United States Patent Application Publication US 2008/0050393 A1 - sequence listing, part 6

SEQ ID NO: 17022 - DNA, 329 bp, Homo sapiens
tgtacagggtgggtttaccggtggacttgtccacggtcctctcggtgaccctgttgggcagggcctcatgggccaccacgcaggtgtaggtctcccccgtgttccattcctcttcggacacggtcaggatgctgtgggcgaagtaccggcctggggcctggggctcaggcattggggcgctggtcacatacttctccggggacaagggctgccccctctgcatccactgcacgaagacgtccgcgggagagaagcccgtcaccaggcacgtgatggtggccgactcccgcaggttcagctgctcccgggctggtggcagcaagtagaca

SEQ ID NO: 17023 - DNA, 528 bp, Homo sapiens
  misc_feature (1)...(528): n = a,t,c or g
ttgaaaccntttgacatgattacgaatttaatacgactcactatagggaatttggccctcgaggccaagaattcggcacgagaagaaaaacaccattatgtttgatgacatagggagaaattttctaatgaacccacagaatggactaaagataaggccttttatgaaagcgcacctaaatcgtgataaagacaaagaacttttaaaattaactcagtacctcaaggagatagcaaaattagatgactttttggatctaaatcacaaatattgggaaagatatctctcaaagaagcaaggacagtagttacaagttatactggcagttattgaagatacttaagatccaagaacttcttgcttttatgctagaaatcattatgatagtgctggacactgaagcanataccatactgcttatacttggtcttccagttttttgtaaatttaattttatattttttgaagatgatagcaatatgctaaaaaatgcttgcccctatatgaatattctgntacgcttgaaaa

SEQ ID NO: 17024 - DNA, 372 bp, Homo sapiens
ggatcttttaagatttccagggttgagattagaaaggagactgtggagaagggtgttgggaaagggcaggcagaaggaagctgagaagtaaccacaggattgcctaaatagcacctgggactttctgcactcctgcccccctggagcatatttaacttttctattgctacaaaaaccattccaaacttagcagcataaaacagcaaccattttattgtgctcatgggtttggtgggtgaggaattgagagaggctacagggatctctgcttcaagttgcctggagccactgctgggaagaataaaatagttggggactggaatcagctggagggttttttacttacctgtctggtatctgggctgggaggac

SEQ ID NO: 17025 - DNA, 445 bp, Homo sapiens
ggaatttttaaaaatatctcttattacatttaattataattttaaaataatttctttgctactcaaactcatcgacaccatgtacaaccttacctttgaagctttttaggagacccatttcacttccagcattgtccagtagaactttctgcagtgggggaagtgttctttatctgtgttgtccaatatggtagccactagccgtatgtaactattgagtactcggaatgtggctaatgtgtctaaggaactgaatgtttaatgtgacttaattttcattgacttataagcaacaatgccacctgaactttagcatttcttatatcctcagcccatttttactttagcatcctagcaaacattcagaagtgacatggtcattttcttccttctgggatggagcgttggctctctttattgtcattaagatctttgaaagcaataa

SEQ ID NO: 17026 - DNA, 451 bp, Homo sapiens
gggtggggataaagagggcagggcccacccactgtgtcaaatacaaaacgttttacaattctgatcacactcacgccctactctctcaacgaaggagacagatcatgcctgactaaggttcttcctgctgaaatgtgctggcggagctcctcccttgtgctgctggctgctctgccatttccacagcacatgacatgtgcagttcttctaggcccctctggctctggttagatgacgcctactccaggagtagggaccagcccccatcccagaacctccagcacccaacacaaaaccagatcccagcagctgctcagccagcacctgttgaagggggtctgctgatggctcaacagtgtactgagggggaaaacgggcagtaggaggaagatgcaggcatcatagatgccccaggactgggtgatggccatgaactgaaacaggcatctgg

SEQ ID NO: 17027 - DNA, 310 bp, Homo sapiens
gggaaattggatgagaacattatgattttcaacttgcatttatcgagcaaaccacagactgtatttccagggccatttagctagattagaacaaataagaaaagaccgatttttaagaacttgtgattaatgacatgcaattcttttaaagtagttttgtaaatactctatcccgaagatatgttgtgctctcatctgttactgagcctcgagctacggggcttgagggacattgttttgctgtcactgatggtttctccatgcatcgtacttttatgaactgggatcttaaattcagtgagcctacctt

SEQ ID NO: 17028 - DNA, 476 bp, Homo sapiens
  misc_feature (1)...(476): n = a,t,c or g
nngtgtttnncctntgatcnatggagacncntatgacatgattacgaatttaatacgactcactatagggaatttggccctcgaggccaagaattcggcacgagcggctgctttgccaagctcaccaacacctactgtctggtagcgatcggaggctcagagaacttctacagtgtgttcgagggcgagctctccgataccatccccgtggtgcacgcgtctatcgccggctgccgcatcatcgggcgcatgtgtgtggggaacaggcacggtctcctggtacccaacaataccaccgaccaggagctgcaacacattcgcaacagcctcccagacacagtgcagattaggcgggtggaggagcggctctcagccttgggcaatgtcaccacctgcaatgactacgtggccttggtccacccagacttggacagggagacagaagaaattctggcagatgtgctcaaggtggaagt

SEQ ID NO: 17029 - DNA, 464 bp, Homo sapiens
  misc_feature (1)...(464): n = a,t,c or g
tcgccnccnacagctatgacatgattacgaatttaatacgactcactatagggaatttggccctcgaggccaagaattcggcacgagttataagatccattcattccatgaggaattgctttgtgcttgctgatagctggtgaggacacagacctgtataaaatgtggctccagcagtgtgagagcagggcatttaaatagctaactacaaagggaataagagctataatggaagcataaacaatttagcacttaacagacttgatgaaggaagaatgcttcccgaggtgacacttgacctgaccttgaaggataagaaggagcttactgggcttattataagtgggtagaagcacactcttcaccgtgggaacagtaagtgaaggacacagaatcatgaaagataaatgcattgtanagaacactgagaacttcaagtgcctggaacacaggggtggggagtg

SEQ ID NO: 17030 - DNA, 285 bp, Homo sapiens
acattgtggaaaccttaaaattatagagcagaagaatatgccattagcctggaaatgaaattaaaataatgtaagaattttaaagaaaaggctatacagctgcagtagcttgatgctgtctttgtaatgataattctgtattgctgtgtatgtattatttactagtgtgtatgcatgcatgcatgcatgcattgtatattaagacttggaagatcagctgggtgccgtgtctcatgcctgtaatcccagtactttgggaggccaaggtgagtggattacttgagg

SEQ ID NO: 17031 - DNA, 320 bp, Homo sapiens
ccagcgtgcactcaggagatgtatctggagtgagtgactttgatttcttttagggctataaattctacaaaattcagagatgattttgtaatgagaagtgctgttgtatcataattctgattatttataaatcaagattggagtaatttgagggtctttgacttgtgaaaatgcaggaaacatgagtagctatttggggatctgccttttgtgttaagtctcgagcccttggcctgagcctgccctgtgctgcttcctgcctctacccaggatgctctgtgcagactgcaccaacactttgcctctcgagggcctggagg

SEQ ID NO: 17032 - DNA, 352 bp, Homo sapiens
gcacagtaaagagtacactcagccactgtcacaggcatattccctgcacacacatgcatacttacagactggaatagtggcataaggagttagaaccacagcagacaccattcattccatgtccatatgcatctacttggcaaggtcatagacaattcctccagagacactgagccagtctttgaactgcagcaatcacaaaggctgacattcactgagtgcctactctttgccaatccccgtgctaagcgttttatgtggacttattcattcctcacaatgaggctatgaggaaactgagtcactcacattgagagtaagcacgttgcccaaggttgcacagcaagaaaag

SEQ ID NO: 17033 - DNA, 367 bp, Homo sapiens
ctcagaagcagtctgccggggtgaaattctatctggaatagtgtcctaaccccatcggagagagactctgaatttttaaaacgcctgttaaggacccctgggtatgagccccgcacaaacatgtctgcggcacccacagctgtgcctcaatgaaggcccaatttctccattgcacagatgaaattgcaaaggcccagcaatgttagccaaattccccaagcttaatgccagagcctgcttccactccaggacaaagtggtttcaaagtccatacttgccccaccctggtggcctgccctggggaaggtcactgccaagaaggctcctgggccgtcttgcagctgctgcctcttcttttaattacgaa

SEQ ID NO: 17034 - DNA, 316 bp, Homo sapiens
ggcatctttccaatgaggtcaaaacttggaaggaaagaacccttaaaagagaggctcacaaacaagtaacttgtgagaattctccaaagtctcctaaagtgactggaacagcttctaaaaagaaacaaattacaccctctcaatgcaaggaacggaatttacaagatcctgtgccaaaggaatcaccaaaatcttgtttttttgatagccgatcaaagtctttaccatcacctcatccagttcgctattttgataactcaagtttaggcctttgtccagaggtgcaaaatgcaggagcagagagtgtggattctca

SEQ ID NO: 17035 - DNA, 432 bp, Homo sapiens
  misc_feature (1)...(432): n = a,t,c or g
tttganatttgaanaccatntatgacatgattacgaatttaatacgactcactatagggaatttggccctcgaggccaagaattcggcacgaggtcctatgcattgtagaatgtttaataacatccctggctctacctaaggccagagtgagtcaaggaggcacgtaggacttaaaatttaaggaggcagtcactctcaggatcttgtaagtgctgaccctatgttttatctcacagcacctgagtaagttctcctgtgctatagcctgttgcttctagatttttgttttgttttgttttcgagatggagttttgctcttgttgcccagtctggagtacagtggtgcactctcggctcgctgcaacctccacctcctgggttcaagtgattcccctgtctcaacctcccgagtagctgggattatagacgcc

SEQ ID NO: 17036 - DNA, 384 bp, Homo sapiens
cccgttagaaacagggtaattcatgacagtgtccgcttgggagacggctgtgacccctgagaattctcgctgcatgccgtgggctggctcgtgagactcaaggtctgggttcgaggcccccgcaaccccttctgactgtgtggcctgggcgagtttgttgtttgtaacctggaaagcgtcacacctgcctggcacggttattgtgggcttcaatgagattgtttgtgtgaaataaacgctttgtgactggcacacaggcgctctcatcccggctctcctggtgggcccggaccgctgggtgctggctgcggaggccctgtgctccctggaactgtctgcgctggtcccagggactcttgggcagagtggagggcaagggggaat

SEQ ID NO: 17037 - DNA, 452 bp, Homo sapiens
ccaaggtacagtcgccgcgtgcggagcttgttactggttacttggcctcatggcggtccgagcttcgttcgagaacaactgtgagatcggctgctttgccaagctcaccaacacctactgtctggtagcgatcggaggctcagagaacttctacagtgtgttcgagggcgagctctccgataccatccccgtggtgcacgcgtctatcgccggctgccgcatcatcgggcgcatgtgtgtggggaacaggcacggtctcctggtacccaacaataccaccgaccaggagctgcaacacattcgcaacagcctcccagacacagtgcagattaggcgggtggaggagcggctctcagccttgggcaatgtcaccacctgcaatgactacgtggccttggtccacccagacttggacagggagacagaagaaattctggcagatgtgctcaaag

SEQ ID NO: 17038 - DNA, 506 bp, Homo sapiens
  misc_feature (1)...(506): n = a,t,c or g
tttggnnnccaacagctatgacatgattacgaatttaatacgactcactatagggaatttggccctcgaggccaagaattcggcacgagctacaaggaaatgaagaaaaaaggataggtcagaggggagaatttctttaaaggattgacagacttggggaaaggcacagagaaagtgggaagaatgggattctcagagtttttaatgtgggtgaagaataaggaattacagttttaagtgcagaatgagaatcttaagattttgttggacttttcagatactgcaatcttttaaacatgagaaagtacaggggccgggcacagtgactcatgcatgtaatcctaacactttggaaggctgaggcaaacagataccttgaccttaggagtttaaggccagactgggcaacatggcaaaaccttgtctgtacaaaaaaattagcctggcatggtggtgcatgcctgtagtcacagctacttgggaggctgangtgggaggatcacttg

SEQ ID NO: 17039 - DNA, 363 bp, Homo sapiens
ctcatccatagcacctccacatacctggccctgagccttggtgtgctgtatccatccatggggctgattgtatttaccttctacctcttggctgccttgtgaaggaattattcccatgagttggctgggaataagtgccaggatggaatgatgggtcagttgtatcagcacgtgtggcctgttcttctatgggttggacaacctcattttaactcagtctttaatctgagaggccacagtgcaattttattttatttttctcatgatgaggttttcttaacttaaaagaacatgtatataaacatgcttgcattatatttgtaaatttatgtgatggcaaagaaggagagcataggaaaccat

SEQ ID NO: 17040 - DNA, 399 bp, Homo sapiens
tatgaattataatcctgatgcaaaccaagagctctttaatccagtgggttttattgctctaccttcatttaatttgatacatatttcccccctctgagcattaggtaagttaataaagcattataaaaataaatttaaaacataaaactaaatgagatctctcaggttcttctttgaacaaagatgtttctgtaaacacttttacaccagtatcttaaaattccaaattattcaagtatctctttaaacatatggcttcatatattaataaaaattgaagcaaatatgtgaaatctttaaatcctcatctgtatttccacagaaatcatttacaaaagctacttgcctttttaaaagtcttctcaatactctttcttgagaactagaattccaacttgc

SEQ ID NO: 17041 - DNA, 385 bp, Homo sapiens
gaatgagagcacttcctgccaatgccatcttaaatcagttccagcctgcatcgggtggctactttgtgccagcagtcccacaggctcagggaaggcctccatattatacacctaaccagttagcacagatgaggcctaatccacgctggcagcaaggtgggagacctcaaggcttccaaggaatgccaagtgctatacgccagtctgggcctcgtccaactcttcgccatctggctccaactggtaatgctccggcctctcgtggcctccctactaccactcagagagtcgggtctgagtgcccggaccgcttggctatggactttggtggggctggtgccgcccagcaagggctgactgacagctgccagtctggaggcgttcc

SEQ ID NO: 17042 - DNA, 971 bp, Homo sapiens
  misc_feature (1)...(971): n = a,t,c or g
caagagtgaatttctgtggattttactggtcccagcttttaggttctttaagacactaacaggactacatagaggctttttcagcattactgtgtcgtctccgtgccagatgtggcaagatcaccattagcaaatggaaattacatttgaaagccattagacttataggtgatgcaagcatctaagagagaggttaatcacactatagaggcataagtggtatcagttttcatttttctaattgtttaaactgtgttttataccagtgtttgcaagtaattgggtgttagcttgagatggttaaaggtggtttggggagggacttcgttgtaatggttttgctgtaaaaaatgtttccaactccgctgaaatgttgctgaaaagcatggtgctggtaacagttcaacaatccgtggctgctcattcttgcctactttactctcccactgaagcaggttagcgttgaaggtggtatggaaaagcctgcatgcctgttcaattcttttgtttcttctccttccccctccccctacctccttcccctcactcctcccctccttcgctcgctcaacctcttttgttcagtatgtgtaacttgaagctaatttgtactactggatatctgactggagccacagatacagaatctgtattgttcttactgaaacacagcatggaattaacattaaacttaaataaaacaaacctaaattaaaaatgccaaaaaaaaaaaaagggggngcccntttaanngnncccntggggggcccnantttancnngnncnnncaannnaaaanntttncccnnanggggggccnnatnaaancntngccntggcccgnntttnaanancgnggnnnngggaaaannngtnacnngggaaattttnggaangaaccnttttttnggggggggnnnanatgggnnnaannnccnnncnnannttaanggctnangggaaantaaaaa

SEQ ID NO: 17043 - DNA, 406 bp, Homo sapiens
gaactggaagacactgattgactggaagacctggatttctttctggaagacactgattgactggaagatctagatttttctggaagaactagatttactggaagacttggatttggtggaagacacagatttttctggaagacatggattagctggaagatctgtatttgatggaagaccttgaaattattggaagacatggatttcctggaagacgtggattttcctggaagatctggatttggtggaagaccagtaattgctggaagactggatttgctggaagacttgatttactggaagacttggagcttcttggaagacatggattgtccggaagacatggattgtctggaagatgtggattttctggaagctcaggattatctggaagaccttgagatta

SEQ ID NO: 17044 - DNA, 437 bp, Homo sapiens
cccacgcgtccgctgcagtggcgcctaaagtctgagagagggaagtcgcctctgtgctcgtgagtgcatggggtataagagccccacagtcttcgttataacctcacggtgctgtcctgggatggatctgtgcagtcagggtttcttgctgaggtacatctggatggtcagcccttcctgcgctatgacaggcagaaatgcagggcaaagccccagggacagtgggcagaagatgtcctgggaaataagacatgggacagagagaccagggacttgacagggaacggaaaggacctcaggatgaccctggctcatatcaaggaccagaaagaaggcttgcattccctccaggagattagggtctgtgagatccatgaagacaacagcaccaggagctcccagcatttctactacgatggggagctcttcctctccaa

SEQ ID NO: 17045 - DNA, 498 bp, Homo sapiens
taacagctatgacatgattacgaatttaatacgactcactatagggaatttggccctcgaggccaagaattcggcacgaggatacagatatagaaagattaaattttagaaatactttggtaattatgagcattttcaactgtatatttttcatgtaataaaacaagcaatatcaattctgtaaatatcttcaaacaggtagtaaaatgactataagtaactgaaatagttaacaaatatgtgttaattgacttcctgaatttttctgtttcaggaaaccaagagttgaaacattaatcatgaattgggtaaatgacagcatcatacaggagtttattctgctgggtttctcagatcgaccttggctggagtttccactccttgtggcttcttgatttcttacactgtgaccatctttggcaatctgaccattattctagtgtcacgcctggacaccaaacttcatacccccatgtatttttttcttaccaatctatc

SEQ ID NO: 17046 - DNA, 487 bp, Homo sapiens
gactggaagctggggcggggtggggctgtgatttcagaaggaagcaaagaacaaggctgcgccaggagaggagagtggaagaagttcagagaaagagtgagacaagggaggttccgtgacagttttccgttgtccaagagactgactctgagtcagcatggcctatgaaccttcttacagcaaatcctgctgccagatccccacatacaaggatgtcagacccaggaaccataaaaggacagaggacaagccaagcctatgtgttattccctgcccttcgtaaaaggagggttctgtgtcttggtctttccagcagtcacctatcgtggctagggagagcctcaagagatttcctgccctgctggtttgttgcacaaccagaaagagccacgcacacttgccagccgagtcacggacgtcccagaaatgcacacacttgatcccatcaataatgcgtcccggccggtgtgggggcttaccctgtcat

SEQ ID NO: 17047 - DNA, 458 bp, Homo sapiens
acctatgacatgattacgaatttaatacgactcactatagggaatttggccctcgaggccaagaattcggcacgagggacccgagccaggcggggacaggacggcggggcgagccagacaaaaagtaaccttcctgaagaggacatgtgattggaagttgtcaattgttgaagcattggtaactccagtctctaacgttttagaaaatcataacaagcggttctctaccctgtaaaggtgaactactgagttcttcattatgtctgatggagattatgattacctcatcaagtttttagctttgggagactctggtgtagggaagaccagtgtactttaccaatatacagatggtaaatttaactccaaatttatcacaacagtgggcattgatttcagggaaaaaagagtggtgtacagagccagtgggccggatggagccactggcagaggccaga

SEQ ID NO: 17048 - DNA, 498 bp, Homo sapiens
  misc_feature (1)...(498): n = a,t,c or g
ttaaaatntganaccttaacagctatgacatgattacgaatttaatacgactcactatagggaatttggccctcgaggccaagaattcggcacgagggctctgcatttcccctggcctttgcctaatggtcccaagatggctgctgcagccccagccaccaagttcatattgaagaaaggaaggaggaagaaggggcactgttgttctttttggcacacttccaccttgcatctctttggtcgcagaagggtctgccttgaccactgagcagccagggagattagaatgaccactttagaccaatcatgattcatgctcagggcctggggtcaggcgcaccctctttgagatcagaagggctccatttgctgcctcgacctagtgggtggggttctcttagcagggaagaggcaggggaatagtggtgagtgctcttcggttaggtgcctatgtgctaaaagacacttgacataggaagcatcggcaggtcatggtgg

SEQ ID NO: 17049 - DNA, 361 bp, Homo sapiens
gaaaatttgtcaaacgggggggaatgtattgaaaatgctagacaactacacttaaaatgaaaacaggccaggcgcggtggctcaggcctgtaatcccagcactttgggaggccaaggcgggtggatcacctgaggtcgggagttcgagaccagcttgaccaacatggagaaactccatctctactaaaaatacaaaattagccgggcatggtggcacatacctgtaatcccaactactggggaggctgaggcagaagaatcgtttgaacccaggaggcggtggttgcagtgagccgagattgtgccactgtattctagcctaggcaacatgagcgaaactccatctcaaaaaaaaaaaaaa

SEQ ID NO: 17050 - DNA, 512 bp, Homo sapiens
ggatgaggccaccgcctcctgccccttttctcttctagtttcccttaaatccctttctcatcttctctgttgagatctctccctctgtttctgtctttgttaccctccactttttgcctcagcaactggcccccagccacttgctgccccctttgttcaaggagatccatgaggcatgtcccagaacgtacacaccacaggagaatggggctgggccaagtaatgactcctgaggggttacctcagggcaccagctctgtttcccaacaagcggccaacaagctgctgccacctcccagacctgtcgacttccttaggaactcctttgggaacctgaaccactttcctcatcctttaaagtgaaatctgacttttgcaaaagacatttggagccaagtttggtaaacatcatggcagggacatgcttgtgtttggtcagaaatgaggtgaggccggccgcggtggtcacgcctgtatccagaatctgggaagctgaggcaacagatcactgg

SEQ ID NO: 17051 - DNA, 346 bp, Homo sapiens
gaaatcttgtgaattgtctaactcttgactgaaggggcaaaggtagtttctgaacagaatccgaggcctcccaaccagcacctccatcctggagtctgaaacccacagcagccaagtcccaggcagtagctgagtcccgtcctccgcagcagcctagccccaggcagcctctgctttcatccagggactgctgcttctctgccgggtgctgcatttgggggcaaccctgtggctgcagagctggacctctggggatgaggatgctggggatgccacgctgctgcggcctcccttctgggctgtctgtggacccccagccttcaccctgaacagcagggagatgagg

SEQ ID NO: 17052 - DNA, 424 bp, Homo sapiens
cccacgcgtccggcccatctgaatgtgtactacatcatcatcctggcatgggccattttttacctgagcaactgcttcactactgagctaccctgggctacctgtgggcatgagtggaacacagagaattgtgtggagttccagaaactgaatgtgagcaactacagccatgtgtctctgcagaatgccacctcccctgtcatggagttttgggagtaagtggagaagaacttgtctcccttggcctgtgggggctctgtcctggttctgctcagttggtcttgcccctattcctggaaaaagcctgatccttcttgcagcctggcacttcctggcttctgtgagcattcgacagcttcggaagcaagagtgcagatcttcagaggtttcccaaaggggcagctgagagaaatgttttcttgtt

SEQ ID NO: 17053 - DNA, 548 bp, Homo sapiens
  misc_feature (1)...(548): n = a,t,c or g
tnnnntttggnnatctgataccgtttgactgattacgaatttaatacgactcactatagggaatttggccctcgaggccaagaattcggcacgagaggatgttcgtcgtggcaacgttgctggtgacagcaaaaatgacccaccaatggaagcagctggcttcactgctcaggtgattatcctgaaccatccaggccaaataagcgccggctatgcccctgtattggattgccacacggctcacattgcatgcaagtttgctgagctgaaggaaaagattgatcgccgttctggtaaaaagctggaagatggccctaaattcttgaagtctggtgatgctgccattgttgatatggttcctggcaagcccatgtgtgttgagagcttctcagactatccacctttgggtcgctttgctgttcgtgatatgagacagacagttgcggtgggtgtcatcaaagcagtggacangaagctgctggagctgcaaggtcaccaagtctgcccagaaagctcataaggctanatgaatattatcctaatcctgg

SEQ ID NO: 17054 - DNA, 349 bp, Homo sapiens
cttaactgtagatatggctgaagcaaaatcaaatgtggctgtatccactttcagaatgttgaagggaagttcagcatgcattttcgttacattgtgtcctgcttatacttttctcaatattaagtcattgtttcccatcactgtatccattctacctgtcctccgtgaaaatatatttggaatattccactatttgcagaggcttattcagttcttacacattccatcttacattagtgattccatcaaagagaaggaaagtaagcctttttgtcacctcaatatttactatttcaatacttacatatctgacttctaggatttattggtatattacttgcctatctga

SEQ ID NO: 17055 - DNA, 405 bp, Homo sapiens
ctttatgacatgattacgaatttaatacgactcactatagggaatttggccctcgaggccaagaattcggcacgagcataagctgaacacttcatatacttgattctgctgggaatcattgaaaggacctcttgaattacagagtactgagttgaggggaaaacaagcgtaaggtgaaaagatagtttatcttttgtcaaggtgaaaagagcaagagttttcagtattcaaatatttaagtcactttttttctcccccttttctacctcgtggaagaaagccctttggtttctattctgtaaactgtcattaatggccatttgcttcctagctacatgattaatttctttgagattttgttccagtggctggcttaaatttgcccttcatttggacacaggaaaa

SEQ ID NO: 17056 - DNA, 519 bp, Homo sapiens
  misc_feature (1)...(519): n = a,t,c or g
ggagcttcatcctgtaatgttgctatgcaaatatttcttgtcctttgacagccaaggcccacatctgctcttccaggaggatgtctgcagacacagctaagtgctttcttcttcatgtccctttaacctctatagcactgtgtttagatgtatctttttaactcaccacttcaattatttgtctattttatcgacctccccactagaatctgacttctaggagtttatgataaaagtatacttatttatatttcaatttccagagacttgtatgcaataaatagttaatagatgtttgtgggatgaataattgtatgaacagtaattctagcttgcacagaaatatatcggctacctgataatccattgaagataaattctaacagtaattttgtattcancattaaatatatggagttgtctactgtaaatgtaanacctttaaatttgggaattatnngaanancactatantaactctggnaagggtacagtaggctaaggnaaggcaaannatgt

SEQ ID NO: 17057 - DNA, 346 bp, Homo sapiens
gggcaatcttccaacaaatgtggcacctttaatcgtctttgatatttctgaagaaccgaattgtccagaaaaccccagtgctacaagatgtccagtgccaaaaccaagatcaaaaagcaacctcagaccaatacccagagattctcacattaaagagcatagtcaacagaaaatcagcccagcagccgtaggagaggagtcatccccaggccggccccagtctctgctggacaacgctagcacctcagacagtcaggcagtgatgaacattatgaacacagaacaaagccaaaatagtattgtttccagaattaaagtgtttgagggtcagacaaacatagaaacc

SEQ ID NO: 17058 - DNA, 540 bp, Homo sapiens
  misc_feature (1)...(540): n = a,t,c or g
ggcagctcatgacagctgtgttcgaagcttgtgctgagtggcgggtacaagaggaaaagcagtcttgccctgttatcctagcaggatgattaaataagtttaaacaacagttaaaattctagctctcttttctctctctctctccccctctccacccccttccctctttcctttctctctcctctctctcccggcccttaaaaagaaaaataaataaataaaaacatttggaattctaatagaacccactgagcttctgaaaggaagtgcattatgctgtgctgtgaaggagcccaacaggggctcacggtcactcagcaggatgatggatgcaggcttcagggccaggagccagacgcagcaagaaaaaaccaaaaatttggattatgaagtaaatggagaggttccaagatcaaaccaagaggtgtttgntgattttgttatgtgctgtgggancatggacccctancaggtanaaggagagcaagtttgaggatgtggtgcaagaagaatttggatcccaagaacnggaaggactga

SEQ ID NO: 17059 - DNA, 356 bp, Homo sapiens
gccgccatctgttccaggagaagaaagtggacctgtctaagccactggtggccacgtgtggctctggcgtcacagcctgccacgtggcactaggggcctacctctgcggcaagccagacgtgcccatctacgatggctcctgggtggagtggtacatgcgcgcccggcccgaggatgtcatctcagagggccgggggaagacccactgaagctgggcaggacacaggcgagctcaggtgatgccggccaccagcaatgcctggcctggtagctccgcttctgctttcaccaagagagtgtttcttcactcaactcaggtggcatttggggtgacatctcaaaggccaggaattccg

SEQ ID NO: 17060 - DNA, 390 bp, Homo sapiens
ggcaggaggaacaggaaaagttttggtaaggcggcattgtcaaatcaaaagagaaggaaggaaggtatctctttagactctgcaaacacattgacacatctcctgagcttttcttggtgttgtcagcatcccagccccatcccctactcctagacttccccagacacagaaattaatcaacactgtacaggacaaccaacaaaacagaaaatagggtactcaagcctggacaccagacagtcaccatgggacagcccagccttctgcagtaatagtggacagatgtttccattcagggaatccaataataaaaggaaaataaatgtgcatgttaagggcagaaaagagggagaagagggattacttgacttacagcaattgcagcttgga

SEQ ID NO: 17061 - DNA, 452 bp, Homo sapiens
  misc_feature (1)...(452): n = a,t,c or g
ttnnnnnnnnnnnntntgganatccnntatgacatgattacgaatttaatacgactcactatagggaatttggccctcgaggccaagaattcggcacgagaagctacatgatctttttaagagatagtgaaaagcattgataagatccagtgtcccttcatgataaaaacattaaacaatagggaaagtttggaacttccttaacttgttaaaaagcatctgtaaaaaaacccacggttaacatcatagtggaggattggaggttttcctgctaattcaggaacaagatggacccctcctggcatttctattcaacattgtactggaggatctagtcaggaaaatgaagcccatttttttttttcaaataataaaagcatcgaaattggaaagggagaagtaaaatatacncggataacatgatttaatatgtanaaaattntaagagattc

SEQ ID NO: 17062 - DNA, 415 bp, Homo sapiens
gatacatacctcctatttacatgtccctcctcccactattatgtcacctttctaaacaccgcaattgggagatgagacaatgcgcaggaacgaagaactgttctggtgaagaggacccaggggcagtgagagggggctagggacaaaaggtgaatggggagctggttcaggttagaagaatgggtgcatgtgaggggcatttggagaatgcgagctgggggagggagagtggctgagcctgtaggcacagtagacacatgtagtaatgacggggatgtgttatgccccacaccaggtgttgtcctacatcaatggggtcacaacaagcaaacctggagtatccttggtctactccatgccctccggaacctgtccctgcggctggagggtctccaggagaaagactctggcccct

SEQ ID NO: 17063 - DNA, 430 bp, Homo sapiens
ggagcacggttcccataagggcggcgagatcagcctcctgtctcatctggaagaccaccactctggggtctcagaggaatgatggaagccttggggtttctaaaattggaagtgaatggccccatggtgacggtggccctgtcagtggctctcttggccctcctgaaatggtactccacatcagcattctcaagactggagaagttaggcctcagacatcccaagccttctcctttcattggaaacttgacatttttccgccagggtttttgggaaagccaaatggagctcagaaagctgtatggacctctgtgtgggtactatcttggtcgtcggatgtttattgttatttctgagccagacatgatcaagcaggtgttggttgagaacttcagtaactttaccaacagaatggcgtcgggtttggagg

SEQ ID NO: 17064 - DNA, 465 bp, Homo sapiens
  misc_feature (1)...(465): n = a,t,c or g
ggtggtnannatntgaaaccttattgangacncgaatttaatacgactcactatagggaatttggccctcgaggccaagaattcggcacgagcacagctactgggagtgctctcagccagcagccttcagctgtcagccccctgggaattttcctcaatggaagagttacctcactgacatacccctttcccaggcaggtcagttcaaggttatgaaggcctggccccactgcctcaacttgacaacttggaagggccatctcagcttcaagaccctcccatgagactggctgaggtcttcatacagcatcggagcccaatttatctctctgagcaatcctgcttcctttcctgcccccttcccaagagcaatccctgataaacttcccgcatgctaatctccatctcagagtctactttccaaggaagtgggcctataacatagctcttccagtttttgttaac

SEQ ID NO: 17065 - DNA, 380 bp, Homo sapiens
gctccaattttcctggttagcaacttttattaaattgtctgttaaaattacaggtgtagtttctgtctcttgactgaaccctgcctaatacactggtcagaatactaggcctttgccagccaaagtccaggagatcacattaatagctactgagcctctgcaatgtgcagagcctttccctgttcttggtatcctgttggatgtcttctgtggtcccagagctgcctgggtatacgtcattatcacactgcattgttgtctgcttttctgtagtgtttctcatcttgaggccagtgctgatgtcttttgtctctctgtccttagttcctaacacaggattcatataaactaggtgagtcatgataaaattacctgatgaa

SEQ ID NO: 17066 - DNA, 472 bp, Homo sapiens
  misc_feature (1)...(472): n = a,t,c or g
tttggnnntntgaanaccctttgacatgattacgaatttaatacgactcactatagggaatttggccctcgaggccaagaattcggcacgaggggtggggaggccatgcaattaagtaaattaagacatttctgataggtagggaataaatcatcacttagaggaactaaccaattaaagaggtaaggcactgctcttgctaaaaagccatgccatcagccagaatgcccgggacaaattagagtaaaggaggggaggaaaacaggccttccgcagcctaaggccactgaacagctatagagttctggcaaatgccaaaaaaaaacaaaaacaaaaacatagctttctgattcacaaagcctgctgaaacacaagtcttctgaagggggctggggaagggtgggaaggtataacctactgttttacagctccccaagtcaaaaggaggtaagtacgggggggaagtctattg

SEQ ID NO: 17067 - DNA, 746 bp, Homo sapiens
gagctttctccgataggaacaccctcatcatctacctggacaaggtctcacactctgaggatgactgtctagctttcaaagttcaccaatactttaatgtagagcttatccagcctggagcagtcaaggtctacgcctattacaacctggaggaaagctgtacccggttctaccatccggaaaaggaggatggaaagctgaacaagctctgccgtgatgaactgtgccgctgtgctgaggagaattgcttcatacaaaagtcggatgacaaggtcaccctggaagaacggctggacaaggcctgtgagccaggagtggactatgtgtacaagacccgactggtcaaggttcagctgtccaatgactttgacgagtacatcatggccattgagcagaccatcaagtcaggctcggatgaggtgcaggttggacagcagcgcacgttcatcagccccatcaagtgcagagaagccctgaagctggaggagaagaaacactacctcatgtggggtctctcctccgatttctggggagagaagcccaacctcagctacatcatcgggaaggacacctgggtggagcactggcccgaggaggacgaatgccaagacgaagagaaccagaaacaatgccaggacctcggcgccttcaccgagagcatggttgtctttgggtgccccaactgaccacacccccattcccccactccagataaagcttcagttatatctcaaaaaaaaaaaaaa

SEQ ID NO: 17068 - DNA, 446 bp, Homo sapiens
gcttcccccgtcggggaaaaatcaaaagctcattgaaggctgaggtcagtgaagctgagtcctcagatgcctttggcacctcccatccacattttgttctctgccctgccccacctttgagtgtcctgtggagaggactggaggtcacttcctgaagcttgtcagaaaggcgccttccttctcctcgcaggagtctctaaaggatgtttaagggacaaaagttttccacaccctggggtggtagcatttcccaggctggcagcactttaggaagccacggaagaagagacttcagaagtgaaatggcctgtggcccatgcacggtgctgccccacagccacgctgtgtccctcctcacactcaagtgacaaaatagaagatgctgaactgaagtgatttttacctcctgattctggagaaaccataactcataagggatccatctc

SEQ ID NO: 17069 - DNA, 425 bp, Homo sapiens
gcctggagagagtatgttggataaaggacattgttgtggcagtaactggagagaacatggaagtaatgaaaagtattattcagaagtatcagcataaacgcatctcactggtcgaagctggagtgacccgccacaggtcaattttcaatggactaaaagcactggcagaagatcagatcaactctaaactctctaagccagaagtagtgattatccatgatgctgtgagaccatttgttgaggaaggtgtccttcttaaagttgtcacagctgctaaggaacacggggcagcaggagccattcgacctcttgtatctactgtcgtcagtccatctgctgatggttgcttagactactcgctagaacgtgccagacacagagcaagtgaaatgccccaagcttttctatttgatgggatttatgaa

SEQ ID NO: 17070 - DNA, 356 bp, Homo sapiens
gccttcagtctccaacttatatttatgcctgaaaataatgttctttatggccatcaccttaggcaatttggatggtgatgaactacaaaaacgtatatatgttcttactaatacggataacttactgctttatcattgcacagaggcagtaatccacatctctttcctagcactactgaagtaggtagagtcattacaatgcattttagtcaaaaggaatgtgagagttgaggatcattgcccccaaattctctctgccaccctctgcacttctgcaattgtctgctttagcatctagctaggtgagctcagatgtggtctgaattaagagcagtgtgacctcagagctgccaggg

SEQ ID NO: 17071 - DNA, 519 bp, Homo sapiens
gagttttcgggtccttgtccagtgaaacaccctcggctgggaagtcagttcgttctctcctctcctctcttcttgtttgaacatggtgcggactaaagcagacagtgttccaggcacttacagaaaagtggtggctgctcgagcccccagaaaggtgcttggttcttccacctctgccactaattcgacatcagtttcatcgaggaaagctgaaaataaatatgcaggagggaaccccgtttgcgtgcgcccaactcccaagtggcaaaaaggaattggagaattctttaggttgtcccctaaagattctgaaaaagagaatcagattcctgaagaggcaggaagcagtggcttaggaaaagcaaagagaaaagcatgtcctttgcaacctgatcacacaaatgatgaaaaagaatagaactttctcattcatctttgaataacgtctccttgtttaccctggtattctagaatgtaaatttacataaatgtgtttgttccaattagctttgttgaaca

SEQ ID NO: 17072 - DNA, 450 bp, Homo sapiens
  misc_feature (1)...(450): n = a,t,c or g
atgactttctgaggtgagctcatgcctgtaatcctagcactttgggaggccaaggcagatggatcatgaggtcaggagttcaagaccagcctgaccaacatggtgaagctccttctctattaaaaatacaaaaattatctgggtatggtggcacacgcctgtaattccagctactcaggaggttgaggcagcagaatttcttgaacctgggaggcggaggttgcaatgagctgagatcgcgccactgcactccagcctaggtgacagagtgagactccatctcaaatttgaaaaaaggnnaaaganatanagggtagcctggaaatcactanaggtgaaacanaggacaatttncanaanctanaaaagaaaaaaccagtcagtcacannggacngnaacctngnnacaaaganncttgngaanngnggggantgacatttaaccccgtt

SEQ ID NO: 17073 - DNA, 455 bp, Homo sapiens
  misc_feature (1)...(455): n = a,t,c or g
ggtggaactaaggatcccgaatccgtttggaggcagagaggggccaacagggtgtttgaagggagcaaaggcatcgaaatttttggagcatctagaactggggcagtgaatgcagaagagtgggagcacacacacgtttctcctccttgacccagaatgggcacagccttcagagagctcttgccagctcctcactctagcctgggtgaagggggcatctgtgccaaagcaggaaggcacacaggcggattggaaggaatttctctcagcagcgtcaaatgcctgagggatctcgccctcgaccctctccatctctcatggtactctcattcacccccggctgcagctcctgcctctgtgctgacagctgtcacatcaatccagcccagacctcctcggcagctctagaccagcagatccactgcttctgacaacccctntggatgtccacaggt

SEQ ID NO: 17074 - DNA, 337 bp, Homo sapiens
gggcattttccggatcaagagactatcaaaccgttttcacctcagtccacttacagggagagcaagaactggatcgttgaagactgatacgttttctcatcaggaacaactcagtcttcattagtataatgacatctgggcagggtggtggctcatgcctgtaatcccaggactttgggaggctgaagtgggcagatcacttgagcttaagagtttgagaccagcctgggcaacatgacgaaaccccatctctacaaaaaatataaaaattagccagtcatagtggtgtgcacctgtagtcccaactactcgggaggctgaggtgggaggatcactt

SEQ ID NO: 17075 - DNA, 258 bp, Homo sapiens
  misc_feature (1)...(258): n = a,t,c or g
ggacgcgagcgcggcgatggggagcggcggccgtggtccactgtaggtgtgccaagtgtttctgttatcctacaaagcgaagaataaggaggaggccccgaaacctgaccatcttgagtcttcccgaagatgtgctctttcacatcctgaaatggctttctgtanaggacatcctgnccgtacnatctgnacactccanttgatggacctgntggncnaccncncctntntgaggnnatgncnntttnnattactttt

SEQ ID NO: 17076 - DNA, 382 bp, Homo sapiens
gaagagatttaatataagatgttgactcaatgcaattatggaggccggcaagtcccaagatttgcagggtgagctggcaagttggagacccaggagagccaatgggatagcaccagtctgattctgaaggtctgggagccaggagagctgatgatgtaagttccagtccaagctcaaaggcaggcaagcttaagacatcagctctgaagtaagagctgatgttttagattgagtccaagagcaagaaaaagctggtgaccaaatctcaaggccttcaggcaagaagaatcctctcttacttggagggagaggcagtctttttgttccattcaggccttcaacagattggatgagatccacctgcactaggaaggacagtctg

SEQ ID NO: 17077 - DNA, 393 bp, Homo sapiens
ggccactcctttgacagtctttcgaatagtaagcagcaactgtagtttctgttgatatgcaactattccttaaatcactagcatcacagttatttttccagagctcttaaatcggccccatatgccgtgaactataaaatacaagctgagtggtggagaaaagaacaatatttgcacatatttggaaactgtagcccatgtcttctaagcataccctgacattggccagaaggacaggtccttgcaaaaacacctgtggagatcaggagtgaagatgccactcccctgaaaagtgaacctgagaaagctcagcccagggtaggtatcactgctagtcatagtgggatattctgtgccaactgctaaagcccaaatgggatcctctagccaaat

SEQ ID NO: 17078 - DNA, 309 bp, Homo sapiens
tacgaactggctctagtctgtaaggtaacgggaccagcccaattatataactgattgaggcattgccatttttcacttaactctttgaatcaagtcataattttatttaataatttttttgaggcagagtttcgctcttgtcgctcaggctggagtgcaatggcccagtcttggctcactgcaacctccgcctcccaggttcaagggattctcctgcctcagcctcctgagtagctgggattacaggcacccgccaccaagcctagctattttttttgtattttttagtagagacggggtttcaccatg

SEQ ID NO: 17079 - DNA, 425 bp, Homo sapiens
gcaaaccttaagatacagaaacatattctggaggttgggatggtaaattgcttcaagacatgtgagagtatggggaattgatggtcatttgtgtacacaaatccttccctcttgctaggtaagcacctcatagcctgtgcttacctgccccactaactgctcttgctcttccttgcacttggatcatcatcagcaaacattaagtatgggcattctgctaaggcagtatagaatactattattatggaatagtgtatatggcaccattgtgttattgaaagaacccggatgtggggatcataagatttcagctttgaagtatttctgctacttgctaacagtatgaagattggcaagtcacttaacctttcttcatttgggaattttggaatctctggggacctagatcacagggttttgggaag

SEQ ID NO: 17080 - DNA, 429 bp, Homo sapiens
  misc_feature (1)...(429): n = a,t,c or g
gattcagtgctttatgcagggcaccatgctaagcatttgacatatattctcttacatgaccctcacaactatttttggcagatcatattgtccgcattttcaggtaaagaaattgaggttcaaataggtcaaataatttgcttaagatctctagctgaccctgaatttttcaaaatcagattttattctacagcttatgcttctaactcaggctaggttgctttctactttcaaactcttagtcatcttgtttagcccctgcactatggagaggaggtgcggtataaaatgcgctcttggccaggcactgtagtcccagcattttgggaggccaaggctgntggatggcttgagcccaggagttcaaggccagcctgggcaacataaggagaccccatctctacaaaaaatacnaaaattagctgggcg

SEQ ID NO: 17081 - DNA, 439 bp, Homo sapiens
ggcccagcagtcctggctatagggaccctctgctcaaaggccagcaaggctggagaccagagataaagaggagagctgaggacagcaagggtcccagagttgctgccttggaaaacagcccagaagggtggagctggctcagggtcaaggccagctccagcctctggcctcctctccacctccaggggccttggctctttcagaataaaagtcctagggggcccaactatcagagtgaagagggctcaatgtgagggtgggaaaagagcctgggggaagggttgagggagttggaaagtccctggccctcatcagatgaagactcttgacccatcttcctgcaacggctggcccccccatgcacacaagacagtcactagggctctggccaagaactaggggcttgtgatactgatcctacacatgctctggaatgaaa

SEQ ID NO: 17082 - DNA, 519 bp, Homo sapiens
  misc_feature (1)...(519): n = a,t,c or g
gaactggaggtctggtgagtacaacttgtctagggtaggggctctcttaggcgagtgattcctaaaaagattccttctgaggaggaggcgctttccctgtcaaatactcccagatctgaaccctttcccctaatgatggctccctgaggcctgtgagaattttcagctttgaccatgccatcatctactaacaagaaatggaggctcaggaaggagaggctgggaagacctgttttaggatggcccaaggggaaaagcccctttcttggtacaataacataactcagagtcttcatcaggcctctggctctggaggcctccagctatcccagatgtgaagaggcctcttccccctgatggagcaggatcacagcactgaacagggaagaggggacctcatctcacagctccattcaccttctcttttctttctcccaaagccttggggccacctttccgtactcctctgctcactggctncgnagttcaagngcactntggttcaacaccttggagaaa

SEQ ID NO: 17083 - DNA, 478 bp, Homo sapiens
  misc_feature (1)...(478): n = a,t,c or g
gtttttttttaattgtttagacgaactctcgctctgtcaccagtctggagtgcagtggtgcaatctcggctcactgcaacctctgcctcctgggttcaagtgattctcctgcctcagcctcccaagtagcagggactacaggcgcgcgccaccacgcccagctaatttttgtgttttttgtagagacggagtttcaccgtgttggccaggaaggtctcgatctcttgacctcgtgatccgcccacctcggcctcccaaagtgctgggattacaggcgtgagccactgcgcccggcctgaaggacaaatttcaagtgtgtcccaattctttcttctagggagagaaggcagaaatggaagacaacacanaacacanagacgttctattaagcaggcgtttcattgaagcattggatgngcttannangcctnanattntnaaaacgggacggatcttnatganacgttnnanaccattt

SEQ ID NO: 17084 - DNA, 938 bp, Homo sapiens
cccacgcgtccgcccacgcgtccgcggacgcgtgggggtgtgtgaattcctggtgaaggaggtgaccaagctgattgacaacaacaagactgagaaagaaatactcgacgcttttgacaaaatgtgctcgaagctgccgaagtccctgtcggaagagtgccaggaggtggtggacacgtacggcagctccatcctgtccatcctgctggaggaggtcagccctgagctggtgtgcagcatgctgcacctctgctctggcacgcggctgcctgcactgaccgttcacgtgactcagccaaaggacggtggcttctgcgaagtgtgcaagaagctggtgggttatttggatcgcaacctggagaaaaacagcaccaagcaggagatcctggctgctcttgagaaaggctgcagcttcctgccagacccttaccagaagcagtgtgatcagtttgtggcagagtacgagcccgtgctgatcgagatcctggtggaggtgatggatccttccttcgtgtgcttgaaaattggagcctgcccctcggcccataagcccttgttgggaactgagaagtgtatatggggcccaagctactggtgccagaacacagagacagcagcccagtgcaatgctgtcgagcattgcaaacgccatgtgtggaactaggaggaggaatattccatcttggcagaaaccacagcattggtttttttctacttgtgtgtctgggggaatgaacgcacagatctgtttgactttgttataaaaatagggctcccccacctcccccatttctgtgtcctttattgtagcattgctgtctgcaagggagcccctagcccctggcagacatagctgcttcagtgccccttttctctctgctagatggatgttgatgcactggaggtcttttagcctgcccttgcatggcgcctgctgg

SEQ ID NO: 17085 - DNA, 500 bp, Homo sapiens
  misc_feature (1)...(500): n = a,t,c or g
gggcgtgtttgttatacctgatgatgcctccttccccagccccaagcaatatcaaattagccctggacctaggatcctctgtggtgaaactatcaagtatttactaagcacctactatgtactagcactgtcctaagatgatctaaatgatttataggatagatcagtccctatccccaaggagagaattggtactattacatgtaaaattatgtgctacgtatgcagtcacaagaatatttctaaaaaatatatgcaaatatgcaaagcgttacattcagatggagtgctgctcttcaaagctgcccttcaaagcaacctggccgtggtcccaaaggttcccggacatggcctttacgaatggtgcaattttattttcaacttttgagttgcgtaattgtanaaaaaccanaaaatatcaaatatttcttttaaagangaaaaatcaggccaggcacagtggntnagcctgnaatcccacacactaggctgatcaggag

SEQ ID NO: 17086 - DNA, 448 bp, Homo sapiens
  misc_feature (1)...(448): n = a,t,c or g
gagcaccatgacttcaataccctgttttccatttaaaaggttcttctgggatttctccaacttgcataatagcttctagttttccaatctcatcgaacagtctgtttgcacctgcaaaagtcaaagaactgaaatatttgatagatcctcctggaaaaatgctaatgcccagtagaagaatgaccccaggaatgagaaaagacctnanacccatccttgaaggtgggtccctgcctgctaaacccagctcataacattttttttttcctatttctttccagttgnatgttttggntgagattaaagcanttntancaaatgtcaggggctcaantgcccagtgcattagaataaaattcattttctccttaaagttttaggggcagggatntaaggctttaggggggnaancattgntgaaatttancgaaccttccnagaaaaaggg

SEQ ID NO: 17087 - DNA, 334 bp, Homo sapiens
atttaagatgtaaaatgtgtgatcttcattcccccatgacccccaccactgtcgtctgctgactctacggtccctttttcaggacatgaaggaaacaattacatggcaagaattcatgttcccccaatcttaaagtctcaggacagagaatgaaaagcttatgtaaaatggtgggccaggccgggcatggcagctcacgcttgtaatgccagcactttgggaggccaaggcaggcagattatctgaggtgaggagttcaagaccagcctggtcaacatggtgaaaccccatctctaccaaaaatacaaaaattagcagggcataatgacacatg

SEQ ID NO: 17088 - DNA, 427 bp, Homo sapiens
ggcatggataaggttgctgtgaccctgaaaaaaggaagaaggcttttgggtggtgcgtggttctcctcttggaagtcttcccagatttcgcctcagtactctcttgccctagcttaaatctttccttgctctgtgtccccttaggcaagtgaggtctcctctcaggtaggcatgatattaagtgcatgtctagaggacagttccttctacctgcccaggtgcactggctgaactcacctatgcccacatctgtgcattggcaggtgatatagatatacacctgagctgtccccctgagctgcagacctaacactaggtgtgggctccgagctgttccacatcaaaacagagccgaggacacatctccctcactgaagctgtgtctcctacctattatggcaacacgtctcatctactcatttggtaa

SEQ ID NO: 17089 - DNA, 328 bp, Homo sapiens
gatcaaattcatacaggcaggaagtagaatggtggttgccaggggctggggaaagggaggaatggcaagttgtttagtgggtatagattgtgaattttgcaagatggaaagagttttggagtttagttgcacaacagtgtgaatgtacttaacactatctgaactgtccacttaagattgttaagatgataaattttgtgttatatatattttactgtagttaactttttaaaacagtatgaaataaagctttatgtactgaaatgaataaatctctaaggcatattttatagcaagtagccaaaaactatctgggaaaaaaagaacg

SEQ ID NO: 17090 - DNA, 479 bp, Homo sapiens
aaacccctatgacatgattacgaatttaataccgactcactatagggaatttggccctcgaggccaagaattcggcacgagtactcagaaaaaatgtcaccactttgttttaattcagttctatatccacatatttgtaacttgtaaattaccagtaatagactgaaccacattttttccttttctggttttgaattgaaaaattactgctttatttgtttttttccttttagaactggttttatgagaattggaagttaactttggggatggcttatttctgtgctcagtttttgtttagggatatatacatccttgtataaggatacatatataaatatatacatatgactagaggtctctgcattttttttttccattttttgagatggagttttgctctcgttgcccaggctggaatgcaatggcacgaacccgactcactgcaacttccgcctcccaggttcaagtgattctcc

SEQ ID NO: 17091 - DNA, 307 bp, Homo sapiens
atcactgtgaacttctggtataagggggctcccacccctaagagaattgaatatcctctcaaagctcatcagaaagtggccataatgagaaacattgagaagatgcttggagaggccttggggaacccacaagaggtggggcccttgttgaacacaatgatcaagggccgatacaactagcctgccaggggtcaaggcctcctgccaggtgactgctatcccgtccacaccgcttcattgatgaggacaggagactccaagcgctagtattgcacgctgcacttaatggactggactcttgccatgg

SEQ ID NO: 17092 - DNA, 489 bp, Homo sapiens
gcggcacgagagcctcacccagacatttccactagaatatcctgaaatgttaggttccatttattgagtgcccaccttgtgatagctacacacattctcctgtaatacttaacagtagtccacagcttttctgaagatcgtttggaatccacagcaaaagctgtaaaacgaaacagacttcttcacccagcaattcagcatctggaaattcacattcagggttgtgtacaaagctgtatgtacttgcatatttattgcagtgttacttataccaataataccgagggcttgctttgaggcacacactgagcaatagcaatgtacagacctcatttggatcctgatttcataaactgtaaaggaaaaacatcaggacagttgggaaaagttgaatactgaatatttgatgttaaagggtgattgttaaactttagttgaagaggtctccatcttcttgagacacacactgcatttccaacttccagagga

SEQ ID NO: 17093 - DNA, 301 bp, Homo sapiens
gccttctccaagcactagcaggagtcttaaaaaggaaatcaaatcatgaaactccctacaatggcttcttacacctctagaataaaaccccaacatggcctctgccttctctggcaatctcatgtgaggtcttctccccactgaaaaagtacccaagctatacaagtcttctctcaagtctctaaacacacggagtctttcctgtctcaggacctctacaaatgcagagggccctgttccttctctccatattctcaccagcacacaacactacccccaacaatcagggctgtctgttatg

SEQ ID NO: 17094 - DNA, 359 bp, Homo sapiens
gtatcgtgaccaacagctgctgcttctcaagaagcacttagaaaataattacaggagcagagatcgaaaatggattgttttgtttccagaagggggcttcctcaggaagaggcgagaaacaagtcaggcatttgccaagaaaaataacttgccatttcttacaaatgttactctgccaaggtctggggcaacaaaaattattttgaatgcacttgtagcacaacagaaaaatggaagtccagcaggaggagatgctaaagaattagacagcaaatcaaaaggcctccagtggataatagatacaacgatagcttatcccaaagctgaacctatagatattcaaacctggatccttggat

SEQ ID NO: 17095 - DNA, 370 bp, Homo sapiens
gatttgaaatgaacatgtgtatattttctacacctattatttaatttcatttcattttagatgaccattggactttgttctccaaaagctgtgtatctgagaccatttgtccctagcaagttatctagaacacgagtcagcacactttttatgtaaggtacaagatactaaatattttaggctttgcaggccgtaaggtttctgtcacaaatactgaactctgccatcgtacttcaagagcagccagtaggcaaaaaaagtacagtggtgtacacaaaaagaagcagttggactcgggaagctgaggcaggagaatcacttgaaccggggaggcagaggttgcagttaagccgagatcatgctactgcac

SEQ ID NO: 17096 - DNA, 465 bp, Homo sapiens
ggggaaccaaggtgttctcctctccctgaactaatctgatatctttgcttcgtcacctggattaatttgctgccacgaaagctgtgcagatggtggtagacttccagaattgtttcagaaggatgaggtgactcagattcttccagtgaggtgctctgtgtgcacttggcctggaggaacatttagatttcaactcctttccaggaaccagtaatttacaaaacctaaatgaaatggaaaaatcctggaacaaatatagattattaaacttgacctaagaacaaatagaaaatctgaaaagattaaaaccataaagaaggagacaccttgtttcaaccgtgacatatatagagtttggaagtccttattgccattcttacaacaagagaaaaatgaactaactagaaatttacttttcttgagatttggttacctggagcagaaaccaccagatgccataagctg

SEQ ID NO: 17097 - DNA, 314 bp, Homo sapiens
gaaacacatcccccaaagccaacaaagaaatcttagacgtaagcccctccaccctctcctgctaggaggacaggaaggaccccatggctgcaggtctgggctctggtctctcttcattggggtttggggagatatgactcccgcaaacctagactatttttttggagacggagtcttgctctgtcacccaggctggagtgcagtggcgttatctcggctcactgcaacctccacctcctggactcaagcgattttcatgcctcaggctcctgagtagctgggattacaagcgcccgctaatttttttttttttt

SEQ ID NO: 17098 - DNA, 379 bp, Homo sapiens
  misc_feature (1)...(379): n = a,t,c or g
tggactctcactgccttatttagcatcacagagggctcgctttgtgccatgccatgttctaaaagcctttataaatattaacatatttacaggtgaggaagctgaggcacagaggtatttaggtatcatggagcagttgctgggatttgaacctagcactctgggactccttagaatccctcaactgttgaggggaagcccaacctcacttgacccttgcacagagcaggaatccttttcccacacctttgtcaaaagtcgacgcggccgcgaattccagatctatgaatcgtagatactgaaaaaccccgcaagttcacttcaactgtgcatcgtgcaccatctcaatttctttcatttatacatcgntttgccttct

SEQ ID NO: 17099 - DNA, 593 bp, Homo sapiens
cccggattgaggcgccgccatttttgctgcccggacgcggagcgagaggctgagagagtcggagacactatccgtttccatccgtcgcgcagaccctgccggagccgctgctcgctatggatgatcgagaggatctggtgtaccaggcgaagctggccgagcaggctgagcgatacgacgaaatggtggagtcaatgaagaaagtagcagggatggatgtggagctgacagttgaagaaagaaacctcctatctgttgcatataagaatgtgattggagctagaagagcctcctggagaataatcagcagcattgaacagaaagaagaaaacaagggaggagaagacaagctaaaaatgattcgggaatatcggcaaatggttgagactgagctaaagttaatctgttgtgacattctggatgtactggacaaacacctcattccagcagctaacactggcgagtccaaggttttctattataaaatgaaaggggactaccacaggtatctggcagaatttgccacaggaaacgacaggaaggaggctgcggagaacagcctagtggcttataaagctgctagtgatattgca

SEQ ID NO: 17100 - DNA, 366 bp, Homo sapiens
gcccaccaccatgcccggctaattttttgtatttttggtggagatggggtttcaccgtgttaaccaggatgatctggatctcccgacctcctgatccacctgcctgggcctcccaaaatgctgggattacaggcgtgagccaccacacccggcctggcactggtatttttaaaaacctctccctgacccccagcaggcaattctactctgcagccacactgagatccactgggccaggtaaacttgcacatctatgactgcgaggaacagctgatgatcttaaagagattcaaagctaattgaaaatctctagttttctgggatcatcttgtgaggtagcacatattcaaacccacttttatactc

SEQ ID NO: 17101 - DNA, 337 bp, Homo sapiens
gccaggcagctacggcttcctcccggaactcctgtgcagctgacgacaaagccactgagcctctgcccaaggactgccctgtctcttcttacaacgaatgggaccccttagaggaagtgatagtgggcagagcagaaaacgcctgtgttccaccgttcaccatcgaggtgaaggccaacacatatgaaaagtactggccattttaccagaagcatggagggcattattttcccaaagatcatttgaaaaaggctgttgctgaaattgaagaaatgtgcaatattttaaaaacggaaggagtgacagtaaggaggcctgaccccattgactggtcatt

SEQ ID NO: 17102 - DNA, 447 bp, Homo sapiens
aattcggcacgagggtatctcttaaggcaaatcttccttctggaagggctctttccagaaagatctctgtgattagatactatagctgccctgtcccctacatgcaatgaccacacaataacaaagaaatgaagatagcatgggagtcctaatggtccttctttttacatcctttgatatggccaacagtcttccctaaccccgccccgcaccccaaaaaaaggattcagttaactaaagaccacgggaagcaaaggaacttatgtatgggggaaaccgacaaccatttatgtgaagtcctttggggctattatcaatgccccaacctctcccctaaaatcaaatacttttgcctggttccagactactgatgctccatcattaatacttcaaccattagggatcagttatggaaacatgcagataatccttggagattattatacc

SEQ ID NO: 17103 - DNA, 435 bp, Homo sapiens
gaagcattatgaaaagaagaaaaaaatttaaaaaagcacagaataactaggaaaggcaggcctgtggcacagcatagcagaagctttggaaaacctaagaacatggaacagagaaggggtaaactgatgttgaagacagactcaaccagttgtcattttgcttctgcaggtctgctggtgggacacagctgagaccaatttgccctctcagttgccacagtctttctctgttgatcctttcattgcaacgggcacatatgcatgcacacacttttactgtttcctcaaaatagggtgaggtgacctaaagtaagggagaaatttggaaagatgatggcagaaagaataagatacagtttcctaaaagatatattccctgagatcccctatacttggttagaagagggcacaaatctgggcccagaattctgtagc

SEQ ID NO: 17104 - DNA, 426 bp, Homo sapiens
  misc_feature (1)...(426): n = a,t,c or g
gctggaagtgtaatttctaaatatatgatattttactgtacttaacaccaaggatctgtttattttacaaaaatgcttcccagaacaaacaactttatgcacgatccaaaatgaaactgacctaaaatatggttgaggaatgcagtaatattttgcaaataaattgcccaattttaccgcaagaggctcacgttcctctctgcataatggacatttttggtcagtctagagatttactccaatagttgaaaagataaaaaaaaaaaaggctacnccttccccaggggtacctgtttnatccggggagctgggtgaggcactgtcttggnacaacgttgnccagctggactcctnatcgntcggngccaggttctggatccggtgcagtgcacanncggttttggcccctgttttcggatnatcctt

SEQ ID NO: 17105 - DNA, 539 bp, Homo sapiens
  misc_feature (1)...(539): n = a,t,c or g
gtgnttgttanngnaactcttntgacacnatnacgaatttaatacgactcactatagggaatttggccctcgaggccaagaattcggcacgaggtggctgagtttagaattgaaacttctttgggtccagtggtgctcacaaggctcaaatgtagtatgtcttttgtaagtgaaagtgaagttcaactgatttgtaagttttaaaaccttggtgtttactttttaaaattttgagggataccgtgtatgtatcaaacaagtttgtagtctttctataacatgaaattatgattattccgccagattttgaagtaactcgaattaatattttgtacttgatgttatattagttttctttaccttcaagcttttacaaattatgtttaggatgttacggtaatatttatgttgttagatttgacttaataacttaatatattatctacattgaatgtctgtaagaatttcacttttctgaaactctgntacatatctgatctttactccaaataggaagtaaggnatattggtcagttaag

SEQ ID NO: 17106 - DNA, 351 bp, Homo sapiens
aattcggcacgagtaagaatgtatctttttatgtgcattaaagcagaataggcagccaagtgcagtggctcacacctgtaatcccagcactttgggaggccgaggttgggcggatcacctgaggtccaaagttcgacaccagcctggccaaaatggcaaaaccccgtctctactaaaaatacaaaaattagccaggcgcagtggtgggtgcctgtaagcccagctactcaggaggccgaggcaggagaatggcttgaacccaggaggcagaggttgcagtgagccgagatcgcgccattgcactccagcagcctgggcaacagagcaagactcggtctcggaaaaaaaaaa

SEQ ID NO: 17107 - DNA, 498 bp, Homo sapiens
atcagctatgacatgattacgaatttaatacgactcactatagggaatttggccctcgaggccaagaattcggcacgaggctcaggtgattatcctgaaccatccaggccaaataagcgccggctatgcccctgtattggattgccacacggctcacattgcatgcaagtttgctgagctgaaggaaaagattgatcgccgttctggtaaaaagctggaagatggccctaaattcttgaagtctggtgatgctgccattgttgatatggttcctggcaagcccatgtgtgttgagagcttctcagactatccacctttgggtcgctttgctgttcgtgatatgagacagacagttgcggtgggtgtcatcaaagcagtggacaagaaggctgctggagctggcaaggtcaccaagtctgccagaaagctcagaaggctaaatgaatattatccctaatacctgcaccccactcttaatcagtggtggaagaacggctc

SEQ ID NO: 17108 - DNA, 742 bp, Homo sapiens
ggcgggaactactcgacccacagagccgatcgcggagcggattctgcttttaggagtacccgccaacaagcgggaccgagcaggaatccgtatctgggaacaggtgagagaggatgtgtgctgggccttggaggaagggggccgagaccgggccttacttctgtaacgatactgtgaggcatcggaaggccagcctgttgtgtccgttttgaagaatgaacggagaccagaattcagatgtttatgcccaagaaaagcaggatttcgttcagcacttctcccagatcgttagggtgctgactgaggatgagatggggcacccagagataggagatgctattgcccggctcaaggaggtcctggagtacaatgccattggaggcaagtataaccggggtttgacggtggtagtagcattccgggagctggtggagccaaggaaacaggatgctgatagtctccagcgggcctggactgtgggctggtgtgtggaactgctgcaagctttcttcctggtggcagatgacatcatggattcatcccttacccgccggggacagatctgctggtatcagaagccgggcgtgggtttggatgccatcaatgatgctaacctcctggaagcatgtatctaccgcctgctgaagctctattgccgggagcagccctattacctgaacctgatcgagctcttcctgcagagttcctatcagactgagattgggcagaccctggacctcct

SEQ ID NO: 17109 - DNA, 107 bp, Homo sapiens
gcatcccccagccccttgtcgctcccactctgctcccagcaccatcaggtctttggagaaatgtaactccttgtcatagaaagcctggaggcagcatcctggtgggg

SEQ ID NO: 17110 - DNA, 362 bp, Homo sapiens
gctgtaacattgcagaaaattaacacagtagtggctttctgtaggatgatagcgaactatctgaaaaataaaattataaattccattttaatagctaccaaaaattagttattttgagtttatttctttatttgtggtggagtctttctctgtcaccaggctggagcgcagtgacatgatctcagctcactgaaactcttgcctcccggattccagagattctcctgcatcagcctcctgggtgtctggaactgcaggcatgtgccaccaccgccaactaatttttgtttgtatttttagtggagacgttgtttccccatgttggccaggatggtcttgatatcctgaccttgtgattcact

SEQ ID NO: 17111 - DNA, 349 bp, Homo sapiens
gtgtataatcaccaaggtttgtccctgagttttaagtttgtaattgatgtgtgtgtttctcaataaaattttatttgcaaaaatcaatggtaagacctgatttggcatataagctataatttgctgactactggtttagaatataggttctggagttggactactgggtttgaatccaggctctaccccttactgtgagaccctaggtgagttactaaacatctctgtgccttacatttgttacctctgtaatagggatgagagaacctactagggattgttgggaataaacttatacagtgatcggaacattgtttggcatacagtaagatcttacttgggattagct

SEQ ID NO: 17112 - DNA, 446 bp, Homo sapiens
gcccagaactacatctgggctgcgcgcttgcgcttcgcttcctggccctcgtttcctgggacatccctggggctagagcactggacaatggattggcaaggacgcctaccatgggctggctgcactgggagcgcttcatgtgcaaccttgactgccaggaagagccagattcctgcatcagtgagaagctcttcatggagatggcagagctcatggtctcagaaggctggaaggatgcaggttatgagtacctctgcattgatgactgttggatggctccccaaagagattcagaaggcagacttcaggcagaccctcagcgctttcctcatgggattcgccagctagctaattatgttcacagcaaaggactgaagctagggatttatgcagatgttggaaataaaacctgcgcaggcttcctgggagttttggatactaccaca

SEQ ID NO: 17113 - DNA, 301 bp, Homo sapiens
taataatacacattacatttttataactgggttataacattgattattctcacttattctagatgtgacttatttaaataagtttagaattatatattaaatacgattatattaaaaacatttttgcttttatgtaaaacactatttgccatgacattttttgtcacgtaattttgtttttctttgtgtttgaatatgatcaaatacttcccaaaattaaacttacaaatgtatatcaacatattataattcaaaagctggttttatttgggaaataaataacaatgtgtaaagaccggga

SEQ ID NO: 17114 - DNA, 304 bp, Homo sapiens
ctaagcactgttctttgcacagtatatttattgaattgattgttgtgctgttaacagtgaggtggctgatcgaatttttttctgtttaccagtcaaatggcttcagactctttatgtcaacagtagaaaagatgattaaaaatttagaagagaaatatggtatttggaaatgccaaaataaggtgctagatctgcatttgtgaaccctccaaaagagcttagttatatgtacttggtggcttactgcatttatcactgaatttccttggaatttttaatcatcttttctactgttgacataaag

SEQ ID NO: 17115 - DNA, 338 bp, Homo sapiens
catgtccaagcttcatcacaatgcccatctatttcatctatgcccctactcataccctagatatcatataatttcatttctttatttatttgagatgaggtctcactctgtcacctgagctgaagcacagtggcacaatcttggctcactgcagtctcgacctcctgggctcaagcaatcctcctacctcggcctcccgagtagctgggaatataggtgtgcaacaccacgcctggctgatttttggttttgtatgtagagatggtgtctctctgtgatgccaaggctggttttaaatatctggcctcaagtgatcttcctgcctccgccatccaaag

SEQ ID NO: 17116 - DNA, 522 bp, Homo sapiens
ggaaagatggccgggaactcgatcctgctggctgctgtctctattctctcggcctgtcagcaaagttattttgctttgcaagttggaaaggcaagattaaaatacaaagttacgcccccagcagtcactgggtcaccagagtttgagagagtatttcgggcacaacaaaactgtgtggagttttatcctatattcataattacattgtggatggctgggtggtatttcaaccaagtttttgctacttgtctgggtctggtgtacatatatggccgtcacctatacttctggggatattcagaagctgctaaaaaacggatcaccggtttccgactgagtctggggattttggccttgttgaccctcctaggtgccctgggaattgcaaacagctttctggatgaatatctggacctcaatattgccaagaaactgaggcggcaattctaactttttctcttccctttaatgcttgcagaagctgttcccaccatgaaggtaatatggtatcatttgttaaat

SEQ ID NO: 17117 - DNA, 417 bp, Homo sapiens
gcctgtggctttattttctggctccttgaggttaagtacctactgctctgaaggagctgagatgttcccggtccactggcaacaacactccgatggcagctgccagcaaaagaactctggtggggcagcaataggctcccacgcacatgcatgcctgcagagtggcacggggaagctgtgggcaaatgcacactggcaggagaaggctgcaggtgggcacgtgccagcaggggaaggctaccggcaggtgcacattggcaggggtctgggtccatttgcaaaagcactccaatggacagatacggtcttatggcaaaaagctatagtgatggctgctggcaagctgaggctgtgctgcaagcaggtacagccaggcagggagggaccctacagaggccagcaacggcaattggggga

SEQ ID NO: 17118 - DNA, 34 bp, Homo sapiens
tgcccctcctactctggctcaggcaatcacttat

SEQ ID NO: 17119 - DNA, 453 bp, Homo sapiens
  misc_feature (1)...(453): n = a,t,c or g
aacccntnttttnagancnctatgacatgattacgaatttaatacgactcactatagggaatttggccctcgaggccaagaattcggcacgaggcagtggcacaatcatggcttactgcagccttgacctcctggactcaggtgatccttccacctcagcctcctgagtagctaggactacagacaccggctaccatgcctgactaatttgtttttattttttggtagagacgagttctcactatgttgcccaggctggtctcaaactcctggactcaggtgatcctctgcctcctgaagggctgggattacagtcatgagccatcgcacctggcctgtaacacaattcttgtgtttcattctctttctctggtggctggattttgggaatttcaccagattatgcccaagtgggattctcttttttgcttttcaaattattattattatact

SEQ ID NO: 17120 - DNA, 451 bp, Homo sapiens
  misc_feature (1)...(451): n = a,t,c or g
gtggagtcttgttctgttgcccatgctggagtgcagtggcatgatctcggctcactgcaacttctgcttcttgggctcaagcgattctcacatctcagcccccaccccagctgggattacaggtgcctgccaccacgcccagctaattttttttttatttttagtggaaaatggggttctgccatgttggccaggctggtcttgaactcctgacctcaagggatccacctgcctcggcctcctgaagtgttgggattacaggcatgagtcaccatgcctggccaacaaatgtttgttgaatgaagaaatgttggttancaggttgaattgttggctcgcggttagttggatagttnatgggtgactggntgattagataattcaatgagntaatagctggntaacaggagaatcanntagtggttttganaggntagncaangggnaataa

SEQ ID NO: 17121 - DNA, 338 bp, Homo sapiens
gcttgcattgaatccctcagaaaggaaatattgtggaagtggatttcatggctctgacaatgtattttcaaatatgcaagccctctttgttggctatggacctggattcaagcatggcattgaggctgacacctttgaaaacattgaagtctataacttaatgtgtgatttactgaatttgacaccggctcctaataacggaactcatggaagtcttaaccaccttctaaagaatcctgtttatacgccaaagcatcccaaagaagtgcaccccctggtacagtgccccttcacaagaaaccccagagataaccttggctgctcatgtaacccttcga

SEQ ID NO: 17122 - DNA, 490 bp, Homo sapiens
  misc_feature (1)...(490): n = a,t,c or g
atttgccngaccagctatgacatgattacgaatttaatacgactcactatagggaatttggccctcgaggccaagaattcggcacgagctgagaggtgcctggatggagttgtgttaaggaccaagtgctctagaaggtcagggaaggccagtgtcagtacaggactttgggaaaatggggaaggcttcctggaaggaataggactcttaggatagatgagattttgataggctgggagggagaagaaaatagtgttttaagaggggccaaaagcataggcaaaggtttgaaagaaaattgcttaatgtgtgtctagaacaagaataaagcagaaagataagtaaggctgagggtataggttgggactctcaatggtgaatggggaggagtgatgggggaaaggagcagccgttagtgactgctatgcctagtcatggcagagtcccaggtaaaagggaatgctggtaacactcaccggtctttatttaa

SEQ ID NO: 17123 - DNA, 313 bp, Homo sapiens
ggagagagctagtgtggtctgggcttcaacagggggctggtatgaggcactgtgagaaccctggagggaaagatttccagttttgcctgggtacaaaaaaagatgagttcccaggaggtgacattggagctaggctgtgaaggacacacagagagtctgccaagtgggaaagcagtggcaaggctacattccaggtggacagaacagtatgtgcagggggaagaaatggggaccagtcagattaagaaacagcgtgctcagtgtggctcagtgctaggtgtagggggagggacatggcccctgctcctcagta

SEQ ID NO: 17124 - DNA, 249 bp, Homo sapiens
aaaatgttgaatacgtgtaaaataattgagtctctgttcacaaataagtatgtatgtatgtggcaagagagttggtaggttttgtttgtttgtttgagatggagtcttactctctcaactaggcggtggtgtcatctcagctcactgcagcctctgcctgctgggctcaagcggccctcccgcctcagcctccggagtggctgggatcacggcgcacaccaccatgcctggctaatttttttttttttt

SEQ ID NO: 17125 - DNA, 451 bp, Homo sapiens
  misc_feature (1)...(451): n = a,t,c or g
gctttttcaaggtaactaaaacccggcctttttctgtaggtgctctatcccctcaagaagggaattgcagtgtttttagctatctgcttcttgggggcacagttccgccaaagcctcccaacttctctttgcaatcctcttacactcctgtctccccagtcctaatggcatgacctggagattttcaggacccatgattttccagcaaagagtcactacagagtaagagtaaatgttactgacagaagtgttttgcaaatacgtggagacagagcagtttgagggtcttgattgactcagcagctgcatcactcagcttgcactctccctgtcccccagcctatacacaagcatttagtgacccccgtgagaattaatgntttcttctcccttctcatgacattgtacattagggacttcatcatncaaatgttccccctgaaagaaagct

SEQ ID NO: 17126 - DNA, 437 bp, Homo sapiens
tttgaaacccttttgaatgactacgaatttaatacgactcactatagggaatttggccctcgaggccaagaattcggcacgaggaatctggctgctttcggccaaatccttttctgaagcttttgtaaaacttcccagccttctaagaaggtttgcttctttctacaatttttctcaccacccttaccgaaccccggcagatgggatgacctgcctgcgtctgggaggtacccactctgggtcttttctgcactgagggctgcacagatgtcaggatgacctgcttgcggaaaggagcaacccactttgggtctcctgagagctgtactgtcgctcagtaaagctcctcttcaccttgttcatgctccagttgtccgtatacctcattgttcctgaatgcaggacaagaacctgggacctgtcaaatggtggggctg

SEQ ID NO: 17127 - DNA, 499 bp, Homo sapiens
  misc_feature (1)...(499): n = a,t,c or g
gatatatctatttataacttaaattagttttattaaatattgcaaacatgtacaaaactgcacacagaaatgtacaactaaatattcatgtaacctgcacccaggtcaaaaattagaacatttctaatactccaaagattcccgtcatccctcttccagactttcactccttcccaggggcagtcatttaggttgtttacagtttgcattattatttgaaaaaggctgctgtgaaaatccttgtgtaagtcttttggtgtacacatgcatgtatttctgtctggagcacacccaggagagaatttgctgagtcataggatatgtggtatgttcagcttcaatagataatgccagttttccaaagtagttatgtcnacaantgnntgaangttgtnggggttcctnanattccggggtaannttctanntgggtgngtntgttnncnnncacnnngttnaanngttnnaatgnccttngnncannnaanananctcccgg

SEQ ID NO: 17128 - DNA, 382 bp, Homo sapiens
  misc_feature (1)...(382): n = a,t,c or g
cccaccttctggccttgttccctggtaacccgagcaggccgaagcgcagccgcactgtcaaggcaaacaacctggcaggagggcagggctctgcatggagagggtgggctgatgccccttctcttcccatcaccaccttgacccctactctggcaccttgaaacccctttcactatagacagggatttttactccacagtcagatggctcactcggggaagtaacctggtggggaaattttatactaaggtgtgaatgattgacataataaggccatttcccaagagctggacctggggggtgggaggatagagagatgagaggataaacagtgaggatgaaggaggaaaaggccaggccccgaactgngctaattttccca

SEQ ID NO: 17129 - DNA, 357 bp, Homo sapiens
ggtagagagcctccccacattggagaaactcttttgttccaagagtctgtgggtttagtgtgttatttccacttatagaaattttgtctgtaatattgtttctaggcaggaaaaaggttttttgtttgtttgtttttttgtttgagacagagtcttgctctgtcgcccaggctggagtgcagttgcgcgatctgggctcactgcaaactctgcctcccgggttcatgccattctcctgcctcagcctcctgcgtagctgggactacaggcgcccaccaccatgctcggctaatgttttgtatttttagtagagacagggtttcactgtgctagccaggatggtctcaatctcctcac

SEQ ID NO: 17130 - DNA, 300 bp, Homo sapiens
attctttgaactttcctagaagttctaagagtaggcacatatccatccacctattcattcattcatttgttaaatatgagggcccgctctgcctattctgtaataacccagtgcttccagggatagcaataacactggctcagctattcagaaaaaaagctgagtgcctactatgtgcaagttgtcatatgctaaaatgtgagcttaccaagataactgcaagtgtctgccctcaagttgcttatagtttgccacaggaagaccaaaatatatacttattgagagaaagaagataaagtt

SEQ ID NO: 17131 - DNA, 610 bp, Homo sapiens
  misc_feature (1)...(610): n = a,t,c or g
gaaaaaccttatgtatgcaacaaatgtgggaaatcttttaggggcagctcagatctttttagacaccatcgtgttcatactggagagaaaccctatgaatgccctgaatgttggaaggccttcagtcagaactcacaccttgtcagtcatcaaagaattcataccagagagaaaccctttgaatgtagcaactgtggtaaggccttcagtgggtggacagcttttcttaagcaccagaaacttcacattggaaaggaatttgaagactgtaagagtctacaaacaggacctattctaataggtagcagaaacctaatgaatgcagtaaaactaggaaaagtctgatggagaccacatcttattgcactacaaatgagttttattagaaaaaaaccatgggaaggtgggaaagcagagaaaatacctactggatttttcaaacgtaagtataatcaagtggaaaagccaaaagctcttggacataatcaccttttttttttctgtctcaaaactgacnctanaatatggncccaacgatncaattttttaaattattnattttttaacatncaangagatgaggtctcactatgttgcccaggctggactt

SEQ ID NO: 17132 - DNA, 444 bp, Homo sapiens
ggcaaaaggaatcaggagagtttgaagagaggctgaactttgatataaacttagagaatcctagtaggaccctaatatcgataactcaagccaaacctgaatctgagtcctcatttttgtgtgccagctctgatgggatgctatggaacctggccaaatgcagcccagaaggagaatggaccacaggtaacatgtggcagaaaaaagcaaacactccagaaacccaaactccagggacagacccatctacctgcagggaatctgatgccagcatggatagtgatgccagcatggatagtgagccaacaccacatctaaagacacggcagcgtagaaagattcactcgggctctgtcacagccctccatgtgctacctgagttgctggtgacagcttcgaaggacagagatgttaagctatgggagagacccagtatgcagctgt

SEQ ID NO: 17133 - DNA, 402 bp, Homo sapiens
gcatgctagaaaaatagggctggatcttatcactgccctgtctccccttgtttctctgtgccagatcttcagtgcccctttccatacagggattttttttctcatagagtaattatatgaacagtttttatgacctccttttggtctgaaatacttttgaacagaatttcttttttttaaaaaaaaacagagatggggtcttactatgttgcccaggctggtgtcgaactcctgggctcaagcgatccttctgccttggcctcccgaagtgctgggattgcaggcataagctaccatgctgggcctgaacataatttcaagaggaggatttataaaaccattttctgtaatcaaatgattggtgtcattttcccatttgccaatgtagtctcacttgaaaaa

SEQ ID NO: 17134 - DNA, 423 bp, Homo sapiens
gcttgcctctcgcccatatgtttgagagagttgtagagtgtgtaatgctgtgtcatggagctaaaatcggatttttccaaggagatatcaggctgctcatggatgacctcaaggtgcttcaacccactgtcttccccgtggttccaagactgctgaaccggatgtttgaccgaattttcggacaagcaaacaccacgctgaagcgatggctcttggactttgcctccaagaggaaagaagcagagcttcgcagcggcatcatcagaaacaacagcctgtgggaccggctgatcttccacaaagtacagtcgagcctgggcggaagagtccggctgatggtgacaggagccgccccggtgtctgccactgtgctgacgttcctcagagcagccctgggctgtcagttttatgaaggatacggac

SEQ ID NO: 17135 - DNA, 118 bp, Homo sapiens
catatggtatatgtattatatactgtattcttacaatgaagttagagaggaaatgttatcaataaaagaaagtttggaatgaatgaaagtggaatccacaggatagatttccctcatc

SEQ ID NO: 17136 - DNA, 333 bp, Homo sapiens
gcggcacgagaactggaagaaaacaaggatgcctactttcaccactcttcaatatagtattggaagtcctaaccagagcaatcaggcaagagaatgaaacaaaaggcatcaaaattataaaggaaggagtcaaattatccctgtttcctgatgatatgatcttatatctagaaaaacctaaagactccccacaaaaactcttagatttgccaggcgcggtagctcatgcctgtaatcccagcactttgggaggctgaggtggccagatcacctgaggtcagtagttcaagaccagctggccaacatggtgaaaccctgtctctactaaactac

SEQ ID NO: 17137 - DNA, 446 bp, Homo sapiens
  misc_feature (1)...(446): n = a,t,c or g
gctgcatagggctcggcgtggtggcgggcacctgtagtcccagccacttgggaagctgaggcaggagaatggcgtgaacccgggaggcggagcttgcagtgagccgagattgcaccactgcactccagcctgggcgacagagcaagactccgatttcatatgatacaaaagattagaggtagataataaaccttaatatgaaaggtgaacaataaagctttgagcaacaaagtaaggtaaaaatcgaacaaatgaaagtataaagtaaaaacataaaatactgcatgttctctcctataagtgggagttgagtacattgagtacacacagacacaaagaaggcaacagcagacactggggcctacttgagggnggaggaanggnnagnnnggggggagaatntnangtacggntccatgannnancntgngngacangnnnnaact

SEQ ID NO: 17138 - DNA, 405 bp, Homo sapiens
  misc_feature (1)...(405): n = a,t,c or g
cagggacctcagggacagaaacagacctatggggttgcatggcacacgtcaagaagaaatgattgatcacagactaacagacagagaatgggcagaagagtggaaacatcttgaccatctgttaaactgcataatggacatggtagaaaaaacaaggcgatctctcaccgtactaaggcggtgtcaagaagcagaccgggaagaattgaattactggatccggcggtacagtgacgccgaggacttaaaaaaaggtggcggcagtagcagcagccactctaggcagcagagtcccgtcaacccagacccagttgcactagacgcgcatcgggaattccttcacaggcctgcgtctggatacgtgccagaggagatctggaagaaagctgangaggccgtcaatga

SEQ ID NO: 17139 - DNA, 434 bp, Homo sapiens
  misc_feature (1)...(434): n = a,t,c or g
gaggaagtacaggaagaaaaacgacatccaaatggcaaggcagatgactgccggcggtccggtttcccgagtgaatttccaggagctctgcatgccgctccctccagacaggacatggggccctgacctggaggccaggcgtttctagcattgttgactgccagtttattcccagtaaataaagcaatacgcttttcaggaggaagatttgttttaaatacttaaaaaaaaacccaaaactatagcctcaaatgtcttccagccaccacattttagcccttgaggagagctcagttccggaaggacgcgtcaaggtggcggtggtcggcattgactcaggaaggggtgggaagaggcacctgctgcggctgccggntgcggctacagtgttttgtgagctccgangagacccagtcctgcctggggcaacacat

SEQ ID NO: 17140 - DNA, 362 bp, Homo sapiens
ggcatcttgtatgactgtcctaattgtgtgcagttctttttgagctttgaatacgaagttgggtctgaaaagaggctttctcaagcctgggcagctctttcaggaacacattcccagggggaattttgggtgggattcaggaggcaccgatctgccagtgagggatttctaggaacacaaggttagtcaggacgtggatccccacagtggacacgactgccccaccccgtcgaggtcctaggtggccatgaggagctgtgccgtcgcttgctgactgagctttcatccacgaatggtgtgggagttcgggatcttcccagacattctttcttcacctttgggaagatggagggggacggtgt

SEQ ID NO: 17141 - DNA, 235 bp, Homo sapiens
ctcagctgctcaggaggccgaggcaggagaatcacctgaacccgggaagcagaggctgcagtgagccaagattgcaccactgcactccagcctgggcaacagtgcaagactccatctcaaatactaataataataataataaatgtccatgactgttaatggcttagggggatggtggagtatcagaatagaaactgtatcataagcagcagccggagtgtgtaaagaaagggaa

SEQ ID NO: 17142 - DNA, 403 bp, Homo sapiens
gcagtgactaaaaaccttactcagatactgccagtgttgtttaattgagcagaatagaggcttctcactataggcaactgtaaatcaatgaaaataaccatttaaagaagaaaaacattttcatgtctatcacggtcgatcccttctgccaaagtgatttggttcattcataaattccccatacctcgtgtgttacatattgtactgtacacgtttactgaatgttcgattgtgatcttgtaatacagactgttcattagcccccttctcttgacttaaaaagttggggggaactaactcttttcatcccaaggaaactttcttctactctgtcttgccagaaagttactgctcatttctcttgtagagcagcttgcctgtgtggcattcactcctgttctgc

SEQ ID NO: 17143 - DNA, 402 bp, Homo sapiens
gtaaatattaccttcaatacctgtcagtagcctactgacaaattatgactaaacaaaggtatttgtgtgactatgtaatagatcatccgctgaaaagtaaaacaaaataacaaaaaaacttgtcctaatgggaaagcatgcttaataaaaggaaatgcagaagttataaacatgttttgtaagtaagtattcagaattaaaattatgtgatacatttttatgattgcttaatgatccttggatgtcagattccttgggtctatttatagctaaattataatgaaaaattcaaggcttgctggagcaactttgtcaacaaatatattagttttgcttatatatttgatttttatgtggaaaaattactacccttttttacaagcagagaataaactgttgatt

SEQ ID NO: 17144 - DNA, 339 bp, Homo sapiens
  misc_feature (1)...(339): n = a,t,c or g
gacagagcctacctacagtagataagagtttttattggaaggatacacttatttcagggaccacaaaagattgatgtttattgggatgcaatccctattttatcttctctcctgttgctagctggaaattatagtcttcctgcgtagagaagaagaaatgatgcaagtaggataagacaggtaggattctgcctggtttggaagatgtcctgagtagtgaggnttgcccatctatttgttgnctatnnntnttntttcannacnanatntgncnnncatgttgttnncangnnntctncnngcctcagnngnngctantnntttgnccgcttgngcgct

SEQ ID NO: 17145 - DNA, 565 bp, Homo sapiens
  misc_feature (1)...(565): n = a,t,c or g
cagctatgacatgattacgaatttaatacgactcactatagggaatttggccctcgaggccaagaattcggcacgaggatgattgagatgcacttcaaaatttcatgtgacaaaacatctaaaatagcaaggacatttttcttccctatcatatttgctgcccactcccctccccccaaaaagggaacattctcagaggtcaaactaccaaagatggttactttcctaaactgacttccctctgtgatcttctcccctacttgctggttcctgaggcttccccttttggtctctgatgaaaagggtggggctttgatgaccctgctgtgccatgtctatgactatgcatgcatctggggccaggtgatggtgaggacaggagaagtaaagcaatgggggcttataaccccctcctaagaactgagttcctccaatctgtggggganatttccctccctcagagtttaggctcccagggctccccttgcttcgcacctgctccagcatgagaatgctttgtagcttggggcacaaganaactgagaaaaggaaaatangaaaaatg

SEQ ID NO: 17146 - DNA, 340 bp, Homo sapiens
gaacagcttcctggtaaaggcaacggctctgctgcccatgaagttggagagaaaaatatgtagagcagataaggcttccttatgatggaaacctggtctaggttgctcaccactgaacctcctcacacctggagccgtgcctagcacaaggagcttacgtatcctcagaagagaagaaacagagacgattgctgtcttcattttagagacaaagaacccgaggcgtagagagccagggttctccatggggatgtgcttgagggagaatgagcagtttaagagaaaagaattcctccagagtgggttgtggagagcactggagaaggtctggctggactaa

SEQ ID NO: 17147 - DNA, 413 bp, Homo sapiens
  misc_feature (1)...(413): n = a,t,c or g
gactttgtttctgaagacagatgatgggaagctggctggctggttccctttgggaggggggatgtgggggagaaggcatatataggaggtctttcttcctctggttctgttggtttccaagtaacatcagaaattcctagaatatcccctcccaatgtgactatcctaagaaattgcttcccaagtcccagtgatacacctgtatgcttaaaggctaatgagacccacttttttgtctgcccagaagataagtagtatagncaggnctcatacttttatgctgattgatttcatgcttttcaagtttttattaatgcctgtggctgtactccttatgagtgtaggagagatttactgtgtaagagagatttactggggtgaacccagctttttttatacctanaatactttgg

SEQ ID NO: 17148 - DNA, 389 bp, Homo sapiens
gaacaaccaccctcaattaaaaggtctcctgctgggctgatgtagtctctgggacatggggcctctctagtagggaatctgtgggactctaaaccatggaatagcttgaacaaggttaactctgtagaacaatagtttgaacttattaacatgttttctttgcccactttttttgtgaaagaaagggcaaagttacatcttcagtgctgggttcagcttcctgtttgcccatgtagggtgcaagggctatgaagggctgtttgtgctgcctattttcttgctcaagtgatcctcagtaagatagaggagactcttgaggaagttaagaaaaggagttaaggacagccctggtaacaagttgaggtgttcctcgtttgctttaggaacat

SEQ ID NO: 17149 - DNA, 512 bp, Homo sapiens
  misc_feature (1)...(512): n = a,t,c or g
cctttgaanacccgntatgacatgattacgaatttaatacgactcactatagggaatttggccctcgaggccaagaattcggcacgaggcccaaggtcaccgggctacacaaagtaagatgaagcagcatggctgtggcttgggctgctctggggctaggagaagaaagatagcccaggaagaagagtgtttttcttaagtgaatttctgattttcctttctgattatagaaggatctatgctcatgatagaaaattggaatcactaggattccctctactagctaggatgagttgtttgcaatgtcgtaagatttttccaactccatctaggtaactaatggttgcagctgtgtgtctggagtgtagatgctgtggtgactacactatagatgggttctttgtccttgattctttttttggagacagggtcttgctctgtcacccaagctggagtgcagtggtgtggctcagctcactgcnacccccgctctgggctcaagcgatcctctc

SEQ ID NO: 17150 - DNA, 447 bp, Homo sapiens
  misc_feature (1)...(447): n = a,t,c or g
tttganaccgttatgactgattacgaatttaatacgactcactatagggaatttggccctcgaggccaagaattcggcacgagagattcacttgttacacttaaaagagccttagaagcaaaagaactagctcggcagcacctacgagaccaactggatgaagtggagaaagaaactagatcaaaactacaggagttagaagctgcagtgagccgtgatcttgccactgcactccagtctgggcaacacagcaagatactgtgtcaaaaaaattttttttgataaaaaataaaagagttacatgacattcagagaccatccaaaaaacctgtgggttcccggctgggctcagtggctcatgcctgtaatcccagcactttgggaggccaaagtgggtggatcacttgaggtcaggagtttgagaccagcctggacaacatggtgaaa

SEQ ID NO: 17151 - DNA, 322 bp, Homo sapiens
ggcaggagaatgacttgaacctgggaggcagaggttgcggtgagccaagaccatgccattgcatttaagcctgggcaacaagaacaaaactctatcaaaaaaataaataaataataaaaaaaacagcaggaatagaagtgggagctttgtcataaactgcttaatagagtcatctctagagtgaggtagcaatgttttaagtgtcaagatggactttatatatttaaaatatcttacaatatgccaggggtggtggcatacacctatagtcctagctaccgcagaggctgaggcaaaaggatcagttgagcccaagagttcc

SEQ ID NO: 17152 - DNA, 349 bp, Homo sapiens
ggcaatggtccccatgttccaatccggagagcgttttttctgtatctcgccccacattaggagcattcccagttctatgcattacttccctattccattgtggattcattctgtgaccttgaacaagatagctaatgtatctgggcctcaactttctcaatctgttgaacaggaataataaacagtagttcactcacaggttggttgtaaggattgaagtaagtagtaagtttataagatagtaagtttataagatgctgttcactacctgacccctggtgagtgttagctattcttttttatggtgcctgtaaccccctttatttgaattgttaacaaactgcctttg

SEQ ID NO: 17153 - DNA, 498 bp, Homo sapiens
  misc_feature (1)...(498): n = a,t,c or g
atttganattcgtttacngntatgactgattacgaatttaatacgactcactatagggaatttggccctcgaggccaagaattcggcacgagtctgaagcttatagggtgacctgaaaggagacgaggaggggagggaaatctgtaaggaggctgatgcaacggtctaagctgctttgtgcaatatggcagccactagccacgtggggctgtttaaatttaaattaacgagcttggcctggtggctcacacctgtaatcccaaaactttgggaggccaaggtggaaggattgcttgaggccaggagtttgagaccaatctgagcaacatagcaaaaacttgcctctacaaaaaataaagttagccaaatgtggtgggatatgcctgtagtcccagctactcgggaggctgaggcggaaggctcacatgagcccaggaggttgaaactgcatgagtcatgattgcccacgcctctacctgggtgacanaacnagaacct

SEQ ID NO: 17154 - DNA, 502 bp, Homo sapiens
gaactgggtacacaagtctggagtttggaggaaggggtctgggctggaaatagaaacttgggagtcatgaacatatagatagtatctaatttcataagaatgaatgagtatctaatttcataagaaagaatgtattaagtgaacatcagttcagaaagtggtccaaggtagatccctgaggcacttcactgttgaaaggacaggcagatgcaaggaattcagcaaagagggatgaaaacgggttatcactgaggtatatgaaaacccaggagagtacagtgtcacagaagctaagtaaagaaacagtttcaaagaagagggagtgattcaccatgacaaagaatggcgatcagtcaaaagaggaagattgagaaataatcgttggattttgcaatgtgaacatttttagtgaccatgaaaagaacattctttttgatgggtagattctaaaaccttgtaacagtgggtttaagaaaaaaataaagaaattagagatagcaag

SEQ ID NO: 17155 - DNA, 492 bp, Homo sapiens
  misc_feature (1)...(492): n = a,t,c or g
ggcagatcagcacctctctgcccagatctgcacattcattgcaaccttcttctggtgatgaaatatctactaatgtatctgtccagctttacaatggagaaagtcagcaactaatcattaaattggaaaatattggaatggaaccattggagaaactggaggtcacctcgaaagttctcaccactaaagaaaaattgtatggcgacttcttgagctggaagctagaggaaacccttgcccagttccctttgcagcctgggaaggtggccacgttcacaatcaacatcaaagtgaagctggatttctcctgccaggagaatctcctgcaggatctcagtgatgatggaatcagtgtgagtggctttcccctgtccagtccttttcggcaggtcgttcggccccgantggagggcaaacctgtgaacccacccgagagcaacaaagcangcgactacagcacgtgaagacctggagctgtctgaattcaatacc

SEQ ID NO: 17156 - DNA, 383 bp, Homo sapiens
  misc_feature (1)...(383): n = a,t,c or g
ggtcattcctgtcctttatcccttacatcctaacctatttaacccaaagcttgattagtttatgatttaatctttctgtgattctttttggaaaaaataaacaaataaataactattggcttatctcccctttgttttcattctagcttaagtaaatgtttaggaattcccttgaggtccagaaacgtggagtcacatcaaattgtgttctattttgcatttttgaacatgactgtggataaatcgcttattttacctgcttttatcagtgtcctgttgggagacaggagcagaaaccactttgcatgtttttaaaaaggaaggaatatgatttttagggaataaggntacaaattattagaaggaatagaggaacaaaaggg

SEQ ID NO: 17157 - DNA, 337 bp, Homo sapiens
cttatctcatctcatgcctcattggtttaatcagctgcaaacttcatctcacctcagggcctttccctctccctagaaaatccatctcagctcaaattcacttactcaaggaaggcgtccttgacctctcccctatcctacccactgtattataagcaatatcgtactacctaatctgtttttgtagagcttaccacaactgttgtatataattgtataattatttgtctaacacctcctgccagagagtagtgtcccataaggaaatggggacatatcaattcttatcatatcaactcagtcccagaacgtatcacattgccaagtacttagtatg

SEQ ID NO: 17158 - DNA, 430 bp, Homo sapiens
ggctttcaggccacgcccctcccagtctgtccacacagctagggagcccagctcccttgctcatggctgcatcacacttccaacttgcccccacccctgccgcccaattccggcccagggagttctccacttgagggtatatcacaaaattcatttgggagcttctttcaacctgtgaccactggctggattagttaagagacttccacagggtcccctgtgaggcacaatatgggatggcttccttagtacacactgggtactgggaatgcatgcaaggcactttccactgccactcctacttttctatttctcattgctccctaaatcaattccagtgctgtgtagagttatgatcttcctgcatgccctgaatttctaggttccccagtgggagtgtatacactgcaggcagtgcactctggggact

SEQ ID NO: 17159 - DNA, 342 bp, Homo sapiens
  misc_feature (1)...(342): n = a,t,c or g
gcagggttgtaagtgcccctttgagaggaagaatgcatatcactgtgtgcctcagttctctcccagcctctcacatacatgtatgtcacctgcctggccctaaggacatttgagacctccctgtgttcttctctttgtcttgggatagcctggcttttaggaagtgttctcaaagaggcaagtgacatttgagcccctacagtggctcaggtgtgaagtcttgggcttttcccctgtggacttggagtgaagccttgtcagtgactgtaatgaccaaatgaggagttattttagcttgngtttgntactatcttctgcatgntaaaggcatnttnnntgcta

SEQ ID NO: 17160 - DNA, 435 bp, Homo sapiens
ggggagcaaaagaagtacataattagaggccttctttaaaccagcttagctgttctttattccaaaatgtgggggttgtggagccagaacacattactgccttagtatgtttatggggtgtagggtaggatgaatcagaccggggctgtgtatgtcttctgtgggctctaggcacttttgcctttgtgggtcccttcctccataaaaacacatgaaaaattatgtttgatgaatatgtcagtataaagacaaatataatccaggttagattcattattatgtatccattactattatattcatttttcctctgattttgaaataaatgaaaattgaaacagttttgtgggctcttgaaaatatcatgggccctaggcactctgctactatgcctcatggataagtcagccctgaatcagatatgcatactggggg

SEQ ID NO: 17161 - DNA, 1017 bp, Homo sapiens
gtgaggatccgaacccaggggtggggggtggaggcggctcctgcgatcgaaggggacttgagactcaccggccgcacgccatgagggccctgtgggtgctgggcctctgctgcgtcctgctgaccttcgggtcggtcagagctgacgatgaagttgatgtggatggtacagtagaagaggatctgggtaaaagtagagaaggatcaaggacggatgatgaagtagtacagagagaggaagaagctattcagttggatggattaaatgcatcacaaataagagaacttagagagaagtcggaaaagtttgccttccaagccgaagttaacagaatgatgaaacttatcatcaattcattgtataaaaataaagagattttcctgagagaactgatttcaaatgcttctgatgctttagataagataaggctaatatcactgactgatgaaaatgctctttctggaaatgaggaactaacagtcaaaattaagtgtgataaggagaagaacctgctgcatgtcacagacaccggtgtaggaatgaccagagaagagttggttaaaaaccttggtaccatagccaaatctgggacaagcgagtttttaaacaaaatgactgaagcacaggaagatggccagtcaacttctgaattgattggccagtttggtgtcggtttctattccgccttccttgtagcagataaggttattgtcacttcaaaacacaacaacgatacccagcacatctgggagtctgactccaatgaattttctgtaattgctgacccaagaggaaacactctaggacggggaacgacaattacccttgtcttaaaagaagaagcatctgattaccttgaattggatacaattaaaaatctcgtcaaaaaatattcacagttcataaactttcctatttatgtatggagcagcaagactgaaactgttgaggagcccatggaggaagaagaagcagccaaagaagagaaagaagaatctgatgatgaagctgcagtag

SEQ ID NO: 17162 - DNA, 523 bp, Homo sapiens
  misc_feature (1)...(523): n = a,t,c or g
gcctgtaatcccagcactttgggaggccaaggctggcagatcacctgaggtcaggagttagagatcggtctggccaacatggtgaaaccccgtctttactaaatatacaaaaattagccaggcgtggtggcacatgcttgtaatcccagctactccggcgactgagacaggagaattgctttaacccgagaggcagaggttgcagtgagccgatagcgggcaattgcactccaacctgggcgatagagcgagactctgtctcagaaagcaaaaaacaaacaaaacattgactttgtcaggaattagctacttcatgattgagggcattaagggaaatgaggctggctttttacttgtagtactctacaacagtaggaaaacattatgtccaagtccttctggaggggctaatgggaaaattgcaagaactgcttaaagagtgagaaatgggatnagnaaggcaanaagggttccaacatanatcaatttccccttaannaacnaatttccgncctcntttcaa

SEQ ID NO: 17163 - DNA, 393 bp, Homo sapiens
  misc_feature (1)...(393): n = a,t,c or g
aattcggcacgagatgtaagatctaagacctggaagggatatatataagccgtttaattcgtccctctgcttaggtacatcaatacctaaatcataaatgagcgatggtttttatccatttgaaaatatttctaaatgcaggtattttgtgtcttcttagtcagtagtatgttctggtgtttaagtctctggcatggtcaagaagttctccctaatgtttgaattcttttctagctgtgcttttatgcccaattgatatgagcaatttagaaatcctagggagatgcatgacattgaaatttcctgaaaagtactcagagttggattacagtagaaacaatgaagaatcgcgccagcctgcagagatataagcagaatatgaaaatgnatagc

SEQ ID NO: 17164 - DNA, 506 bp, Homo sapiens
  misc_feature (1)...(506): n = a,t,c or g
atcttgaatnccttnagctacgacatgattacgaatttaatacgactcactatagggaatttggccctcgaggccaagaattcggcacgaggtaattacatagaggtttaaaataagtttcaggctgagtgtgaactttaagtttcaggcctgtaattctgcagtacttcaggaggctgggggtgggtggatcacttgagcccaggaattcgagactagcctgggcaacatgacgaaacacatctccactaaaaatacaaaaagtagctgggccgtcggtggctcacacctgtagtcccagctacttgggaggctgaggcaggaggaaatctgtctcaataaataaataagcttctagtttgtttcctgtgagagtctttttttttttttnnaaagggngncnnnnngngtaacccagnntgnannncagggnccccnnnttnggcncgnngaantcncnntnnccnggntnaaatngggantnacgggngcaccccnttgcccag

SEQ ID NO: 17165 - DNA, 622 bp, Homo sapiens
  misc_feature (1)...(622): n = a,t,c or g
gcttgtacagatctcctacaataattattttctattttatttctaaggtttatttatttatttattgagacagacagagtttcactcttgtggcccatgctggagtgcaatggtgcaatctcggatcactgcaacctctgcctcccaggttcaagcgattctcctgcttcagcctcctgagtagctgggattacaggcgcctgccaccacactcggctaactttttgtatttctagtagagacgaagtttcaccatgttggccaggctggtcttgaactcctgacctcaagttatccacccacctcagcctcccaaagtgctgggattacaggcgtgagccactgtgcctggcctctaggattatattactagancnatcttcaattattttaccgttctttatcttncttttcangnaggaaatgtccnaaaaattttcaaacccctcantttgnatgcacnttnaaaatcatacatnggcgagcatttagatncnaaccancnaaaaagtccngtgncatttgcantnaaaaannnattggancacaggcttntanttgggncnctgaaactngngggccnaagnncntnaccncaaaggcccggcntntaacggcagga

SEQ ID NO: 17166 - DNA, 419 bp, Homo sapiens
ggaacagtggaactcacactcctgggcttctagaagatctaagtaagaatggtaggctccctgagattaaacttcctgtcaacggttgcagtgacctggaggatagcttcaccatcttgcagagcaaagacctcaaacaagaacctctcgatgaccctacttgcatagacacatcagaaacatctctttcaaatcagaacaagctgttctcagacattaatctgaatgatcaggagtggcaagaattaatagatgaattggccaacacggttcctgaggatgacatacaggacctgttcaacgaagactttgaagagaagaaggagccagaattctcgcagccagcaactgagacccctctctccaggagagtgcgagcgtgaagagcgacccctctactctccttcgcacatgtctcc

SEQ ID NO: 17167 - DNA, 462 bp, Homo sapiens
  misc_feature (1)...(462): n = a,t,c or g
tttgnnannccnnntttgaanaancgctatgacatgattacgaatttaatacgactcactatagggaatttggccctcgaggccaagaattcggcacgagagaacgtaaaactgaggacagaggaggaaagcagggtgacccctgatgttgccctagaaaatggaaaacaaaacacagcaaaacagaaaaacagaagatctgactctgcctttagccaggaaaacagtttgggggagtaaaaagtattagggaaaagagtgggcattttgcctggaaaaaaggtttctagagccatctgggctttccgggaacctggaccagactctggcccagtaggatgtccccgtgtcctccccagcagagcaggaacagggtgatacagctgtccacttcagagctaggagagatggaactgacttggcaggagatcatgtccatcaccgagctgcagggtctgaatg

SEQ ID NO: 17168 - DNA, 441 bp, Homo sapiens
gcggcacgagttgagtatttcaaatattaagtacattgaggctcatgagaattgctaatctgccgtgtgaaactgcagagttgtttcccaagggtagagatgcattcacatccacccacacagtacaaagggggaaatgattacgctggcctggattttttgtaatagtcccgtgacatggcttccacattgctctgtgggctgtggttaaagaacctaatctagaacaagacaagacttgtagatttaaaaagtcacctaagctgtttctttcctagacaaatgggattctagtttgggttttattttattttattattttttgagacagtctcattctgtcatccaggctggaatgctgtggcgcaatctcggctcactgcaaactctgccccctgggttcaggctattctcctgctcagcccacctagtagctgggat

SEQ ID NO: 17169 - DNA, 490 bp, Homo sapiens
  misc_feature (1)...(490): n = a,t,c or g
ttgaattggatacntttgactgattacgaatttaatacgactcactatagggaatttggccctcgaggccaagaattcggcacgagataaactccaactgtcacggtaagttgtgtttttggagactcttccaactccgccaggctgtaaacaatgactttgccttagaagttgcagttgaataggaagagcttggaagagcgctttgagttgaattgccaagtcggagcttttgaagcttctccgaagtttgctcgaattgcagcccgaactacatcttttccacaagggctggacatatttcaggaatctagtatttncttggggaatggtttccttcccctgcgctggaagctgntcttcatgntttccccccctttcatttccatgggttgaaactnaaccgcctnngttggaggaaagcctttgtaggactntggaganccgacagacattccctgggcattttggacccaacgncttggttctg

SEQ ID NO: 17170 - DNA, 258 bp, Homo sapiens
gggcaggcccccggggaggggccagagttttctatgaatctatttttcttcagactgaggccttttggtagtcggagcccccgcagtcgtcagcctccctgacgtctgccaccagcgcccccactcctcctccttttctttgctgtttgcaatcacacgtggtgacctcacacacctctgccccttgggcctcccactcccatggctctgggcggtccagaaggagcaggccctgggcctccacctctgtgcagggca

SEQ ID NO: 17171 - DNA, 417 bp, Homo sapiens
gggacaaagtcaactggactgctgagtgagagggcaggggcagttgaagggaacatgaattgctggaacagctacataaaatagtgatgtagccaagtcatgctatttaaattataattctccactgtgtttagaataacatctgaggttcttaacctggccttggaagggtatcacttttacttgtaacctggaatggctttataatgtgctagctaattgctactctcatcttgtattttaactcctaatttacccttcaggtctcagcttcagaacattcacttataaagaaaccctgctgattaaatctctcttgggcttcctcccgaaatgtgagactatactttaaagatgtatggttagagtccaattgccattgcctttcttgtttacagatagtgcaatggcgcaatc

SEQ ID NO: 17172 - DNA, 569 bp, Homo sapiens
aattcggcacgagaggggctgtctgcttgcctctttccacaacttgttcttggggatcctcaagcatatactgtcatcatcttggaaagaaaaggctgagaacgtaaaactgaggacagaggaggaaagcagggtgacccctgatgttgccctagaaaatggaaaacaaaacacagcaaaacagaaaaacagaagatctgactctgcctttagccaggaaaacagtttgggggagtaaaaagtattagggaaaagagtgggcattttgcctggaaaaaaggtttctagagccatctgggctttccgggaacctggaccagactctggcccagtaggatgtccccgtgtcctccccagcagagcaggaacagggtgatacagctgtccacttcagagctaggagagatggaactgacttggcaggagatcatgtccatcaccgagctgcagggtctgaatgctccaagtgagccatcatttgagccccaagccccagctccataccttggacctccaccacccacaacttactgcccctgctcaatccaaccagattctggcttccactt

SEQ ID NO: 17173 - DNA, 401 bp, Homo sapiens
gaactgggacagggtggaggaggcaggatgtgaaaggtacacactattggtaatgttttatttcctaggctggtcatgagtacatgggtgcccattttaatactgatagtgtaaactgtacacacatacactctttggtatatattttactttttacaataaaaatttttaaaaagacagacacaggaagacattagtaaagcaataaaagatttactttttaagtttcagaatgctccagtgaaaattccacacgattccctcacagtgtctactatgacttctacaatcaggctggataaagtaaagctgactcaatgacgtgtgctggtggagataacacatgcacagagctgccttgctgccactgtggggtcagactcaaatctctcctgggaaca

SEQ ID NO: 17174 - DNA, 528 bp, Homo sapiens
  misc_feature (1)...(528): n = a,t,c or g
ttggnnnccaacagcttcngaatcctnacgaatatgacatgattacgaatttaatacgactcactatagggaatttggccctcgaggccaagaattcggcacgagggaaggtgtagctctgttctcttcggaagacctcgttttctaaaggctggactaaatggctgcagaactccctttggcaaaaggcatgcgctcactgcttgcttgtcagaaacactgaagccatttgccccagtgtggtcaagcagccatgctttctgggcattttcgtcctcccataatttcatatttccgtacccctgaggaaacaaaaaggaaatgaggagagaaagttactgttaagggtggttaacattttttttgttttgttttgttttggttttttttttttngaaacaaagtnnggntttgncncccaggctgnantgcaggggcccantntcggntnatagnaagctccgcctccngggttcatgccnttntccngcctaagcntccaaagnanctggnnctacaggngcccgc

SEQ ID NO: 17175 - DNA, 405 bp, Homo sapiens
gcggcacgaggggctcggcgtggtgggttggccgggcgcagtggctcatgcctgcaatcccagcactttgagaggccgaggcgggtggatcacctgaggtcaggagttcgggaccagcctgaacaacatggtgaaaccccgtgtctactaaaaatacaaaacttagccgggtatggtgcgagagtctatgctcccagctatttgggagactgaggcaggagcatcacttgaaccaggtaggcggaggttgcagtgagccgagatcgcaccactgcactccaaccttggcgacaagagcgaaaatccgtctcaaaaaaaagaaaagtcatgaagggatttcagaccaatggtctgtatttgaggaaagaaatcaaagtttaaaggaagatacaagaaagctaagtt

SEQ ID NO: 17176 - DNA, 378 bp, Homo sapiens
agaagggagatgccaaagtccatggcatcttctggtttgatccttggggttgtctgtactagaggttttcgggtggctcggaaggtaacaaaggctgtgacagcagagaacaagatccagatcactaggaacctccaccagtgcagcttcactgtgaaatagaggggaacaacccacatctgaaagagggtcaccatattgtaggagcgtgggtgcctctgcttccactgcaccaggagcagctgggccaccaccaaggttgcgatgaggatgaggaccatttcagcatgcatagcttcatggccacggtgcttggcatgcatgcgtgcgtgctcgaccctccattgctcttctggagagagatctgacatatcaacc

SEQ ID NO: 17177 - DNA, 512 bp, Homo sapiens
  misc_feature (1)...(512): n = a,t,c or g
gngnnnnnagnnnntgtnnnnntntgaannccnttntatgaaaaccntntgacatgatnacgaatttaatacgactcactatagggaatttggccctcgaggccaagaattcggcacgagggattgccacacggctcacattgcatgcaagtttgctgagctgaaggaaaagattgatcgccgttctggtaaaaagctggaagatggccctaaattcttgaagtctggtgatgctgccattgttgatatggttcctggcaagcccatgtgtgttgagagcttctcagactatccacctttgggtcgctttgctgttcgtgatatgagacagacagttgcggtgggtgtcatcaaagcagtggacaagaaggctgctggagctggcaaggtcaccaagtctgcccagaaagctcagaaggctaaatgaatattatccctaatacctgccaccccactcttaatcagtggtggaagaacggtctcagaactgtttgtttcaattggccatttaa

SEQ ID NO: 17178 - DNA, 424 bp, Homo sapiens
gcgaacgagtcaaccggatcggtgactgtggagggcgagctgagccctggccgccgccacaatgggccgcgagtttgggaatctgacgcggatgcggcatgtgatcagctacagcttgtcaccgttcgagcagcgcgcctatccgcacgtcttcactaaaggaatccccaatgttctgcgccgcattcgggagtctttctttcgcgtggtgccgcagtttgtagtgttttatcttatctacacatgggggactgaagagttcgagagatccaagaggaagaatccagctgcctatgaaaatgacaaatgagcaacgcatccggatgacggttccctgtctctgaaagacctttctctggaagaggagtctgcattgtagtgtctcaaagacacaataaacttcctatggtctgcaaaaaaaaaa

SEQ ID NO: 17179 - DNA, 500 bp, Homo sapiens
  misc_feature (1)...(500): n = a,t,c or g
gaattancagntatgacatgattacgaatttaatacgactcactatagggaatttggccctcgaggccaagaattcggcacgaggtcctaactacttgggaggctgaggtggaaggatcgcttgagcctgtgaggttgaggctgcagtgagccatgatcatgccactgcactccagcctaggtgacagagcaagaccctgtctcaaaaaaaagatttaaaaaatacagtctttagtgtctattcattgcatttttattacatcctgacaaactgaaaagactaaaatcttttcctatttgaaatattctatttaaattcacataaaacttgttttctttttaaatactatggtattatattatagtttgtgatattgctgtaatgatccanatcttatcttcctctctctttttataataaaatgatatantancnncaaggagtgatacagcacntaaaataatcnttgttaaatttccttattntannggangtttct

SEQ ID NO: 17180 - DNA, 428 bp, Homo sapiens
acccgctatgactgattacgaatttaatacgactcactatagggaatttggccctcgaggccaagaattcggcacgagtgggtgtggtgacgggtgcctgtaatcccagctactcgggaggctgagacaggagaattgcttgaacccaggaggcagaggttgcagtgagccgagatggcgccactgcactccagcctggaaaacaagagcgaaactccatctcagaaaaaaataaaaaaataaaaaataccagctacgcagcctgtttattaagcttccataatgagagcttccaatccaggtgatttgtgttcctgtctcgtccatattggccccaaactccaagatcaaatacgcttctctgacttcaaagctgaaggtttccgcaggtccgtacccccgtccgaggactgcctccaactggagct

SEQ ID NO: 17181 - DNA, 418 bp, Homo sapiens
gaccatgttggcttcccctactgtatccctagtgtctaggacagagccggcactcaggagatacttgttgaaagagtgactccacaatctacccatgtggccttgggcagccgtcttgacttctctgaattttgattgcttgcttatagtggtagatataataaatgcccatctcccagcggcactgtaaagcttaaatctatttcaaggaaactagcccagcacatcacgttagttttcttcctctgactcttaacatttcagcttcaaaggctttgtgctcctcttggagcccttaccttactcagccaggaagcagattattttgtggttgatagttccaatgggaatctgagccctaagttgagttattaatgacctttttatagcacactcttgcgccctcacagggattttt

SEQ ID NO: 17182 - DNA, 325 bp, Homo sapiens
agttccttggggtaacgatgggggtccatcctcttcaagtaagactacaaacaagtttgagggactatcccagcagtcgagcaccagttctgcaaagactgcccttggcccaagagttcttcctaaactacctcagaaagtggcactaaggaaaacagatcatctctccctagacaaagccaccatcccgcccgaaatctttcagaaatcatcacagttggcagagttgccacaaaagccaccacctggagacctgcccccaaagcccacagaactggcccccaagccccaaattggagatttgccgcctaagccaggagaactg

SEQ ID NO: 17183 - DNA, 430 bp, Homo sapiens
accagctatgacatgattacgaatttaatacgactcactatagggaatttggccctcgaggccaagaattcggcacgagggaatctcgaaggagttagaaatgaaaaaagtatatcactatggagattatgtgactttgaagtgtgaagatgggtatactctggaaggcagtccctggagccagtgccaggcggatgacagatgggaccctcctctggccaaatgtacctctcgtgcacatgatgctctcatagttgaaaaggcaataatgcacatgaaaaccctaaagaagtggctatccatttacattctcaaggaggcagcagcgttcatccccgaactctgcaaacaaatgaagaaaatagcagggtccttccttgacaaagtactatacagctgaagaacatctcgaatacaattttggtgggaa

SEQ ID NO: 17184 - DNA, 340 bp, Homo sapiens
ggacggccacctgtaatcccagctactcgggaggctaagacaggagaatcacttgaacccaggatcttgcagtgagccaagatcgcaccactgcactccagcctggccaacaagagtgactctgtctcaaaaataaaaaaactcaaaaagctaaataaccataaactttggtctctgaagtgaaactggacatgtgttatttttctcacgcctcttggttcctgctagttctgtgcttgcatacaaagatttcctgagttatttaaagaggcattattctcaggagttggcatgaagaaggttcctagtaaatactgagcactattctgcctgagctgtt

SEQ ID NO: 17185 - DNA, 430 bp, Homo sapiens
ttgacatgattacgaatttaatacgactcactatagggaatttggccctcgaggccaagaattcggcacgagaactggacaaaatatgtacactaacactaaaaactattaaagatttcattgaaaatgtttgcctaaatcgtacaatctcattttatcatgtagtctgttgccacgacacttacagaagccagtaattaactcaggattccagagtgaaagatagaaagctcaatgaaagctattgtcaatttgattctatagtaaaacgttcaggactttctcagagagagcctcagctaagccatattacttatcattgccatgcagcaaataccaactccagtgttggactggaaatttataacttacataagacagtcaatgtcattcaatccatgatgtatttataagttaatgtatttataag

SEQ ID NO: 17186 - DNA, 354 bp, Homo sapiens
ggaagcagaggtccaggttccaactcttgattctatcacaaaacactgcacccgaggcagccaggcagcttccgaagacctcgttttcgttcttgttgcccaggctggagtgcaatggcacagtcttggctcactgcaacctccatctcccaggttcaagtgattcttccacctcagcctcccgagtagctggtgttacaggcacccgccaccacgcctggctaattttgtatttttagtagaaacggggtttcactatgtggccaggctggtctcaaactcctgacctcaggtgatcagactgcctcagcctcccaaagtgctgggattacaggcataagccaccggacctgg

SEQ ID NO: 17187 - DNA, 349 bp, Homo sapiens
ccagcttattcatttctattcattcaagtcataggccccattatttggatgatactctatttagtctagaagacagaaaaagaaacatctccatctaataaagaagtctggacaatgcaaaaagtaaaagtacatagtgtttaacataaggcacatttccaaaagaaaaatactacataagcaatgataaaattacatttgtcttgggtaaagcaacaaggcttacagtgtaagtacattaagtagttgtaggtaacctcataaaattctatcctactgctattagtaacctccccaagaattaagagcaattatattttttacaacagaacagtttttcttcttggaa

SEQ ID NO: 17188 - DNA, 303 bp, Homo sapiens
ggcccattaataattatatgatggagtactatatagccgttaaaaatgacatctatttaatgacattactatttaattatatggcagaatttagataattgcattttagaggaagttgtaatactatttatatatttttcttctttttttcattgtcatagagtcatgtttttataatttataaagttatgtatcaccatacattgacaagactagactatgtactctgaaatgttaacagtagttatctctgaatggtagtattcaaggtaacttttattttctttttgcccttctgtatta

SEQ ID NO: 17189 - DNA, 237 bp, Homo sapiens
  misc_feature (1)...(237): n = a,t,c or g
gtggaaatctacataagcaaatgaaaataatgaaggagagtctcttacgaaaaataatttggaagctactgagagcggttgtagccagtgacacagaaattcctgcacaggttaagaactacagggaagcacttgcctgacaaactcaatagtgaaaagaagtcctattaaagagattttacaataaacatgttctaagaaacatacattgccctgggcaatanngcaagactccgt

SEQ ID NO: 17190 - DNA, 440 bp, Homo sapiens
  misc_feature (1)...(440): n = a,t,c or g
ttcncctttgaanacctttgangacccgattacgaatttaatacgactcactatagggaatttggccctcgaggccaagaattcggcacgaggcgtgggaagtgctgctctaagtggttatgacttgctgtcaagatggacagcagacagacttgatgctgtcgtcgtatcaaccaactacagattagcacctaagtatcatttcccaattcaatttgaagatgtatataatgccttaaggtggttcttacgtaaaaaagttcttgcaaaatatggtgtgaaccctgagagaatcggtatttctggagatagtgcaggagggaatttagctgcagcagtgactcaacagctccttgatgacccagatgtcaagatcaaactcaagatccagtctttaatttatcctgcccttcagcctcttgatgtagatttaccgtcat

SEQ ID NO: 17191 - DNA, 345 bp, Homo sapiens
accggatcctgaggaggcagctgcggtggcagctgctgagttctcggtgaaggtatttcatttctcctgtcccctcccctccccaccccatctattaatattattcttttgaagattcttcgttgtcaagccgccaaagtggagagtgcgattgcagaagggggtgcttctcgtttcagtgcttcttcgggcggaggaggaagtaggggtgcacctcagcactatcccaagactgctggcaacagcgagttcctggggaaaaccccagggcaaaacgctcagaaatggattcctgcacgaagcactagacgagatgacaactccgcagcaaacaactccgcaaac

SEQ ID NO: 17192 - DNA, 341 bp, Homo sapiens
gatagtttctaagataaaacatcattaatttttaccatgactggtagctgctattggcttgcatttactgaggttctcatgtttctactatttaggcttaaaaatatatgacaaagtatgtgatcataataatgccataattcatttagtatagtcatctggtcgggagttataaacttttttgaagtcagacttgtttgtttgtttttttaaatagtattaaatgagaatttcttatactatcagttgtcacaaggtgaacaaatataagtaattaagtcaaagttttgaagcacatattatggcttatgctgttgaaaactctccagtgttttagcata

SEQ ID NO: 17193 - DNA, 372 bp, Homo sapiens
gtttggccatcttttaaattcatatttgtgtgttttctaatggtcagaaaatacttgtatatggtttatagataaaagcatttaatgtgaggggtgcatttatttattggggtacatcatcagaagtctagagaaccagaaagttaactccttctctagcaccagtatcatgagagacctctgaatgccattttttaaaaaggaaagaatttgtcaattaaaggggaatagaaactgctctctggctaggttgtgattcatgtcaaataggcctgtgacttaaggagagtcaggttaactccagagtatgttttgtctctggtcccaaaacttagcagtgtggaagcctcattgggatcagggttttatttt

SEQ ID NO: 17194 - DNA, 398 bp, Homo sapiens
  misc_feature (1)...(398): n = a,t,c or g
gctcttggggtggtgagaaggatcttcgagaaatcgtgttcagtatttcaagctctatttctgtggcacatgtcttttgagaggcatcttcacctcttctgtgatgacttggtatgttgtttggtagagagatcttgattttcggaggatcttgcatttttctagggaatattttgtagttgtgtttgtgtgtttttgccttggtccccattatgggatgcattaggactggcctatgcatcgaaaatctttttgtttgtaaacgtttaaaaacaaagttccccggccaggcacagtggctcacacctgtaatcccagcactttgggaggccaagatgggccggatcacgangtcaggagttcgagaccagcctggccaacatagtgaaaccccatct

SEQ ID NO: 17195 - DNA, 371 bp, Homo sapiens
ggactgacaaatgctggagaactggaaagtgactctgggagtgacaaggccaacagcccagcaggaggtattccctccacctcttcttgtttgcctagccccagtactccaagtgcagtctcctcatccacagtttcctcacatttccagtactatgaatggaaccagcaacagccccagcggtaaccaccaatcttcttttgccaatagacctcgaaaatcatcagtaaatgggtcatcagcaacttcttctggttgatacctgagactgttaaggaaaaaaattttaaacccctgatttatatagatatcttcatgccattacagctttctagatgctaatacatgtgactatcgtccaatttgctttc

SEQ ID NO: 17196 - DNA, 457 bp, Homo sapiens
  misc_feature (1)...(457): n = a,t,c or g
nctttgataacagctatgacatgattacgaatttaatacgactcactatagggaatttggccctcgaggccaagaattcggcacgaggctttgatgaagtcccaccaacctcagatgaaaatgtcactgtgactgagacaaaattcaacaacattcttgttcgggtatatgtgccaaagagaaagtctgaagcactaagaagggggttgttttacatccatggtggaggctggtgcgtgggaagtgctgctctaagtggttatgacttgctgtcaagatggacagcagacagacttgatgctgtcgtcgtatcaaccaactacagattagcacctaagtatcatttcccaattcaatttgaagatgtatataatgccttaaggtggttcttacgtaaaaaagttcttgcaaaatatggtgtgaaccctgagagaatcggatttctggagatagtgca

SEQ ID NO: 17197 - DNA, 361 bp, Homo sapiens
gcggcacgagtgatggtgctttccctttaactgcctcgctccttcctgccattctgatggacactccctgcctgctccttggaggttttccatgctataggtagattgttttcctcccaggtagcactgagcagtttgcctccctctgcttttcctttggttttctcaaagtgtcctctgaggactacctacaggaggggcacctgtgtgactgatggaaaggtaaattcctgggcctcctccgctggagccactgaatcaaaatccctaggggtgaggccatgcaatcggattttcatgtcctggaaaaattcagcaccattgttcctcccagccctgcatatgcaacaacaaagggatg

SEQ ID NO: 17198 - DNA, 350 bp, Homo sapiens
ggttagagatgcagaagcttgggcctgccgaatcagaatctgcattttaataagatcccctggcgattcgtgcacccatcacaattagagaagcactgttctagcacgtagctgcaaatgtgttttcaaactttgctagagtcctgctattgtagtattgggctatctggtctggtatgtactccagctgttttatttacattctggaatgatgacacttaatttgagaaggcttgtctttgccactaattaaagtaaaaaaccagtcttacggtgtgtgcttatatttataagcaccacctagcaacagcatcaggcaattcttagcaaaataagtgagacatttccct

SEQ ID NO: 17199 - DNA, 387 bp, Homo sapiens
gcatgtggctaatttttatatttttagtagagatggggtttcaccatgttggccaggctggtctcaaaactcctgatctcagatgatcagcctgcgtcagcctcccaaagtgctgggattacaggcgtgagccatcgcgcccagcctcacacaggtctttaggtggctggtgtcacagggtggacttcagtcaggcccagtcagagcagctcctcctgcctggcctatcatgagggttcaggtccttacaccttattgtctgttttcacagtgagaatatgggaaattctctggcatctgttttctgggaaggtttactctatttcagcaccaaggacctaagacaggcagctgcatttcctaatcctgattccttaaagtaaactg

SEQ ID NO: 17200 - DNA, 349 bp, Homo sapiens
gtgatatataaactcagacccaaacattaatcagttcttcaaatatctactcatcttcctaattaccatactaatcttagttaccgctaacaacctattccaactgttcatcggctgagagggcgtaggaattatatccttcttgctcatcagttgatgatacgcccgagcagatgccaaaaagactttttcatagagaagaggctttcttttgtaaagacagaataaaaataattgttatgtttctgtttgttccctccccctcccccttgtgtgataccacatgtgtatagtatttaagtgaaactcaagccctcaaggcccaacttctctgtctatattgtaatat

SEQ ID NO: 17201 - DNA, 314 bp, Homo sapiens
  misc_feature (1)...(314): n = a,t,c or g
ggaagaatatgcactaaagtgagaagcacttattagagggaggcataagttgcatggaaaacaagagtcatctatttcttatcagtctggaattagccaataatataacttctgcatttgtgaattgttccactataaaaacatgtaatgtttgttcttaagcagtgtaattctattttttaatcttactcttgatattatgtctcttaaatatgtttttccatgcctcaaggtgtnagcancacacctagcanatgtatgtgcanctgcncnattttgnntnnntanngattnnnnatacgctntcncntttg

SEQ ID NO: 17202 - DNA, 551 bp, Homo sapiens
gggctcgggcagtcgcctgtccaaggagctgctggccgagtaccaggacttgacgttcctgacgaagcaggagatcctcctagcccacaggcggttttgtgagctgcttccccaggagcagcggagcgtggagtcgtcacttcgggcacaagtgcccttcgagcagattctcagccttccagagctcaaggccaaccccttcaaggagcgaatctgcagggtcttctccacatccccagccaaagacagccttagctttgaggacttcctggatctcctcagtgtgttcagtgacacagccacgccagacatcaagtcccattatgccttccgcatctttgactttgatgatgacggaaccttgaacagagaagacctgagccggctggtgaactgcctcacgggagagggcgaggacacacggcttagtgcgtctgagatgaagcagctcatcgacaacatcctgggaggagtctgacattgacagggatggaaccatcaacctctctgagttcagcacgtcatctcccgttctcagacttgcaagtcct

SEQ ID NO: 17203 - DNA, 714 bp, Homo sapiens
gagaagcgggacgttcaccatgggaagaaaatcgctgtaccttctgattgtggggatcctcatagcatattatatttatacgcctctcccagataacgttgaggagccatggagaatgatgtggataaacgcacatctgaaaactatacaaaatttggctacatttgtggagctcctgggacttcaccattttatggattcctttaaggttgtcgggagctttgatgaagtcccaccaacctcagatgaaaatgtcactgtgactgagacaaaattcaacaacattcttgttcgggtatatgtgccaaagagaaagtctgaagcactaagaagggggttgttttacatccatggtggaggctggtgcgtgggaagtgctgctctaagtggttatgacttgctgtcaagatggacagcagacagacttgatgctgtcgtcgtatcaaccaactacagattagcacctaagtatcatttcccaattcaatttgaagatgtatataatgccttaaggtggttcttacgtaaaaaagttcttgcaaaatatggtgtgaaccctgagagaatcggtatttctggagatagtgcaggagggaatttagctgcagcagtgactcaacagctccttgatgacccagatgtcaagatcaaactcaagatccagtctttaatttatcctgcccttcagcctcttgatgtagatttaccgtcata

SEQ ID NO: 17204 - DNA, 540 bp, Homo sapiens
  misc_feature (1)...(540): n = a,t,c or g
ctgaatacccnttatgacatgactacgaatttaatatcgactcactatagggaatttggccctcgaggccaagaattcggcacgagcggcacgagggctcggcgtggtggctcatgcgtgtaatcccagctctttcggagatcaaggcgggcagatcgctttgaggtcaggaattcaagaacagcctggccaacacgggaaaaaccctgtctctaccaaaaatacaaaaattagccaggtgtgatggtgaccacctgtagtcccagctactcaggaggctgaggaaggagaatcacttgaacccagcagtttgaggctgcagtgagctagtcatcccattgtactccagtctgaaaacagcaagaccccgtctctaaaaaattaaaaaaaatatacaacataaacctaaactataaaacagcaatggttccaggtaatgttggccgtgacatttaaagaacaaaattgcttatgaagttgagatggttgccaaattgtaaattcctaactcagggctttgaaaaatcaattgtaggaaag

SEQ ID NO: 17205 - DNA, 347 bp, Homo sapiens
gaagtcatcccctcttctcctcaggaactgctcaaacctgtgccccaaagatgagggcccaggaggacctcgagggccggacacagcatgaaaccaccagggacccctcgaccccgctacccacagagcctaagtttgacatgttgtacaagatcgaggacgtgccaccttggtacctgtgcatcctgctgggcttccagcactacctgacatgcttcagaggtaccatcgccgtgcccttcctgctggctgaggcgctgtgtgtgggccacgaccagcacatggttagtcagctcatcggcaccatcttcacgtgcgtgggcatcaccactctcatccagaccacc

SEQ ID NO: 17206 - DNA, 357 bp, Homo sapiens
gcgtccgcatccccctgtgcaagtccctgccctggaacatgactaagatgcccaaccacctgcaccacagcactcaggccaacgccatcctggccatcgagcagttcgaaggtctgctgggcacccactgcagccccgatctgctcttcttcctctgtgccatgtacgcgcccatctgcaccattgacttccagcacgagcccatcaagccctgtaagtctgtgtgcgagcgggcccggcagggctgtgagcccatactcatcaagtaccgacactcgtggccggagaacctggcctgcgaggagctgccagtgtacgacaggggcgtgtgcatctctcccgaggccatcgttactg

SEQ ID NO: 17207 - DNA, 445 bp, Homo sapiens
tatgacatgattacgaatttaatacgactcactatagggaatttggccctcgaggccaagaattcggcacgagcactggtgaaaataggcatctgcctatctttacctttaacgtatgctaattagattttttaagatgtagaaatatatactaataacatgaatataatttaaattctttatgtttacgagtattcctctttatttcactttccttgattagatgttcataaaattcactatataagttaagaataagtccagttatgtacagaaagataaaatttaaaaagcttgtctctttattattgacattctgtcagcttccaaaattttttgaactgactagaatggtgtatgtaattggctattttacgttgacacttttcattctaacttgtaagaatttcggtataggctgggtgtggtggctcacacctgtaat

SEQ ID NO: 17208 - DNA, 347 bp, Homo sapiens
gggcactaatgatattagcgagtgtgaagtacatgtgccccataaatagaaggtatcgaagatatttacaaaacctgcccttggccaggcgtggtccatgcctataatcccagcactttgggaggccgaagtgggtggatcataaggtcaggagtttgagaccagcctggccaatacggtgaaaccccatctctactaaaaataaaaaaattagtcaggcgtggtggcacacacctgtagtcccagctactcgggaggctgagacagaagaatcgcttgaactcgggcggcggaagttgcagtgagctgagattgcaccactgcactccagcctgggcaacagtgag

SEQ ID NO: 17209 - DNA, 336 bp, Homo sapiens
  misc_feature (1)...(336): n = a,t,c or g
ggtcctctgggccagctgcccgccctgcagtggaaggaaagggcccccagcagctctgacactgccccgggtgcaatgccgagcctctcggtacccgatcgccgtggattgctcctggaccctgccgcctgctccaaactccaccagccccgtgtccttcattgccacgtacaggctcggcatggctgcccggggccacagctggccctgcctgcagcagacgccaacgtccaccagctgcaccatcacggatgtccagctgttctccatggctccctacgtgctcaatgtcaccgccgnccacccctggggctccagcagcagcttcgngccttt

SEQ ID NO: 17210 - DNA, 451 bp, Homo sapiens
  misc_feature (1)...(451): n = a,t,c or g
aaaccnntattacatgattacgaatttaatacgactcactatagggaatttggccctcgaggccaagaattcggcacgagagaggcagcgccaagaagaggcctttgccgctggtcgggattgggatgtcgaagaacacagtgtcgtcggcccgcttccggaaggtggacgtggatgaatatgacgagaacaagttcgtggacgaagaagatgggggcgacggccaggccgggcccgacgagggcgaggtggactcctgcctgcggcaaggaaacatgacagctgccctacaggcagctctgaagaacccccctatcaacaccaagagtcaggcagtgaaggaccgggcaggcagcattgtcttgaaggtgctcatctcttttaaagctaatgatatagaaaaggcagttcaatctctggacaagaatggtgtggatctcctaatgaagta

SEQ ID NO: 17211 - DNA, 464 bp, Homo sapiens
gatctacttcatggtgtcatctctgacttacaccttcccatatgtttcttgtttagcatatgtttactgaaagcatgctatatgcaaagaattgtgtgacagtaaggaaaggggaggagaaattaggaaataaaagatgtatgagacatggtaactgctcctcaaatcttattcctctgtgaagtgaatttagatgcattcttaaatttattttttatttgtataattttatatttccaaaaaaatactagagtcatacaaagaattcttggacaccttcatcaagatttcccagatgggcccaggcgtggtggcttacacctgtaatcccagcactttgggaggccaaggtgggcggatcacctgaggtcaggagttcaagaccagcttggccaacatggtgaaatcccgcctctacaaaattagctgggcatggtgacacatgcctgtaatcccagctactc

SEQ ID NO: 17212 - DNA, 333 bp, Homo sapiens
gctggagtgtaatggcgtgatcttggctcactgcaacttcttcttcccagattcaagtgattctcatgcctcagcctcccaagtaagtgggattacaggcacatgccaccacacccagctaatttttgtattattagtagagatgaggtttcaccatgttggccaggctggtcttgaactcctgacctcaagtgatcctcctgcctctgcctcccaaagtgctgggattacaggcatgagcctgtgcctggcctctgttatctttttaatgctctcttccttactggcatactttgtttatcatgcatcctgcagcagggcaggcagtacagt

SEQ ID NO: 17213 - DNA, 337 bp, Homo sapiens
gcttcaccaccagcctggcccttgcgggcctgacgccgcccagcgacagggccattgatggcctcaacctcctccccaccctcctgcagggccggctgatggacaggcctatcttctattaccgtggcgacacgctgatggcggccaccctcgggcagcacaaggctcacttctggacctggaccaactcctgggagaacttcagacagggcattgatttctgccctgggcagaacgtttcaggggtcacaactcacaatctggaagaccacacgaagctgcccctgatcttccacctgggacgggacccaggggagaggttcctctcagctttgca

SEQ ID NO: 17214 - DNA, 474 bp, Homo sapiens
aaacccctattacatgattacgaatttaatacgactcactatagggaatttggccctcgaggccaagaattcggcacgaggggtgttcctacttagcctcagtttcttcattttactaaatctttgagtgttaccccagatgagtcctctgttaccacgattacggtgaggcagccctgccttcaaggaggtctctaggttgaactgctcctagggtgtggggcctcatctggtgacgttagtaccccctggaccagtgtagaagctgaggaaaattctacacttcattttttaaaatgcctttcaggtaaaggttgttgctgttgatgcagagttgaatgtcttctatgaggaaagtgtgcattttgacagagatcttccagaatttgggactcagggcggtgttcatgtgcacaaggatgggctgacggtcacttctccagtactaatgtgggtccaggcactggatatcat

SEQ ID NO: 17215 - DNA, 265 bp, Homo sapiens
aaatgtgatataacaattatccttcatacagcaaaagatgaaaatcccttcatgttataactcacactaattttgctagttttttattagagcattacaattaagacattaaattataaacttatgtggtatatttagaaattaaattataaaataatacatgatactttcaaggtgtgatgtgccaacaaaatttaaatttttctcattaggattcagatttcacattaggcaaacagtttggaagattctgtgatgtatttac

SEQ ID NO: 17216 - DNA, 391 bp, Homo sapiens
ggacttatctagctttcacagattcagagtgcgtttcaaacatcatcgtgaaactacctccaaaaattctgtaactaccattctctgtacaactatcttggtcctttttacactttatagtcccctcttcggggatatgttccaagatcccccgtgaatgcctgaaactggatagtaccaagtctgattataattactggaaacacatttctgttcctgtcttctatccacaaatttaatgccttttccatcttaactaagcacttatcatggaccgtggctataatttttgcagtttgaagtgcaacagcatgactagcatagattccttcctcaaaatgttatggtagaagattcatttttagcatagatgttatcaatctcagcatat

SEQ ID NO: 17217 - DNA, 354 bp, Homo sapiens
cctgggtgtacctgcctaccagacacgtgaccttgcaagagggctattaaaagtctcactttcactgttctttgtgcctctaagttcactctttgggtttggacgggtgagcatgtttctcgcactacgaaaaaactgatttttttctttaagacagagtcttgctgtgtcgccaggctggagtgcagtggtgccatctcggctcactgtaacctccacctctcaggttcaaacaattctcctgcctcaacctcctgagtagctgggactacaggcgcacgccaccacagccagctactttttgtatttttagtagccgacagggtttcaccatgttggccagatggtcttgat

SEQ ID NO: 17218 - DNA, 864 bp, Homo sapiens
ccagagcggaagagggaggtgaatcaggcgccgggtagtgggttgctgggctgggcttgctgaggtagaggcagcgccaagaagaggcctttgccgctggtcgggattgggatgtcgaagaacacagtgtcgtcggcccgcttccggaaggtggacgtggatgaatatgacgagaacaagttcgtggacgaagaagatgggggcgacggccaggccgggcccgacgagggcgaggtggactcctgcctgcggcaaggaaacatgacagctgccctacaggcagctctgaagaacccccctatcaacaccaagagtcaggcagtgaaggaccgggcaggcagcattgtcttgaaggtgctcatctcttttaaagctaatgatatagaaaaggcagttcaatctctggacaagaatggtgtggatctcctaatgaagtatatttataaaggatttgagagcccgtctgacaatagcagtgctatgttactgcaatggcatgaaaaggcacttgctgctggaggagtagggtccattgttcgtgtcttgactgcaagaaaaactgtgtagtctggcaggaagtggattatctgcctcgggagtgggaattgctggtacaaagaccaaaacaaccaaatgccaccgctgccctgtgggtagcatctgtttctctcagctttgccttcttgctttttcatatctgtaaagaaaaaattacatatcagttgtcctttaatgaaaattgggataatatagaagaaattgtgttaaaatagaagtgtttcatcctttcaaaaccatttcagtgatgtttataccaatctgtatatagtataatttacattcaagtttaattgtgcaactttt

SEQ ID NO: 17219 - DNA, 393 bp, Homo sapiens
gagcctcgaagtactatggtagaaatggcgccatcttccttttcatgcttaaaaaccaccacctgagtatctccaacttctgagaggtaaacactgtcacagtgtcccatttcttcaaggacaggaggtgtcaatctaggaagagctgtagcaccaacagttttacaaagtcttcggagatcccattttgagtttagcctcactaacatgatattatatttatttgcataatgaagagccatgtctgccactttgccacctgttactacgacatttgcaccagtatcagcaatagctttgacttgtgcatccatgaggttttcttctcccttactaaaattcatcaattcttcagcagtctttatcaacactgttcccttagtttctgttatc

SEQ ID NO: 17220 - DNA, 478 bp, Homo sapiens
  misc_feature (1)...(478): n = a,t,c or g
gtaattgtagagtatagagccgggaagagtggggaatgacaggtgtgataggattggagtgggggtaagggcatgacgatctcctgaaggacctgagatcatgaaagagtgtgcagcagagagtcctcatcaggttagcagctcaaggagacacaagctcaccgagtaggggatgttagctgcagtgagaacagtcaacctaggaacccagggcagatcaggaaacttgacattgaatctctacaagactgcctcgaagggaaaaaggacagtgggtgaccctgcctttttgcattgtaggcagtttagcgagaaaagaagtattgggaacagtgataggacattangccattgggttgaggactgaagctacaatctgggaattactcttatccaagctgtttaaagattactaangcattttggatactgacttcccgccaggaaagataggggatctnagactgaaccaactatt

SEQ ID NO: 17221 - DNA, 551 bp, Homo sapiens
  misc_feature (1)...(551): n = a,t,c or g
cccccttgncnccatcagctatgacatgattacgaatttaatacgactcactatagggaatttggccctcgaggccaagaattcggcacgaggaggggaaagctgtgattcaggctctgaagtctaagaattgcagacttagtttcttgtctcccgatgaaactgctaatctgggtgccaatggtgtttctgctacatggacacctgcccacacagcatgattagaaattataatgatgacgacgatgagtcttccaggacacccacgttctttgcaagatatttctgctaatcgtttctaccagaatcagttggaaaacttttttttttaagttttttttttttctcnnnnnnnaagtcacccaaaaangctggtctaattcnggtntaaattaanggtttgcctccccnttaagggggggtnatnattcntgcagggcntcntaaaaccttgggcccatagggtaatggaaagccccctggccngggaaatggggattcaggcttgancaangcccaaaattttcgtatggccttggnaaaggggattc

SEQ ID NO: 17222 - DNA, 367 bp, Homo sapiens
cgcacttattctcacttgaaaaaagcttcatttatagggcacagataagaatctatgaggagattaaaaacactgaatgatcccttttggaaactagtaaataatacatactttgaaaagaaagaaaatcccttggcatgtttggtaaacaagaagctcctcaaagtttttccttcacctcttgaataggaataaaattaagaaacaatgggtggaatatatgcatatttgaatgtagtaggtaagataactctatcaaaatgtcaaagggttttattggtccatccattacttaattatctaagggtaaactgcccactttatggataatctactaggcttggaaagcttcaacagggtcatgatg

SEQ ID NO: 17223 - DNA, 331 bp, Homo sapiens
cagagttggaggttcagtccttctgaagcaatctgttctgtttttagaaagcaccatttgaaacctgtttattatattgagcctaaagctcccactgtgtaatttctacccactgctcctgattctccactattgtggctttaagtcctaaaccttgtttttcttttctaaaacaacaaaaataatgatacttatggatcatatacgttgtgctaggcattgtggtaagcacttttttatgcattatcctatttcattcctgcgacctcagagagtaggcattattattatacctaatttgaagaaattgaggcttagagagtttgaagta

SEQ ID NO: 17224 - DNA, 355 bp, Homo sapiens
gttaacatattatatgattccatttaaatgaaatattcagaatagatcaatccatagatacagagcatagatgggtggttgctagggactagggggaggaggaatggggagaaactgcctaatgggtaaggagttttactttagagtaatggaaatgttttgaaactagataagaggtcggtgattgtacaacattgtgacaatactaaatgcactgagttatttatgttaaaataggtgaattattaaataattcttttttaaaaggaatgaagtactgattcatgctatgacatggatgcaccttgaaaacatactactaagtaaaagaagccagagtcgacgcggccgcgaa

SEQ ID NO: 17225 - DNA, 365 bp, Homo sapiens
gaaccaatttaatcaaagtgccctacttagggagaacattgctagaaatgacagggattgggaaaccatatggtgcttggcagaggacccgaaaccaatgtagaaactgaggagcttgggcaaagtgtgtcatttatcgttctggggctagggctgagtcaggtccaagaactgaccccctctcagagctgggacttcatcaaggctttggctctggtttgaacgtggtacttgcaggctcttgtcgtagcaccgggagactcctctcccagcaactcaggactcctaggaccagtgaggcctgtgctatcataatgaattatgagtggatccatctgacctataacaaataccacccataaaca

SEQ ID NO: 17226 - DNA, 458 bp, Homo sapiens
gatcacaaactgtaaagatgagtaagaagttgttatttaattcaaattcagacctttcatttgccagctgatttcgggggaaaacagaagtctcagtgatgtggtctagcacatgcaccaagtccattgtaggaagaatcagaaagttgatcataagtccttccagtggattactcatatttgtcaggtttgtagctggtagaaggccctacatgcttgctttaagaccaattagtagacactcagatggtcactgaattgctttttctgtgtgccaaattatattttcttggatgaaataaatagcccttaaccctgagaaaaacacaatggccagagagcattataatttgttgacactcctcattccctcatccttgcctctgaaaacttaaataaatgagtactcagattgaagctaaccagcaaatctctcagattcattggttaacatagca

SEQ ID NO: 17227 - DNA, 429 bp, Homo sapiens
  misc_feature (1)...(429): n = a,t,c or g
accgntntgacatgattacgaatttaatacgactcactatagggaatttggccctcgaggccaagaattcggcacgagcatgttttgcattttatgttcttccacaattgatctgatgttcaggaaaagataataaaggcaaattagttagtggttgagacaggcatttcctcctcccgcttcttgaccccacagatgtattccagcagagagcaacacaccagtcatcaaaacccactggctcctgtgcggtgtcacagattgcagggttctgacaaggcaggacagtcaagagtggggacactttcagcttctacttttgccttctagggggagctttctaagtccccacatttaccccgagtcaccggaaaaatctgatttttcccccgaaagctcaatgactttaacgtgcttggctggtttgtc

SEQ ID NO: 17228 - DNA, 329 bp, Homo sapiens
ggccagggtaaggcccagccgggatggcaccatgaggtccatttgaccactgaccatgctgcatgcagggctatcggagcacatgcatccactgcttcaacacagacttattaaacacctcctatgccaagcattgggaatgcagcagtgaacaaaacagataataggtcctgcctacatggggcttacattatagcagacaaaacccggcagtaaacaaaacaagtaagtaaaatatgtgctgtttgacaatagcaaggacaaggtctttgtggtcaagaatatgcccaggaaagtccctacagtgtacatgaaggggcagctggccc

SEQ ID NO: 17229 - DNA, 372 bp, Homo sapiens
ggcccggggtaccaacatggcccagaagcgtcctgcctgcaccctgaagcctgagtgtgtccagcagctgctggtttgctcccaggaggccaagaagtcagcctactgcccctacagtcactttcctgtgggggctgccctgctcacccaggaggggagaatcttcaaagggtgcaacatagaaaatgcctgctacccgctgggcatctgtgctgaacggaccgctatccagaaggccgtctcagaagggtacaaggatttcagggcaattgctatcgccagtgacatgcaagatgattttatctctccatgtggggcctgcaggcaagtcatgagagagtttggcaccaactggcccgtgtacatgaccaa

SEQ ID NO: 17230 - DNA, 292 bp, Homo sapiens
gagtaaatatttccttttgtttttgcgaaatactagagagagtttgagctaaaattttggaagtttttaacaattctttgcatttcacttttggcctttctattttttttccattttcatatgccttttttttttcattttaagtttttttgctgccttttccatttatgttaaatctgaaaatagctactttatagctaaagtggatgagtgggaggaatgaatgggttaattcccctttaggcatcattatttatataccttattttaaatttggggcaggaagtttgaa

SEQ ID NO: 17231 - DNA, 346 bp, Homo sapiens
gcagaattacctattgcaacttgtgttcagaaatacacagcttgtttttttgcccaaggatgagtctacattttaagaactgcaatggtataaaggaacttaaggattctgagaatcatagtaataacatacattggaatagtactttataatttacaatccccatttacatcatttcaccttaatgttgatgacaatgttttgaaacaaatactatttttcctactttgcttttgagaaaattgacactcagacttgccctaatcatgcactttacttaaggaaagatcgagaaatcaaatgaagttctcctgactctctggtttagtgctcttttgttattatg

SEQ ID NO: 17232 - DNA, 77 bp, Homo sapiens
gggtccctgcctctcattacgacctggagctagcatgacctgtggcctgaccagtcaccccaagtcacagtgtggtg

SEQ ID NO: 17233 - DNA, 438 bp, Homo sapiens
gggatggagaattatcctgtcgagtttttcagcttatatctttaatggataccggattgcctcgatgttgtaatgagaaaatagagcttgcaattctgtggttcttggatcagtttcgtaaaacatatgttggtgatcaacttcaaagaacctcaaagaaaaaaattgccaatccttaacataaaagaagcacaccacttgctgattgagctgagatcaccactgactacattacttataaacctgaagacagacatcttcctgtgaagggcttgtggcaaacctatccaactcgggtttcttcttccttgagaacgatctgattcatcatcatctgaaccagggatcacagtctaaggtccaggtatatgctcgtatgtcagaagtcttaggaataacagatgacaaccacgttctaaagacgttcatgacaaaaat

SEQ ID NO: 17234 - DNA, 331 bp, Homo sapiens
ggggaagacaccagaggggattgatgccattgaggaaatagagatagatttggaagaaactgaaggagaaatatccccacaggaaaatggcctagaggaggttaagcctctaggtgaaatgcatacagatttgaaagcaaccggaagggagatttccccaagggagaagacaccagaggtgattgatgccactgaggaaatagacaaagatctggaagaaactggaagaagagaaatatccccagaggaaaatggcccataggaggtcaagcctgtagatgaaatggagacagacttgaaaacaactggaagagagggttcctcaagggag

SEQ ID NO: 17235 - DNA, 450 bp, Homo sapiens
cctgcatgatacgaatttaatacgactcactatagggaatttggccctcgaggccaagaattcggcacgagaatgtaaatgtgggaaagcctttcataatttttattcctttcaaaatgatgaaatatctcacactggagagatgctgtatgatataaggaatgtgggaaagtgatcgatttttttttaacaccattgtcaacataaaacaactcacagagcagaaaaactctgtgagtgtaaaatatgtagggaagccttcagtcattttggtaacttaaaagtacatgaggctgggcacagtggctcacgcctgtaatcccagcacttagggtgggcaaattgcttgacctcaggaatttgaggcctgcctgggcaaaatggtgaaaccatgtctctgcagaaaatagaaagagtagcaggtgtggtggtgtgcccctgtagtcccaa

SEQ ID NO: 17236 - DNA, 509 bp, Homo sapiens
  misc_feature (1)...(509): n = a,t,c or g
gagcttcctttctttgcagcttctcaagcctttaatgttccaaagtacaatatgaatctccaagacaatgatggaatgtgtcctaattttatataatttcctaaaattatttgtgaaaacttatttttttctacaaagcatcttgtgaaacttgtgtttcctgggatgctctttggtcaaagccactcttgagattcatttttacaggcctcctaattgtacattgaatggaattcccttcatcaaaagttgtgcctactcagttcctaaaatgccagagggagtgaaaaccagaccattcagcaaaaacaaaaggtgccccctactaataatttgacatcatgttggtgaaacaaaggcttgcattcctcccattctaactggttgcttttgcaaagacacaaccttccggttctggtgggcagaatggggctgttgggaaggttcagcaaaaggcaactcttcttgccttgtccattgaaagtacagactnttaaagtagcgccaag

SEQ ID NO: 17237 - DNA, 327 bp, Homo sapiens
ggaccttataatatttggtctggtagatataacataatttagccatggtcattgttgtaagagtagtatttttggaatatcatacacactggcatgatataaagtaagtggttctctacacctctcttaaatccacttactacctgtaccatgtgtcattacacgtgatcacacacctggttgtgggttataatgtcaactgtgttattttgcccgctgttttatgtgagtgttttatgtgtccctccctaaaagatgacaagctcttggagtgtggggccctggttgtgtctgtcttctatgtggggcctggtgctgtgtgagtgc

SEQ ID NO: 17238 - DNA, 316 bp, Homo sapiens
gaaaataaaatactgtccttaaattctaatatggactaataagtatttaatttggtagtctcataataaattaactataaatattttctcttcctagcatttccaactataaaaataaagcataagattacactgaattcattaaatgcatattaattcagatgcagttttctacatatggcatctttttctagctttatcttttactgcagttcatagtttgctataaatccaaatatttgggtcgacgcggccgcgaattccagatctatgaatcgtagatactgaaaaaccccgcaaggtcacttcaactgtg

SEQ ID NO: 17239 - DNA, 404 bp, Homo sapiens
  misc_feature (1)...(404): n = a,t,c or g
gccgtgacggaatccttctctacacccaagttccacatcagccccaccggaatgatcatggaaggagctcagctccacattaagtgcaccattcaagtgactcacctggcccaggagtttccagaaatcataattcagaaggacaaggcgattgtggcccacaacagacatggcaacaaggctgtgtactcagtcatggccatggtggagcacagaggcaactacacgtgcaaaggggagtccagccgcatatccaaggtcagcagcatcggggtcaacataacagaactattttccaagcccgaactggaatcttccttcacacatctggaccatggtgaaagactgaacctgtcctggtcatcccaggagcaccttcagccaactttccatccanaaggaaa

SEQ ID NO: 17240 - DNA, 431 bp, Homo sapiens
  misc_feature (1)...(431): n = a,t,c or g
gctagtttcctaaagggcttcttgatgccttgcaaagcgactgcctccaaggtggggttgcccactcatggacctggaagacatttggatcagtgggcacaaatgatgggctatttggatgtttttccttcaggcatgaagaacccctctaggaaactctgattcattagtccatcctgagtgacatgactgtatttaggcaaacagtatttttccagccaattgtttccctaacctgacctgagcctcagaaagtgaagatgatggggtcattgagtcaatgatgctcatgaacatctcgagggtttgctttgcctttctcagttgaagggatgcttaccanaatccaaatcacagcctcctggatgttcacccccattttacttttagcgcagganctggncctcaatgggggttttcaanagtgctct

SEQ ID NO: 17241 - DNA, 472 bp, Homo sapiens
ctgaatccatcagctatgattggattccgaatttaatacgactcactatagggaatttggccctcgaggccaagaattcggcacgagattatttgtacctgaatttatattatatacacgttcacacatggagagtactaaaggatctgtgggcatctatatgtgtgtatgtgtgtgtgtatgtttgtgtgtgtgtgtgtgcttatgttttgagttctagattaaatattgaattgctgggattacaggtgtgagccccatgcctggcctttttttttctttttctttaaaaaaattttttgacaccagtgtcactcaccaataaaaaatttattctttttgtttttttttgagacgtagtctcaagagtgcagtggtgtgatcatggctctctgcaggctcaacctcctgggctcaggcaatcctcttgctttagctacccaagtagctgggactatataggtgtgtgcca

SEQ ID NO: 17242 - DNA, 1267 bp, Homo sapiens
gccaccaactcgtccaactgacaagcccttgcgcctgcctctccaggatgtctacaaaattggtggtattggtactgttcctgttggccgagtggagactggtgttctcaaacccggtatggtggtcacctttgctccagtcaacgttacaacggaagtaaaatctgtcgaaatgcaccatgaagctttgagtgaagctcttcctggggacaatgtgggcttcaatgtcaagaatgtgtctgtcaaggatgttcgtcgtggcaacgttgctggtgacagcaaaaatgacccaccaatggaagcagctggcttcactgctcaggtgattatcctgaaccatccaggccaaataagcgccggctatgcccctgtattggattgccacacggctcacattgcatgcaagtttgctgagctgaaggaaaagattgatcgccgttctggtaaaaagctggaagatggccctaaattcttgaagtctggtgatgctgccattgttgatatggttcctggcaagcccatgtgtgttgagagcttctcagactatccacctttgggtcgctttgctgttcgtgatatgagacagacagttgcggtgggtgtcatcaaagcagtggacaagaaggctgctggagctggcaaggtcaccaagtctgcccagaaagctcagaaggctaaatgaatattatccctaatacctgccaccccactcttaatcagtggtggaagaacggtctcagaactgtttgtttcaattggccatttaagtttagtagtaaaagactggttaatgataacaatgcatcgtaaaaccttcagaaggaaaggagaatgttttgtggaccactttggttttcttttttgcgtgtggcagttttaagttattagtttttaaaatcagtactttttaatggaaacaacttgaccaaaaatttgtcacagaattttgagacccattaaaaaagttaaatgagaaacctgtgtgttcctttggtcaacaccgagacatttaggtgaaagacatctaattctggttttacgaatctggaaacttcttgaaaatgtaattcttgagttaacacttctgggtggagaatagggttgttttccccccacataattggaaggggaaggaatatcatttaaagctatgggagggttgctttgattacaacactggagagaaatgcagcatgttgctgattgcctgtcactaaaacaggccaaaaactgagtccttgtgttgcatagaaagcttcatgttgct

SEQ ID NO: 17243 - DNA, 525 bp, Homo sapiens
gaagatagatcgccatcatgaacgacaccgtaactatccgcactagaaagttcatgaccaaccgactacttcagaggaaacaaatggtcattgatgtccttcaccccgggaaggcgacagtgcctaagacagaaattcgggaaaaactagccaaaatgtacaagaccacaccggatgtcatctttgtatttggattcagaactcattttggtggtggcaagacaactggctttggcatgatttatgattccctggattatgcaaagaaaaatgaacccaaacatagacttgcaagacatggcctgtatgagaagaaaaagacctcaagaaagcaacgaaaggaacgcaagaacagaatgaagaaagtcagggggactgcaaaggccaatgttggtgctggcaaaaagtgagctggagattggatcacagccgaaggagtaaaggtgctgcaatgatgttagctgtggccactgtggatttttcgcaagaacattaataaactaaaaacttcaaaaaaaaaaaaaa

SEQ ID NO: 17244 - DNA, 467 bp, Homo sapiens
ctttgatacccgctatgacatgattacgaatttaatacgactcactatagggaatttggccctcgaggccaagaattcggcacgagtgccgagaggaggttgtctgcagggctttacaggcagagctcagaagagcacagtcctaacggcttgacttccgataactcagatggacaaggagaaagacctttgaatctccgaatgcctaatttacagaacagacaaccccatcattttgtggtggatggggagctgagcagactttaccccagtgaggcaaagtcccactcatcagagagccttgggattttaaaagactaccctcattcagcttttaccttagaaaagaaagtcatcaaaacagagcctgaagattcaagatagctgtgatttctctcaccgttctctggaaatggcatcagatttaaggataatactccatcatagaaataagccttaataaccag

SEQ ID NO: 17245 - DNA, 455 bp, Homo sapiens
  misc_feature (1)...(455): n = a,t,c or g
ggagcccgntatgacatgattacgaatttaatacgactcactatagggaatttggccctcgaggccaagaattcggcacgaggaaagagatgaattatccccaaagagaattaaagtggaggatgggtttccagatttccaggattctgtgcaaacactcttccagcaggctagagctaagagtgaagaacttgcagctcttagttcacagcagcctgaaaaggtgatggcaaagcagatggagttcctttgcaaccaagctggctatgagagactgcagcatgccgagaggaggttgtctgcagggctttacaggcagagctcagaagagcacagtcctaacggcttgacttccgataactcagatggacaaggagaaagacctttgaatctccgaatgcctaatttacagaacagacaaccccatcattttgtggtggatggggagctgagca

SEQ ID NO: 17246 - DNA, 513 bp, Homo sapiens
  misc_feature (1)...(513): n = a,t,c or g
ggatactcgtatgactgattacgaatttaatacgactcactatagggaatttggccctcgaggccaagaattcggcacgagataattctaatatttataggttactgtgtattctttcagcatgctccttggtacaaaactattcaattgaatttactaactatatatgattatcttggagccttttttggtactctatcagctgtttctatggtaattttttgttcattgttatcacttatagcttactctattatggcttttttaaaaaaaaatctctgtatattttctcatccttacttgtttgcttacttttctaaccattagtctaaattgacatttaggtaaatttgcttttaagttgaatacttaagccaatgattcagtcattttgtcttttctggggtgggtagtgcctactagacatttaattgtgctgcattttaatatttcttaccattcattataaacttttttttttaaacaggntnttccttcggtgccaaaatggag

SEQ ID NO: 17247 - DNA, 386 bp, Homo sapiens
gaaagaatgtatctcgaaagaatgaaggaagaagaaaaaaggatccttgatgtttgtgacaagaaaatgagaaagttagtatctgcaatacagagcttgttcctgttcagtgactgaccctctgtattctgtatagacaccaggccgatacacagtggagttcccaggccttgtttgcaggaagccgactgtaaagacagccccagctcaaggctattaggttgaatatttgctttcatgagtaaatgtggatctttggggaatggcttcaaaataagtcacgaacacaaattctttgtaaattatgtaaattcctgtttatataaattggcaacaacttataccgtctgacagttcaaaatctctttcagctgcgctcttcccac

SEQ ID NO: 17248 - DNA, 340 bp, Homo sapiens
ggagtgtgacagaggttgttttgctcttgctgcccaggctggagtgcagtggcgcgatcttggctcaccgcaacctccgcctcccggattcaagtgattatcctgcctcagcctcctgagtagctgggattacaggcatgtgccatcacatccgggtaattttgtaccaaatatgtcatttttaaaaaaggacttggcatgtgtcgatttatgtatgcccagggggtggtagaaccacgctcctgcaaatattaggggataactgtatttgaaagaaactgaggcttaaaattaaggctttactatgtgtttacattcatagggtttatctccaatgaga

SEQ ID NO: 17249 - DNA, 385 bp, Homo sapiens
ggatgaggatggggccacatggactggggtgcaatgggacagctgctgccagcgagagggaccagggcaccactctctagggagcccacactgcaagtcaggccacaaggacctctgaccctgagggccgatgaggccagggacaggccaggggggccttgaggcccctggtgagccaggccccaacctcaggcagcgctggcccctgctgctgctgggtctggccatggtaacccatggcctgctgcgcccaacagctgcatcgcagagcagggccctgggccctggagcccctggaggaagcagccggtccagcctgaggagccggtggggcaggttcctgctccaacgcggtcctgactgcccaagtgctgccccgggggtt

SEQ ID NO: 17250 - DNA, 396 bp, Homo sapiens
  misc_feature (1)...(396): n = a,t,c or g
atgaaagctgcatctttactagttagctaccatgcgtcattatttatcaaaagatatatgctgcttaaacacaaatacgttttaaaatatattttaggcagtagggttttgggtttttttttttgcangttntttnggggagnaaatttaggganaaangatttttttttttttngaaacagttngntntgtcncccagnanggagngcagggcaggggcncnatcntgcancctccgcnttttnngttaaagcnattntccngcctaagcctcccnagtancnggnatnncaaacgcncnccaccccacccanannatttttttaaaangcaaanggccttngcccaaaaantcaaagaatcagcttaagttccaaaaaaaagaaaaccccccaa

SEQ ID NO: 17251 - DNA, 369 bp, Homo sapiens
tctacacatgttttaacacccaaaaagctgttggatgatataaagatgctgaataaacccaaggataaagtctccttaattaaagatgaatagcatttctttttggagggtttagagattcttactaatatgttgaactaaaatagaaagaaaatgttgctgtcatgtaatttaaacaatgtaaatattttatggaataatggcttttcaaatacatttcttaaggaactgtttatgattattactggatttgtcatttttgataatttaaatattgctgctgctttgtagatgatgagaagaaatgttaaagtgctttctaaaaggaaattttttcacctttggaggagaatatattagagttgtggg

SEQ ID NO: 17252 - DNA, 370 bp, Homo sapiens
gctcttaaccacccaggctggaatgcaatggggccatgacggctcaccacaacctctgccttccgggttcaggcgattcttttgtctcagcctccggagtagctgggattacaggcacctgccaccatgcctggctaatttttgtatttttagtagagacagggtttcaccatattggccaggctagtctcaaagtcctgacctcagctgatccgcccacctcagccttccatgatatatgttgttcttcaagcagtttcccctggcttaagtggggagaaagcctcaggcctcacactttttttcctcaccctgggcccggcttaggtgtgagctctttgaccagaacctgaagctagctctggaggtg

SEQ ID NO: 17253 - DNA, 334 bp, Homo sapiens
  misc_feature (1)...(334): n = a,t,c or g
gcgagcagctgggattacaggtgatgccaccatgcccagctaatttttttaattttcagtagagatggggtttcaccatgttggccaggctggtctcagactcctgacctcaggtgatctgcccatcttggcctctcaaaagtgctgggattgcaaagcatgaatttggccgcgcctggcctttcctggttttaagaagaaaancaagantggtattgggcctgctggtttttaaggtcctttnactnaacataannaatatgccagaagngcatattttagcccaggctggncttgactcctgggctcaggcaatcctttccncttggcctat

SEQ ID NO: 17254 - DNA, 355 bp, Homo sapiens
gagctacatcacatagcttgggataaatttttgccttatagtatgtttatatggaggtacaatttttaaaatatctctttcatttatttttttcataacttttattgggatatagttcacataccataaaatttaccttttaaagtaggccatttacagatttttagtctattcattaaattgtgcagccgttatctaattctataacattttcacttccccagaaagaaactccatatttatttcccagttattctccattccccttccccctgcgttggcaacaactaatttacattctaagtctctatgaatctgcttattctgaacatttcatgtaaatggaatatcagta

SEQ ID NO: 17255 - DNA, 862 bp, Homo sapiens
tatgtaatcacaatctaaattagcatcaatactttgacattcattacattggtttgggggaagaaaagtagttctggtatgtttcattgatccccagataccttccaatctggacatgatggggctgattccagatggtttttctgaaatttcattaaggtaggtcagcgtcatttgtctctgtttaggtaaaatataaaaaccctgcccagtagcagtggcatcgcttggttcctgatgcccatgttccagaggaattcggataccacaaacagctaagacaatctcagcttttcttagacaatcttctatctcaaacttcagacattccagaattgtcatgatgtttacactgtctgagttaaaaatcctgttcaagaaaaaaaaagattttgtatcacttcttaaaaaggaatattcatagcacttgtcacaaatagaaggcaaccatgagataatacaagccagggagaggcttgtattacatgacaggtgtaattagtctgctgagccagctttacccaatgaagggcatatgtgttagagagattagctaagagtagaaattcgagcatagaggccaggtgcggtggctcacgcctgtaatcccagcactttgggaggttgaggcaggcgtgtcacttgaggccaggagttcgagaccagcctggccaacatgatgaaaccccgtctctactacaaatacaaaaattagccgggtgtggtggcacacgcctgtagtcccagctactggggaggctgaggcagcattgcttgaacccaggaggtggaggttgcagtgagccaagatcacaccactgcactccagcctgggcgacagagggagacactgtctccaaaa

SEQ ID NO: 17256 - DNA, 368 bp, Homo sapiens
gtcatgggaacccagaggaggtcgatggcatttgtggttgatgtgggaaggagagagagagaagaaccagaaattgatttggagaaatataaacttctgccagaatacccaggtgttctctctgatgtccaggaggagaaaggcattaagtacaaatttgaagtatatgagaagaatgattaatatgaaggtgttttctagtttaagttgttccccctccctctgaaaaaagtatgtatttttacattagaaaaggttttttgttgactttagatctataattatttctaagcaactagtttttattccccactactcttgtctctatcagataccatttatgagacattcttgctataactaagtgc

SEQ ID NO: 17257 - DNA, 361 bp, Homo sapiens
  misc_feature (1)...(361): n = a,t,c or g
gggcatgtgaacatccttgcggctagagcttcactgccaacttcacaagaatctctcttggcatctgaggctcattagtgcactaatacaccaaggtgtgcgaaaaactgtcatccacgtccctttctattgctcggataaattagtatcccactaaatgttcaccctaaactcctttaccgagtggaggaattgcganatgctttttatnaagacacattaactgatcccnntangatnttanattnccttgnngcncttcntntaaanncatttantccaattnntcgcgcgnaantnttattnatnatngngttnannanaattnctnnnnanggtnntnannanannntnnnnaact

SEQ ID NO: 17258 - DNA, 323 bp, Homo sapiens
ttctaccaatccaagacataaagctgtatttaattccagatttgaattttgtagttttggaagtcatggtggaaaacaaaagtacggtaaaaaggaaatagtatgggaaaatcagtataaaggaaaaatatatattaagcaatggttggtgtttgaattgccattactactctcttctcttctcttttctcttctcttttcttttcttttttgagacagggtttcgctcttgttgcccaggctggagtgcaatggcacaatcttgactcactgtagcctccgcctcccgggttcaggcgattctcctgtctcggcctcctgag

SEQ ID NO: 17259 - DNA, 424 bp, Homo sapiens
cagtgaaaggtgtgtttgaccatcgaatgaagtgctggcagaaatgggaagatgctcaaattactttgctcaaaaaacgtgaagctgaagcaaaaatgatggttgctaacaaaccagataaaatacagcaagctaaaaatgaaataagagagtgggaggcgaaagtgcaacaaggggaaagagattttgaacagatatctaaaacgattcgaaaagaagtgggaagatttgagaaagaacgagtgaaggattttaaaaccgttatcatcaagtacttagaatcactagttcaaacacaacaacagctgataaaatactgggaagcattcctacctgaagccaaagccattgcctagcaataagattgttgccgttaagaagaccttggatgttgttccagttatgctggattccacagtgaaat

SEQ ID NO: 17260 - DNA, 337 bp, Homo sapiens
gagagatagtttttcctatgaaaaatttaactttaaaagcaatcctaacattacattctatgtgtacgtcagcaacttttcctggcctattaaaatacagattgcattctcacaacacaatacaatcatggaccttgtgcagttttttgtcaccttcttcagttgtttcctatccttattgctggtggctgctgtggtatggaagatcaaacaaacttgttgggcttctcgacggagagagcaactgcttcgagaacgacagcagatggccagccgtccctttgcttctgttgatgtagctctggaagtgggagctgaacaaacagagtttctgcga

SEQ ID NO: 17261 - DNA, 513 bp, Homo sapiens
  misc_feature (1)...(513): n = a,t,c or g
gnnannnnnnntnnnnnnntncnnnnnnnnnnnnnntnnntnnnntagcgnntnngangngnaatnngnnnnngtnangtttnntcgnnttggantcgnttcctgatacgaattaatacgactcactatagggaatttggccctcgaggccaagaattcggcacgaggaagaaggggtaggggactagaatgagttacaggaagaaatatcttcctgcctggctggttcccaagctggctgatcatctgatgcctttgggaaacccttttaataattcaggttcccagggcccagccctagtagttctgattaagtaggtctgaagagagaaccactgttgaagatggtacaacatcattaaaggagttaattacagcaatcaaggacatttttccccagatagaactcttacatttctgttatttagttcctgaatgatttgaaaatggagtagccattgaatccactaattactgctcttgngtcttatggcaacagaggtgaaattatta

SEQ ID NO: 17262 - DNA, 450 bp, Homo sapiens
  misc_feature (1)...(450): n = a,t,c or g
tntgaaacccttatttgagaccctaanaaataccactcactatagggaatttggccctcgaggccaagaattcggcacgagggaaaaatcaaattataacttgctttgttttcttattgaaactctgaaatcagcctgtgaacagtcccttttccttctcacttgccctacgattgggcttcagttagtgtcgtgattatatatgtgggaagaaggggtaggggactagaatgagttacaggaagaaatatcttcctgcctggctggttcccaagctggctgatcatctgatgcctttgggaaacccttttaataattcaggttcccagggcccagccctagtagttctgattaagtaggtctgaagagagaaccactgttgaagatggtacaacatcattaaaggagttaattacagcaatcaaggacatttttccccagatagaactc

SEQ ID NO: 17263 - DNA, 369 bp, Homo sapiens
gaaaggaatcattgccttggactagttgtgtaatgcccagggtttacagagtggaggtaaaaatttttgttgcttttgttttttatattaagaagaaggacgttcaaaccaaaagacagatcctagagcagagaaagaatttgtgaagagaattgtggagccctccctgtctgtgatttttgaggagtgctgggagtcttcgaggggagtttaatgacacccatctttcctgcccgcattctgaatgtttaaggcaaaagaggaaaacatattggggccacagtaccctctttactaccaacaaagcagataatggagaacgtgcgtacttcctaataccgaattccagccttaacccagagtcaccgg

SEQ ID NO: 17264 - DNA, 454 bp, Homo sapiens
  misc_feature (1)...(454): n = a,t,c or g
tggaaaccctttgattgacacnaatttttacgactcactatngggaatttggccctcgaggccaagaattcggcacgaggcttgttaatgaaaggaatggtgctgtctaatcgatttgttcttttagattaagtaaaactttggcagttgtgtttttaatctccttacctttgtccctaggcctcttatgtggtctctagtgctttttgctgaatgtcttggctggaattcctaccttctcaaattgcctgtggtcttaaatcctgcatcttggtctgagaatatccagtaggtcaggaagcagagcactaattgaatactgaagaggtttgcctatggagagtaccatgagtcatgcttcagaacatgcctaaaatgttgtgtccagactggcaaaggaacagctgaatttcagaatgaaaatagcagtcacagctgtcagtggagataggcc

SEQ ID NO: 17265 - DNA, 356 bp, Homo sapiens
cgtgtcactagccctgccatttgctcactctgtgttcctggggggtcatgtcacttgtctgagcctcccttcccttccctgtggacagggatcccgagacgggcctggtggatgcagttcagcatgtttggtgtgttgcaggccctggtgactaaggtcggctcctccccactggccatgcctggagggtgttgtcaccttgctgctctctcagaggagtgtggctgcctacttggcggcagctggggtctcttctactctgtccctgctcctctgcccctcctgcgtcccaccccccccacgttattctcagagcatgggacaattcctctgttagggtgaataattgagcgtta

SEQ ID NO: 17266 - DNA, 1034 bp, Homo sapiens
  misc_feature (1)...(1034): n = a,t,c or g
gcttggaaaaagaagagctgccacgtgccgtgggtacccagacattgagtggtgctggtctcctcaagatgttcaacaaagccacagatgccgtcagcaaaatgaccatcaagatgaatgaatcagacatttggtttgaggagaagctccaggaggtagagtgtgaggagcagcgcttacggaaactgcatgctgttgtagaaactctagtcaaccataggaaagagctagcgctgaacacagcccagtttgcaaagagtctagccatgcttgggagctctgaggacaacacggcattgtcacgggcactctcccagctggctgaggtggaagaaaaaattgagcagctccaccaggaacaggccaacaatgacttcttcctccttgctgagctcctgagtgactacattcgcctcctggccatagtccgcgctgccttcgaccagcgcatgaagacatggcagcgctggcaggatgcccaagccacactgcagaagaagcgggaggccgaggctcggctgctgtgggccaacaagcctgataagctgcagcaggccaaggacgagatcctcgagtgggagtctcgggtgactcaatatgaaagggacttcgagaggatttcaacagtggtccgaaaagaagtgatacggtttgagaaagagaaatccaaggacttcaagaaccacgtgatcaagtaccttgagacactcctttactcacagcagcagctggcaaagtactgggaagccttccttcctgaggcaaaggccatctcctaatggaccaaggaccccagagcccacctgtgtgacgctgcctttttatacactgtcctcctccaccttgatggacccctagtgatgcatcctgcctaggctggacttaaccccttcctccctgtccccacgaccaactgtccccagttactctaaccgttatttcatttagcttccatatanattnctaacctaaganaaagtttcngngtttacncaagacctacnataaggggggggaatatggganggggggga

SEQ ID NO: 17267 - DNA, 324 bp, Homo sapiens
tgatcattatagaaaaataaaataggtcatcaataattgcatcaccttgaaacaatcacttttaatttgttgttagaggttagtctattttaacatttctgaagtcatatagacttacatgattgctctcatgtaacctgtaacataagcgtttctcatgttgctacatctgttaataacagtggtttgactaattgtattggctgtgtggatgtggaacagaagattcttgatgtcaagaacggctgaggcacagaaggtgcagtcagtcatttgggaccatattgtctgtggctttcaggacagggagctttgggactcagg

SEQ ID NO: 17268 - DNA, 331 bp, Homo sapiens
ggagctattcaccagaaaatagtaaaggacactgaatttcagggttcatagtgggactattttcaactttctcagagacagcatctgtaaataatcaggcagaaccctcttataaaacaacataggaaaaacctcaaaggctattctaaggctgcaccatttaaacaagatttttaacccatggggacgccaagatcaacatggagcttcctgcacataaaagtcctggaatttcatagcaatgtgggggcaaaagctatgatagcatttccccctttctaaattatatactgcttagtgttaatgtgagcagagggctggatggcgacgg

SEQ ID NO: 17269 - DNA, 291 bp, Homo sapiens
catatttctactggagaaaaaaaggtactgtaattttggcataggcatcacatattgctggagtggaaagacccatgcactcaggtcctgctttctataatctgtgacctcgggccagtcactccatttctcctgaactagatcactgatgatctgttgaaagaaaaaatatggctagtaatgccttaattacctcacagaggttttacatggagcaaaaagacaatgtatttttaaatgtactttgttgaaggtgtgtgttgtcgagacaatacagcagtgaagagaagg

SEQ ID NO: 17270 - DNA, 559 bp, Homo sapiens
  misc_feature (1)...(559): n = a,t,c or g
atgntaannatngnnnngtngtaacnnggnatngnangcncnnntannanantctggannggntnttntaannaattggaaccctctatgaatgatacgaattaatacgactcactatagggaatttggccctcgaggccaagaattcggcacgagcttcttgccacttcatgcctgttttccctgaggacccactgactgagaaggactgttatagaaactctgttttcctctaggaacgtgctctcagacagtgtccctgagcctggaagtgctccccacatgtctctggaagtggggcggggaggagagccaaaggtttcctccaccttcgctttggtggttggtcaccaggaagtaggtgcacactctaaagtgaaacaaacaaaaagtgatgtctgccaacagccaccaccaagacaagcgtctgggttctcgtttctcctctggtggctcctcaggccaaatgataccttnttgtcacccacggggncttgantcagaggtnaancttcaaccnccanaccggganttcttggnatctggcnnggggatttgg

SEQ ID NO: 17271 - DNA, 676 bp, Homo sapiens
ttgactgattacgaatttaatacgactcactatagggaatttggccctcgaggccaagaattcggcacgaggtttatccgtcactcgccgaggttccttgggtcatggtgccagcctgactgagaagaggacgctcccgggagacgaatgaggaaccacctcctcctactgttcaagtacaggggcctggtccgcaaagggaagaaaagcaaaagacgaaaatggctaaattcgtgatccgcccagccactgccgccgactgcagtgacatactgcggctgatcaaggagctggctaaatatgaatacatggaagaacaagtaatcttaactgaaaaagatctgctagaagatggttttggagagcaccccttttaccactgcctggttgcagaagtgccgaaagagcactggactccggaaggacacagcattgttggttttgccatgtactattttacctatgacccgtggattggcaagttattgtatcttgaaattctgaagaatctaagccaggttgcaatgaggtgtcgctgcagcagcatgcacttcttggtagcagaatggaatgaaccatccatcaacttctataaaagaagaggtgcttctgatctgtccagtgaagagggttggagactgttcaagatcgacaaggagtacttgctaaaaatggc

SEQ ID NO: 17272 - DNA, 468 bp, Homo sapiens
  misc_feature (1)...(468): n = a,t,c or g
ggtgntgnnntgtttgaactcctttttgaanacccnttatgacttnannacaaatttacnacgactcactatagggaatttggccctcgaggccaagaattcggcacgagcacaaagagaagccaatggacatgttattttggattcgtcttctctgtcgataaacctacatgtgaattcctttttagtctgtagtgcaaccgtcgttaactctgaggctttgactttgctctttgattaaggcggtaggggtgagagcaaaggttttctaccttctctttcattttatcaagtgtgtgtggggaagttctgaggcatctgtctggataaaaggacttgtgtatagagaatgaggtcaaagttaagggccacctatctcaatgtatgtttgtatgattatcaggggccaaattttagtgtagcacttttgaagctttaggattctttttttttttaangccttagggt

SEQ ID NO: 17273 - DNA, 314 bp, Homo sapiens
gtgaaacttgagtgagatgagagagcatggagcctgccagtctccccctctgcgcacacacacacgcaaacacatttaactttccacttgcagtgacctgcccttcagtgtgacttatcagctgtttggcttttgtcactaaaggaaaacaaattgtggaatatcccgctctgcatgctcatgagatggctgagccaactcaggggttatgaggtggtttgcgagtgaggagaagaatgatcttcagtttctgacctcctggcacggtggcgggcggtatttatcaggaggtacatgtgactggttaagactca

SEQ ID NO: 17274 - DNA, 447 bp, Homo sapiens
  misc_feature (1)...(447): n = a,t,c or g
gacttcagaacctccagggcgtgagtgcaaggtcaaacatgactggcttccaggccgaccatcaatgtaggaggagagctgatgtggagggtgacatgggggctgcccatgttaaacctgagtccagtgctctggcattgggcagtcacggttaaagccaagtcatgtgtgtctcagctgtttggaggtgatgattttgcatcttccaagcctcttcaggtgtgaatctgtggtcaggaaaacacaagtcctaatggaacccttaggggggaaggaaatgaagattccctataacctctgggggtggggagtaggaataaggggccttgggcctccataaatctgcaatctgcaccctcctcctagagacagggagatcgtgttctgctttttacatgaggagcagaactggccatacacgtgttcaagactangggaactacctgg

SEQ ID NO: 17275 - DNA, 158 bp, Homo sapiens
gggaggatagaaatctgaaatcaaggactgggcagggctacgctccatttgaaggcttagggaagtcccctttcttgcctcttccaggctttctgtggctgctggagatccttggtgttccttggcttgcagcagcatcaccctggtcttcgcctttg

SEQ ID NO: 17276 - DNA, 444 bp, Homo sapiens
ggatccttcagcttctaaaacacgagaatgtggtcaacttgattgagatttgtcgaaccaaagcttccccctataaccgctgcaagggtagtatatacctggtgttcgacttctgcgagcatgaccttgctgggctgttgagcaatgttttggtcaagttcacgctgtctgagatcaagagggtgatgcagatgctgcttaacggcctctactacatccacagaaacaagatcctgcatagggacatgaaggctgctaatgtgcttatcactcgtgatggggtcctgaagctggcagactttgggctggcccgggccttcagcctggccaagaacagccagcccaaccgctacaccaaccgtgtggtgacactctggtaccggcccccggagctgttgctcggggagcgggactacggccccccattgacctgtgggggctggg

SEQ ID NO: 17277 - DNA, 421 bp, Homo sapiens
  misc_feature (1)...(421): n = a,t,c or g
ggtaaacattttgataataatttactgaaacttcttcccaacttcagtttctttaccttcaagtgagtcccaatgctgcaccctgacttaatttttctaaaatataggtctgctaagattacatcttgccagacttttgatggcttctcataagacaagattcagaattcctaacctcaattacagggcccttgacaatctgaccctattcagtttcatcttctactggtctctctcacagtgatacccttgaatatttatttttctgtaagcctgtcatgtacttccttgcctctgtgttttttctgttccctgtgcccggaatgctctatctattcttcctgtctggtatattcccactaactctacaaggtccaaaccaggtttatctcctctgngaagcctttcaagacctatactt

SEQ ID NO: 17278 - DNA, 370 bp, Homo sapiens
ggctgtcacccttgttattgatctttgtagccaaagaattatctcaaaacaatgatgtgatcctcattttccctttaaaaacctttgtcttcctaggccgggcactgtggctcacgcgtgtaatcccagcactttgggaggccgaggcgggcggatcacaaggtcaggagatcaagaccatcctggccaacatggtgaaatgccgtctctactaaaaatacaaaaattagctgggtgtggtggcatgtgcctgtaatcccagctactccggaggctgaggcaggagaatcgcttaaacccgggaggcggaggttgcagtgagctaagatcacgccactgcactccagcctagtgaccaagtgagactgtc

SEQ ID NO: 17279 - DNA, 427 bp, Homo sapiens
  misc_feature (1)...(427): n = a,t,c or g
gacagagatgagacatctaattcttgggggcaggcttaagagaaagctttcttaggctgagtgtggtggctcatgcctgtaatcccagcactttgggatgctcaagcgggtggatcacttgaggtcaggagtttgggaccagcctggtcaacatgatgaaaccccgtctctgctaaaaatacaaaaatgagctgggcatggtgctggtgcccgtaaatccagctactcggaagctgaggcaggagaatcgcatgaacccaggaggaggaggttgtggtgagctgagatcgtgccactgcattccagcctgggccacaaagcgagactcagtctcaatgaaaaaaaaaaaaanatggagaaaaanncagntttttgaaanaaattntgtntanccaanaatgagtaaaanttnntgaagcaattgggg

SEQ ID NO: 17280 - DNA, 413 bp, Homo sapiens
ggatggggtttcaccatgttggccagatggtctcgatctcctgaccttgtgatctgcccccgctcagcctcccaaagtgctgggattacaggcatgagccactgcacctggcctcggtttaccttctaatttgtgagtgctcgtttgtctttaattttgtatcatgtagataatatacaaaaacatgtatagacataacatatatgtagacacaacatatagcacacatgtacacatgtatgtatcgacaagttacagagatcaaggagctctatgtaaaagagaatagagctttagacctgagaggagcctgtttacccacaatgcttggggctccatgaggataaacagaggttcactcatgtgataccaaaggtggcaagaggaaggagggacagacagcggtacatcaa

SEQ ID NO: 17281 - DNA, 299 bp, Homo sapiens
atttcttagaactcttaagagttcttagattccacagggttacatttttaaaaattttttggctgctggaaaagctatgatagccaatcaaatcaaatttttggtggcacaattttaactatgaaacagcaagaaagagattattgcttaggatgttttctaaaagcttttttcctcagaaaaatcccaggcacagtggctcacatctgtaatcccagcactttaggatcccaggcaggtggatcacttgaggtcaggagtccgagaccagtccggccaacatggggaagtcctatctc

SEQ ID NO: 17282 - DNA, 340 bp, Homo sapiens
  misc_feature (1)...(340): n = a,t,c or g
tttctgtaaatatctgttttagcatactccctggcagagagaagtcagtcaataaatgtttgctaaataaagaatgatgtgatgtattaatggtattaatattaaagaaggtatatatcatcatacacatatgctcataaaataatgactcaaacttccaattctgtatgcagaagctaatcacctccattggtttttacttaaaaaaagggagacatttttagtcttcacaataatcatgtatagattggggatgaaataatttaagtttcctactatatataaagccactgagcagtaacttttttatttcttanaagtcntaattttttaatcatta

SEQ ID NO: 17283 - DNA, 416 bp, Homo sapiens
  misc_feature (1)...(416): n = a,t,c or g
accctttttgaantccntntgtaatncgnctcactatagggaatttggccctcgaggccggnaattcggcacgagaccacttattgagttctgactgtgtataagatactgtcctagacactttacatacaccacccatttaactttctaaacaaccatattcttagatatgatttagctcttgagaagacagattagaagagattaactgatgtgtttaagatcacatagcttgtaattggtggagcttggatctgaagctatgtttgtctgactccaaatcccaagcttgataagatttacttccaggagctataaagaggataagcttagctatttgaggctcccattttcattctctctcaaaaacttgcaagagagatattttaaaggagtgatgacatctttttcctatc

SEQ ID NO: 17284 - DNA, 334 bp, Homo sapiens
gctgagatgttatctgtcttagtatctgattgtatcttgtatatttggcaaaaatttaaaaatagccttttgggttacattgaagaatgccttttatggccaggagcggtggctcacgcctgtaatcccagcactttgggaggcccaggcgggcagatcacttgagctcaggagttcgagaccagcctggccaacatggtgaaaccccgtctctactaaaaacacaaaagttagctgggcctggtggccggtgcctctaatggttacttgggaggctgaggcagaagaatcacttgaacccagaaggtggaggttggcagtgagccgagattgc

SEQ ID NO: 17285 - DNA, 400 bp, Homo sapiens
gaaatggtaaagttatgatagagaacaaactggttccaagatctcttggaaggatcttccttaattttttatcctgacaatttaatacaccaaatattttacatgatttttttcttgcttttttttactactattttaacttaccgttattaaattatttacgcttttcattacatctagtttagaaaatttagtgtctcattgactatttggaaagattattctgtatatgctcagagaagaggtagaagcatcaagccagctgatgtggatcccaaagggtttgtggcaggaacatctgtagtggtgcatggccagggacagccatccccataggctcaacttgctcctataggagtctttagtgctaggggaactgtcagtcctcaactctgcagga

SEQ ID NO: 17286 - DNA, 377 bp, Homo sapiens
ggaatagaaggtgagcacaaagaaaatctgtgactggtacagctcagtgcaataaaaataagatgggcaattttaggtttctccctcaggagggagggaagggagtgcagtatgtgtccaacattctaatttttcagggagatgcccaagaaatgtgtttttgtctttcccacccgggatgccaatgggactccagatactctggatatcttaagaataaaacatgataaaaaaaatctgactgtcatcctgctgcatcagagaactcatagtacagcacacagacaccacgggcagccagattacaagatattttaaaacagaaaccagtagatctctctgatcagaaatatgcacacacaaatacagataaggac

SEQ ID NO: 17287 - DNA, 414 bp, Homo sapiens
  misc_feature (1)...(414): n = a,t,c or g
gcacagatcactgcagcctcgacttcctgggctcgggtgattctcccacctcagcctcccaagtagctgagactacatgcatacatcatcacacagggccaatttttgtattttttgtagaaacggggtgtccgcatgttgcccacgctggtctctaactcctgggctcacatcgttcacccaccttggcctcccaaattgctgggattacaagcatgagccactgcgcccgtccaggaggaaagtttttanaaaaaggtgcacaagaaagagcataggattgtgccagcattgatgttatcttctggttatatgagagtgtttgccaagaatcggtcaaatgttttacattagggaaaaagcattattgttactggcatagggagggccccagttaaaatagcaagccaattc

SEQ ID NO: 17288 - DNA, 207 bp, Homo sapiens
  misc_feature (1)...(207): n = a,t,c or g
ggacaaagtcaaagaggagacatttcacagatacctcagccaggcaccatgaggcctatgaggtcaagaatggagagaagtttgagaaattaggannanatattagcgtcagcacacaactcactacgaatgngacaaatcctagnggtcagatatnttatgagngtgnncgatgtggcagatatttgatggggntgccggncttgc

SEQ ID NO: 17289 - DNA, 385 bp, Homo sapiens
caaaagctgacacaaggaagatggacccttctaaaccgtcttccaacgtggccggagtagtcatcattgtgatcctcctgattttaacgggtgctggccttgccgcctatttcttttataagaaaagacgtgtgcacctacctcaagagggcgcctttgaaaacactctgtattttaacagtcagtcaagcccaggaactagtgatatgaaagatctcgtgggcaatattgaacagaatgaacactcggtcatctagtacctcaatgcgattctgagatatttgaatttcataaaattgtaactgaaatttaaaatttttagttcaatgtgattgttttctttaaaatgagtactgaattgtactggctgccttttttcctttgc

SEQ ID NO: 17290 - DNA, 455 bp, Homo sapiens
ggctaagtaagtggtacacttccttcttttataccttcactccttaaatgacgtagattctcccaagaagcaacagaaaaaccagcatcaggctctgagtatttatttcagttaatagtagtctcccagggaagactgggggaaatataggtgtttctgtcaactccaggaaaatcacagcatcatatgagagtactcagacctgctgcccactgaggagggggctattctcaccaatgggacaagagcagaagatgcggggtagacgcagccagtgactgctgctatgtggcaactggggtacgggagaagtcttgcttcataagtctgcgcctgatattgggagaaaggggtaaactggttagcaatggacaaaggtagcttgctgtgcttctccaaagaagggaacacacccatatccagtctgcttaccttgatcctacttcctcccttct

SEQ ID NO: 17291 - DNA, 559 bp, Homo sapiens
  misc_feature (1)...(559): n = a,t,c or g
ggcccgccgctncncttctacccagtgatcttctgnntgccnncntacgaatntaatacgactcactatagggaatttggccctcgaggccaagaattcggcacgagcaagtgggaactcaggcacaagctgaagctgatgtccacaggtggaatttcttcatccgaaaagtctctgatctgctttttaaaacattcagctgattgaaagagacccacctagaacaagcaggatcacctctcccacttacagtcagctgattatggattttcatcacatccagaaaatacctccactgggccgggtgcggtggctcacgcctgtaatcccagcactctgggaggccgaggcaggagaatcacctgaggtcaggagttcgagaccagcctgtccaacatggtgaaaccccgtctctactaaaaatacaaaaaagccggcgtgntggaggacgcctgtaaattccagctattcgggaggctcagcanganaatctcttgaacccggnaggcatagcttgcagtgagctgagattgcccattacactccagcctgggcaaca

SEQ ID NO: 17292 - DNA, 271 bp, Homo sapiens
gcggcatcaacaccttgttgttctgtgtgcaccaccccacggggtgcaaatccgcgatgactacgtcacaccagaagtcggccctgcggtcctccccgtaaccgcagtagcgcagaagcagcagctgcccgcacgtggtaatgatcgtggccacccagtacgtgtccgggttgttcttattagccacttccaatttcattcctggctggaagttgctctgaatgctgatttcaaccttaaggaatcagaaatagagaaaacccattactac

SEQ ID NO: 17293 - DNA, 465 bp, Homo sapiens
  misc_feature (1)...(465): n = a,t,c or g
gatgtcttnnaacccttttgacatcattacgaatttaatacgactcactatagggaatttggccctcgaggccaagaattcggcacgaggcttttacagaatgttgccaagctgctgataaagctgcctgcctgttgccaaagctcgatgaacttcgggatgaagggaaggcttcgtctgccaaacagagactcaagtgtgccagtctccaaaaatttggagaaagagctttcaaagcatgggcagtagctcgcctgagccagagatttcccaaagctgagtttgcagaagntttccaannnngtgacnnntcntaccaaattncanncngaatgctgccanggngacnnncntnaatncnctnctacnatttttatnntgcctgtttanntannttctctnnnnnnnccanntnnnnannnntnttnnnnattnannnctcgtgntnttcaccgnttntntgta

SEQ ID NO: 17294 - DNA, 372 bp, Homo sapiens
ggtgatgtgatactgaagcaggtaagaacaggtccctgctcttaaggttctctgcatggtaggggagacagaattgtaagttgttgctcctggtggagtgtggtaagggccgtgaaagacacatgtgcaggtgtcctgggagcccagaggaaggggaggacagagaggggccagtgggctctactaactgtgcagccagatgtttactggcagcttcctgcttcccaaatgtctgattttcttgggctcctggtagaccacacctttctgctgtgaaagcatagaagtcccagtggggttttgaaagtgccaattaaatcttagcttgacctgtgttaaacattccatgtgtggctctctcaagatctatcc

SEQ ID NO: 17295 - DNA, 336 bp, Homo sapiens
gggtgtccacgacctctgacagcccccgatgtcgaaagttaatcctcatggaccctagtttaaagggtgtgtgttttataggaataaatctaaagcactattttgtttctgtatagcatttttatcttttagaaacatcatttgttcagcattagtagtagttgtagtgcctgttttggtagccttcaaaattataaactgctcagagaatgtgacttttgagcgctttaggggtgcttggtcggaaaacagactgggtctgtggaaggaccacagacaggagagaacagctgctgtgacttagaagtgtagccggagtctcattccctggactcg

SEQ ID NO: 17296 - DNA, 441 bp, Homo sapiens
  misc_feature (1)...(441): n = a,t,c or g
agcctattaaccgatgcacttaaaatagtttaattggaataagcatagaatgctatgagagtacttaagagggtcttcaaatcctttcttgcaggatcagagaaggcatcccaaaaaatgcaactgctaagccaaaatccaaaggataaggagaaagtgggggaggaactttctaagcaaagagagtggcatgttaagagataaaactggccgggcatggtggcccatgcctatggtcctagcactttgggatcacaggtgtgagccacagcgtccagcctcattcttccattctctcttaatttccgtatagtcaggccttctccccctcacccctacacatagcaaaactgttcccctcgtgccgaattcttggcctcgagggccaaattccctatagtgagtcgtattaaattcgtaatcatgtcataanggtgtcaa

SEQ ID NO: 17297 - DNA, 285 bp, Homo sapiens
gctttaccaatgaagatgagttatacctgggcctgactgacagcccttcctataatagtcaagaaacctgtgtgatgactccttccccatgttctacaccaccagtcaagtcactggaggaggatccatggccaagggtgaattctaaggaccatatacctgccctggttcgtagcaatgccttctcagagaattttttagaggtttcagctgagatagctcgagagaatgtccaaggtgtaggtcataccctcaaaagatccagaaccacttgaagaaaattgg

SEQ ID NO: 17298 - DNA, 448 bp, Homo sapiens
gctatgacatgattacgaatttaatacgactcactatagggaatttggccctcgaggccaagaattcggcacgagtatatctatttctgcccttctccgtcttgctctgtaccccaggaggctagttgctatgagctgagacacctggacttccacaccagctagtttccacttggcttggtcagtgggagttactggcaggacgtcagagggtggaaggagtatttggtattattcaacctcctttcctacttttggccaaggttccaccagttgctgcctctccccatgacttcagcaactgtcactcttggtgactccaggtcttgataggccctgataacagcaattctttccctggtcctttaggcctagggttgataatgacttccacattttcatagtctctggatgcctcaacattcccggttttccatatcttagccca

SEQ ID NO: 17299 - DNA, 79 bp, Homo sapiens
gggagttaatacacaagcaaatgcgacctttctcccagggaattgtgatcctctctagaagctgggctgtggacctgaa

SEQ ID NO: 17300 - DNA, 432 bp, Homo sapiens
  misc_feature (1)...(432): n = a,t,c or g
ggctatctgaggatcgaacagttattttttaaaaatctattccctaagttgactcctcattggctcccgctatccagcctcccctcctgtcacacttaaaagtctgcccacaaatcctctcaagagacatggctcaaatctagcgggtgaaaaaagtctgagtgaggcttggagccaagatcctgcatcttacaacctgcagtttctgaggctgccgagagccctgaactccagatgcttgtataaacaagacttcctagaagtcattacctcataactcctcataagcttacacctgacaagcctctcaaagcgagagggctgtgttttccctaataaattcctttttgaacccacttgttagtcaagcgttgtgcacactaactacagaaaggaccctgaccttgggcataaatnatctttttgggcacg

SEQ ID NO: 17301 - DNA, 369 bp, Homo sapiens
ctgagtcgaaacttggatgtgcgagctttcatttacaagactctgatgccttctgaagcaaatggcttgctcaactccttgctggatatagtttccagcctcagcgccttgcttgccaaagcccagcacgtctttgagtatcttcctgagtttcttcacacatttaaaatcactgccttgctagaaaccctggactttcaacaggtttcacaaaatgtccaggccagaagttcagcttttggttctttccagtttgtgatgaagatggtttgcaaggaccaagcatcattccttagcgattctaatatgtttattaatttgcccagagttaaggaactcttggaagatgacaaagaaaaattcaacatt

SEQ ID NO: 17302 - DNA, 328 bp, Homo sapiens
gttttaaaggaaaaccttaggatctaattatgaaaatacctgattaagctaggatttacaaatgaattctgttgccatagtgtagtttaaaaatttttagaataattataagaaaatcagtaggaaacttgcttgaggaatagttcttagtgggcagcctccctccttttgctgttccctattttgataatctattttgatcttcaaaaatcatgaaaacggcccttaaagaaattctcttttaaaaaaatgacagggttacgattaagaaatgcttatttcaggaaagccaaggaggtactcttgtaagtacaaagcctgacccatc

SEQ ID NO: 17303 - DNA, 513 bp, Homo sapiens
  misc_feature (1)...(513): n = a,t,c or g
tttgaanccncntgctatgacntntgatacccatttaatacgactcactatagggaatttggccctcgaggccaagaattcggcacgaggacagtttcatatgatatcacctgctcatttaaggctgcagtggccaaacataccagatttttaatctgacttagataccaatttcaacagaagcatccaacacagctaggtactctctgtaaaccttcagccctaccccctctgcctcactcagtatatgtctttacaactcctacttaacggagacaatagaatcctatctggtggggagttctttattgctaccaagtctacagattgtatatgtgcacacacatccccttttcttaggttgctgctaatatgagaaacatttctgtccttgtaaggcttatctctacctattggttnttttttttcttaatcggcngtnaattaaccccctgctgtgngccagccactataannaaaataagnccattgccctgtnnaanctnaaattct

SEQ ID NO: 17304 - DNA, 348 bp, Homo sapiens
ggttttgggctcttattatgattatacatgacacctattcaatcacttctctattggtggacatttaggatatttatacatttttgctactgcatggaatgtacccatgtacccataagggtagggcagggagggcagtttcatgttattcctatatttgcttcatgtttttataatttgggaacaatatttgataagccatgagcttttatgttttaaaataaagcactcaattctttatgatggatttttatacagctatttcaaataatttggtttaatatctcttggcttcaatcagttttgaggtttttaagacccaaatgtagttggtcctaatgctgggtc

SEQ ID NO: 17305 - DNA, 532 bp, Homo sapiens
  misc_feature (1)...(532): n = a,t,c or g
ttggantntgaaaaccntatgacatgattacgaatttaatacgactcactatagggaatttggccctcgaggccaagaattcggcacgaggacttcttgaaacctgttgccatgcctttaccatgtttcccttcaagacagcctgtctatagaatatctgaaacacctgatgagagcttaatgcttaacctaagtatgtgttccagattgatcgaagttgagcttttccattcatatactctaaaattgtttatatgtggctcacaaaattttattatgtccaaaattgcttatttgtggctttaaagaaattcttagtggctgggtgctgtggctcttacctgtaatcccagcagtttgggaggccacggtgggtggatcacttgaggtcaggaggttgagacaagcctggctgacctggcgaacccatatctaccaaaaatacaaaaaattagacgggcgtggtggtgcgtgcctgtaatcccagctacttggaaggctaacacaggataattgcttgaccccggangca

SEQ ID NO: 17306 - DNA, 547 bp, Homo sapiens
  misc_feature (1)...(547): n = a,t,c or g
gggtcagtcgtgaagagggagctctattgccaccatgagtttctccggcaagtaccaactgcagagccaggaaaactttgaagccttcatgaaggcaatcggtctgccggaagagctcatccagaaggggaaggatatcaagggggtgtcggaaatcgtgcagaatgggaagcacttcaagttcaccatcaccgctgggtccaaagtgatccaaaacgaattcacggtgggggaggaatgtgagctggagacaatgacaggggagaaagtcaagacagtggttcagttggaaggtgacaataaactggtgacagctttcaaaaacatcaagtctgtgaccgaactcaacggcgacataatcaccaatgtaagttggtggtgctctgancgtgtggctcccantgcttgangggaaangggaagtgaaacatggggancgctcacatnccctaatgccaccctccacctccaaccccaagcttctttcctgttggtcattatctgccanncacttactgaagatccatcttgttcccnggcnntttac

SEQ ID NO: 17307 - DNA, 340 bp, Homo sapiens
gggaaacaccgtgttttctgacacagtcaattctgattttctttttcttttgcaagtctaaatgttagaaaactttcttttttttggagatagtctcattctgtcacccagactggagtgcaggggggcaatcacggctcactgtagtctcgacctcccaggctcaagctatcctcccacctcagcttcccaagtagctgggaccacaggtgtgtaccaccgtgcccggattttttttattctttattttttgtagagatggagggatctcactttgttgcacaggctggtttcaaactcctaggcccaagtgatcctcccacctctgtccccaaaatac

SEQ ID NO: 17308 - DNA, 500 bp, Homo sapiens
acaacagctatgacatgattacgaatttaatacgactcactatagggaatttggccctcgaggccaagaattcggcacgaggaaatacagaagcacagtcagcaaaagcaaagacccctcggggctgctcatctctgtgatcaggtgagggaggcaggaggcagggtctggggactgggggcagcggctcgacctccgctttggaagggagaagggttagctgggtcccaccctgctctcccttccctttcctccttgcctcccgcagcccctccccagggctctaacccctccccagggccccagcaattccccctccaccttttttttctggggttagctatagagagaggagccccgcctcagtcttttctttaggggcagcaccttctattacagtctcgggaccccaaagcacgctatttgggtttggtagagaaaaccaggtgtaaaggtgtgtttattgattcctaaaatgcttggttattggttgcctgtac

SEQ ID NO: 17309 - DNA, 498 bp, Homo sapiens
  misc_feature (1)...(498): n = a,t,c or g
ttggnntntganacngttatgacatgattacgaatttaatacgactcactatagggaatttggccctcgaggccaagaattcggcacgagaaactcatgaggtcaggagatcaagaccatcctggctactaaaccccatctctactaaacccatctctactaaaaatacaaaaaattagccaggcatggtggcgggcccatctactcagcctctcaaaatgctgagatcacaggcataagccactgtgcctggcctattctattcttataagacaccagtcagattggattagggcccacactacttggcctcgctttcacttaattgcctctttaaaagccctgtttccgaatacaatcccacgctgaaatactgggggttagggcttcagcgtatgaattgtgcagggacacagtgtagcccataacaccaggagcaagtcagacccataccagacttgtggaaccctgaattggtcattttgctgagctgcctga

SEQ ID NO: 17310 - DNA, 409 bp, Homo sapiens
ggaagttaagatatgccaacaacagcaattacaagaatgatgtcatgatcagaaaagaggcttatgtacataaaagcgtgatggaggaactgaagagaataattgacgacagtgaaattaccaaagaggatgatgcattgtggcctcctcctgaccgagtgggccggcaggagcttgaaatcgtcattggagatgaacacatttcttttacaacatcaaaaattggttcccttattgatgtcaatcaatccaaggatccagaaggcttacgagtattttattatcttgtccaggacctgaagtgtttggtcttcagtcttattggattacacttcaagattaaaccaatctagactgaatattggtgtggacatggggggtgggtgggagtagaaaattttgtgtatat

SEQ ID NO: 17311 - DNA, 487 bp, Homo sapiens
  misc_feature (1)...(487): n = a,t,c or g
ttnnnttttnnnntttgaancnnnanctangacatgattacgaatttaatacgactcactatagggaatttggccctcgaggccaagaattcggcacgagcggcacgaggaaatgattttcaatgccgagagagttggaggcctcgaggaagagcgggaatccgtgggcccactgcgggaggacttcagtctgagtagcagtgctctcattggcctgctggtcatcgcagtggccattgccacggtcatcgtcatcagcctggtgatgctgaggaagaggcagtatgnnnnnnncagccacgggatcnnggaggtnnnacncccgctaccnactgaagantncggcctgacntcnatgccatggatgatggtgagaagatcaccnctagtgacnnggaacacaacttgaggaaaaacnaagacacccgcaaaancnggnccaagtcacaagaggacnggaagacnangtgggttccatcaaggtcct

SEQ ID NO: 17312 - DNA, 496 bp, Homo sapiens
  misc_feature (1)...(496): n = a,t,c or g
gcagcatttgctcacctaatgaatgtttatgagtgcctgctgcatgcctgctgctgtggctgcttgggacacagggtctaactttgggtactggtctatggggtggtgggggtaggcaggagggaagcagcttggcagctggtgctgacgttggaagcggggggacaacagaggcagttctggcttcacagaggagggagtcgtgagggggcaggctcctcccanagtagggcacggcctgcaggagctctcaggtgtgtctgtggaagggatgaggtgggcttgatgcccctgtgggaagtgctttgcatgccaggcctgagcatggactttatgctaggcatcaggaatttattgaaagctttatttatttttttaattctttttttttgaatttgganataaagtttcacttttgttgcccaggctggagtgcaatgcccnatcttggcttactgaacttctcctcccgggtaaaagtgattctcctgcctna

SEQ ID NO: 17313 - DNA, 390 bp, Homo sapiens
aagaaactttcagccaaggaatttggtctgcttaaacccacaagtgccaggtcaggcttggcagaaagcagcagtaaattcaaacctactcagagcagtcttaccagaggaggcagtggaaggatctcagccctgcaaggcaagctttctaaactggattacagagatataacaaaacaatctcaggaaacagaggctagaccttccatcatgaaacgggatgacagcaacaataagactttggctgagcaaaacactaagaatcctaaaagcactactggtagaagttccaaatctaaagaggagccattatttccatttaatttggatgaatttgttactgtggatgaggttatagaagaagtgaatccttctcaggccaagcagaat

SEQ ID NO: 17314 - DNA, 354 bp, Homo sapiens
cttggaagcaaataatcatagataactgttcacttgggcagctcctctgtgcagagctgagatcaagtaattgtaaatattttgaggttaactcacaaacaacctcacagccaaatagcacttatcctacttatagaaaggaaattgagggacagggagacagtcactaacaagggtcacacaggccataggtggcagattagagacatatgaggtctgtctgcagccacagccccctcctctcctcaaccgggggtgatggggctgtttgttgttaggcatctgcatctgaggccagtcatgggttcacttccttttgtcttgtgcatccgcagctcagaagtggagattctg

SEQ ID NO: 17315 - DNA, 816 bp, Homo sapiens
attacgaatttaatacgactcactatagggaatttggccctcgaggccaagaattcggcacgagttgaagaaaggaggaaccaaagcctctctctgctctacaaagtaccttatgtagcccaagaaattcaagaggaaattgatgagctccttcaggagcagcgtgcagatatggaccagttcactgcctcaatctcagagacccctgtggacgtccgggtgagctctgaggagagtgaggagatcccaccgttccaccccttccaccccttcccagccctacctgagaacgaaggatctggagtgggagagcaggatgggggactgatcggtgccgaagagaaagtgattaacagtaagaataaagtggatgaaaacatggtcattgacgagactctggatgttaaggaaatgattttcaatgccgagagagttggaggcctcgaggaagagcgggaatccgtgggcccactgcgggaggacttcagtctgagtagcagtgctctcattggcctgctggtcatcgcagtggccattgccacggtcatcgtcatcagcctggtgatgctgaggaagaggcagtatggcaccatcagccacgggatcgtggaggttgatccaatgctcaccccagaagagcgtcacctgaacaagatgcagaaccatggctatgagaaccccacctacaaatacctggagcagatgcagatttaggtggcagggagcgcggcagccctggcggagggatgcaggtgggccggaagatcccacgattccgatcgactgccaagcagcagccgctgccaggggctgcgt

SEQ ID NO: 17316 - DNA, 439 bp, Homo sapiens
gcaacctatatggggaggaaatggtacaggccctgaaacagctgaaggacagtgaggagagggcctcctacatcctcatggagaagatcgaacctgagccttttgagaattgcctgctacggcctggcagccctgcccgagtggtccagtgcatttcagagctgggcatctttggggtctatgtcaggcaggaaaagacactcgtgatgaacaagcacgtggggcatctacttcgaaccaaagccatcgagcatgcagatggtggtgtggcagcgggagtggcagtcctggacaacccataccctgtgtgagggcacaaccaggccacgggaccttctatcctctgtatttgtcattcctctcctagccctcctgaggggtatcctcctaaagacctccaaagtttttatggaagggtaaatactggtaccttccccca

SEQ ID NO: 17317 - DNA, 379 bp, Homo sapiens
gttcgggctccgtctcaggggctgaagtttgtgaggtgtagtattgagtcctgtttgagctattgttctctttttcctgaaaaatggcactgtcaaagagggagctggatgagctgaaaccatggatagagaagacagtgaagagggtcctgggtttctcagagcctacggtggtcacagcagcattgaactgtgtggggaagggcatggacaagaagaaggcagccgatcatctgaaaccttttcttgatgattctactctccgatttgtggacaaactgtttgaggctgtggaggaaggccgaagctctaggcattccaagtctagcagtgacaggagcagaaaacgagagctaaaggaggtgtttggtgatgactt

SEQ ID NO: 17318 - DNA, 383 bp, Homo sapiens
  misc_feature (1)...(383): n = a,t,c or g
acccccattaaattttgttagaaaaattaccacattaaatatatgagttaagtagattggatttgctgaaattggtgttgggcatattagcaaaatattcttaatttgtggactcgattcttttttactacatatttcccaagttatcttaagatgtctgtaaatttaacttttattaaagttttgtcaatctttgtgaaatagtggttgtggaacagtagaaaaccatatggggactatagtgcaacctatttgggtaaagaaaccatttgctaaaatggagaaagtaaatagatttttatttaaattacagaaacatgttaaaggccggacaaaggaaagacaataaaatcataaattatcaaaaaaaaaaaanggggggg

SEQ ID NO: 17319 - DNA, 520 bp, Homo sapiens
  misc_feature (1)...(520): n = a,t,c or g
atctganaccnttgactgattacgaatttaatacgactcactatagggaatttggccctcgaggccaagaattcggcacgagggttttgccatgttggccaggctgggctcgaactcctggcctcaagcaatcccccacctccgcctcctgagtaactgggattacaggtgcgagccaccgcatccagcctgccaaattttctaaagtagttttgccagtttatactcctgccagctgtatataagaattctctttgtgccatattcctgataacacttgatttgaatcagccttcttgttttttgccattgtagaaggtgtaaaatggtatctgctagaggccttaatttacatttcattaatgtctgaggttggacatattcttatgtatgtgttcattgtttgtcatcacttgtgagaatagataatacaggtattactccattatattggtggttaaataaagggactaaaaggaagagtgatttgcttcagtatgcacttgataagtggcaggaa

SEQ ID NO: 17320 - DNA, 486 bp, Homo sapiens
  misc_feature (1)...(486): n = a,t,c or g
gctcacccacaccttaaactcacaaccccttgaacaactccttgactaccaggaccttttcttcctccatgtctcaatttcataccatcatagacattctcagggccatgtcaccagcaaaaccaactccagcatcctctcctctgactaccaatttctattctcacagctttctccgttttcaaacttgacaaaacctcctatctcttaattcctccattatcctgcagtctacaaggctcttcagctccattactttcccttccccagagtcatcactgcaccaaccccctctcaacagaaacatgcagctttgccaagaagcttatgaggcatcaggtccctcacttgcctgggctcattcagagctctgggaggggtcccagcaacatgttcacatggtcatatttcttttatacttgtgaaagtgagatatcttaccacaacctactaaaactgntgntctttccattttactcccccttg

SEQ ID NO: 17321 - DNA, 425 bp, Homo sapiens
ggtcagtaaagggtaccctctaaactcaaggacttggaaaacaaagtttcactttgttatatgtcctccagagagtttctctggtggtcaagagacagtaatatctttgacctgagagcctgttcaggctacagggcaaaaccctttctgggagcttgagaagtctaagtgtctatcttgctacatacaacaacagtaaaagagctccccaaatgctggctagtattattgtgtgcctagaagtgttctaaattacctatgtatattttaatttattaaaaggactttggattcacattacaggtttgccacttacttgggcaggttacccaacccctctgtgccgccttcttctgtaaaacagccctcataagattgttttgaatgaagtattaccatagcatagaccttttattcaaacttgg

SEQ ID NO: 17322 - DNA, 366 bp, Homo sapiens
gaacgcctaagtctagtcttgacagagcaccagcttaaatcacatgagcctatcagagaacttatgacaatatttagggctaaactgatgttactggtgaaccagtatctggaatgatttccataactcacttaacttgcacatttataatgtggactttaaaaaataattatcaggatggctactctgaagccaggagcttaggaagtgtcacagatggtatatatttgtattcctgcctcatgtccctttccctgaagtggcgtgtggagtatgagggattacggtgtatttgtaggtggtgtccctgaaaggctatcaggggacttctggttctgcttcagttctgttttgtgaagacagtca

SEQ ID NO: 17323 - DNA, 493 bp, Homo sapiens
gcggcacgagctcctgaggaatgatagggacagaccagccacactgcaccaggcctgcctgacactccgcacgggtcgggtagggtcacagcctcaccatgggtgaacctgacgtgtagggattaaaggccattccctctcctcgaaagctcctattaaaagtcaatttcaaaaccaaacatcaatttcaacttttattaaaacaaagactttcctaagaaaatccccaataattcatggggctgatgtgctaaaaacgagtgtcttccccctgaactaacaccctcgctcattacaggagtcaggggttgcctgctgtctccaggaagccctgctttctgcaagagccctgagcagctgggctgcaggaggagacctggggaaagggttggccctgttcttggcaactaaggggtgtcttgtcacagagaagaggctgttggagaaagcctggcttagctgttagagcctgtggttgagactcggctgtgga

SEQ ID NO: 17324 - DNA, 231 bp, Homo sapiens
gcctgagggaaaaaacagactttcagtttatattgtataggtggagaaatgacttgtatccaaaatattaaaagctcttacaactcaagaacagaaagacaacgcattctaaaacttagcaaagggtctgaacagacctttctttaaataatgtaatcaaatggccaataagcacacaaaaagatgcttatcactaatctttaggaaatgcaaatcaaaaccactagtgag

SEQ ID NO: 17325 - DNA, 363 bp, Homo sapiens
gggaaaggggtatatatcacaataatatacacaagttcaaattaagcattagacatccttgttcttgaaagatattatccagcctgggtcatcctaaggagttgtactattttccttccaactttacacattatttccccgagatccctacagccttcccaactctaaaatctccttaatatatgatgaagaacgagtcagagttctgccctgtaggccaccttttcatattcaagttcaccaaggacttctcctgtaacagaagcatctctatggaagaacaacaatgttttattcacaatgattttcctccctattacatactcatacatgggagagatgagtagtgttaagttctaatta

SEQ ID NO: 17326 - DNA, 397 bp, Homo sapiens
gggcgtgaaggagagcgactggaaccagcacaaggagctggagaagtgccgtggcgtcttccccgagaacttcactgagagggtcccatgacggcggggcccaggcagcctccgggcgtgtgaagaacacctcctcccgaaaaatgtgtggttcttttttttgttttgttttcgtttttcatcttttgaagagcaaagggaaatcaagaggagacccccaggcagaggggcgttctcccaaagattaggtcgttttccaaagagccgcgtcccggcaagtccggcggaattcaccagtgttcctgaagctgctgtgtcctctagttgagtttctggcgcccctgctgtgcccgcatgtgtgcctggccgcagggcggggctgggggctgcgagccac

SEQ ID NO: 17327 - DNA, 351 bp, Homo sapiens
tccagtttggagctattatgaatattctagtattgctcctctgaacattctagcacttttgtttttggagcacacgaatgcacttctgttgattatatgcctagaagtgaaattgttgagttatacagtattcacacagtcagccttagtggctactgctaaacagttttctctagtagtttgcgccaatctaatcaccagtagtgtatagaagctccttttactccacattttgttaacacttggtgttttccttctttttgattagtcatttagcaagtgaaacctattttttacattttgatatctccaataactaactaaatggagcacttttaatatgcttttggg

SEQ ID NO: 17328 - DNA, 367 bp, Homo sapiens
  misc_feature (1)...(367): n = a,t,c or g
gttcgtgtattttaaaatgccaggtaaacagcaatattaagagctaattaaaagaatgttagtatttgctgaaactgcataattggagaaagttaagtttaatttgagacattggtagagaaagttaaactttgcttgtttaggccagtgcaggagcatgtttaccaacaatccctgtggtaacttagaaggcatggagataatgataatagaaaaacagaagtactggccaggtgcggtggctcacgcctgtaatcccagcactttgggaggctgaggcaggcagatcatgaggtcaggagattgagaccatcctggctaacatggtgaaactaataatataaaaaaattagccggncgtggtgta

SEQ ID NO: 17329 - DNA, 325 bp, Homo sapiens
ggaggtggaaagaaaagtgatgggaaaaagaagagacgaaggggaaagtcagggttaaagtaatcttaatcttacgaatgcctgtcagaccctgtcacctgcctgcaaggcctgcaaccctgtgtggagcttggccattaggatagtgcagtgtagacaaagctgcatttttctcaagagctagattcatactcatttcagcacttgagaatatgtgcatttgatgttccataattcctaccttccacagtgtaagagacaggggaaaccaaagtgttttcctattcacacagcacttaccactcagctcagcgcttctgacacc

SEQ ID NO: 17330 - DNA, 687 bp, Homo sapiens
gcttcccgcgtccgccgattcctcctccttggtcgccgcgtccttggctggcgtcagaaaaatggctacaaacttcctagcacatgagaagatctggttcgacaagttcaaatatgacgacgcagaaaggagattctacgagcagatgaacgggcctgtggcaggtgcctcccgccaggagaacggcgccagcgtgatcctccgtgacattgcgagagccagagagaacatccagaaatccctggctggaagctcaggccccggggcctccagcggcaccagcggagaccacggtgagctcgtcgtccggattgccagtctggaagtggagaaccagagtctgcgtggcgtggtacaggagctgcagcaggccatctccaagctggaggcccggctgaacgtgctggagaagagctcgcctggccaccgggccacggccccacagacccagcacgtatctcccatgcgccaagtggagcccccagccaagaagccagccacaccagcagaggatgacgaggatgatgacattgacctgtttggcagtgacaatgaggaggaggacaaggaggcggcacagctgcgggaggagcggctacggcagtacgcggagaagaaggccaagaagcctgcactggtggccaagtcctccatcctgctggatgtcaagccttgggatgatgagac

SEQ ID NO: 17331 - DNA, 452 bp, Homo sapiens
  misc_feature (1)...(452): n = a,t,c or g
gcgtgggatcaggcagcagagcttttttcccctttgccttgatccttcgcaaggctgagccactgggctgtgggggaaggggtcaaggccatatcccaatacgtgtagggcgagggtccctgctggcacattcaggctgtgctgggaagaagagacctgggcttggaaggaaccggtccccgacggtttctggttgcctcgcctcttcccccttttgtcagctgagcagtttgtggtttctatgcccgcaagtttcaggaagtattcacaaaagaaaaatacattttttcccccaggggtggggcaaggacagtggagagagtgctaggaaatgagtcccctgggaaaggggaccgggcccgtgatgttaaatatctccggctcccaagtgactggatttgcctaggaccttcagatcaacagacttcagaccctnaaacctgcccggggcc

SEQ ID NO: 17332 - DNA, 441 bp, Homo sapiens
gaagatggatcctgccttctgcggggggaggcagtcttctaccagacagtagcaagaagccctaccaccccaccagagatgggaaaaggagttcattctcaccagcaaaagggaaatgcagacacgccatggtaagaggcaggcagctgcctttttcccataggaacggggggcagacaggaagacgacatcaccaaagggaccctcaaaaataagcctttgggaaacaaatgagccatttgggatgcagacagatatcataagcctgacttgcgccgggtgcagtagctcacacctgtaaccccagcactttgggaggccgaagcaggaggtcggctcgaggccaggagttttgagacaagcctggacaacatagcgagaccctatctccacgaaaacatacaaagttagccaggcttggtggcacccgccgccatagtc

SEQ ID NO: 17333 - DNA, 336 bp, Homo sapiens
ctttgatctgttcacctctggtcttgcaaggttgttcttggaaacgctttttacaaatgtgaaaagggagacaggtggagtcagtgtttccaaacttgaccatagatcagaatcacctgtagggcttcacgagatacagattgctgagttctgcctccagagtttctgatttagtaggtctggagtggggcctgagaatttgagtatctgagttcccagataatgatgatgctctggatctgggaccacactgtgggattcattggttttaaagaacctatactgaagtctcatatcgggtaagctgaagaccttgccttaaacaggcatttatct

SEQ ID NO: 17334 - DNA, 390 bp, Homo sapiens
ggacaccttcctcagggagatgcttgaggctccccatcaactggcctgagctcagacccagacgtggtgcttctcacactggaggagcacacatccaagagggactccaagccctggggcagggtggggggccatgttcccagaaccttgatggggtgagaagtacagggcagaaccaagaacataaaccctccaagggatctgcttgatatcccaagttggaagggaccccagatacctgtgaggactggttgtctctcttcggtggccttgagtctctgaatttgtcgggttctcccatgatttggggtgatttctcaccctctgtccttcccccagcacaaagcactggccttgcctccaggaccttgcttccttctcatcttgcct

SEQ ID NO: 17335 - DNA, 809 bp, Homo sapiens
ggaaatgaggaccagagttaacaaagaaatggctggatataaaaggaaactcctcatcaatgactttggaagagagagaaaatcatcatcaggaagttctgattcaaaggagtctatgtctactgtgccggctgactttgagacagatgaaagtgtcctaatgaggagacagaagcagatcaactatgggaagaacacaattgcctacgatcgttatattaaagaagtcccaagacaccttcgacaacctggcattcatcccaagacccctaataaatttaagaagtatagtcgacgttcatgggaccagcaaatcaaactctggaaggtggctctgcatttttgggatcctccagcggaagaaggatgtgatttgcaagaaatacaccctgtagaccttgaatctgcagaaagcagctccgagccccagaccagctctcaggatgactttgatgtgtactctggcacacccaccaaggtgagacacatggacagtcaagtggaggatgagtttgatttggaagcttgtttaactgaacccttgagagacttctcagccatgagctaactgccccctggcggccaggaagagaaacagctcctccccgactaggtggaaggctggccaggcaccaagcatgtgtgtgcacttgtacctggtggtttctctgttagcagtccattagctcatgctgaattatttttgccttactttcttaagaaacattaattttatgtatagtgagtatattttgcatgttttaaattgtaaatggagctaagtccaagaaagtacttgaagctctctt

SEQ ID NO: 17336 - DNA, 362 bp, Homo sapiens
aaatgaagtcttattctattcctcaaacatgatatgtccctcacaccattgctatctggccgcaactaaactttttcctgctcaggtctccagtcacctctctcttttttaaccaggcaatagcctttcagacccaacaatgtgcagcctcttgatccccatgtgaccctgatgcccccttcctactacctaaaaaactctcccccttaaatttggtacatcacaaacttcagctttcttctgcctccttggtgactggtctcagttatagagtcttgtcccttttcctaactctagaaaggtggtgcccagagggttctcgggttatcttctctctttttcttttcctttttttttttttt

SEQ ID NO: 17337 - DNA, 459 bp, Homo sapiens
  misc_feature (1)...(459): n = a,t,c or g
ggnncccnccccctttgccctttgaanacccgctatgacatgattacgaatttaatacgactcactatagggaatttggccctcgaggccaagaattcggcacgagggggagcagcacgttttcctttggtaggtaggatctctatactagtgaacagtgccagttccacactttggacttataactgttctctagttattgtaacacagaatactgtcaatccctaatttacttaatgttacttattggaagtggggctgatgaaatacgcacaggagggaaatctactgtgtttaggcacaggcagccccagtgtataaggagatcatattccaaaaggttgtcagtaggttgtttgcaacctggaatgtattttcctttatagaccaggttatccatggtggttaggcccctatagcagctggaaaagatgatcaaaccaataggttagctgacat

SEQ ID NO: 17338 - DNA, 389 bp, Homo sapiens
cggacgcgtgggcggacgcgtgggcggggcagaagtgctggtctcggtcgggattccgggcttggtcccaccgaggcggcgactgcggtaggagggaagaggttttggacgcgctggcctcccgccgctgtgcattgcagcattatttcagttcaaaatgaactatatgcctggcaccgccagcctcatcgaggacattgacaaaaagcacttggttctgcttcgagatggaaggacacttataggctttttaagaagcattgatcaatttgcaaacttagtgctacatcagactgtggagcgtattcatgtgggcaaaaaatacggtgatattcctcgagggatttttgtggtcagaggagaaaatgtggtcctactaggagaaatag

SEQ ID NO: 17339 - DNA, 440 bp, Homo sapiens
gaagaggaaaggggaatgaagacaaacctaaggtttttggcccgggcaactgaaaaatggaacttccatttattgagatggaaagggctactggaggagcaggttttagggaatgggagaaatttaggtgttcactttggaaaaaaaattatatagggatagcgaggagcaggttttagggaatggggcacatttaggtgttcactttggaaaaatttttatatagggatagcatatcacagaattaaactaggaagaaaatcccatgatagaaagcactggaggagcagggcacgctggggaaatagtgtttggtaaacattgttttacgaaggatataaaatggaccagcctatggattgaaggacgcccgggaatcttgttacaaagaaagggggagttggggagatggacccagggcaagggcagcaaggaaccat

SEQ ID NO: 17340 - DNA, 427 bp, Homo sapiens
ggaagaacatcccagtgggatagaggggttgatgagcctccacccaaccttgtcatgtcctcaaagggcccacacattccctaaagccacacaaagggcctgcctcccagggctcctgacaagtttcagaattcagtttcacctgggtcacctctttatgcatgatgccccaaaagttgtcctgctcaagcttgaacacaaagacctcactgacccccaaggccacttgctcccaggtaatcatagctgcaatttgcactcagctgattgatactgagttgagattcatttcagagacactcagagagtaggattgcctccttagcctcatgacaacacttccaagactggaaaattctgtgctttcactctgcatctcccctaccatcgtgctgccatccttagagactttacgaagccccacagg

SEQ ID NO: 17341 - DNA, 336 bp, Homo sapiens
ggcagagcccatttatttgtccaaagtgagagtacataatgactcaattaacagcataaggcaccagccctgagctggcaaaagagaaggctccaaggggaactttaaagcctggctgggtgttcttcatcaagacaatcatgctgcgtaggttgtagtctcctcatttatgaaacagtgatttggcctggatctaagattccttatacatgttaactaactctaaggggaaagagatagatcataaattacatgttaacgttgaggggaaattgatagatcataaattaaaatataatttaatatgttatatatttctattgatttatataccta

SEQ ID NO: 17342 - DNA, 344 bp, Homo sapiens
gcagactatcaggttctatgctagagaaggtggatggacctagagaaaaaagtatcacatttctgacatttgaggaaaatccccattgaaaagggcaggtcttgcccaataaacctgcagcaaactcacttattgataagccctaaccaggcacctttttttcttagagactcatgtttaaaactgaatatatgcccaaaggtcaataactattagagggaagcttcagtatgaaaagtatatataaataccttaaacaaaataagcagagaagaaaaatttggtggaaatagagataatatagagaaaaaatttcaaaatgaagctttcaattctcaatgaga

SEQ ID NO: 17343 - DNA, 321 bp, Homo sapiens
gtttctgtgagtgcgacaacttctcctgtgccaggaacaagggagtcctctgctcaggccatggcgagtgtcactgcggggaatgcaagtgccatgcaggttacatcggggacaactgtaactgctcgacagacatcagcacatgccggggcagagatggccagatctgcagcgagcgtgggcactgtctctgtgggcagtgccaatgcacggagccgggggcctttggggagatgtgtgagaagtgccccacctgcccggatgcatgcagcaccaagagagattgcgtcgagtgcctgctgctccactctgggaaacctg

SEQ ID NO: 17344 - DNA, 302 bp, Homo sapiens
  misc_feature (1)...(302): n = a,t,c or g
tatgtttcacctgttgctccacaaatgggcctcacctgctgatggggtgggattccagcccctacccaactccctgctccacatcaagggagcagagaaccctgaagtgtgatgctggctgccatcctctaggtcccacatgacctcggggttccccagcacagctgtagggaagcagcttttgtgttgggctgacactggacactggggttggctgctgcggtggaaaccctctctcaggaggttgctcctcttcactgtgtgttaaccctccncattactggcgtatttgtctccatcca

SEQ ID NO: 17345 - DNA, 786 bp, Homo sapiens
aattcggcacgaggaatgaagtaactgaatttgcaaaaacatgtgttgctgatgagtcagctgaaaattgtgacaaatcacttcataccctttttggagacaaattatgcacagttgcaactcttcgtgaaacctatggtgaaatggctgactgctgtgcaaaacaagaacctgagagaaatgaatgcttcttgcaacacaaagatgacaacccaaacctcccccgattggtgagaccagaggttgatgtgatgtgcactgcttttcatgacaatgaagagacatttttgaaaaaatacttatatgaaattgccagaagacatccttacttttatgccccggaactccttttctttgctaaaaggtataaagctgcttttacagaatgttgccaagctgctgataaagctgcctgcctgttgccaaagctcgatgaacttcgggatgaagggaaggcttcgtctgccaaacagagactcaagtgtgccagtctccaaaaatttggagaaagagctttcaaagcatgggcagtagctcgcctgagccagagatttcccaaagctgagtttgcagaagtttccaagttagtgacagatcttaccaaagtccacacggaatgctgccatggagatctgcttgaatgtgctgatgacagggcggaccttgccaagtatatctgtgaaaatcaagattcgatctccagtaaactgaaggaatgctgtgaaaaacctctgttggaaaaatcccactgcattgccgaagtggaaaatgatgagatgcctgctg

SEQ ID NO: 17346 - DNA, 1180 bp, Homo sapiens
  misc_feature (1)...(1180): n = a,t,c or g
gctgagatgaaggaatacataacaaagttttctttagaacgtcagacttgggatcagctcttgcttcactaccagcaggaggctaaagagatattgtccagaggatcaactgaggccaaaattactgaggtcaaagtggaacctatgacatatcttgggtcttctcagaatgaagttcttaatacaaaacctgactaccagaaaatattacagaaccagagcaaagtctttgactgtatggagttggtgatggatgaactgcaaggatcagtgaaacagctgcaggcctttatggatgaaagtacccagtgcttccagaaggtgtcagtacagctcggaaagagaagcatgcaacaattagatccctcaccagctcgaaaactgttgaagcttcagctacagaacccacctgccatacatggatctggatctggatcttgtcagtgactttatgagagtttctgccacaaggtgcccaagaggagaggaatgggaagagtgccccagcacgtggtgactgcgtgatttctgctcgttgcctttgaagataactggcaggactgactgtagaacactttgacttttttcaaaaagtgatggaatttgtacatccaaatgaatattgtatagacaattttcccaggaatgtgcaaaatgcttgaaagttcaaacttcttttttgaaatgatcttcagatccagtggcccattcttttatctttatcctgtgaaggtgtttttcaggttttgaaacaatccaaaaatcatttaggaccaagtctaaggaaacattttagtggccaagttggattccgattgtaaaggaatgatactaattttctagcatggctctgaaggtgattttaggtagaagagttttgaggctgggcgcaatggctcacgcctgtaatcctagcattttgggtgactgaggcgggtggattgcttgagcccagaagttgaagaccagcctgagaaataaggtgaaaccctgtctacaaaaaatacaaaaagttagctggctgtggtggcgtgtgcctgtagtgctagctactcagaaggctgaggtgggaggattgcttgagcccaggaggttgaggctgcagngagttctaattgcgccactgcactccagcctgancgacagagtgagacactgtcttaaaaaaaattaaaaattg

SEQ ID NO: 17347 - DNA, 325 bp, Homo sapiens
  misc_feature (1)...(325): n = a,t,c or g
caaaaattaggaatagagaagtataacctggccaaaaggagatgaaaaattagactaagtgtcctcacaatctgaggtatctacataaaaatgttcattaaatcactgatgaatcttcacacaagtactcacagaactaaactgtagctgtaagacagctgaacatgacagactataacgaaagtgtgagaaaatccgttatgacctataattcaaatgagcatggtacttattctgttctgctgcaagcagatttgccgaagggtcactagtcatctttaacctttcccatgccatatcagttggnctccctatccattagggc

SEQ ID NO: 17348 - DNA, 343 bp, Homo sapiens
gcatatttaggggcacacgctccttattctactcctgtaacatagtagaacttattccttctaactttacttttgcaccacttaaccaacttctatacatccctccttcccccaccccacttaatataagcatcttttattttttatttttgagacaaagtgcctatctcaggtcatcgggcatgagttagattcataaggagttagattcatagatccctcacatgtgaaggttcacattcctatgagagtctaatgccacagctgattggcaggagacagagctttgggggtgggggtaatgcttgtccacagctcacctcctgttgtgtggtggggtagg

SEQ ID NO: 17349 - DNA, 398 bp, Homo sapiens
tcagtatcggctcagcatccttcccccttctgttcgattagaagctgatcgaagcaacagtgccataaagaaatgggctagatatttccagaggctgcaatctggaggcgtttggaggtaccgaccaagaccatcactatgaccgatggagactatgattatctgatcaaactcctggccctcggggattcaggggtggggaagacaacatttctttatagatacacagataataaattcaatcccaaattcatcactacagtaggaatagactttcgggaaaaacgtgtggtttataatgcacaaggaccgaatggatcttcagggaaagcatttaaagtgcatcttcagctttgggacactgcgggacaagagcggttccggagtctcaccactgg

SEQ ID NO: 17350 - DNA, 380 bp, Homo sapiens
gatttgcattgctttcactttcccaaagcagactggatttcttgctttgcattgttaaggaagatacttagctgttttatcttcccactctgttcactgaccaggctggagggaccaggaggcagccaactgcccatcttatttttcctttttgacctgggagtattactgaggagcaaaggtgcaagctctagatcaaaagacagctcttaccccctgactggtttcatctacagtggctctgtttttttctggtgtctatactgtgtgcagaagtattttggccttgcctagaggtggggaggaagaacgctgctttggattggattttggacttgcaataccttgttcctgttgtcccagttctctgggtgagatga

SEQ ID NO: 17351 - DNA, 375 bp, Homo sapiens
  misc_feature (1)...(375): n = a,t,c or g
gaaactccaggccatggtgattgagatatcaaacaaaaccagcagcagcagcacctgcatcttggtcctactagtctccttctgcctcctccttgtacctgctatgtactcctctgacacaagggggagcctgccagctgagcatggagtgttgtcccgccagcttcgtgccctccccagtgaggacccttaccagctggagctgcctgccctgcagtcagaagtgccgaaagacagcacacaccagtggttggacggctcaaactgtgtactccaggcccctggcaacacttcctgcctgctgcattacatgccttaggctcccagtgcagagcctcccctggagtggcctgnaggcaaatctnacaaggaagg

SEQ ID NO: 17352 - DNA, 448 bp, Homo sapiens
  misc_feature (1)...(448): n = a,t,c or g
gaacgctacctgacaactcaattctggtggtggatggcggggacttcgtgggcactgctgcccatctggtacagccccgcggccccctgcgctggctcgatcctggggcctttgggactctgggagttggtgcaggatttgcacttggggccaagctgtgccggccagatgctgaggtctggtgcctgtttggggacggagcttttggctacagcctcatcgaatttgatacattcgtcagacacaagatcccagtgatggccttggtagggaatgatgctggctggacacagatttctcgggagcaggtgccctctctgggcagcaacgtggcctgtggcctggcctacactgattatnacaaggnaaccatgggtctgggggcccggggcttgctgttttacgggaaaacnaagatcaagtggtcaaggngcttgaccnatnccac

SEQ ID NO: 17353 - DNA, 390 bp, Homo sapiens
ggaagaggtttctcacgaagttcacctccatacggcgagtccgtggtgataattactgtgcactgagggccacgctgttccaggccatgagccaggctgtggggctgccgccctggctgcaggacccggagctcatgctggtacgctgctgctgcaggtttgagtccaaaatgtttcaaacaatttttgtgagaaaactttccctttctgtccatgctactttctagtatcgtctgcagtatgatgtcagcatgtgccgtttattcagttttgtgtggctggggtgatttcacatagttaaatgaccaaaaataattggtgtttcctagaagagaaaaatgataaaatttatatgaacaatttaattgaattagaaagcagatgtttgta

SEQ ID NO: 17354 - DNA, 527 bp, Homo sapiens
  misc_feature (1)...(527): n = a,t,c or g
gcggcacgagcttagtgcaagtattgccagagcccaaggggtgaattccaaagggtttttacaaggctatacataaaagataaagccctggcttgtatatcacttgcacataggagataaagccccagcagttgtatgtaaatttcaaaagcagagaagtatggcacaaagaaactcctgatagtaacactgtgttcccactttgcttaggggcatattggcaccgtagcatggtacacccttactgctacctgccatgaggccagataatagctagcagcccctggtctcattctactctggatgggtactgctgtttcctgaatgaaagacactgagattgatttcatgctaatgactgttggttaagagttcatgctttctattcaatagcaaagacttggaaccaacccaaatgtccgtcaatgatagactggattaagaaaacgtggcacatatacaccatggaatactatgcagccataaaaaaggatgagttcatgtcctttgtanggacatggatgaac

SEQ ID NO: 17355 - DNA, 399 bp, Homo sapiens
  misc_feature (1)...(399): n = a,t,c or g
cggacgcgtgggtgtaagtgaatactatgcatactattatgccaataaattagaaaaattaggtgaaagagtggattttctaggaaaatagaagttttgccatagttaagagtattaggttgaaccaaatgacgttgttgcctttgatggtcagaaatagttatatattgtcagtttcatatgattcagcttaattgaagcattaaaatggaagaactttatgtaactaaaaaaaaaaaatcnctgngtnccaanggggttncnagggagttntncaaaangttcaaanatgatttgctgtatgaggnntcaaaaatagaggtaganagttttccagttcattctgnganactagccncttttaactttaaatgaaattttaggccaaagaactaaatg

SEQ ID NO: 17356 - DNA, 429 bp, Homo sapiens
ggatatttgtttcatgctttggtttataatccagtactactttattttcttgctcagattgttctagctttggtcattgggagctcttttcagttggctgataagtccctttgacataccattgtcatgatggctttgtttgattttgtttgttttttaagtatttccttccctttctggcactacaagatgctccaggttcatcttgtatatttcctcagtcatagaatcagatatttctccaaggatccctgattccttttattggagaatggtattagaagccaagagctaggtgttaggtgtgtttgttgctactggggcacaatgtggttttaatttgcattcctgtgatgattgatgacatcagacaccattgtatatgtttattggttatttatatatcctgttgtcatgtgacaaagcctg

SEQ ID NO: 17357 - DNA, 493 bp, Homo sapiens
  misc_feature (1)...(493): n = a,t,c or g
ggtgaagaggtcggagttcaggttttcaccaagagacctttggatgaacagcagaagaacagttttaatccagacgacattatcaattgccttaaaaaataccctaaagcccttgtgaagtatctggaacatcttgtgatagacaagagactgcagaaagaagagtatcacacccacttagctgtgctgtacctggaagaggtgctgctgcagagggcctccgccagtggcaagggtgcagaggccaccgagacgcaggccaagctgcggcggctgctccagaaatctgatttataccgagtccactttcttctcgagaggctgcagggagctggcctgcccatggagagcgccatcctgcacgggaagctgggcgagcatgagaaggcgctgcatatcctggtgcacgagctgcaggactttgcagcggccnaggactactgctgtggtgctccgagggccgagacccaccccaccgccagcaactctttca

SEQ ID NO: 17358 - DNA, 357 bp, Homo sapiens
gagggaagaaggcacagaaggctgcttactgacgtgagcttccatctttaaagtggagcatcctaactcctggacttttccctcttcctgcagctcactgctctgtcttgcattcgattcttgcttatcagcagtgccacccctgtaggtcaaactctttcctcccattgacttcttacgggtctccctgcctggacattcaccctcctccacagtcacctcctctaagtgtggctcttatattagtcccatctcaagaacttccaaggagtccctgttacctactcagtaaagccaagcccctaaggtcctcccgctccttgatcctgatcttgatcctatcctgtcttccttcac

SEQ ID NO: 17359 - DNA, 551 bp, Homo sapiens
  misc_feature (1)...(551): n = a,t,c or g
gcgtgccttgggctcccgagtagctgggatttttagtggagaacaggtttcaccgtgttggccaggctggtcttgaactcgcaacctcaggtgatccacccacctcagcctccccagagtgttgggattgcaggcatgagccaccatacctggccccttttgttgttttgaggggcaggcagtaagaagcagggatttcttcaaatgctagtaagcacaaagagagagagggagaagtttttgtaagtaacgaacagggccgggcatggtggcgtgagaggccgaggtgggcagatcacgaggtcaggagttcgagaccagcctgaccaacatggtgaaacccccgtctccgctagaaatacaaaaattggccgggcatggtggtgcacgcctgtggtccagctagtcgggaggctgaggcagganaatcgcttgagcctgggangtgaggttgcagggagctganatcacccctggactccagcctggacnacngagtangactcccgtttnaaaaannnnnnnnnnnnnnnnnnnnnnnnnnnnttttt

SEQ ID NO: 17360 - DNA, 309 bp, Homo sapiens
  misc_feature (1)...(309): n = a,t,c or g
gcacaggtctctggatcaggaatttgggancagcttagctggtggttctggcaaagagtgtggtgtaaggttgcaaacaagatactggttggggctgcagtcatctgatgctttgactggggctgacttttctgctcactgacctggctgttaggcagaggccccagttcctcttcttgagggcagaggccccagttcctctccttgagggcagaggcctaagttcctttccttgagggcagaggccccagttcctctccttgacggcccttccatagagtgtcctcacagcatggtggctggctttcc

SEQ ID NO: 17361 - DNA, 442 bp, Homo sapiens
ggttggccaggctggtttcgaactcctggactcaagggatccgcccacgtcagccttccaaagtgctgggattacaggcgtgagccactgcacctggcccatttttaaaattatgcacaaacgttaaatatcctttagatttttgcataatttagcataccttactgatgtccttagcaaaaatttccagaaccatattttagtgtgttgcatggtaaccccacaaaagatatgttcatgtcctaatccccagaatctgcaaatgttatttggaaaaaggggttttgcagatgtaattaagttaagaatcttgagataagatcatcctggattatccaggtagcctcaaaatcaagtgacaagtgtctttgtaagggacaagtagacccattacagagaagacgacgcgcagaaaaggaggaagcagtgtgctcatggaggc

SEQ ID NO: 17362 - DNA, 341 bp, Homo sapiens
gcagcatcagcaccaattgtgagcttgtcagaaatgctgtgtctcagactccagcccagacctactgaaccacaatctgcattttaacaagatatccattaaagtctgagatgcactatgctaggctactctatgacaatagctggcttactctattaattgtgatgttaacctttgctgttcatttgttaattcccctgaaggaataaattactcaaatctctaagatatttaaaaacagacaagaaaacaaaacaaagagaaaatgatgacatactgatattatctttatctgtccttccagttacggccaaaatctcttttgcctttcaatcctcaaa

SEQ ID NO: 17363 - DNA, 497 bp, Homo sapiens
  misc_feature (1)...(497): n = a,t,c or g
atcagctatgacatgattacgaatttaatacgactcactatagggaatttggccctcgaggccaagaattcggcacgagggactcggctgtgttgatggagagactgtgcaagtacatctacgccaaggaccgcacagaccggatccgcacatgtgccatcctctgccacatctaccaccatgctctgcactcgcgctggtaccaggcccgcgacctcatgctcatgagccacttgcaggacaacattcagcatgcagacccgccagtgcagatcctttacaaccgcaccatggtgcagctgggcatctgtgccttccgccaaggcctgaccaaggacgcacacaacgccctgctggacatccagtcgagtggccgagccaaggagcttctgggccagggcctgctgctgcgcagcctgcaggagcgcaaccaggagcaggagaaggtggagcggcgccgtagggccctttcancnngacataacctggagctgtgg

SEQ ID NO: 17364 - DNA, 500 bp, Homo sapiens
  misc_feature (1)...(500): n = a,t,c or g
gacagccgacactcctataccaaaagacagattaacaagagtaagccatatcaaatttagttaatcatagccttatgtgacacaagagcctttggaatgaagacctaaagatacagagaaagctatccatttttatgcttaggtttgatgcataatggatagttgtgtagagcggtgattggacaaggagagaatgaccccagcaaggcctgaccgttcagattcttcctggcctctctgagtggcattctttcactccaggtagggggtaaacctcccctggaatgagggtcttatgacctactatcagacaaggtaaatcagagaatttcttgcacagaaaggnggggaatgaagggaaaggttanagatgtatttcaaggttttacggctgactctcgggganangggttctggttccaagtccttccttggggaaaaaggantcnaatttcnaaggcttgcctcnanggcaaataaggggtgananacagggaaca

SEQ ID NO: 17365 - DNA, 386 bp, Homo sapiens
  misc_feature (1)...(386): n = a,t,c or g
ttccatgttccctgggggctggtcagctccaagttgtgggtggcagagctgtgtttcagcatgaactgactagagacccatctggaggcaaatattaagttgccaggactgctttcacttcagggtgattgaaggacacatattgaagtacctaagaatgccagaaagtgttctattgcccaaaaaacaaatcagaaaagcctattcttttttgcaacgctgttaatgattagtggagttctgaaattactttgtgccacttggaagtactgtgaaaccgcattcactgggattttgctgtaattcacatccgctggactgaagtttaccttgatgttagctataagaaatagttttctaacacatacgatagcaaatcnagacaa

SEQ ID NO: 17366 - DNA, 376 bp, Homo sapiens
ctgaaagatatctcaaaaatatatcctaaactaaatgaatcccaacttaatgtccccttagttgaattctcaatatgaccatggtcattgcattgctacccaacacacaggcaagagggatagagacagcatagtggaaagaaagattccctgaaccaactgtggttaaaatatcttttgtagattttccaaaccatacaactgtaggaccataatgctagggctccttccagggctgttcaagcaagagacactgaagctttatctttaacttcattcacttcactgtgtacttgcatcgggtctagagacttacagaagagaaaccatgagaaaagacatagggcccagataatgagacagaagggaagagagt

SEQ ID NO: 17367 - DNA, 445 bp, Homo sapiens
gactcactatagggaatttggccctcgaggccaagaattcggcacgagagccagagaagccgtgaccatgggcgaggcatcctccataggactgagagagcggggggcagcccggtcagtgagttgattaggaaccagcgatagagatcgagaaagacataagccaatattgggggtaacataagtaggaggccatcagatattagccacaaaagacacagatattattggagagtagatggtgaagcgacagtagaacggtttattctgtggttttgatgagcccacattcttggtggttctttggaaagatgctgtcacattatgctgacataatcacagggacagatgatgattgaagtgaatgagatttccctgactccaagatttttttcaataaaggagaacaagatcctttctgatttgccaaattttataaaagttg

SEQ ID NO: 17368 - DNA, 419 bp, Homo sapiens
tccgttatcacatgattacgaatttaatacgactcactatagggaatttggccctcgaggccaagaattcggcacgagaggatattgtcatcaatgaggccatttacatgcagaaggtgatttactacctctgcatcttattgaaagatccagtggaaccacatgggatatcccaagtagtacccgtcttccagagtgccaagccccggctggactgcttgattgaagtatacaggagctgccaggagatcctggcacaccagaaagccacatcaacaagcccatgagccccagcgttcagaaggccagcattgtcttccatgggagatgactcttaagccataggggctggttttccgtactccaaaccatcaggtggacacagtcctaggaaccattaatggatgtagtgcatctta

SEQ ID NO: 17369 - DNA, 500 bp, Homo sapiens
  misc_feature (1)...(500): n = a,t,c or g
nnttggannacagctatgacatgattacgaatttaatacgactcactatagggaatttggccctcgaggccaagaattcggcacgaggaggcccaggtgtgtgccatcatcgagcgtgtgcagcgctacctggaggagaagggcactaccgaggaggtctgccgcatctacctgctgcgcatcctgcacacctactacaagtttgattacaaggcccatcagcgacagctgaccccgcctgagggctcctcaaagtctgagcaagaccaggcagaaaatgagggcgaggactcggctgtgttgatggagagactgtgcaagtacatctacgccaaggaccgcacagaccggatccgcacatgtgccatcctctgccacatctaccaccatgctctgcactcgcgctggtaccaggcccgcgactcatgctcatgagccacttgcaggacaacattcagcatgcaaacccgccagtgcagatctttacaaccgnaccatgg

SEQ ID NO: 17370 - DNA, 507 bp, Homo sapiens
  misc_feature (1)...(507): n = a,t,c or g
gactggttctctctcttcctggatgccacaccttttttccatctcttttctagtttatttttcatcttcattttgacccccacctaaggtgcatcgggnaaaattccatctttatcatcatgttcttctccgtgaacattcttcctctcaaggaggtcacaagttctgtgtgagtactgaatgatttctctaaccagaatacaattgctcactagcaagttaagactcagaactgggtcaatcagatttagcatttactgagagcttactaggggcactaaaaacatctctgaatagggccccaatgccaacacagcctggaagaatggggaaggcatgtgatggtcttacctgtcgctgctttaggaagtccagggcaatctgcacattctgcagcctatgaaaacgcatcctgcccttctcccggggctgcaaacaacaaaaaangggatgttaattctggctacacaaatttaccatacaagacccttctcttttatttccaag

SEQ ID NO: 17371 - DNA, 363 bp, Homo sapiens
gcggcacgaggattaaatagaaaaagaagaaagaaaataggacaaaggttgtaagaaggtgtaatgaagatcaagaagtaactaccaacccttaaagataaatgactggaaaatgtgattatgtgatctatgtctcttaattgccctcttaatgtctggaattgtgaaaatttacaacgaaatcagacttttgatatcaaaaagatgttttcagctggggacagtgacacgttcctgtagtctcagctactctggagtgcaatggcgcgatcttggctcaccgcaacctccacctcctgggttcaagcaattctcctgcctcagcctcctgagtggctggggttacaggcgcccgccaccacc

SEQ ID NO: 17372 - DNA, 348 bp, Homo sapiens
gggaagaaccagaaacctcttctcactccccatccaggcatatgaaccactcagagcccaggccagggctaggggctgatggggatgctgcagaccccgtcgacaccagagactccaaatttctcctccccaaggaggtgaatgggaagcagcatgagccactctcttttttcttcgacatcatgcagcaccataaagaaggaaatggcaagcagaagctgaggcagaccagcaaggccagcagcgagccagcgaggaggcccacagagccccccaaggccacagaggggcagtccaagccccgggcccagactgagtcaaaggctaaggtggtcgacctcatgtcca

SEQ ID NO: 17373 - DNA, 321 bp, Homo sapiens
  misc_feature (1)...(321): n = a,t,c or g
gatcaagttcaatatcatcgcctctctctatgactacaaccccaacctggcaacctacatgaagccagagatgtggggaaagtgcctggactgcatcaatgagctgatggatatcctgtttgcaaatcccaacatttttgttggagagaatattctggaagagagtgagaacctgcacaacgctgaccagccactgcgtgnccgtggctgcatcctaactctggtggaacgaatggatgaagaatttaccaaaataatgcaaaatactgaccctcactcccaagagtacgtggagcacttgaaggatgaggcccangtgtg

SEQ ID NO: 17374 - DNA, 350 bp, Homo sapiens
gatgtggtggcatcctgcttcgcggccgtggctgaccaccacctggctcagttggccttctggcccctgagactctttcacagcttggcatggggcagctggaccccgggggagggtgtgcattggtacccccagctgctctaccgcctggggcgtctcctgctagaagagggcagcttccacccactgggcatgtccggggcagggagctgaaaggactccaccgctgccctcctggaactgctgtactgggtccagaagcctctcagccaggagggagctggccctggaagggacctgagctgggggacactggctcctgccatctcctctgcatgaagatacaccat

SEQ ID NO: 17375 - DNA, 435 bp, Homo sapiens
  misc_feature (1)...(435): n = a,t,c or g
tttganacctttggnnaacagctatgacatgattacgaatttaatacgactcactatagggaatttggccctcgaggccaagaattcggcacgagcctccttttaaggtgtgtttgtgtgtgtgtaggcattaaaaaattgtataaggaagctgggcacagtagttcgctcctgtaatcccagcattttgggaggctgaggtgggaggatcacttgagcccaggaatttcataccagccgggcaacatggcaaaaccctttctctactaaaaatacaaaaattagccaagtgtggtagtatgcacctataatcctagctactcaggaggctgaggcaggagaatcacctcaacccaggaggcagaggttgcagtgagctgagattgcaccattacactccagcctgggtgacagagcaagactctgtctcaaaaa

SEQ ID NO: 17376 - DNA, 522 bp, Homo sapiens
  misc_feature (1)...(522): n = a,t,c or g
gtganaaattanttgganaacatcnngaatacccttttgacatgattacgaatttaatacgactcactatagggaatttggccctcgaggccaagaattcggcacgagaaagagagtattaaagagaagtaacttcaccaactgcaaaatgtctatatatatatcccatatggatttaaaaaactaggccgggcatggtggctcacacctgtaatcccagcattttgggaggccgaggcaggcagatcacctgaggtcaggagttcgagaccaacctggccaacatggtgaaaccctatctctactaaaaaaaaaagtacaaaaattagccgggcttggtggtacgcacctgtaatcccagctactcaggaggctgaggcaggagaattgcttgaacataagaggcggagtttgcagtgagccgagaccattccactgcagtccagcctgggcaacagaacgagactatctcaaaaaataataattaactcaatttaaggaaaggattaataactaccactc

SEQ ID NO: 17377 - DNA, 399 bp, Homo sapiens
gatgtgggtgctggtgccggggtactaggtggaactggtgtggactctggagtcacatctgggtcccatttgtggctccttcactctctgagcatctccctatggtaagaggggacccatctccccagctcacaggtctgttgggaaggttgggtggggcagtataagacactagccactcagtggctgtcttcaaggcatccagggtgcctggctctggactggactgtgctttgcggacacagacagctagacagcagggttacagctgttgaatgcacatagcacagggcgctcattggatggtagggtggattgacatggtggaaggcccttacttaacagcatgtgctttcttgggagcaggccttgtgctggatggcccaccgacccagtgaa

SEQ ID NO: 17378 - DNA, 1144 bp, Homo sapiens
  misc_feature (1)...(1144): n = a,t,c or g
ccgctatgacatgattactaatttaatacgactcactatagggaatttggccctcgaggccaagaattcggcacgagctggaagagagtgagaacctgcacaacgctgaccaggtaaagggaggagttggcaggataactggaggtgtgtattttatgctttgggaaggctcagtgggacccgagggttgaggtttgagactgagatctgggctaatttgttgactcctccttcgccttccttttcagccactgcgtgtccgtggctgcatcctaactctggtggaacgaatggatgaagaatttaccaaaataatgcaaaatactgaccctcactcccaagagtacgtggagcacttgaaggatgaggcccaggtgtgtgccatcatcgagcgtgtgcagcgctacctggaggagaagggcactaccgaggaggtctgccgcatctacctgctgcgcatcctgcacacctactacaagtttgattacaaggcccatcagcgacagctgaccccgcctgagggctcctcaaagtctgagcaagaccaggcagaaaatgagggcgaggactcggctgtgttgatggagagactgtgcaagtacatctacgccaaggaccgcacagaccggatccgcacatgtgccatcctctgccacatctaccaccatgctctgcactcgcgctggtaccaggcccgcgacctcatgctcatgagccacttgcaggacaacattcagcatgcagacccgccagtgcagatctttacaaccgcaccatggtgcagctgggcatctgtgccttccgccaaggcctgaccaaggacgcacacaacgccctgctggacatccagtcgagtggccgagccaaggagcttctgggccagggcctgctgctgcgcagcctgcaggagcgcaaccaggagcaggagaaggtggagcggcgccgtcaggtccccttccacctgcacatcaacctggagctgctggagtgtgtctacctggtgtctgccatgcttctggagatnntttanatggncgtcatganagcnatncccgcnacgnatgatcagtatnttttancnnnnntttncntgnntnnttatanttttgtnntnntntttttnatncttnngntnnnngttttt

SEQ ID NO: 17379 - DNA, 381 bp, Homo sapiens
gtaccactctgcaggtcagtttcctcatctgtgagatggatgtaataatagggtgtgatgagatgatccctagtgagtcattggtgttgctgtggccaccaccattgttgttactgggagagttttggatttggaatcccgtgagcaggattctattctggctgtgccatgtgccagctgggcagctgtaggaagtcacttcctctctgagccttcacttcccagtctctaaactggggctcacaaatgtcgcattgcagtttgggggtggatctgttgtaagaatggacagaaaaaagatggtcaactgtaatgtgtggtgcatcgtgagctgtcactcccgtgtgccctggtctcctgctggcctcactgtggtttgac

SEQ ID NO: 17380 - DNA, 359 bp, Homo sapiens
actcctttgggaaaaaaaacaaaacaaaacaaaacaaaaaaaacactatttccggggttgttctttgtttacactgtccacggaatataaaactttcaaatagtagggatcagaacatcagtatttaatatcgccactgatctgataccagaatctcatagtaggcagttaaatcttaaaaacaaacctcccgtatctgcatttaattgtatgtaaaagcttccctccacctaccaaggcagtcttcttccttggttcccatactgcttctttaactattttagcctttaaatgctaaattaggtttttctagttcactatagtttgcacatttaaatatttccattcttcacaagaat

SEQ ID NO: 17381 - DNA, 485 bp, Homo sapiens
gctttttctctgccacaaagaccacagagtattgatatggagactgtgccatcaagatagtatgtagcagatgtgtaacatgagtgagggaaagcgggtgtgttgttttggggattatttgttactacagcattaccttggttgagtagactgataaatatgttgatatttaattgcatagagcaatcaactgcaacagaaaaagtctatcttaagagctaaaagctctttcttccatctgaatgaagcacagaaattaagtttcttataaaaataactaataaaacttctaatttcatcatcgaccatatgactgaatcattgttcctctctattgtttaaaatttaaagtctttctccatatggtttacatttgtgtttgtgcttggcattggatcacctacctgacccctctaacttttccttcattacagcaagagccatcccactggtcaggggacataatacatagcccagatctttag

SEQ ID NO: 17382 - DNA, 472 bp, Homo sapiens
  misc_feature (1)...(472): n = a,t,c or g
tttgataccnaacanctttgacaccattacgaatttaatacgactcactatagggaatttggccctcgaggccaagaattcggcacgaggatgaagtttgccaaacattgctttcaatttgttaaagaagagactgttgatgttttgggagtctttaccctcagtgtgacctggtcattagaaaacattggtcccagtgggatagcaaagagaaaatctttttttaaagacgaagtctcactctgttgcccaggctggagcgcagtggcatcatctcggctcactgcaacctccgcctctggggttcaagcaattctcctgcctcagccttctgagtagctgggtctacaggtgcccgccaccacgttcggctaatttttgtatttttagtagagatgaggtttcaccataattggccangctggtctcgaactcctgaccttgtgatccgcctgcctcagcctcccaaagg

SEQ ID NO: 17383 - DNA, 331 bp, Homo sapiens
  misc_feature (1)...(331): n = a,t,c or g
ctttataaaacgtaggtgcttctgtctattggtcacccaagtaacaagaagacagtttggagcagccaatttagggataggtatttgctttatttgcaggggtgacaaataactgtacctattacttcttttaactgatttgttctgccatggtggatctatcacaattacatcaaatgttttcctatagtttagaagtggttgcatacaagaaatgtcagataaaagaaaactgcttttcggtggtagcaggtatttctgtcccattaaagtaatcacttttgtaaagctagagttgttttcaacaactngcaaaaataaatcctgttct

SEQ ID NO: 17384 - DNA, 538 bp, Homo sapiens
cctttgatgccacatctatgacatgattacgaatttaatacgactcactatagggaatttggccctcgaggccaagaattcggcacgaggcgagcgtgagcccagcgacaggagagtgagctcaccacgcgcagcgccatgaccagcaagggtcccgaggaggagcacccatcggtgacgctcttccgccagtacctgcgtatccgcactgtccagcccaagcctgactatggagctgctgtggctttctttgaggagacagcccgccagctgggcctgggctgtcagaaagtagaggtggcacctggctatgtggtgaccgtgttgacctggccaggcaccaaccctacactctcctccatcttgctcaactccccacacggatgtggtgcctgtcttcaaggaacattggagtcacgacccctttgaggccttcaaggattctgagggctacatctatgccaggggtgcccaggacatgaagtgcgtcagcatccagtacctggaagctgtgaggaggctgaaggtggagggccac

SEQ ID NO: 17385 - DNA, 347 bp, Homo sapiens
gggaaagtgtagcatcagttacagagttaatggtgcaatgtaagaaacctttaaaagtttctgatgaattagtgcagcattatcaaattaaaaaccagtgtctttcagcaatagcatctgatgcagaacaagaacctaaaattgatccatatgcatttgttgaaggagatgaggaattcctttttcctgataaaaaagatagacaaaatagtgagagagaagctggaaaaaaacacaaggtaagagaaatcacagtacaccaaagggtcactgttgattttgtagcactgcatatagtaacactcttactaccacagttatctcacttcttttgtcttagaatagaa

SEQ ID NO: 17386 - DNA, 381 bp, Homo sapiens
gctcgaactcctgacctcaggtgatccacctgccttggccttccaaagtgctgggattacaggcatgagccaccgcacccggcctcatactcattcttatgtgtgtcatgtatcgctgcttttatgctacagtagcagaatggagtaattgggacagagaccatatagcctacaaatcctaaaatatttgctgcttggccattaataaaacatttaaagtcagactattacaaaagttgccaggtccctcacagcatcatctttgatagctttaaatgcctaattggcagccttgtcatggactagtagggactattatcattctgttctcttatgtttggtggggattcttatttccttactccctactgtgacacttta

SEQ ID NO: 17387 - DNA, 399 bp, Homo sapiens
  misc_feature (1)...(399): n = a,t,c or g
gcacgaagtcaggagattgagaccatcctggccaacatggtgaaaccccacctctattaaaaatacaaaaattagctgggcgtggtggcgcttgcctgtaatctcagctactctagaggctgaggcaggagaatcgcttgaaccccggaggcggaggctgcagtgagccgagatcgtgccactgcactccagcctggtgacagcgagactcttgtctcaaaaaaaaaaangtccntngntntaanaaaagngcccncggatnctagtagttaattcagncncatnngngaaataccttataaaangctacttttaaacaagcngtttttatgaaagggcttgnaaatgttaatggattnaagctcctntntancataacgnattatacattcanaaagg

SEQ ID NO: 17388 - DNA, 431 bp, Homo sapiens
gtggtgtatggttacggagctgtgcatcttgggacatgtagtagcccaggtcggcttgtcactcgctgtgagatggggagattttgtcttttgatttatccctgtagggctggcagggttgtagatgaagggggaatgatctgagccttggttcccctgacacgtcttgctagccccagggttagagtgggcagggcagagccgcgcagcacctgggagcggtacctttcccttgggcagcctggggtcccaggaacaagccagggcgagtggcatgtctgcctgagcagggtgtggccccagaaagctgaggagtgtgggctggcagagagcttcgagggcaaggccacccgcgggggccgtgtgtgtggtggggcttggcatgtgatggcagctccaggcatgccgctgcttggatggctttttttgcc

SEQ ID NO: 17389 - DNA, 373 bp, Homo sapiens
  misc_feature (1)...(373): n = a,t,c or g
ggtcccagacgcttgtaaaggtggaatgaagtgtgtcaaccactatggaggatacctctgccttccgaaaacagcccagattattgtcaataatgaacagcctcagcaggaaacacaaccagcagaaggaacctcaggggcaaccaccggggttgtagctgccagcagcatggcaaccagtggagtgttgcccgggggtggttttgtggccagtgctgctgcagtcgcaggccctgaaatgcagactggccgaaataactttgtcatccggcggaacccagctgaccctcagcgcattccctccaacccttcccaccgtatncagtgtgcagcangctacgagcaaagtgaacacaacgtgtgccangacata

SEQ ID NO: 17390 - DNA, 531 bp, Homo sapiens
  misc_feature (1)...(531): n = a,t,c or g
ttngnnnccccttggnnnncaanagctatgacatgattacgaatttaatacgactcactatagggaatttggccctcgaggccaagaattcggcacgagggtgaatgacggggtattgcctaaggctggtgcactgaactccaacgatgcctttgttctgaaaaccccctcagccgcctacctgtgggtgggtacaggagccagcgaggcagagaagacgggggcccaggagctgctcagggtgctgcgggcccaacctgtgcaggtggcagaaggcagcgagccagatggcttctgggaggccctgggcgggaaggctgcctaccgcacatccccacggctgaaggacaagaagatggatgcccatcctcctcgcctctttgcctgctccaacaagattggacgttttgtgatcgaagaggttcctggtgagctcatgcaggaagacctggcaacggatgacgtcatgcttctggacacctgggaccaggtctttgctgggttggaaaggattctcaagaagaaaaaaag

SEQ ID NO: 17391 - DNA, 377 bp, Homo sapiens
ggccctgagagccggccggctggagctgcagctgcgctacaacggtgtcggccgtgtcaccagcagcggcccggtcatcaaccatggcatgtggcagacaatctctgttgaggagctggcgcggaatctggtcatcaaggtcaacagggatgctgtcatgaaaatcgcggtggccggggacttgttccaaccggagcgaggactgtatcatctgaacctgaccgtgggaggtattcccttccatgagaaggacctcgtgcagcctataaaccctcgtctggatggctgcatgaggagctggaactggctgaacggagaagacaccaccatccaggaaacggtgaaagtgaacacgaggatgcagtgcttctcggtga

SEQ ID NO: 17392 - DNA, 376 bp, Homo sapiens
  misc_feature (1)...(376): n = a,t,c or g
ggtagaattgtctcatgtggaatttgcttcagaaggtatagagcacaatggttaatgtgttatcttttcagaaacatagaactaagttgatgggaaagaggggacaattttattctgtaatcactaaagtggtttggagactttcccaaagatattggcaggatggctttataacataaaccatgacttggagaggataaaataatcagtantcttcactgaagtataangtgtgaatgaggtggnaaccgccntggaaaaggaaanctttccttatggccnggggaactttntcaaanggtctttaacntggcctttcctgggngncaatggcccctgcctttaattantaanggggtaanccgtaaganccccc

SEQ ID NO: 17393 - DNA, 412 bp, Homo sapiens
  misc_feature (1)...(412): n = a,t,c or g
ggagctagcaccatgagcaggtctgttttttttccaccaagttttgcttaagatttggaaagaacactctacctccttagttaattatgtgcataaatatttgcttctccaggaaggacgttttcccacgttattttaaaggactcacatagatttaaaggttttcttttctcccacccctaaggaattcagtgttggtaaatggtgcccatctcaggaacagagaagcttctgattagttaggagtccagctgtggatataggagcagagatgggaggaagaacagtcctgtacttcagcagggcttccgggagcctaccatacctcagagataccatgggttcagttccagaccaccacnatanagtgagtcacatgaantttttgggttcctagtatatataaaagggg

SEQ ID NO: 17394 - DNA, 368 bp, Homo sapiens
gaaaatgcaagcacagatgaaagcatgaaggtctgcgtgacaggcagcagcagcggcactttgcctgcatccctgggtttttctgccctaaaggatttttaggtttttgatattgcattattcctgaagtttttgtttatcagattaaattgtaactttggatacaataaaattaacatttattactttctgccatgaatttaaaaaattttaggtataatttcaaaattacattttaagtgtaatttatgttacttatgaaatcatggaactgggtcagatatggatttggattttgattttgattctgttataaggagttaaatattaagtttcttgataatgtagagatacatttgagtttatat

SEQ ID NO: 17395 - DNA, 458 bp, Homo sapiens
gcaaggccaaggccaacccgacaggttcaaagcaggcttggccactgtgaaaaaacaaccccctcaaaacttcaggagaatgtatataataaatgaaggtacaatttcataccttcacaggattattgagaaggtcaaattacataacagatatgaaagcactgtgtaaactatgcggactatgctgcaccaaataactgtaaagaattattaactagactgtaaatgccttgagggcaaggaatgcatctgcaacgggtatttgtgaagtacttgacagtttgctaaggacttctgtggattttcctcatatgctactcataacaaccctggaaggtaaggggaattgttatcccaaattccaaataaagacactgcaggtcagacatcacacaggtggtaaatagcaattctgggacttactttagatattctgctcaggcttgctattcaagtgg

SEQ ID NO: 17396 - DNA, 338 bp, Homo sapiens
cttaatttaaatgtactttgtgtatagccacctttatggagacattacggacaaggaagtctgaacaaaggatgttcttagtcatgcattgtgaggcggtaggaatttgaagaacctcaggatgcctgaacctcaggatgcctgaacagtttcctttcttcccacttctctggtcataattgaagttaacactcaggtaaatgggttttttaagtgttttttattctctgaaggcaggagcagaccatatctgcctctgaacacaggctgtagcggcctcatttcttctgcaccccaccctcccgccttttccttgaatttccatctgctcaggctcc

SEQ ID NO: 17397 - DNA, 431 bp, Homo sapiens
  misc_feature (1)...(431): n = a,t,c or g
gcgcgggccaatttcctcaattccaatgatgtctttgtcctcaagacccagtcttgctgctatctatggtgtgggaagggttgtagcggggacgagcgggagatggccaagatggttgctgacaccatctcccggacggagaagcaagtggtggtggaagggcaggagccagccaacttctggatggccctgggtgggaaggccccctatgccaacaccaagagactacaggaagaaaacctggtcatcaccccccggctctttgagtgttccaacaagactgggcgcttcctggccacagagatccctgacttcaatcaggatgacttggaagaggatgatgtgttcctactagatgtctgggaccaggtcttcttctggattgggaaacatgccnaccaggaggannaaaangnnnnanccncnnctgt

SEQ ID NO: 17398 - DNA, 447 bp, Homo sapiens
  misc_feature (1)...(447): n = a,t,c or g
ggtaagttcactggcaataaccttgcagaacctcacaaagccccttctcaccaacaagccaccacagctggttccccactgagacacctcattggcaagaactcagttctcaattcttccacagcagagcattccagcccatattctgaagaccctatagaggatcctctacagccagatgtcacagggatacgtctactttcacttggtgctggagaattcaaaagtcaagaacatgctaagcataagggacccatggtagaaagagatcaagcagcagagcacaggttctcctggatgaaattactagcacataaagttgggagacacctatccaagacactggttctccttccggaatgaggccctgggaggaccttcctagccnngacactggttctccttccagaatgaggcctgganggaccctcctagngatctgtactc

SEQ ID NO: 17399 - DNA, 262 bp, Homo sapiens
gaactggaagaagtctttgcggatccccggagaccttcgggtagcaactgtcaccttgatgctggcgatcctgagctcctcactggctgagggcagagactctcccgaggatttcgtgtaccagtttaagggcctgtgctacttcaccaacgggacggagcgcgtgcggggtgtgaccagacacatctataaccgagaggagtacgtgcgcttcgacagcgacgtgggggtgtacccggccggtgacgccgcaggggcggca

SEQ ID NO: 17400 - DNA, 317 bp, Homo sapiens
cacccactcagtggaaatgattgcatgtttctatcttatagtattttgcaagcatatgcatattttaaatgtatgtttcattttgcctaatctatattgtttgtcttctccactaattataaaatattggaagttggggatcatgaaaccttcatatgtgggtatcctgtatttcctggtatagtgttttgtgcatgtgacctccggatattatcaccttccatctccatagcccttgcctgtaatgaagcactctccaacattttttattcatttttgaaaaatcaaatctgaagcaaaattgtcctatacccccc

SEQ ID NO: 17401 - DNA, 435 bp, Homo sapiens
  misc_feature (1)...(435): n = a,t,c or g
accgtttgactgattacgaatttaatacgactcactatagggaatttggccctcgaggccaagaattcggcacgagtcatttacctagttcccctttacagcgactatggacaagaacctttcagttggttttgtcattcttggccagatttaaccaagaaatttctttcactatcagcctcattttctcaggcatgcttacagggacaaagttgttttgagttgagttctcagcaaataagcattaatatcaaactgtgctaaacttgtctcacttggtataagaacttcagcataaagagattagtttatcctttgacaccaagtcttttttttttctttgagacagagtcttgccctgtcacccaggctggaatgcattggggngatctcanntcagtcactgcaacctccgcntccccggttcangcaatt

SEQ ID NO: 17402 - DNA, 323 bp, Homo sapiens
ggagagctagcaccatgagcttcaataccctgctttgccacttataaaaatttccacggctagaatttcaaagacttgcagaaattgaagaaaccgaattggatcaattgatttccatttttttgaaggttgctaggaacacttcaccaactccttctcccttatcctttagaaagagggtgctggagctttcaacgaagcaggacttttgctagaaatgagctttaaaatctgcttgcctgggtcaggatacctgaaggtcaaagaagaaagtgaagccacatgaaagtcatttatattccaatctgtggtctgggttactt

SEQ ID NO: 17403 - DNA, 464 bp, Homo sapiens
ggaggcaggcagatcacttaaggtcaggagttcgagaccagcctggccaacatagtgaagccccatctctactaaaaataaaaaattagttgggtgtggaggcacatggctgtaatcttagccgctcgggaggctgaggcagggtaatcgcttgaacccaagaggcaaaggttgcaatgagctgagatcgtaccactgcactctttcttatgaaggtttctgtgattaagtttggaaaggatgaattaaacaaagttaaacagatttcttaactacaggactcttagccttttcacaggaatgtgcatgacttggtgactgcctacatgtcctgcctcatctcacgttttttttccctgacccactttgcttactctgcccagatttaatctagtactaaggatcaaattacaattgctatgttacatgggcattttctcagtttgccacagcaatattatgat

SEQ ID NO: 17404 - DNA, 549 bp, Homo sapiens
  misc_feature (1)...(549): n = a,t,c or g
gnnnnnnnnnntnnntnnnnnntttganaccgttttgactgcntcgaatttaatacgactcactatagggaatttggccctcgaggccaagaattcggcacgagcaagtgtctgaaggatggtgctggggatgtggcctttgtcaagcactcgactatatttgagaacttggcaaacaaggctgacagggaccagtatgagctgctttgcctggacaacacccggaagccggtagatgaatacaaggactgccacttggcccaggtcccttctcataccgtcgtggcccgaagtatgggcggcaaggaggacttgatctgggagcttctcaaccaggcccaggaacattttggcaaagacaaatcagaagaattccaactattcagctctcctcatgggaaggacctgctgtttaaggactctgcccacgggtttttaaaagtcccccccaggatggatgccaagatgtacctgggctatgagtatgtcactgccatccggaatctacgggaaggcacatgcccagaagccccaacagatgaatgcaag

SEQ ID NO: 17405 - DNA, 1072 bp, Homo sapiens
  misc_feature (1)...(1072): n = a,t,c or g
cccttgactgattacgaatttaatacgactactatagggaatttggccctcgaggccaagaattcggcacgagactaccgccatggtggccgccaggggcagataatctataactggcagggtgcccagtctacccaggatgaggtcgctgcatctgccatcctgactgctcagctggatgaggagctgggaggtacccctgtccagagccgtgtggtccaaggcaaggagcccgcccacctcatgagcctgtttggtgggaagcccatgatcatctacaagggcggcacctcccgcgagggcgggcagacagcccctgccagcacccgcctcttccaggtccgcgccaacagcgctggagccacccgggctgttgaggtattgcctaaggctggtgcactgaactccaacgatgcctttgttctgaaaaccccctcagccgcctacctgtgggtgggtacaggagccagcgaggcagagaagacgggggcccaggagctgctcagggtgctgcgggcccaacctgtgcaggtggcagaaggcagcgagccagatggcttctgggaggccctgggcgggaaggctgcctaccgcacatccccacggctgaaggacaagaagatggatgcccatcctcctcgcctctttgcctgctccaacaagattggacgttttgtgatcgaagaggttcctggtgagctcatgcaggaagacctggcaacggatgacgtcatgcttctggacacctgggaccaggtctttgtctgggttggaaaggattctcaagaagaagaaaagacagaagccttgacttctgctaagcggtacatcgagacggacccagccaatcgggatcggcggacgcccatcaccgtggtgaagcaaggctttgagcctccctcctttgtgggctggttccttggctgggatgatgattactgggtctgtggaccccttggacagggccatggctgaactggctgcctgaggaggggcagggcccacccatgtcaccggtcaatgccttttggaactgtccttccctccnaagaaggccttaaaacnaaccaga

SEQ ID NO: 17406 - DNA, 420 bp, Homo sapiens
  misc_feature (1)...(420): n = a,t,c or g
gaccttctgagacacctaacctttaataattcctttctctgtggcctgtggaacactttcttacatatgaattcaacatttttttgtgtcattttctgctttaatctgtttcatacatgctttttctttttccatgtcataaatggcatgtcctattaacactttttctttccgtatttccttactttaactggcattttatgtcaatgccatttctttcaaagtattatgcagcagacaccaaactttctcccaattcctttaacttctcctggaggaaggactgactttgcttatgctatggctgtgtttgtgcactgtgtgtacagccccatgattcacagatgagggagcaagcacaggctgaaattctatagggctctcttncctatttgggcaaaagaagcacctatgccagca

SEQ ID NO: 17407 - DNA, 370 bp, Homo sapiens
ggtggtaatggttgtgtgactccctgagtatactaaaatcaatctgtttgtatgtgaattatatatcaatgaagatttttttaagtagtaaaaatcttaagaaaccaagaataaatgccagggtaaaatccagtggacgtttggaacttgggagagaggtctgtgccagagggaaacgtgaagttccttgcatggaagagtagtcgaagccgtggaagtgaaccaactgtccagggagaatgtggagggagggagagcagtgaagttgttggaatgcagaacctgggagcacggctctttttttaaggaccaagaagaaggtagaagaatgattgagagataaggaagaaaccaggatggcacagaataa

SEQ ID NO: 17408 - DNA, 224 bp, Homo sapiens
tttggttccttttgccccttggtaagtttattttaccatcctcccacctgccattctgactttattaaatcaacatgtggaccagagtgttaatgagatgttattgcagaagagattgagaaaattggtatatcatgcagataacatacaaaatctttttgtaacgtaaaaaatgcagttttattattgcttgtgcctcaactgtttaagtgaatattaaaggg

SEQ ID NO: 17409 - DNA, 388 bp, Homo sapiens
gagcagttaaaaatttgaagcttgaatttgggtgagactttcagggatggagatattaacctgagaacagaggcataaagatgaaggttcggttatgtattagctcacgaatagcctaaactgagaaagaatggcagtttttttccctttgtctctgtgtgattttccatgtggtattgaaggcaggtatgctgaatattcatttcacaagatattatctgttccaggtagggcgtaaaaatgatgtcttgatcagctgtcatcaaatatctcatgacacttttttagagttagcacttggacctgagggtcatggccacagtctactgtagggtcattgtttcttacctctgggatattttgacaggtttcttagagggctggaatt

SEQ ID NO: 17410 - DNA, 326 bp, Homo sapiens
gggaactagaaaacagacaaaaccccaggctaggcagaaggaagaaaataataaagaacagagtagagagaaataaagcagaaaatagtaaaatgattgataggaaaaacccaaaaattggttctttgaaaaaataacaaaattgacaaacctctagctagactaagatgacttggctgggcatggtggatcatgcctgtaatcccagcactttgggaggccaaggtgggtggatcacctggggtcaggagttcgagaccagcctggccaacccggggaaacctcgtctctactaaaaatacaaaaattaactgggcgtggtagtg

SEQ ID NO: 17411 - DNA, 479 bp, Homo sapiens
  misc_feature (1)...(479): n = a,t,c or g
gctggagtccccattcttctggaattggatgaaaacctgcgtgctgttgggcctcatcagttcctgggtgaccaagaggcgatccaagcagccattaagaaagtagaagatcaaggaaaagtgaaacaagctaaaaaatagtctttctcaactgttggctaagaagaaatgcaaaagaagtggcataggagtgtgttatgggtgctgaactctctctctttttccccgattttccagagctaggctgtggagtanagtttgtataggtaactaggtaacttattgtggcccagataaggctttaggatgcctcagtgcttatgtcatagccttatgaagttagctttcttgctaagccccctaatcggtcaccaaactantaactagtggggcntaatgaaggtcataagtttctgagatgggagagcaacaagtananatnaagttaaaggtatttatcattcaagaaatcattattg

SEQ ID NO: 17412 - DNA, 454 bp, Homo sapiens
  misc_feature (1)...(454): n = a,t,c or g
ggtgntnnnncttganaccgntattncatgactacgaatttaatacgactcactatagggaatttggccctcgaggccaagaattcggcacgagaggacatcgacgggcacatggttaacctggacaagtaccggggcttcgtgtgcatcgtcaccaacgtggcctcccagtgaggcaagaccgaagtaaactacactcagctcgtcgacctgcacgcccgatacgctgagtgtggtttgcggatcctggccttcccgtgtaaccagttcgggaagcaggagccagggagtaacgaagagatcaaagagttcgccgcgggctacaacgtcaaattcgatatgttcagcaagatctgcgtgaacggggacgacgcccacccgctgtggaagtggatgaagatccaacccaagggcaagggcatcctgggaaatgccatcaagtggaacttcccaa

SEQ ID NO: 17413 - DNA, 326 bp, Homo sapiens
ggctcaaaatgctaggagaagggtgctggctagctagtgccgtggggtccctgagaatgattccaggagtatgaatataaaagggagatccgaagtcaactgtcgctgccagaaaacagaagcactgacgagttgacacaacaggaagcaaacaggaacatgtgtgtctcttatgtctccctctgtgtcctttcatttgtaaaactgagtagagaccctcctggaaaagcagaaaaagctttgcagaagctcaggtccagcttcaataagcagaaaatagaagggtgggcctgaagcctgctatagactgaatgttcatgtccctc

SEQ ID NO: 17414 - DNA, 354 bp, Homo sapiens
  misc_feature (1)...(354): n = a,t,c or g
ggatttcaatggcaggaaataaagtaggactagtcgggacctgggcttcatccggctgagccccacaaccagccctgacgcaggtgctcaggtgtagacccctggtgttcttggtgggtgtggaaggctggataatgtctcctcgagaaagccacagcctaagcctggaacctggagctgttcccatatgtggcaaaatgggctttgtaggtgcgatcaagttaaggacctggagatggcgtgatgttcctggataatctggggaggccctaaatgtaatcacaagagtcctcgtgagaggaggcggaggaggtctgattgcagaagcggtcgacnggncgcggtcgacgcggc

SEQ ID NO: 17415 - DNA, 347 bp, Homo sapiens
gcggcacgagggaggacctgactgagacaattgtgactggatgtggtctgagagcaggcagtaggatgaggcttggggactggctcactcactgcccaactggtagcaaaacccatctggagcagcagtgtgaggtatggacactcactcacacgagggggtggcccagttgctgaggattccaccagtggtaccctgggaaaatatccctgtggaggggaatgggaggagtcaaactgtggaagataagaggagtactgcacacaaggacagtagagtgtctgttccctgcagagggatagtgaggaactgatgaggtgactgtgagtgcccggggcctctgtcgt

SEQ ID NO: 17416 - DNA, 333 bp, Homo sapiens
gagaattctaggaagaataataaaatctcgtgtattccacagcaaacttacataccataaagacagaattcctaaacatcttggagccgtctgtctctcccatatgatggctgtctgtatatttttacttggggtgctgctttattggctttgaaaacactgtcagataagctcagtaatatgttaccatgggataaaaatatgtatccctgcctaagaataacttgtgcatttgttatggaaatttaattcatatggtgtttacagtactacttttgtaacttccagactttctaaaacattctgcttaaaaaccatataaaatataattcc

SEQ ID NO: 17417 - DNA, 332 bp, Homo sapiens
ggactcagagttagtattcctgttgtgtaccaagaacagttccaaattgtggcatgtgcttatatcatttaatcacaagcctgtcaggtagttgatattgttacttcactgttgaaacttcagaacggttaaattgctcaaggtcatacacgtagaaaatggcaaaaccataatttgaacctatttgactccaaggcttagttgcacattccattataccatttaaaattttgaaacattgcactaaaaacaatatttaaagaaaatcctctggtttggtttatggatgctgcaggacattaagaagaacttgagactagaggtctatattt

SEQ ID NO: 17418 - DNA, 284 bp, Homo sapiens
ggaaagaggcgtccccgctggaggggctcggtgcaaactggaccccgaagcttcttgccgcttattcccaagggggcctgcagtggtgggtgttgtcctgacacccccagccccagacagacggactgacaggcgggggacggacagccgtctcagctgcttctgcccctccaacacggcagcatattctagaccaagggttgggaccacgtgttctaaaaggtcaccagcaggtgacaagaagatgccagtcagatctgccctcatctgctctcggcccccac

SEQ ID NO: 17419 - DNA, 298 bp, Homo sapiens
atccttacatgtgatgtcctggctacaatcctgcccgttgtccttggtatatgaataacacttcatctcagtttgtgtgcagcttggtgtattatggcctaactctgagtgcgggtgatctaggtggaagtatttatgccaacctggccctgtctggcctcatagagattccatcttaccctctctgtatctacttgattaaccaaaaatggtttggtcggaagcgaacattatcagcatttctgtgcctaggaggactggcttgcttattgtaatgtttcttccagaaaagaaagaa

SEQ ID NO: 17420 - DNA, 474 bp, Homo sapiens
  misc_feature (1)...(474): n = a,t,c or g
gngnnnnnnnttggannnccnnttgganaccncttgacatgattacgaatttaatacgactcactatagggaatttggccctcgaggccaagaattcggcacgagccgcgcctggcctggccgggaccatgtgcgcgtcccgggacgactggcgctgtgcgcgctccatgcacgagttttccgccaaggacatcgacgggcacatggttaacctggacaagtaccggggcttcgtgtgcatcgtcaccaacgtggcctcccagtgaggcaagaccgaagtaaactacactcagctcgtcgacctgcacgcccgatacgctgagtgtggtttgcggatcctggccttcccgtgtaaccagttcgggaagcaggagccagggagtaacgaagagatcaaagagttcgccgcgggctacaacgtcaaattcgatatgttcagcaagatctgcgtgaacggggacgacgcccacccgc

SEQ ID NO: 17421 - DNA, 348 bp, Homo sapiens
gttttaacttctaaaaaaattatcctttaacaaggtagttaagtaaatttaatgttcatgtggtataatttacttagcagccctcttaaaacagttataaaaaccatatggcaacagggacaaatactcctgataaaaatggcaagtggggaaaaaagcagaaatgcaaaatttgtactacgttgtgattaaagctaaacgttgtaagtgcttagggcaagaaataggaaggagaaaaaaaattgaagttggatttgtttgttaggtggtaggatcctggattaaaaaaaaaaaacaaaaccctgacattattctgttatacattaaaaataatattggcgggcatgg

SEQ ID NO: 17422 - DNA, 327 bp, Homo sapiens
gcaacctttgcctcccaggttcaggtgattctcctgcctcagcctcctgagtagctgggattacaggtgtgcgccaccacgcccagctaattttttgtatttttagtagagacagggtttcaccatgttggtcaggctgatctcgagctcctgacctcaggtgatctacccacctcggcctcccaaagtgctgggattacaggcgtgagccactgcacctggcctgacattctttatgaaatttagaattgttgaagaactataacatttcagtagggttcaaggtggtcccaaaagttatataaaagattaggttttactataaac

SEQ ID NO: 17423 - DNA, 349 bp, Homo sapiens
tactgggaggaattagaaaacttagttcagagcaaaaagattgttgccataggtacctctgatctagacaaaacacagttggaacagctgtatcagtgggcacaggtaaaaccaaatagtaaccaagttaatcttgcctcctgctgtgtgatgccaccagatttgactgcatttgctaaacaatttgacatacagctgttgactcacaatgatccaaaagaactgctttctgaagcaagtttccaagaagctcttcaggaaagcattcctgacattcaagcgcacgagtgggtgccgctgtggctactgcggtattcggcattgtgaaaagtagaggaattatcaaatt

SEQ ID NO: 17424 - DNA, 617 bp, Homo sapiens
tctatcagccgattacgaatttaatacgactcactatagggaatttggccctcgaggccaagaattcggcacgagtactgaagccggcgctgctctgtggggctctggccgcgcctggcctggccgggaccatgtgcgcgtcccgggacgactggcgctgtgcgcgctccatgcacgagttttccgccaaggacatcgacgggcacatggttaacctggacaagtaccggggcttcgtgtgcatcgtcaccaacgtggcctcccagtgaggcaagaccgaagtaaactacactcagctcgtcgacctgcacgcccgatacgctgagtgtggtttgcggatcctggccttcccgtgtaaccagttcgggaagcaggagccagggagtaacgaagagatcaaagagttcgccgcgggctacaacgtcaaattcgatatgttcagcaagatctgcgtgaacggggacgacgcccacccgctgtggaagtggatgaagatccaacccaagggcaagggcatcctgggaaatgccatcaagtggaacttcaccaagttcctcatcgacaagaacggctgcgtggtgaagcgctacggacccatggaggagcccctggtgata

SEQ ID NO: 17425 - DNA, 303 bp, Homo sapiens
taaaggaatcatcccctctgcttaaatacacaccctacatataatatagtcatacaaaacagtattcccgaagctgaggaagtcaaaaatgttcataacaactctcacaataatccttgcctctgcaaagcaggccagaatgaaaaccagcttttctgatttccatctgccctctccaaagctcaacttaaaagcttgacatcatctttgacccctccttcacccagacctttcccattctattagttgccaagtcctacaagttctatctgagaaaacctctcaaactgatcccttcttgtc

SEQ ID NO: 17426 - DNA, 440 bp, Homo sapiens
gttgctgattgcgacggaatacgactcactatagggaatttggccctcgaggccaagtaattcggcacgaggctgtccaaaacagtgttgataggagtttatcatagctgctttggaaggaagccagattctccttatcttttagctttagatcgaggaatccaggaagtagaacaaagtctattgttgctaaagaaagaaagaaatgggccggaagtggtggctcacggggagaaatcccagcactttgcgaggccgaggtgggagaatcacctgaggtcataagttcacgaccagcctgaccaacatggctaaaccctgactctgctgaaaatacaaaaattatctgggcatgatggcatgcgcctgtcccagctactcaggaggctgagacgggagaattgcctgagcccaggaggcggaggttgcagtgagccgag

SEQ ID NO: 17427 - DNA, 350 bp, Homo sapiens
  misc_feature (1)...(350): n = a,t,c or g
atggagtggacatgggatgacataaagggtttggggtttgtttcttgatttgtttttccaaaatgtgagaaggaggatgtttgaagcagacatgaaagaaccagtgaaaagggaagatactggatacaagagttaaaaataaaacaaaaacccagcagagtcttgaaagcattgggaggggtgaggatcaaaggcatagggttaatcttacaaaaagaaaaaaagaaaagaaacccctcttcttctgagtcaagagggaaggattgatttttttttttttaangtatgtcaccatggaggatgngatnccgtcnacncggccgcnaattccanatntatgaatcgtaaat

SEQ ID NO: 17428 - DNA, 426 bp, Homo sapiens
  misc_feature (1)...(426): n = a,t,c or g
gcctcaaggctgaggtcctcattgttttaattctgtataccttaagcaggttactttccctttctctcctagatctatctccctcttttctgtaggagccaaggggtcctacctagaaataaaaacattaatccaaggactgaagcactttgcaaacacttactattcatgaacattcctcgcagggatctctatacttccagtggttcaggtctataaacatttattgaccatctacaagctctatgccaggcgttcagggtatatacagagatatacttaagacccctgccctaaaggtgcttatagtccagcttttttggtccacattatcccaggttggcgtctcagtcatttctaagtattggcactgnctataagcccctgaggaaatacttactaaaattctttctntacaggggagcc

SEQ ID NO: 17429 - DNA, 107 bp, Homo sapiens
gcgtaattgttgaaaagagcgtcatttgaattctttgtctaagatcgtgtatgagtactaactatcttctttctgttcttgattttgggggtgtgagggttaacacc

SEQ ID NO: 17430 - DNA, 560 bp, Homo sapiens
cagcttgactgattacaatgataatacagactaatacgactcactatagggaatttggccctcgaggccaagaattcggcacgaggtgattcagctcagagtccacccttcctgggcatcttctcacatctcttcctggccccctgtcccagccccaccttccacattccctgcctaggtctgttacggagcacctgtcaccctgcatggtcctctgggtactcgtccgtctaccctaccagacttgaagctgcttacggacaagttcgcttaagttaattatttagtttgtaacttccagagcctggacagtgctgaaaaatgtttgtcagatggctgaattaaactataaataaatgaggggaaaaaaatcacaccgataaaacattaacataacatgcccctgactttattcctgaaaatacccacagactcaccaggaaccttgctcacattccttttgaaattcaagatctttcttggatcatcttccatttttaatgtgttgccagagaaggctcaagctgttgccaggaccatgaggctgcgtgacatcttac

SEQ ID NO: 17431 - DNA, 378 bp, Homo sapiens
gtcatcctgttaaaaaccagtagtgggccgggcgcggtggctcacgcctgtcatcccagcactttgggaggccgaggcgggcggatcacgaggtcaggagatcgagaccatcccggctaacacggtgaaaccccgtctctactaaaaatacaaaaaattagccgggcgtggtggcgggcgcctgtggtcccagctacttgggaggctgaggcaggagaatggcgtgaacccgggaggccgagcctgcagtgagccgagatcccgccactgcactccagcctgggcgacagagcgagactccgtctcaacaacaacaaaaaaaaaccagtagtggaagtagctgaagcctttcacatgtgacaaaaatatttcaaagtc

SEQ ID NO: 17432 - DNA, 596 bp, Homo sapiens
ggagccccggagccgcggcgggagaggaacgcgcagccagccttgggaagcccaggcccggcagccatggcggtggaaggaggaatgaaatgtgtgaagttcttgctctacgtcctcctgctggccttttgcgcctgtgcagtgggactgattgccgtgggtgtcggggcacagcttgtcctgagtcagaccataatccagggggctacccctggctctctgttgccagtggtcatcatcgcagtgggtgtcttcctcttcctggtggcttttgtgggctgctgcggggcctgcaaggagaactattgtcttatgatcacgtttgccatctttctgtctcttatcatgttggtggaggtggccgcagccattgctggctatgtgtttagagataaggtgatgtcagagtttaataacaacttccggcagcagatggagaattacccgaaaaataaccacactgcttcgatcctggacaggatgcaggcagattttaagtgctgtggggctgctaactacacagattgggagaaaatcccttccatgtcgaagaaccgagtccccgactcctgctgcattaatgttactgtgggctg

SEQ ID NO: 17433 - DNA, 281 bp, Homo sapiens
gctggaatgcagagtagaagaaatcataaagaagcagggggaaggcgtccccgacttagtccatgtgatgcgcacattagcgagtgagaacatccccagcctcccaccagggggtgaattggcaagcaagaggaatgttattgaagccgtttacaatagactgaatccttacaaaaatgacgacactgactctacatcaacagatgatatgtggtaaaactgctcatctagccatggagtttaccttcacctccaaaggagagtacagctcaacttttgtg

SEQ ID NO: 17434 - DNA, 401 bp, Homo sapiens
  misc_feature (1)...(401): n = a,t,c or g
ggatncaacagttatgacangattacgaatttaatacgactcactatagggaatttggccctcgaggccaagaattcggcacgagacccagtcaatgcccatgaccatggccctctgctcatgctgctctttggttccccctgaggtcttttgtggacagagagtgtgaaaatgccctctagccacacaaggaaacaggactcagggacaaaggacctgtgccctgaccaaggcaatgcgtccctcaccatatatgcagtggtgcatcctttcctgttgactttttgatcaagcaattaagactttagtcttttttgttgntgtgcaaaaggtatnatgattanaggncctananccnaatnatcacnaananggttttacanntntcatngagaanattt

SEQ ID NO: 17435 - DNA, 346 bp, Homo sapiens
ggaagaaagtaggtaatacaagtttgctcagaataaacctatgtgttcatgaaaatatttctatctagggttctcccaggaggtgaacttgccgttctctgtcttccctggaggcctctcaaccctgaagggcagtgctgagtcttcacaccctggcacatgggtcgggagaaccctgggaggaggagcaggcagcttctttctggctccagtgcgagtctcgggagggaggtgctttccccctcacccgtcacctggcttaaaatgggcagggctgtcctgatccccatgagaacatcaggcgcccatccacatgtggcaccctgttggcaccggctgctacctg

SEQ ID NO: 17436 - DNA, 323 bp, Homo sapiens
ggatataatttgatctgaaaaatatgaatctagttcaattcttgaggaaactcatgcctaggaaattaatttacttaagattacacgggccatgtatggtggctcacggctcacgcccgtaatcccagcactttgggaggccgaggcgggtggatcacttgaggtcagaagttcgagaccagtgtggccagcatgttgaaaccctgtttctgctaaaaatacaaaaattagccaggcgtggtggcacgcgcctgaagtcccggctactcaggaggctgaggcaggagaatcgcttgaatctgggaggcggaggttgcagttag

SEQ ID NO: 17437 - DNA, 341 bp, Homo sapiens
ggttaaataacttacatgttccttcctcatcccgggggacaccatcttctttgtctgtgtttccccaattaaagtggttccaatgtgaagagatgggctatttttgttccccctctggtcttgtttcgtcctgttttctcttgaaattgtctcttttactagttcttcactcttttgtacatgttttctgagtctcttattttcactttctcatccactgtctcttgactatgaaaataccaacacagaagctcccaagcagaccatttgtttaaagatgtatctctttttcaaagacataaggaatttttattctccacatgccttactagctgccagga

SEQ ID NO: 17438 - DNA, 308 bp, Homo sapiens
ttttttgctttaactgctttattgttataatcaaatgtagacaatggtcctccttgtctaaactttgctttagttatattacatagcatttaaactgtttggataataatgttgttggtttgcctatgagtaatattggaaattaatatggcataagacagaaactagaaaacatttgaactgttcccttttttttattcagtaggaaaatgcaattaaatatgttacacaagataaaaggaacttgaatgtcgacgcggccgcgaattccagatctatgaatcgtagatactgaaaaaccccgcaag

SEQ ID NO: 17439 - DNA, 342 bp, Homo sapiens
ctcctatttactgggtaggctaagcattatcagcaatcatttttcctgtctctattcaatactcttctattgccaagctttatcagtaatttctagaatccataaacaagactctcgccagacagaacatttcatattgaaaagtagaaactgttaattgtggaccaaataactacctttctaaaaagtccacactgctattgtatacatcccacctccttaaatatcattacatatcaataatctcctctcgtatcttcaaatttgctatcttagtagtttcttcctctcaatccagttttcctacaatttactgtcctctaaatgaccatactctgcctc

SEQ ID NO: 17440 - DNA, 318 bp, Homo sapiens
gtccattaaggcaaaacaaattatttgcccccatgatttaaattggttttcagaatggtctataagttctcacaggttaaagagaattgaatgtgcataaggtgattcaaaacctgacaacacatggcactgggcaatgcctccttctggaccagcaaagggctttacaggcaacactttagcccaagtgtgctggcatgcttggtcccttcaggggcatgccattacagctgtgatataactccatttgcacctttgccttctgggaaagccacaggccttagagacactaatgtaagtctatccaaatgccttttg

SEQ ID NO: 17441 - DNA, 504 bp, Homo sapiens
ttaatacgactcactatagggaatttggccctcgaggccaagaattcggcacgagcctggctgagaatcacttctccaaaataactaaagaaagctcctttgggtctgaatcccacagagtatccctctccgcacccagtatcaggctaaaactatttttccctcataccccatacaccattctcagggttctatggacaaagtttccctgaactagattctccaattcctggcaaggaggctcttcctccatgtcttgtcatttaagcctctttcaggctttctcagctatttctctagaaaggttctaagtcggctactcacttaccccgggtccaacagtttatgctcctctcacgtacagagcattgaaggcctttgccccaaggcccaatgacatgctcatttgctgctcacagccagggcccaaccagactctccttccctacccttgatgcatctgccacataggacttgaggaaagccattctatgggcagagact

SEQ ID NO: 17442 - DNA, 190 bp, Homo sapiens
gggccagcggccaccaagctcatgggacacccagagcagaagctagggcagagccaatgctgagggagcctcgacttccggcgccgccgccctctcccggcatccgcagagccagctgacgccctccctgcctcccagggcagctggccagcctcgggcagcgcggccccctcctcccaggggagagtaa

SEQ ID NO: 17443 - DNA, 538 bp, Homo sapiens
  misc_feature (1)...(538): n = a,t,c or g
tttgaanccctaacagctatgacatgattacgttnataccacaactcantatacgtgantacgaacctaatacgactcactatagggaatttggccctcgaggccaagaattcggcacgagggaaattaagatatggaaaggattaatggatttttttcaggatcccctgggtaagggctggctgccaccgggttaacaacctggtccccaggaactcttttcaggagccatcgttctccatagaaaggaaggggcagaaagaatactgtcaaacctttgtcaattcactattgcccaaaatagaaaactgcttattcaaaaattactttctcattacttccaagatcctatggataatggaaataaactctctctgggaaaatctcccagggcagagcataagtgtgaagaagaaactatttggtctctgtggtgtggattgatgttaccttactgttattatgccattctaggccataaaagacatccaagccagaaaaagcgttatgctttttaaaatcatgatttcactttttt

SEQ ID NO: 17444 - DNA, 453 bp, Homo sapiens
  misc_feature (1)...(453): n = a,t,c or g
gggcngnnnnncccctttgaagcttgaaggccgtggnataactatctattcgatgatgaagataccccaccaaacccaaaaaaagagatctctcgaggatccgaattccagatctatgaatcgtagatactgaaaaacccggcaagttcacttcaactgtgcatcgtgcaccatctcaattgctttcatttatacatcgttttgccttcttttatgaaactatactcctctaagtttcaatcttggccatgtaacctctgatctatagaattttttaaatgactagaattaatgcccatcttttttttggacctaaattcttcatgaaaatatattaccagggcttattcagaagctttggacttcttcgccagaggtttgaagaaccnncnnataaacantnatacatannncnganngtgnacgagaccaactgagagncccagagnatct

SEQ ID NO: 17445 - DNA, 477 bp, Homo sapiens
gggtggccagagatataaatgattaacacaaaagatggatcatagagcaagtcaaatttaaaagtaccacattttatagtatcttaggaaaatctgtactatcgttaagtaggcctgaatatatttcagggaaaagtgacacgtactcagaaaacatttatccattatcaataaagtcagaaatagaaccaatagaaacaaggtgcttgaacagatctaatgcatctttggtccaaaaataatatggtcacaagactggattatggtggctgccatgaaaatgttacacacactttgctgacagagcccatggattccatgtagtattttcctactaaaatttctgcccaaatcaatgcctcctgagtgatgtaagcagccaaatacatgctactgagtcaatcaaacttagtaaataacacctttccgaggaaactaatgtgtaatgggaaaacaaaaacctctctctatgattct

SEQ ID NO: 17446 - DNA, 332 bp, Homo sapiens
gacaggctaggcctctcctgttgacctgaggccctcttcctccagaatccgacaaggaacaaggcatggcctaagcggtatgatagaagggatgatatccaccccatccaggcctcttagagtccaggcaaaggcaattaggagagagatttccatagctcggagcaggtgagccaccagcggcctgaatggcagcagccatacccaagtgaggccacgagagggcagcagagtccttacgctaacactttctcccggtgcagccccaaagaaggcagctgctggagttagcttggttttctcagagccgtcagccagagcacagagcacct

SEQ ID NO: 17447 - DNA, 343 bp, Homo sapiens
ggttactctacatatagagtggcagggtcagggtcatgtggaatgcagttgtgggcatatgcagatacagataaacagctaagttcccaagatagctgtaaatgtgcttattttcctagagtcaattatcagcaggacatacagatagaactcaaatatcaaaaccataggcagtcaaaatatacctcaaggtaagagaagggatgaggcttagacttggcttgttccttgtctagactggaaatggagaaatctctcaatagaagtgtgggctaattatctgtattaggaaaggcctcagactaaaaacttaactgagttggttgtgaccgtctccctatcc

SEQ ID NO: 17448 - DNA, 483 bp, Homo sapiens
  misc_feature (1)...(483): n = a,t,c or g
gngngtgcttgncccctttgacaccgttatgacatgattacgaatttaatacgactcactatanggaatttggccctcgaggccangaattcggcacgagctagataacttggctcagctgtatgaaggttggacagcctgggtgtgaatggcaagacagtagatgagtctggttaagcgaggtcagacatccaccagaatcaactcagccttaggcattcaaagccacaccacagtcggtggtgatgcaactgggggcttactctgaggaaacctaggaaatctcggtgcactaggaagtgaatcccgcaggacagctgcactcagggatacgcccaacaccatggcctgcaaccccagggtcaagggtgaaggaaagcaagctcaccgcctgaacacggagattgtctttctgnncagaacagcagcagacgtgtcgggaggttagctgcggaaagaaatcgggatgccgcggagcacaga

SEQ ID NO: 17449 - DNA, 444 bp, Homo sapiens
  misc_feature (1)...(444): n = a,t,c or g
ggngnnnnnttggttgcatacnnctatgacatgattacgaatttaatacgactcactatagggaatttggccctcgaggccaagaattcggcacgaggcttgtagtcctaaaaaggcagtcagagaccctaaaactgggaaagcggtgcaagagagaaactcctatgcagtgagtgtgtggaagagagtgaaagccaagttagagggccgagatgttgatccgaataggaggatgtcagttgctgaacaggttgactatgtcattaaggaagcaactaatctagataacttggctcagctgtatgaaggttggacagcctgggtgtgaatggcaagacagtagatgagtctggttaagcgaggtcagacatccaccagaatcaactcagcctcaggcatccaaagccacaccacagtcggtggtgatgccactgggggcttact

SEQ ID NO: 17450 - DNA, 389 bp, Homo sapiens
gttggaaataatgaaggctgagactcatttctaaactcttccataaccatcaccagaagagcagccactgtgttgtgtgatgtaggctaatgcctcccagatagaggtaaagtcacaaggactattagaattccagtggattgtggaactggttttggattatccttatattttcattctgattactgaggcagttctgaaaactcctaccattgaaatagtggtgtgtcttttccttgtttaaggattttacatcatttttatgcacttgaattccaaaatcagaatctctcttttacctatcaacctttattggctattggcttttggcaatgacctttctgttcaaatgtagtcctgctctttgtttccttagggagtagaacctg

SEQ ID NO: 17451 - DNA, 383 bp, Homo sapiens
ggcagtggagaagaggtgagagaagaatgggagcgattcgagttataattggttgtgaaggaggggtctaggtacagatgactgaggacggatgaagagaaatagaaggaccaggcgaataaaagtgaggacctgctccatctgagctctccagctggcccccaattgctcctctctctctttgctctctttctccctcccctaccagcctcattcttcctccggtagcctctcccacctaacctctgcatcccccagcctcatgtcctgccccatccctatcctgcctgatccctggatctccctcagatcccctcttctcagacagcgccaggccggggtggggccggggttggggccgagccccacagctgcccccctcc

SEQ ID NO: 17452 - DNA, 518 bp, Homo sapiens
  misc_feature (1)...(518): n = a,t,c or g
tggaaaccnttgagcnctgacatgattacgaatttaatacgactcactatagggaatttggccctcgaggccaagaattcggcacgagctgacctagatctactgtgaaccaaatgtcaaaaagtacctcctctgccctgagaagcctggtggactccagcctgcgtcaactgtgacatctcagcgctgctgttggtatcacttcatttaagcatcgccatgtttgaagcaggtatattattgtcactaccattcatgaggaaagcaaggattagagaggatgagcatatcacccaaggttacccagctggtagcagtgtatgaaaagttccttcattttcttgtcatcactttgtgtccggaattggtgagttctcggtctcactgacttcaagaatgaagccacggaccctcacgggacttgtgcttaacccatgagaataagccagactggaacgctggatgatgagagacacatggccagtcactcatcacactagccgacagccatacatgtg

SEQ ID NO: 17453 - DNA, 389 bp, Homo sapiens
  misc_feature (1)...(389): n = a,t,c or g
cggacgcgtgggatttggtgatccaaattctcatatgcctttcaaaagcaaattgcttatgataatctctcagaaagatacatttcattccttttttcaacacttcagctacaaccacatgatggagaaaattaagagttatgtgaattatgtgctaagtgaaaaatcatcaacctttctaatgaaggcagcggcaaaagtagtagaaagcaaaaggacaagaacaataacttctcaagataaacctagtggtaatgatgttgaaatggaaactgaagctaatttggatacaagaaaaaggtctcacaagaatcttttcttatctaagttgcaacatggaacccagcaacaagaccttaataagaaaganagaagagtaggaactcctc

SEQ ID NO: 17454 - DNA, 386 bp, Homo sapiens
acttctcaagataaacctagtggtaatgatgttgaaatggaaactgaagctaatttggatacaagaaaaagtgttagtgacaaacagtctgcggtaactgaatcctcagagggtacagtatccttattgaggtctcacaagaatcttttcttatctaagttgcaacatggaacccagcaacaagaccttaataagaaagaaagaagagtaggaactcctcaaagtacaaaaaagaaaaaagaaagcagaagagccactgaaagcagaatacctgtttcaaagagtcagccggtaactcctgaaaaacatcgagctagaaaaagacaggcatggctttgggaagaagacaagaatttgagatctggcgtgaggaaatatggagaggg

SEQ ID NO: 17455 - DNA, 432 bp, Homo sapiens
  misc_feature (1)...(432): n = a,t,c or g
aggcttangtatacnactatctattcgatgatgaagataccccaccaaacccaaaaaaagagatctctcgaggatccgaattccagatctatgaatcgtagatactgaaaaaccccgcaagttcacttcaactgtgcatcgtgcaccatctcaatttctttcatttatacatcgttttgccttcttttatgtaactatactcctctaagtttcaatcttggccatgtaacctctgatctatagaattttttaaatgactagaattaatgcccatcttttttttggacctaaattcttcatgaaaatatattacgagggcttattcagaagctttggacttcttcgccagaagtttgtgatagggtgcacaatcaaagcaggttagagaccactggactaaataacctgaattctcctcacctgctcagctgc

SEQ ID NO: 17456 - DNA, 398 bp, Homo sapiens
  misc_feature (1)...(398): n = a,t,c or g
gcaattttctaatctttaaaatgatatatgacatcatgatgatgatagctaataggtaatgagtgccaggcactgtgctaagtgctttgcatggcttatctaattgaatcctcataactaccttgggggcagatactattagtatccctgtgttacagatggtaaaccaaagctcaacagtttggttacttgtccagggtcatctcaccagtaaaagtaaagctagtctcatttggtagtctgtgattctctgtgtgtcagatgttagtagttgcatacattagctgccttcttttgcatttgatttttctgatcataattacattttgctgatgcttcatggggttggcttaanggaaaccattnggaagaaagttnggaatttgaggctaaatgga

SEQ ID NO: 17457 - DNA, 492 bp, Homo sapiens
  misc_feature (1)...(492): n = a,t,c or g
gggaagggatccagtttcagctttctccgtatggctagccagttttcccagcaccatttgttaaatagggaatcctttccccattgcttgtttttctcaggtttgtcaaagatcagatagctgtagatatgcggcattatttctgagggctctgttctgttccgtcgatctatatctctgttttggtaccagtaccatgctgttttggttactgtagccttgtagtatagtttgaagtcaggtagcatgatgcctccatttttctacataccaattgagaagcaattctccataaatctcttgcatttctatatgtctttctaagaaaggcacagacttcttgtgtcctatactgtgtttttgaggatatttgtatagtgaacaatcttggaagatatagagtctttctctcccctgctcccctcgctttaacttctggagcaagggttaagctgngtacaaccttggaaganagggcttcctttanaagaa

SEQ ID NO: 17458 - DNA, 326 bp, Homo sapiens
gaatattctatacatttcactagcttttctgcgaaggcatatgaagagcagagaaacattattttcccacctgcttgataaagaaaccttgaaccggccatttaacactgctgtgagttatctgaagcctcctgagtcactttgcacttactttcctaggaaccgaaagcatgtgaaattgacatacacgtttcactgagtgatagttgggttcagatcacgtcttaccttccgtttaacagagatgtattgaacacctaccatgtacgaggtgttttttagggttttggagaaaaatcaagaaatgaaagcatcatgaaccatag

SEQ ID NO: 17459 - DNA, 554 bp, Homo sapiens
  misc_feature (1)...(554): n = a,t,c or g
atcancancatnnnnnatnnnnatnntnancntcnngaaggngggnntnnnttnnnnttgaaancgtangcctgatacgaattaatacgactcactatagggaattnggccctcgaggccaagaattcggcacgagaggaagctgaggctcagagaatttaagtaactttcngnngggngncaccaaatggcagagccaggatttgaactagaccatctggcttaaaattgacagtcttagtagcttcattacactataactatagtgaatgtaagatgcatagcacatcgttagggttgccaggtttagcaaacaacaacaaaacataatacccagttcaatctgaattttagataaacactaaatacttttcttagtataaggatatttcattgtagaagctcaacaaataatatttattatttattttatctcaacatagaaacaaacttgataatgattagaactctccaattataaaacaacatgcccagagaatactctgntatggtggggntaaataggtggctggaaagacaatgtcctggaatat

SEQ ID NO: 17460 - DNA, 332 bp, Homo sapiens
gaactggagatctgaaacaaatagggcaaaatgttaaaatgtgacaacgtagtattaggtagaagcatgagtatttattacactagctccatgcttttctgtgcttgaatatttcttttttttgagacggagtctcactttgtcacccaggctggagtgcagtggcgcaatctcggctcactgcaagctccgcctcccgggctcatgccattctcctgcctcagcctcccgagtagctgggactacttgggagcgggaccacgctcggctaatattttgtatttttagtagagacagggtttcaccgtgtcagccaggatggtctcgatctc

SEQ ID NO: 17461 - DNA, 364 bp, Homo sapiens
gattttttaaaaagttttgattatccttgggggaaataaggtagtttatttactagctttattctgagtgacttgaatactagagttcagtgcttattttgaactggattacatataacagccacttaatatcagactctgttaccaggctggtggctcacacctgtattcccagcactttgggaggctgacacaggagggtcacaccaggagttcatgaccagcctaggcaacaaagcaagatcctgtctttacaaaataaaaattaaaaaattagccaggcatggtggtgtgggcatgtaaactcggctacttgggaggctcaggtgggaggattccttgagcccaggagttcaaggctgca

SEQ ID NO: 17462 - DNA, 370 bp, Homo sapiens
gcgatggcaaaggctgtatgcactgtagcagtctcttttttttaaatgcatgatctatttgcttttttcacttaaatagaaaggaggggacaccacacatttattcttttacttcttctccatgatcttgtgattcccatttacattttatcttgctccagtattctggtgacacaggagccatggggtcatgttccgagcagcagaggcggccttccagtgcagagggaaccagggcccccttttcatgatctttacaaaatgaatgtggacctggaattcacagaaggaaacagctgcactgctgcactcatcgcactgatgccacggacactcccactttcctaattcggggagatggggaggaaga

SEQ ID NO: 17463 - DNA, 398 bp, Homo sapiens
  misc_feature (1)...(398): n = a,t,c or g
gtgaattacatgtttcatgaatccatttggcacagagacacaaggaagaaaacactagtaaccatctttccactagttcatagactgagaaacagtaaatacctttcctttccacttttaccctgtgttctttgaacatcatttgtgcagattctgccctcaatgaggaccaaataaagatgatttttgtgcttagcagtttaaggtatatggctgcatatgcaaaactctttcccaattcagtcgctacttttacttctgccctttctatccatcgtcttcattttgtgtgtacagtgctgtgtgtaagcttatcagtgtgtttttttatttgtatcagtcatgaaagtcctggtaggtatccagagttctatttatctanctggacngactctttc

SEQ ID NO: 17464 - DNA, 410 bp, Homo sapiens
gggccattgcacgtgagttaggactttggcaatccacgatgtcaaccatcttaagggataagaagcatatcagtgatgcatggaaatcgacagcatcagttaaatccactgtcatcacaaagaaaagggctggaccaattgatgatatggaaaaattacttgttatgtggatggaagaccagatacagaagcgtataccacttagcctactgaggatccaggctaaggcaagaagtctttttaatatgctaaaagaccgtgccagtgatcctacatatacacaaatgtttaaagcaagtcatggatggttccagcgcttcaaaaggcggcataattttcaccatgtatagatcactggtgaggcagcacgtgctggtaatgaaggtgccatagcttttaaggacagctgc

SEQ ID NO: 17465 - DNA, 353 bp, Homo sapiens
gctcacaagtcaaaagagctggaaggattaataaatacgaaaagaaagagactcaagtattttgcaaagttatggacgatgcataatgcacaagacctgcagaagtggacagaggagttcaacatggaagaaacacagacttctcttcttcattaaaatgaagactacatttgtgaacaaaaaatggagaattaaaaataccaactgtacaaaataactctccagtaacagcctatctttgtgtgacatgtgagcataaaattatgaccatggtatattcctattggaaacagagaggtttttctgaagacagtctttttcaagtttctgtcttcctaacttttctacgtata

SEQ ID NO: 17466 - DNA, 803 bp, Homo sapiens
tgctatgacatgattacgaatttaatacgactcactatagggaatttggccctcgaggccaagaattcggcacgagtgcaggcacaaagtgtgcagatggaaaaatctgcctgaatcgtcaatgtcaaaatattagtgtctttggggttcacgagtgtgcaatgcagtgccacggcagaggggtgtgcaacaacaggaagaactgccactgcgaggcccactgggcacctcccttctgtgacaagtttggctttggaggaagcacagacagcggccccatccggcaagcagggaaagaagcaaggcaggaagctgcagagtccaacagggagcgcggccagggccaggagcccgtgggatcgcaggagcatgcgtctactgcctcactgacactcatctgagccctcccatgacatggagaccgtgaccagtgctgctgcagaggaggtcacgcgtccccaaggcctcctgtgactggcagcattgactctgtggctttgccatcgtttccatgacaacagacacaacacagttctcggggctcaggaggggaagtccagcctaccaggcacgtctgcagaaacagtgcaaggaagggcagcgacttcctggttgagcttctgctaaaacatggacatgcttcagtgctgctcctgagagagtagcaggttaccactctggcaggccccagccctgcagcaaggaggaagaggactcaaaagtctggcctttcactgagcctccacagcagtgggggagaagcaagggttgggcccagtgtcccctttccccagtgacacctc

SEQ ID NO: 17467 - DNA, 350 bp, Homo sapiens
gtttggaaattttactgatatttgtatccctaaaaacatggtgtttttataaatgatggactatggtgcttcatctttatatcctatatgctatactcaggttccaaaaatagattctttccttcatgctcccatagcacctgtacctgcttctgttattgtacttacgtattttatatatatatatattttaaggatttttaccgtctattaaaagtacataaaggctctggaagcaaaatgcctagtttgcaagttcttctatttagcagctatataatctttagatagatgaatgatttttgtatgtcttagtttccttatctggatatgggactagtaatacaggg

SEQ ID NO: 17468 - DNA, 368 bp, Homo sapiens
gacctcagtgaaaactaaagcaaaagcagcaagagtctgcgcggggcaaacgtccttgcgatgcgactagcagacaagaggcaggagatgcgaggcgtcctacccgaatttagtacctccagcaaatctgtggcccagcgtggcccgatcaacaatggtagaccgagccatcaacctgttttcctaaaaatgaaaggtgatctggccctgactgaagacaaacgggaacaagcccaaaatgaacagagtgcctggaagtttacgcctggtaggtaaactctccagtcatattctcagtcaaggcttccctgacagtcccactactagaaagtcactggggggacagccaaggactcgtttctacacca

SEQ ID NO: 17469 - DNA, 349 bp, Homo sapiens
gttacaaattaaaaaaaaaatctttgtttatctgataggaggttaagcatttgcagtatattctatctaactgggagatatgctttgtttcaatagcattcttttaaagttgatttacgattacttcaggtggagcatgcattctgttcccgggcctcccttaggtggagctgcttcacctatttacattctctgcttggctcttgaaagcatatggttttgttatcactgatcaaaaagaatctgggtgcctgcctaatagactatatatttcttgagggtaaggaacgtgtaactttcttgataatctactggcagttccggtatatagcaggtggtaagtaaatgg

SEQ ID NO: 17470 - DNA, 611 bp, Homo sapiens
caagctagacaaaagatttatagttagacgagattttaaaaggaaacttttattataaaacatgtatttgaagttaaagttccttagcaaattttttgcatgaatgtttttaagattttgtatgttttcttccttccttccagccaatacaagagttgcggaaagttgttcttaatatcttgcaagactcaaacagaaccacagaaggtactattatttttgaatttaaattcatcttctctagctgtaccagtaaaaatcatccaggacatataggaaaaagaggaggagaatcatcccctgaaatgcttctcacttcttggtttccatgacctggccctttcagccattgtcatcagctgacttaattggattattaccaggtaaatgcactactcaatactgaacaaagggtgtttccaccaaaacaggctagactggagtgtcccacttccttggaatcctaaatggcagaagacaaacagctctttgctggaagagactgaggcagaaaggagaaatgccttaagttacatgtttaatcataataaacccaccaacatactcatctaaatttgtgttacgctctagaaatagctatctcaggaatc

SEQ ID NO: 17471 - DNA, 540 bp, Homo sapiens
  misc_feature (1)...(540): n = a,t,c or g
tnnnnnnnnnnttttgaanaccgttttgacatgattacgaatttaatacgactcactatagggaatttggccctcgaggccaagaattcggcacgagggaacattttggcaaagacaaatcaaaagaattccaactattcagctctcctcatgggaaggacctgctgtttaaggactctgcccacgggtttttaaaagtcccccccaggatggatgccaagatgtacctgggctatgagtatgtcactgccatccggaatctacgggaaggcacatgcccagaagccccaacagatgaatgcaagcctgtgaagtggtgtgcgctgagccaccacgagaggctcaagtgtgatgagtggagtgttaacagtgtagggaaaatagagtgtgtatcagcagagaccaccgaagactgcatcgccaagatcatgaatggagaagctgatgccatgagcttggatggagggtttgtctacatagcgggcaagtgtggtctggtgcctgcttgcagaaaactaccataagagcgataattgtgag

SEQ ID NO: 17472 - DNA, 584 bp, Homo sapiens
aacagctatgacatgattacgaatttaatacgactcactatagggaatttggccctcgaggccaagaattcggcacgagggaagaggcggacagcgaggccaagaattcggcacgaggctgcgggacggtcaggggagacctccaggcgcagggaaggacggccagggtgacacggaagcatgcgacggctgctgatccctctggccctgtggctgggtgcggtgggcgtgggcgtcgccgagctcacggaagcccagcgccggggcctgcaggtggccctggaggaatttcacaagcacccgcccgtgcagtgggccttccaggagaccagtgtggagagcgccgtggacacgcccttcccagctggaatatttgtgaggctggaatttaagctgcagcagacaagctgccggaagagggactggaagaaacccgagtgcaaagtcaggcccaatgggaggaaacggaaatgcctggcctgcatcaaactgggctctgaggacaaagttctgggccggttggtccactgcccatagagacccaagttctgcgggaggctgaggagcaccaggagacccagtgc

SEQ ID NO: 17473 - DNA, 496 bp, Homo sapiens
  misc_feature (1)...(496): n = a,t,c or g
ttgannccntnnnnnnntttgaaaanngctatgacatgattacgaatttaatacgactcactatagggaatttggccctcgaggccaagaattcggcacgaggagagagctagcaccatgagcttcctgagtagctgggactacaggtacatgccaccacacccagctaatttttatatttttagtagagacagagtttcaccatgttggccaggatggtctccatctcttgacctcatgatctgcccgcctcggcctcccaaagtgctgggattacaggtgtgagacaccgtgccgggccatgaacagaaatttttatattgtgttcacaacatctaatagtaagttggagtctcaagtggaagttgatcttcataaacttatgttcaaactacaggcatacctcagagatatcacaagttcagttgcagactaccacagtaaagcaaatatcagaataaggggaatcacataaatttttttggctttccagagc

SEQ ID NO: 17474 - DNA, 329 bp, Homo sapiens
ccaaattacccaaacaaaataaacatggcaatataaaaatgttaagaatttacaaagctgtacaaaataacttaaaatttaaaaattagactgatacagtctgtaagatctcttcgagagagctgtccaattacagatctatatacttttcttcagaaggtcaaagaaaggatgctttaaggcttctctgagagtaattcttttggctggatcatactccaacattttctgaatgaggtcaaagagacgctcatgttcaacatcttgagaaagcataaattcctggaagaaaaacgagaaattcattcaacagccttttccactaccat

SEQ ID NO: 17475 - DNA, 362 bp, Homo sapiens
cccaaatggactttgtcatgagtcgccactattctcctcacaccttctctactagacatgctcaggaaccaaaatcccaagggcaccagaagcacatgcttcaggctaacaaggacagcttgcaagttcaacatggccagcaccctcctcccagcaaaaaagcccacacccagtcacaggaacaaccacaggtctcattacctctacctccaagggtctcctcttgccagactccaagcccagccacacccaacgtcgacgcggccgcgaattccagatctatgaatcgtagatactgaaaaaccccgcaagttcacttcaactgtgcatcgtgcaccatctcaatttctttcatttataca

SEQ ID NO: 17476 - DNA, 350 bp, Homo sapiens
gaataaaatatccaaaatgcttcaaggtgccttatataactgctagaaatactgaattcattctcttcttttgaaagcgcacttgagatcttccaatccagcattatgaagaccgcatatctaatgacctaatttagaatcagcacttgtcacaatccatgctctaaatcatggcaagttccttggggatttctgcctctatacagcaaaaataatgcctgagaaaagatagaggccgaagttagccaccaaggagaatagagctgttctccaaagcagagagcgagagagcagatgggacagacctttggtcagcagcgaatcaaaaggagcatttaccaggggctagg

SEQ ID NO: 17477 - DNA, 470 bp, Homo sapiens
gcttcaataccctgttacccaacaggtgatgtgaagctgtaactgtcatatatgtggtgaaattccacttgctatacatgctaaccagagttataccatgtgctcaaagcacagggccctaatacccacagctctcaacttccttgaagacaaagatctgtctgttactatattgtagttactattttgtagttttcacttcatctaacacaagtctatgtagatatatcatcaaaccataatttgttacatacgtaatggtattaatgcataaaagaagtattagtctccacaagatagtaaaaggggctgggcacagtggctcacgcctgtaatcccagcactttgggaggccaagtcaggcggaccacctgaggtcacgagttcgagaccagcctggccaacatggtgaaactctctctctacaaaaattagccaggcatggtggcgcacacctgtagtcccagctc

SEQ ID NO: 17478 - DNA, 438 bp, Homo sapiens
  misc_feature (1)...(438): n = a,t,c or g
gaaggtgaggcatatttagatattacttacatgtgtgtactaggagtatcttcatgaaactcactgataagaaattacacgtgtagaaagcagacaatggaaacggaaaatggatactgtggtctaacatctcaccaaatgcaggaattctttccacattatcccagttgccatttgaaccagccaggaacgaggagtttggtcaacattttatgaagccaaataatgctaatgacagtagtctgcagtgctccggaccctaagcccatttcgatttggacttcatgttatttgtgattggaccaatactccatcaagcacaggtggacacagatatttgtaaaacctcttccccagtggtgcactgaaacctgctccctgcagcttccctggtggcttncatccgcctttgaatgccncagaataaatatgcncctt

SEQ ID NO: 17479 - DNA, 365 bp, Homo sapiens
gcagggacattagtgtgctgaatccctcagagaagcatgtgcatactctaccctgttgcctggcctggagaggttcttgttcgcttgtgcatgtccccagctacactcagagctcttgacgggcatcattgtgtcttactgatttctgtagccccaatgccaagcttagaacctggcaccatataagtgctcaataaacatttgttgaattgaattgaattggagtctagaatgagacttaatactgtaataaacaagatactgtaatataacacataggcatgagaagctttattatataaacaataccatggttcagtgtgtgctgtgtcacctgttttcacacttggggacttcctccattt

SEQ ID NO: 17480 - DNA, 349 bp, Homo sapiens
  misc_feature (1)...(349): n = a,t,c or g
gcggcacgagcggcacgagcggcacgaggaaaatgattaggtgatagtgattgacattattaagtaatgtaattattcagagttgtaaatatgaatttagagtcttctaaaaaactttttaatgtcacaatacacaatccaaacacnacacggacttggnacannttgcngantactccctngnnccttgcatatggcatatggggatgtgagatcgagcatagancagcagngtgctatcntcgtattatgtgctcttgangggaaatggcncgggctctgtgcttcctttctactcctcccactggctggagtgtggatgtggnggatgagatttggacctgtcacc

SEQ ID NO: 17481 - DNA, 147 bp, Homo sapiens
gggacattaatcttctccccagccaactgatggtagtcatattataataactccccagattggtttgtgctctgcactttacaaatcactccactgtttaagacctgtctttttgcttatcatgcccacagctgctctgtgaggtgg

SEQ ID NO: 17482 - DNA, 452 bp, Homo sapiens
  misc_feature (1)...(452): n = a,t,c or g
atttganacntntatgacatgattacgaatttaatacgactcactatagggaatttggccctcgaggccaagaattcggcacgagggtgcatgccgtggtcaccgtccgagacgccaaacacaccaactttgtggagttccggaactttaagatcatttaccgccgctatgctggcctctacttctgcatctgtgtggatgtcaatgacaacaacctggcttacctggaggccattcacaacttcgtggaggtcttaaacgaatatttccacaatgtctgtgaactggacctggtgttcaacttctacaaggtttacacggtcgtggacgagatgttcctggctggcgaaatccgagagaccagccagacgaaggtgctgaaacagctgctgatgctacagtccctggagtgagggcaggcgagccccaccccggcccggccctcctggact

SEQ ID NO: 17483 - DNA, 305 bp, Homo sapiens
ctccctgaaacatctgactccatgccataaatacatttccagggtttaaatttttcagaaacattttttctattgataccaaatttacctctccttaaattgaacaagaaaatatctgaatttgtatctatacatagatataaattctacgtatatattctgcatctgcatcattctaaaatatctgggatgttgtggtaaatatggtacttactgctaccagattgatttgtatcaaaacactatatgcccttatattgaactaactggtaatggctttaaaaatgagaaagtattgatccttt

SEQ ID NO: 17484 - DNA, 422 bp, Homo sapiens
ggtcaccagggtcttggattctaccgtgggcttcctgattgctgcacttgcatgcagttggttaacagcctttttagagaaggcagggagagattgtggctttctcaaagacgcctactgagtgagtgaaaaaggatttgagtctaggttaactcactgtgctgtttgggaacatcttggaatccttgtgatgaactcagcctcgcacaggggaggctctgaggttgtgttcctggaagaattaaagctgaaatggggcaggctgaatcaagtgtcttacgtcaggttgagtggccggcctgacgtctcacacatggtgaggggggtgcttccctgcgcttggagctcagccagcattctaggtgatggaggtgagggccttgcttgcctgcccattgtggattgaagaaactggatgtcac

SEQ ID NO: 17485 - DNA, 454 bp, Homo sapiens
  misc_feature (1)...(454): n = a,t,c or g
gagatcccagatctttgactctcaggactggaggcatcctcagcagccctttgcagctccctggcagcctgattcttctccctccactgtggatgacagggctctccctgtcttcatctggctgctggtgcatcagacccaccactggaggaagacctggggacatggccattccaacatgccccagagagcccttcatcacacagtcagctttcgtgagaggtagaggacccagggccacaataacatgctgcccgaccttaagcagatcactttacctgctgggtctcagacctttcatctttcctgcctgcctcacagtcaaacagaaaagtctaagaagtgcacacaaatttctcagagcaacaggagcattttatgaggctgggcacaaagaacgtttctggaaaaaatgtcagttantggnggataaatcgtgtcnaaagggngggtt

SEQ ID NO: 17486 - DNA, 432 bp, Homo sapiens
ggtgccccatcccacccaatcagagcatttggcgatggcacccaggcattcttggcaaggcacgcactgagtgaaacgttttagtgaacacctgtggaaagagctctgagcagggacttggctggcagagatctagtcctggctttgcggatgcaaatccatggaggatcttggccacgtcactcaactgaggctgagggccgggcacaggctttggaaccatcgggtctccctggatttgaatcctgaccctgcctcttaccatcttcactggagacctgggcgtctgagcctgtttcccccttgggaagcagagcatttcctacctggtagggctgggaggatgcgaccgaagtgcatggtcttgcagtgagagctggatgcaaggcacacactgttctcttgaaataaatgacagttcccagcataaaa

SEQ ID NO: 17487 - DNA, 420 bp, Homo sapiens
gcctaggcaatgacaactacaaacaaatagcaatgtgtggtctttaccacataagcatggatgaccgctttaaatcaatgtttgcatacactgactgtataccacagttaatgaagatgctgtttgaatgttcagatgaacgaattgacttggaactcatttctttctgcattaatcttgctgctaacaaaagaaatgtacagcttatctgtgaaggaaatgggctgaagatgctcatgaagagggctctgaagtttaaggatccattgctgatgaaaatgattagaaacatttctcagcatgatggaccaactaaaaatctgtttattgattatgttggggaccttgcagcccagatctctaatgatgaagaagaggagtttgtgattgaatgtttgggaactcttgcaaacttgccat

SEQ ID NO: 17488 - DNA, 643 bp, Homo sapiens
  misc_feature (1)...(643): n = a,t,c or g
aaccgctatgacatgattacgaatttaataccgactcactatagggaatttggccctcgaggccaagaattcggcacgaggtcgccatgatccgctttatcctcatccagaaccgggcaggcaagacgcgcctggccaagtggtacatgcagtttgatgatgatgagaaacagaagctgatcgaggaggtgcatgccgtggtcaccgtccgagacgccaaacacaccaactttgtggagttccggaactttaagatcatttaccgccgctatgctggcctctacttctgcatctgtgtggatgtcaatgacaacaacctggcttacctggaggccattcacaacttcgtggaggtcttaaacgaatatttccacaatgtctgtgaactggacctggtgttcaacttctacaaggtttacacggtcgtggacgagatgttcctggctggcgaaatccgagagaccagccagacgaaggtgctgaaacagctgctgatgctacagtccctggagtgagggcaggcgagccccaccccggncccggccctctggactcgcctggtcggttccccttccaggcccgtggnnaaccnagcngtccttcctnaagttgnctagagggaagggnccagctgggttttggg

SEQ ID NO: 17489 - DNA, 432 bp, Homo sapiens
gggaggtatatgctgcgggagagcagaacaagggagaagagaaaagatgtgcgtaccaaaaggatgtgaggccctgagcccagggcaggtaaggcatgggactgccttattttaccctggcatttaggacagtactccacaaaccacaaattcttataaatcacagccagtgaaagtatgctcaaaatccagaaagctcttttaaaaaaggtctcaacactttgagatgttagtcttgaaataagttaatgtttcaaattatattcattcctttaaatggattaaattgctatttcttgacccggcaaaattttaccttggtagatcattcaataaagcagcactgtgcccttctctaagtctgtggtgttgtaccggctcctgcatcatttttcacagctctttgaggacaaagaggtggaggacttggta

SEQ ID NO: 17490 - DNA, 354 bp, Homo sapiens
ggcgcaatcttggctcgctgcaatctccgcctccccaattcaagtgattctccagcctcagcctgccgagtagctaggactataggcgtgtgccatcacacctggctaatttttgtatttttagtaaagaggggggtttcaccgtgttggccaggctggtctcaaactcctgacctcaacgggagatcctccctcctcggcctcccaaagtgctagaattacagacatgagccactgccgagaattggtttttacttagatttgataggcctgttatttctaataagaaatggattttcaaaaataaattactttttccttccccagatttgacaaaacatttatcagggggct

SEQ ID NO: 17491 - DNA, 465 bp, Homo sapiens
  misc_feature (1)...(465): n = a,t,c or g
cagatcngatatgacatgattacgaatttaatacgactcactatagggaatttggccctcgaggccaagaattcggcacgagggcatgtgtcaccatgcctggctaatttttgtattttttctagatatgggggtttcaccatgttgcccaggctgatctcgaactcctgggcccaagcaatccacctgcctcaaccacccaaagtgctggaattacaggcatgagccactgcaccggcctattttctaactaactttttaaatgacgttggacaagtatctttacctttcttgttcctggtgccccagatttacaacagtctactctctcaggaatactcttgataaaatagtagattattacatttctcttacttgcagaatttctgtactagatagtgataatatatacagagaaagaaattgtgatctctggttatatatttaatagatgggtaatggtta

SEQ ID NO: 17492 - DNA, 378 bp, Homo sapiens
aaaaacttaaacagtttgaagagcgattagcagaagaaaggcataatcgattggaagaacggaaaaggcagcgtaaagaagaacgcaggataacatactatagagaaaaagaagaggaggagcagagaagggcagaagaacaaatgctaaaagagcgggaagagagagagcgcgccgaacgagcaaaacgcgaggaagagctacgagagtatcaggagcgggtgaagaaattatgaagaagtggaaaggaaaaaacgccaaagggagttggaaattgaagaacgagaacggcgtagagaggaagagagaagacttggcgatagttccctttctagaaaggactctcgttggggagatagagattcagaaggcacctgg

SEQ ID NO: 17493 - DNA, 457 bp, Homo sapiens
  misc_feature (1)...(457): n = a,t,c or g
ggatcttttgacactttaaggtgggtgggtgtgtgtgtgtgtgtgtgtgcgcgcgtgcgcgcgcgcatgtgtaaggttttatgttgctgttatttatttacgaacttcagatacgtttttatgtatttttcattcttctggagcttcctaaaaattgataagcatctgcactgaaatataatttaacagcaaaagtaaaaaaggattgaaagttgtaaattcctcatatcactacagtgacgattattctagaaatcgttgcttgtgtagcaaagaccaaataaatagatttcagacacaaccttgagcacagttgattttggacagctgctgtttattaggaaagggctccaggtggcaaaggtgcacacttcctcagacacaggtgagaagatgcagcaccttccacaggtgaatgggacggattcgaagtgagcaaagggattcncaaattatg

SEQ ID NO: 17494 - DNA, 327 bp, Homo sapiens
ggtagcgggcacctgtggtcccagctactcgggaggctgaggcaggagaatcacttgaacctgggaggtggaggttgcagagccgagattgtgccactgcactctagcctgggcgacagagttagattccatctcaaaaataaaaaataaaaaataaaaaagaatgtacataattctatctattattgtatagtattgttgcttcatgattttattttagttattattagctggcttaagttctccaaagataaatttgccctcatttttcttagactttataaaaaatgaattaagtaaaaccataagcctctgttttgcctttga

SEQ ID NO: 17495 - DNA, 446 bp, Homo sapiens
gtatatgctcttttgaaatatacaatagcttattattacagtcaccttgctgtgcaataggtcaccagagctcattcccacatctaaatgaaactgtaccctttgaccaacgtctccccttccccatgtcccatcccagcctctggtaaccaccattctactcttccatgatttcgacttttttagacttcacatgtgagcgagatcctacggtattggtctctctgcatgatacatttttaaaagaaacaaacaagatagattcaaatgctaagtaattctgtgaatggaacagaaataattttaccatattcaagtttgtcttgtaattttttctactcaataaatcaatacatggtaaatttacattgtaaaatttgggcacaacatttccatagacatttttctggaatctctaaatctttaaatagaatatttttgtaggg

SEQ ID NO: 17496 - DNA, 363 bp, Homo sapiens
  misc_feature (1)...(363): n = a,t,c or g
ggatgaaaatggatatattttgactgaaattctaacttctactctcagggctactcagaaagtctggctaatggttcatataggaaaaacaaacagattttttttctttcctagactggtgtccctgaggcttaggaataataatcaatttctctaaggctagttaataacaaacactgtttgttctttgtagtatctaacatttgcccaacctacttatagcacatggaatttggactgaacccacaagatacacactggttgcctttgaccctgggatagggcttactgacatctattttgaatggagggaagaatggagtactacaattgntgcctgngngnanannnccnatccactcg

SEQ ID NO: 17497 - DNA, 419 bp, Homo sapiens
gaatgtcattagatcctttataacgtagatcgaagccaaagcagctcatttgtgacaacatttcatatcaccagacacaccaggcaacagaagatgaagcacaaccactgtagcaaaataccttgactgcttgtgagaccattagcattgcaggccaaaccgtactgtatttccttctcataacctcaaggaaccatatgtgctacccacaacacctcattcttacccagggtgcgctgcgtcctcatggtactgtaggcagctgaagaaccgccgttcccttgaaagggaacacctggcattctgtggtgtttcgtgctgcttaaataatggtgcatttattatgttcaagttatttcaggattgccatatgtgcaaacaaatcatgcaatgcagccaaggaatatatgttggtggtg

SEQ ID NO: 17498 - DNA, 494 bp, Homo sapiens
  misc_feature (1)...(494): n = a,t,c or g
ttgatacctcgagaaaccntgaacatcctacgaatttaatacgactcactatagggaatttggccctcgaggccaagaattcggcacgagacctgtcttaaacttacctagacttacctttgccttcgttttgcatttatgatttttccctcctttctcttcaagtgaatgctttatttttgttttcatggtgtgttnttttcttgctttcattttatctttttctcttttttttttttnaaatncctttttngancaanttnttccngcccntccanngttgcccncnttgaggggntnatgtngnaaanggcccnntnccanatccngtntngggggggctttcntgttaaattttnccngggggncntgntttccctttttttncaattcntttttaannaattgggncattnttanatnangttanggaaacncttagnccttgatnnccacattgggnaaataggggnntgatnanccggnaattttcc

SEQ ID NO: 17499 - DNA, 769 bp, Homo sapiens
ccttactgcatttctaattcttcctcttgtttttggaaacagggtctcactctgtcacccaggctggagtgcagtggcacaatcatatttcattgcagctttgacttcctaggctcaaacgatcctcccacctcagcctcctggcttgctgggaccagagatgcccatcaccacgcccggctaattttttaaattttttgtagagaaggagtctcgccacattgcctaggctggtctcgaactcctgggctcaagcgatcctcctgccttggcctcccaaagtgctgggattacaggtgtgagccattgcgcccagccaagatttttaaacaaacatggaacaaattccaaatgaagtttttttttaaaacaatcgccttgagactatttattccaacaatgttattgttcggctaaaagcatttggtaaggttttctttcataattaccctcaaagctcctttagataaaagaaaaatcactcatgatcatatagtcacatcttactttgcatctataccaaaccaataatccaacctggtatgatactctagctgctagacttggctctaaagcaacttttagtcattctcagaaatcaaactgatactaagctgacatatcctaaaagttatgccaatgaggcattccagggaagcactgctgaaataaacacaaaaactcccatggtgactacgttgaggaagaccaatattcatttggataactaaatcatgatttattttaaaaaataataaaagccatttcc

SEQ ID NO: 17500 - DNA, 505 bp, Homo sapiens
  misc_feature (1)...(505): n = a,t,c or g
cctaacagctatgacatgattacgaatttaatacgactcactatagggaatttggccctcgaggccaagaattcggcacgagtgattattttcagtggcaccatctgaaaaaagacattcacattatctgggtgtaacttcttcaatggacatatgcatattttgagagggcaaacaagtaatttcaattgggaagtatggcacagctgtaatttataattgccaaacattttattttaactgcagaaatagaaactccctaccatctgcagcctaagataaactgggattgtgtacccaggctgtctctgttctattcatgaaggtatattaggctacaattgagtgaaagtgttgggattatatttggaaaagcaagtcttctctttgcagacttcaaagttttagcaaattagctgcaataattttacattgatctctggtatggctccagaatangnaatatgcntatttataagtggtatagaatgcatatatgaagaag

SEQ ID NO: 17501 - DNA, 401 bp, Homo sapiens
gtttttgtccgcacgccaaacgggtttggaggaccctcttcgccttcggagagcagagtcaacacggagagttttgggactggaattaaataagagacagagatgttgaaagaatccacggcggtggaattaacacccttgacattgaacctgttgaagggagatacatgttatcaggtggttcagatggtgtgattgtactttatgaccttgagaactccagcagacaatcttattacacatgtaaagcagtgtgttccattggcagagatcatcctgatgttcacagatacagtgtggagactgtacagtggtatcctcatgacactggcatgttcacatcaagctcatttgataaaactctgaaagtatgggatacaaatacattacaaactgcagat

SEQ ID NO: 17502 - DNA, 429 bp, Homo sapiens
gcggcacgagctacgatagaaagagaatcatggtgaggggcaaagaggcgatgctgaattaagaaacctgaaaagttgagtttgagacagaccttcatccagagtcctcaagtagttctcagatgcaaatttccttggggtgtccttccattcatcaacatggctgcgtatttaaagcttctttcaggttccggtaacaagggcttccaagtcaggcccacccattgagtcttcgatctgccccttccaggcaatgtgaccttggacaaatctcagtaatctttgctcttctggtttctaacccctaaaacaaggatgataaataccattgttgtgagatgttttcttcagatgcctctgctttccttcattcttgctagtcaaggtacaatttccatagagctaaaaatgaatgattcaggaactaaa

SEQ ID NO: 17503 - DNA, 344 bp, Homo sapiens
gctggaaggtgaagaagaacttatcctatcaggacggaaggtcctgtgctcgggatcttccagacgtcgcgactctaaattgccccctctgaggtcaaggaacacaagatggttttggaaatgctgaacccgatacattataacatcaccagcatcgtgcctgaagccatgcctgctgccaccatgccagtcctgctcctcactggcctttttctcttggtgtggaattatgagggcacatcctcaataccaggtcctggctactgcatgggaattggacccctcatctcccacggcagattcctgtggatggggatcggcagtgcctgcaactactacaaccg

SEQ ID NO: 17504 - DNA, 455 bp, Homo sapiens
  misc_feature (1)...(455): n = a,t,c or g
ggagtcntnntnttganatctnnatgcccttatnacgaatctaatacgactcactatagggaatttggccctcgaggccnagaattcggcacgaggagacagtttgttaccgggtctcacctgccttcttggttcatgaataggtttttactctttagcttcaacagtgggcaacatcagtaaggcaagattcacacattatttgaaattggacaaaatggatacaagaggccggctatggtggctcatacctgtaatcctggcactttgggaggctgaggcccagcctggccaacatggtgaaacctggtttctactaaaaatggaaatattaggtaggcatgcctgtaatcctagctactcaggaggctgaagcaggagaattgcttgaacccggangtggaggatgcagtgagccaagatggcaccacttgcnctgggcaagagagcataga

SEQ ID NO: 17505 - DNA, 344 bp, Homo sapiens
gacaacattatgttcccgaattcccagaaaaagaatatgaaggtgaaaaggtttctgtcacaacaagattactgatttcccatttaagtggaattcgtcattatgaaaaggacataaaaaaggtgaaagaagagaaagcttataaagccttgaagatgatgaaagagaatgttgcatttgagcaagaaaaagaaggcaaaagtaatgaaaagaatgattttactaaatttaaaacagagcaggagaatgaagccaaatgccggaattcaaaacctggcaagaaaaagaatgattttgaacaaggcgaattatatttgagagaaaagtttgaaaattcaattgaa

SEQ ID NO: 17506 - DNA, 227 bp, Homo sapiens
gtgggatcctcaaggtgcctgccatcaatgtcaatgactccgtcaccaagagcaagtttgacaacctctatggctgccgggagtccctcatagatggcatcaagcgggccacagatgtgatgattgccggcaaggtagcggtggtagcaggctatggtgatgtgggcaagggctgtgcccaggccctgcggggtttcggagcccgcgtcatcatcaccgagattgac

SEQ ID NO: 17507 - DNA, 511 bp, Homo sapiens
  misc_feature (1)...(511): n = a,t,c or g
cacgcgtccgtacacctgtactctgagctggagctctcagctcacaacgcagccaaccgaggcctacgaggacctggcctgatcatcagcactcaagagcaggggccagatgagggagaggagaaggcggccggggaggccgaggaggaggaggaggatgatgatgatgaagaggaggaggaggacttatcttctcccccagggctgcctgagcccctggagagtgtggaggcccctcccaggccccaagcccttacagatggcccccgggaacacagcaagagtgccagcctcctgtttggcatgcggaacagtgcagccagtgatgaggactcaagctgggctaccttatcccagggcagcccctcctatggctccccagaggacacagattccttctggaaccccaacgccttcgagacggattccgacctgccggctggatggatgagggtccaggacacctcanggacctattactggcacatccaacagggacccccagtgggaa

SEQ ID NO: 17508 - DNA, 320 bp, Homo sapiens
  misc_feature (1)...(320): n = a,t,c or g
ggagcagtggacgctgagagcagcaaggccagagttgaaaacttacagagtcctgaggctttcagactgaaaaaggctttcttctgtcactgacaatcgccaccatgatccatagtcttttcttgatcaactcctctggagacattttcctggagaaacattggaaaagtgtggtcagccgttctgtttgtgattacttttttgaggcgcaagagagagctactgaggcagaaaatgtgcctccggttatccctacccctcaccactatctcttaagtgtttaccgccacacgatcttttttgtggccgtgntncagacg

SEQ ID NO: 17509 - DNA, 321 bp, Homo sapiens
ctgccacactgacccatctacatcacagacaagatgtgctgctcctcggctcaacgtgctgcaatggctcctgaccacctttatgctaatgtccacaccctttagcacggcagacagactcgttagggcctgactcacctgcctccctcaccatcagacccactgacagctcgtgaccacctttatgctaatgtccacaccctttagcacggcagacagactcgttagggcctggctcacctgcctccctcaacatcggacccactgacagctccaaatgtgcctctgggcacccccaggttctgctccctctgaccatct

SEQ ID NO: 17510 - DNA, 369 bp, Homo sapiens
caactttccattccctgaaatcactcacaagctgagtttgttaataggctctcaatattttatttcttatattctggccttgtttttagtatttcttaaggtgattttaataataattaattgtatatgttttactgtactagacttagtaaaacataagaaagacgtataacatagttgaacaactttaagttgctctaagaagtttcctatgtgaggctgggtgccatggctcacgcttataatcccagcactttgggagaccgagatgggcgtatcacttgagatcaggagttcaagaccagcctggccaaccaaccccatctctactaaaatacaaacattagccgggcatggtggcacatgcct

SEQ ID NO: 17511 - DNA, 544 bp, Homo sapiens
  misc_feature (1)...(544): n = a,t,c or g
gttttttttttaatttggaagtttccctttattacttttaaccttgcctagctttcatgtggtgcatgatttgagtttttgtgtgttttaagtatggagccatttgttatgcacagtttttaagagagacaatatggcttatttatagagcaaaaaacggagatttgaaccacttataggttcaaggcttatatgttcttgatgtgtttccagaataagcctgtgtttattcatttatattttatgttacttatttttttgacacagttttgtagtttttaaattttttacagaatgatgagtatatactatttgacgtttgagttaggaaaacaggctgtcactggaaattagcaggatttaaaaatgcagagtaaaggaatgatgaatagtctgctagtcgaacaaatcacaggaaaagataaggaaatagcagttactctaagtagtaggganatggcggggagactggagaattgacacatcttaatgttaattatgaaaattagttattctttccagggaaagaatttttatggttatc

SEQ ID NO: 17512 - DNA, 195 bp, Homo sapiens
gacaggcgtgagccaccgctcccaggctggtctcgagctcccgacctcgtgatgcgcccacctcgggctcccaaagtgctgggattacagacgtgagccactgcgctggcctaaccctgtaattattatacgttgatttttggcatgctcataattacctggaacataaagtttttgctggtaattccctgttat

SEQ ID NO: 17513 - DNA, 408 bp, Homo sapiens
gacccgctggacaaaccatctccagagccttaatcgcatctgtaaagtcccttttaccatgtaaattaatattcatagtttccgaagatcaggatctggatttcttttggggcaattattcagctaaccacatattataatgaggaagcacttcttgggaggcatcataatgcttgttttttcttttcctaaatagagtatcacttttacccaaatggaataactcgctgggttattttactgagctcttgatgctcatttctttggtcttctctgtgatgaattaatgtttctatatggacatcatgcacaatttctttattcctgaagaatattttaaaatgttgttattttatgttgtagttggtgtaatacggtgcccagtatgccgccaagaatgcagacaga

SEQ ID NO: 17514 - DNA, 369 bp, Homo sapiens
gaataccctgtctccacaaaaaatacaaaaattagcctggcatggtattgcatacctgtagtcctagctactcgagaggctgaggtgggaggattgcttgagcctgggaggcagaggttgcagtaagtcaagatcatgctactgcactcctgcctgggcaacagggtgagacggtctcaaaaaactcccccaaaaaccaaaaaacccaaacaaaaataattcccccataagaggcacaagccaaagagccaattgatacggtactatgcaatcaatgcctgttgatctttcctgaccttttgatcactcagtcttctaaaatggacagctatacaattatattcattccacaatcatttgaaagacaag

SEQ ID NO: 17515 - DNA, 453 bp, Homo sapiens
ttggaaaaccctatgacatgattacgaatttaatacgactcactatagggaatttggccctcgaggccaagaattcggcacgaggcccatgccatctggcacatcagcaccatccctgtccacgtcctctttttcagctttctggaagatgacagcctgtacctgctgaaggaatcagaggacaagttcaagctggactgaagaccttggagcgagtctgccccagtggggatcctgcccccgccctgctggcctcccttctcccctcaacccttgagatgattttctcttttcaacttcttgaacttggacatgaaggatgtgggcccagaatcatgtggccagcccaccccctgttggccctcaccagccttggagtctgttctagggaaggcctcccagcatctgggactcgagagtgggcagcccctctacctcctggagctgaactgg

SEQ ID NO: 17516 - DNA, 365 bp, Homo sapiens
gattgcatctaatttctacagtaatcctagcaggtactgttttgttcccatgttacgggtgaggaaacggagatatagcaaggttaagcaacttacccaaggcggtgaatgtaataagcagtagagctggaatttgaccccaggcactctgctccactgagggttgatttgcttcccataggcagcaccacataggaagatttcgattccaaattcagagggaaaagtcagggtgcagcatatagctagcagcagaaagtagtttgtgataaggcccctatgggtggccaagcaagaagagggcaggaaaggctcacggaatcagagaagtctgcattagtggatgaggaaggcttgagataggc

SEQ ID NO: 17517 - DNA, 344 bp, Homo sapiens
gggagcatgcagtgccacactcttcctctctgcccttactctggggcccaaaacagtaggagaaatagaattggggagtagggttcaggggctgctgggagtcccttctgaaatgtgttgtatttactttttcatattggcagctggaaggggaagcccatcccagctcggcattgttgtctaacatggttaatcagatcctataatcctgctgtggaaatattgggcctcactcaaaacaatagagaccgagaatattgtggttaaatttcaaccaacggcctccctggcctgtttgctaacccctacccccctctcccgggccagagtcctcctagctttat

SEQ ID NO: 17518 - DNA, 369 bp, Homo sapiens
ggtcaggaaaaaaatgcctttaataacggacccatggtatgggtgcaggagacattactgaagtcccatattcatgactctgagcctgataaattttgcatacctcgcacagctcagattgttctgagctatttttcttttcttaaaaataatgttaaactaaatttggcctaaggacgcctccatatttgatttcttatgttacaaactataacctaatttagtacataaactaactgaaactaacttgggtgtatacttttgtaacaaaagctgagtctcagcccatcacagcagcagagcttcagtcaattaaaggtggccaactgatcaaactatgatcaaataaggcaaatactgagctgtaac

SEQ ID NO: 17519 - DNA, 484 bp, Homo sapiens
  misc_feature (1)...(484): n = a,t,c or g
ggngnnnattganncccttgancagcgctatgagcgtgaagacgaatttaatacgactcactatagggaatttggccctcgaggccaagaattcggcacgaggtggagtacaatgtgtccttcccccacgcagcaaagtggacattctcggctcagaatgcatcccttcgagatctccaagcacccctggggcagagcttcagttgcagcaactcgagcatcattctttcaccagctgtccacctcgacctgctctccctgaggctccaggctgctcagctgccccacacaggggtctttgggcaaagtttctcctgccccagtgaccggtccatcttgctgcctctcatcatcggcctgatccttcttggcctcctcgccctggtgcttattgctttctgcatcatccggagacgcccatccgctaccaggccctctgagcatttgcttcaaaccccagggcactgagggggttggggtgtgg

SEQ ID NO: 17520 - DNA, 315 bp, Homo sapiens
aaaatctgctgatctcttttgtaaaattttatttgtgggtttagcttatttattcctgtctcattatataaaaggagggcagggtaggggagcaggtctaggactggactcttttcaagtctaaaattcaatgttgatgaataagagcgtcttataaatacataaaaatctaggtgtaggccaggtgccgtagctcatgcccataattccagaacttttggaggttgaagcaggcaaattgcttgggcccaggagtttgagaccagcctgggcaacatagtgagaccccatctctgcaaaaaaaaagtaaaagtt

SEQ ID NO: 17521 - DNA, 468 bp, Homo sapiens
  misc_feature (1)...(468): n = a,t,c or g
ttgcttccancgctatgacatgattacgaatttaatacgactcctatagggaatttggccctcgaggccaagaattcggcacgagcggtacgagtgccaacattccttcttggcaggacttaggagtgcagatgggccccagagagcatgccttgctcaagccaggtccccctcctgctgccactttgggtggctggaaaaacctcacaaagggtgcagagtctgcggttgggagactggtctcaattttcctccatcacctgctcataaactctcatgggtttctgggtcacagtgcagccctaggtcaatcttccaaaagctgatttgctgaatttcatgtgaattgactagcttcatgtcagcattttagggaacatttgattggtcttcatgcctgctttctgcctttgcaggctgagaaacaatgaggggagagaatgagggacagagagaggaggggactga

SEQ ID NO: 17522 - DNA, 428 bp, Homo sapiens
gcaaggagctttaataaacattatcttatttaaataaatagagcaaattaaagagaagaggatgcagttgtacattatggccagttaaacagagagggattctgagggggaggaagggagggtggccccagaggacagccatggctgtaaggaggaggccagaggtctccagcagggcctctctggggctttccaggtttccttggagccaagaattttaatcttgggcaaacctgtctcctatacttcaaacgtgtttccatgtattacgtggaattatagactacctaaactgcatcttttgtttctctcagaaaaattcacagattcagattcacctaatatttattgagcacctacctggtgccaggggttgtgctaggtacttacatttttgatcttactgagtaatcacatcattctcagat

SEQ ID NO: 17523 - DNA, 423 bp, Homo sapiens
  misc_feature (1)...(423): n = a,t,c or g
gtctgnnttgtgccttngaagcacgagatactcttnngactgactacgaatttaatacgactcactatagggaatttggccctcgaggccaagaattcggcacgagcggcacgagaatgagcttcccaaactctgtggacaggtgtcttgtgagcttagatcctcataactgtcagtgaggctggtcaggttgtgggaacagcccaagtccctgggtctgttgactctagtcttgagcagccactccagttaatcccaaattctctagaaatacataattttctataagtgccatgaagtaggggtaaaatattgggaggcntcngtctaaacagcactgncagaacatatccagtganntttaaagaatatcnttggccgcgggnttnnttngngaggaagggggcctaggcccgggcctgc

SEQ ID NO: 17524 - DNA, 494 bp, Homo sapiens
  misc_feature (1)...(494): n = a,t,c or g
gaaatacacctgttaaaggaggaactgtagcggatctagatgagcaggatgaagaaacagtcacagcaggaggaaaggaagatgaagatcctgccaaaggtgatcagagtcgatcagttgaccttggggaagataatgtgacagagcagaccaatcacattattattcctagttatgcatcatggtttgattataactgtattcatgtgattgaacggcgtgctcttcctgagttcttcaatggaaaaaacaaatccaagactccagaaatatacttggcatatcgaaattttatgattgacacgtatcgtctaaacccccaagagtatttaactagcactgcttgtcggaggaacttgactgganatgtgtgtgcngtgatgaaggnccatgcccttttanaacnattgggganccnttaatnaccaatttgacccgggaaantanacccatggaatggggacctcctcctacnccncattttaatgtattag

SEQ ID NO: 17525 - DNA, 398 bp, Homo sapiens
actcactatagggaatttggccctcgaggccaagaattcggcacgagcacctacagtccagagatctcctggcatcacaggaaagggacaaaaggttctgaagacagcccacccaagcatgcaggcaacaacgaaagccattcttccaggagaaggaatcggcattccaagtcaaaagtcaccaatggcgttggaaagaaatgaaaaaccctggttaatcaaagatgttccagagtgcctagaactgagagggaaatggaactcatttggaactccccgtgaggaggtcgaggcgcacagggcaagcaggaagaggcgagggcacttgggggtcattatttgagatcgtaagtcttgtttcccacagacctggccgcgtcaggcagatcatcgcctgg

SEQ ID NO: 17526 - DNA, 507 bp, Homo sapiens
  misc_feature (1)...(507): n = a,t,c or g
tnnnnnnnnnaaantttgaanccatcagctatgacatgattacgaatttaatacgactcactatagggaatttggccctcgaggccaagaattcggcacgagccttcgagatctccaagcacccctggggcagagcttcagttgcagcaactcgagcatcattctttcaccagctgtccacctcgacctgctctccctgaggctccaggctgctcagctgccccacacaggggtctttgggcaaagtttctcctgccccagtgaccggtccatcttgctgcctctcatcatcggcctgatccttcttggcctcctcgccctggtgcttattgctttctgcatcatccggagacgcccatccgcctaccaggccctctgagcatttgcttcaaaccccagggcactgagggggttggggtgtgnngggngngncccttatttctnnacacgcaactggctcanagacaangnatnntcttcctttnttgaanaacnnnnnnaangccg

SEQ ID NO: 17527 - DNA, 400 bp, Homo sapiens
ggtaaatggaccgctcattctgtggggtgagaaaagagataaggggctagctattaagttaatactctgtctttattctgctgataaacttgtaaaaccgtaggtttttaaattatgtggaaaactgagggggtcagtatttcctggtacattcttgtattttctcttgattaggacacccaaattaaacctaatcctcttagaaggctgggtattgaagaaggattttagagtttaggtatgcctttatggctaggattcttaaattggggtccatagggctttagtgggtccttgggtgggctttggaacactaaaccctgaaattataggtaaaatcttgaaaatatacattttttctggggagatacttcatagatgtcattggataattaaaagg

SEQ ID NO: 17528 - DNA, 235 bp, Homo sapiens
  misc_feature (1)...(235): n = a,t,c or g
aggngnccttgtannnncntggccaccgganactcttatgacatgattacgaatttaatacgactcactatagggaatttggccctcgaggccaagaattcggcacgagtaactgaattgcaggacacccagtttgtatctgcagagaactggagaactgcttagtgtggaaaacccacacatttggtgtcagaaatgtgtgagaaaaaacaattttttcctttttttttttttt

SEQ ID NO: 17529 - DNA, 336 bp, Homo sapiens
ggatattgctgtgtgatgttagactgcaacttagcccaacagctgttctagtaattggcagtttctcatcgagttaagcctacctgataaagaagcacgcttacatttattgattacccccgtaaaatgaacaatacatccaacaaggcttctagcaaaaatgttcttattaacctcctttttatactaaggaaaaactgggtacaacacaaatcttcatcaacagaagaataccaactgttatacagtcataaaacgatcccagaagttcactccataccatcaaaaccaggaacccacactgatgcccctgatggcagaaaatcatgatacaaa

SEQ ID NO: 17530 - DNA, 388 bp, Homo sapiens
gctggaagagtagacttgcaaataatttaaacaaaataagaaagaatgaaaaaagtgtgctaaaagaacagtacaaagtaaatgctaaaagaaacatcatctgaatattattgtatgtattacagcagtagttccctttgtttctcattttgtccttgaacatctgcttttctggagtgatgatttgattgccaattttttcatatttaacaaattcagatttttttgaaaatcatttgtagaatgcattgtgtatgctaaataagtgcagaatttgtgaactaaagcatctattgattaacattgcactaacaggtaccatgtaatattcattgctctccctgctggaatttgtaacttttccaaaactatgccattaagccatact

SEQ ID NO: 17531 - DNA, 526 bp, Homo sapiens
  misc_feature (1)...(526): n = a,t,c or g
gcagctcagccacagcaggataaggcactggacagagttgtgagggtctcattctaggccctagcttctggacaacttttctagacacacctgggccagaaaagaacccacttcctataaaggaagaacaaaatattggaagatttcatttgccactcactaaagagcacctgggccctgaataaccagcagcaatacccaggtagcattcatcatgggccttatatgagactctagattgtgatggcttcggatactagctcaaccacagttgggtagagcaccaagtgggctcttagggtccccaattccaagcactggttcttggatggcaattctggacccactaggccaaaagggagcttgctacccaaaaagtgagtctcaggcctggcagcattaaccacaaactacagaagcgcccttggaccttaagtgaacacaagaggtcacctggaagtactctatgtangcctgtgatggggctatccacaggagaggtcccctgcctgtggaaaagggaaaa

SEQ ID NO: 17532 - DNA, 595 bp, Homo sapiens
agaaccgctatgacatgattaccgaatttaatacgactcactatagggaatttggccctcgaggccaagaattcggcacgagcaaaaccaaggtccagggaagctgtgagggtgcccatccccacctgcttctctcattcccctatggacacctcagctttggattcatgcaggacctccagcagaaggttgtctacctgagctacatggcggtggagtacaatgtgtccttcccccacgcagcaaagtggacattctcggctcagaatgcatcccttcgagatctccaagcacccctggggcagagcttcagttgcagcaactcgagcatcattctttcaccagctgtccacctcgacctgctctccctgaggctccaggctgctcagctgccccacacaggggtctttgggcaaagtttctcctgccccagtgaccggtccatcttgctgcctctcatcatcggcctgatccttcttggcctcctcgccctggtgcttattgctttctgcatcatccggagacgcccatccgcctaccaggccctctgagcatttgcttcaaaccccagggcactgagggggttggggtgtgg

SEQ ID NO: 17533 - DNA, 343 bp, Homo sapiens
gagatcacatagtcacagttctctgcagacattgcagttattggtcgtgacaggatctgcggtttgctcttggaaggagtgactaaggtagatatcattagaacggaataatttagggagctaagaatatcgggtgttggaaaaatcatgtatatgtatacagacattgccatgagtcagatgttttaattgatagggtaggagtgaatcaggaaccaaaacttttgaagaatacatgtgaatgatcctagatgtgagtagctgacagcagtagtttcctttccagcagatgactgttgaatcctatagggtacatatgcaatttgaatccgataacttcatg

SEQ ID NO: 17534 - DNA, 426 bp, Homo sapiens
  misc_feature (1)...(426): n = a,t,c or g
aaccttttgaaacntangactgattccaantantacgacncactataggnaatttggccctcgaggccaagaattaggaaatgtctgtctgcataccttttaggagcgtgtgaatggtggcttcactnattatgtatgtttatctgtatgtatattccttattttgtcatatatgtagagaaaattgcatgacttgaggcatcatttaggttgaagaagttaatgcttagaatgcattctaggagaaaaaatcagttttaaaaacctttgttgttaacaaagtatatccagattggttaattttattgaagggtttttttctgtaattgataaaaatgtaatgacaacaattcaggcatcataaaatactgaactattgtgactttattcttagaattgctgcttacattaaacatgtttttaggg

SEQ ID NO: 17535 - DNA, 346 bp, Homo sapiens
ggacttctgtagtccagacgagctgtatcatagtgaaggtgtgaagacactgaagactctgggaccctaaaccttactagagttcacatgctgaaattcaaataactggcataaatgtgaaaacaacgccacatgtaattgctaccacatccagtttactcttctgtaggaggtgcttcaggaagtctccctccctgtgtcttgggagccactgatttcacttgactatagactgaattttggagtgaacacttatcacgcaggatcaaagtaaagcatcataggaattctgattttatgaacattgcacactgcctaagcagtgagtgttcactttattctgaag

SEQ ID NO: 17536 - DNA, 314 bp, Homo sapiens
  misc_feature (1)...(314): n = a,t,c or g
gggttattaatcccactagttcttgaaaaaagtttacattaatttgtcttactttcaacttgacccattttgtataataatttaaaggaaattgacacattttgactaaacataaaaaacttactttaaaaaacctgatggactctaaactttaattatatgggttacacatgagtaaatgttttcaaatggacatattttattacacagaaataaaaaattcataggaaaatggcattgcttaatgtgactttttagaaaagttgctgttgaaaataggtgattgaattgngttcttttggaaatagagttac

SEQ ID NO: 17537 - DNA, 398 bp, Homo sapiens
atagaaccgagctgtgcctagccgcacaagcagggatgcactgggcagagagaagaaggagaatgctgcacacagagaaaatggcactgaagaaggcagggaggcatggaaaatcaggaatgctcagaggatggtgaggtcttcaagttgggattaaagtatatatttgttcattctttcactcaaaaccattttgaaggggagagagggactatcatgttctgaacatcataatgaaagcttctgtgaaagcccatgtgacataacccaacacagtccttccttgctggccttacacattttactcgttctttactgagttcttttctaagtacaatgtaatggtaaagagcatggactctagagccagaccactgggatcaaattcaactcttgaa

SEQ ID NO: 17538 - DNA, 492 bp, Homo sapiens
  misc_feature (1)...(492): n = a,t,c or g
tttgantttgataccgttatgacatgattacgaatttaatacgactcactatagggaatttggccctcgaggccaagaattcggcacgagtacatttcctacttaggttttaagaaaatcgtgtttgtttgttttggacaggtgcttgtatctatgaaattaaaatgtaaatgccaggtaaaattaaactgaggcatctagcagtgtatgtattagttgtagatattcagggcaattaatttatgactaataaattatgataaagcttatatttttgctttggtgatactttggattattttagtttttttaaaatgaccagtagagaatttggcagtattctctagtgctgcacttggcttctgtatcagtaagaattctaagattgtaagcaacagaagcccactctggctaacttaaggaaaagataatttatttgagggatattaagattccatagacttanctgaaagaccnacagccggctttgga

SEQ ID NO: 17539 - DNA, 428 bp, Homo sapiens
gggttacttggctggtttcctggacagagaacatccaaggttccattaaatacatcatgcttaaccctagttcacgaatcaaggtaaggggatagttgagagctgcactggttcatggtgctgataacctttttttgttgaaatgtaacgttctcgtcctctagaatcactttgacaaattaaaaatcctccccattgaaagaaggcaagtactttcatagttagcattatggtgatcttcctacagtgcctccatttttttggtcacattgtaatcttatttattaattcacaaatatttactgaaatcccaaatgtgccccacacagtatacatttgatgctaggaattatgttggtaaacaagatagacgtaggccctgccttcatattgcttaacgtccagtggtcagaatgtgttgaagtatg

SEQ ID NO: 17540 - DNA, 502 bp, Homo sapiens
  misc_feature (1)...(502): n = a,t,c or g
tnnnnnntttgantttgantaccatntatgacatgattacgaatttaatacgactcactatagggaatttggccctcgaggccaagaattcggcacgagggatgccaagatgtacctgggctatgagtatgtcactgccatccggaatctacgggaaggcacatgcccagaagccccaacagatgaatgcaagcctgtgaagtggtgtgcgctgagccaccacgagaggctcaagtgtgatgagtggagtgttaacagtgtagggaaaatagagtgtgtatcagcagagaccaccgaagactgcatcgccaagatcatgaatggagaagctgatgccatgagcttggatggagggtttgtctacatagcgggcaagtgtggtctggtgcctgtcttggcagaaaactacaataagagcgataattgtgaggatacaccagaggcagggtattttgctgtagcagtggtgaagaaatcagcttctgacctnacctgggacaat

SEQ ID NO: 17541 - DNA, 345 bp, Homo sapiens
gccgtgatcatctaaatgctttcctggagttttctaaagaagtggatgcccaatcttccctgaaatcatctgttctgagtactggaaatcagctccttcgactaaaaaaggtggacacagccacgctgcgctctgagctgtcgcgcattgatagccagtggactgacctgctaaccaatatcccagccgtccaggagaagctccaccagctccagatggataaactgccttcccgccatgccatttctgaagtcatgagttggatttctctaatggaaaatgttattcagaaggatgaagataatattaaaaattccataggttacaaggcaattcatgaatacc

SEQ ID NO: 17542 - DNA, 407 bp, Homo sapiens
gggagtcagaagaacagctcagctctgaacacacctgttacagtcctatcactcactgatgatagaaaaccgcattttgttggaacgggcacagtgattgtcaaggaagttgtcttgtgctactgccatggattcaaaagattcttgggtcgtgaaagaggtggcatcagaaggatatgtttgttgacagggagaccagatgcactgatccattttttatccttttgccttcagagcatccttgtctccttgaattcactgctgtctcagaacccaggagggctgtcggagccctctcctgcagctcagctcccagggggctctcccagcaggctggggctgtctcccagccggccagctctgctggaactggaggaggcagccagctgcaatgggactgcctcttt

SEQ ID NO: 17543 - DNA, 404 bp, Homo sapiens
  misc_feature (1)...(404): n = a,t,c or g
catttaaggacttgtgctgctaagttgaggccattgacggnttcccagactgttaanacattttcacaaaacagaccaccagcagctaggacatttcaacagattcggtgctattctgcacctgtagctgntgagccctttctcagngggactagttcgaactatgtggaggagatgtactgngcttggctggaaaaccccaaaagtgtacataaggtaaggntcgnagggctgtgggtctgcctcatgttggngtgatggcctgttcctgactggtcaccaggtaagtgngtgcgncctgaggagtcancggcatacaggnagctggagcgcnataccaaccaccgaattgtatcggcccnacataggccnacagaagcctgntcctngaatggtttgtgcct

SEQ ID NO: 17544 - DNA, 402 bp, Homo sapiens
gatggtgacataagtcaagtgaaatattaatggactccttgcgtattttgctcttaggaatgccatggtctacagcccaaacagcttggctagaccatttccagatcactgtgcccattggctgttgccaatgatcctggttgaacgtgttcactagttattttgaggtggctgtagaatagaatgtaattaaggaagtatagcctcttctgtaatagagtcctgaacagctttatgttaaaaaagtgtgctacttctgccatgttactctgaaggattaagtcttaaacagttcagcagttttcagcctactctaagctgccatggagtgtatgggaaactataggaaaaattgggattaagactcaaaaatctggattaagaagggcaggccttgcatgt

SEQ ID NO: 17545 - DNA, 331 bp, Homo sapiens
ctgggctccacatagttcagagtatttggactttaagctggtaatggaatgctaaaaataaataaacaagcaaataaaacatctgtacaatttactttctagagtgagagtgagatgcatgatattcaaaagcctagtcctgggagtggagagatatatatggctgttttaagcccccagacagtgctaaaagccagtgagggtaaaaacccaggggttactccccaccttgaggaaatgaagggagtccagctcttaaaattggaagcagtttggtgagaatgtgaggaattgccatatcacctaagagcttagcttttctttctgtaga

SEQ ID NO: 17546 - DNA, 430 bp, Homo sapiens
  misc_feature (1)...(430): n = a,t,c or g
ggtgnntnnnnnatttganaccttttgactgnttacgaatttaatacgactcactatagggaatttggccctcgaggccaagaattcggcacgaggtgatattgtgattcaggagagtgcattcattttctttactaagtctccaaagcactgtggtctaggagcagcaataaggaatgcatagagagttgagacggttgattttgttgttaagtgtgggttatttaaatgtgaatgtgaatttacatgtgtggcaatcagtaagctgcagatagacttctatgcagtctatgatgtcttttggagaccctgttgtgagctgtagcggtaataagagagccaggcatggtagtgtttttgctcctgaaactgctatgtgatctttaagtcatagtagtaagagcctatcaaactgagcttaactgtgggt

SEQ ID NO: 17547 - DNA, 545 bp, Homo sapiens
  misc_feature (1)...(545): n = a,t,c or g
ggaggcgggcatatcaactggggtcaggagttcaaaaccagcctggccaacatggtgaaaccgcatctctgctgaaaatacaaaaaattagccaggnatggtggtgggcacctgtaatcccagctactcaggaggctgaggtaggaggatcgcttgaacccaggaagtagaggttgcagtgagccgagattgtgccattgcactccagcctgggcgacaagcgaaacttcgtctcaaaataaataaaagtaaggggcacagggagggggccccagctcgtgccccttctgtgtgggctgcacatggtgacttccttccagagagcacagagtgggaggtaggcaaggcgtctccacagtggagagcccgacccactgtctcagcccagaggtcaaggctggcaccatcaccgagaggtcacacgggcagatgtgacaaggcgcttcacactgggctcttctcccagacccataacccttgtcctantattagaaaaacactggcanaccgggcgcaattggcttancctgttanccaanattttg

SEQ ID NO: 17548 - DNA, 382 bp, Homo sapiens
  misc_feature (1)...(382): n = a,t,c or g
ggtgtttcacaacggcattgtgctatgatgttacaacagctatgacatcacaaagcagtaggaatttttcagctccagtataatatgggaccacagctgcacacggtccgttgttgactaaaatgttatatggtgcatgactatgtttaaatattcctatatttttatattggttattttaaagttctatggccaggtgcagtgactcacacttgtaatcctagaactttgggaggctgaggcagacggatcccttgaggccangagttgaagaccaacctggncaanatgacaanaccnccgtctctacaaaaaanntttttaaaagattagntgggcgtgtgccntatgcccngtaatcanagctatcgtnaggnntgtg

SEQ ID NO: 17549 - DNA, 482 bp, Homo sapiens
  misc_feature (1)...(482): n = a,t,c or g
tttgaaatccntnagnnaatntgaatcctncagctatgacatgattacgaatttaatacgactcactatagggaatttggccctcgaggccaagaattcggcacgaggttttgctccagttcatttcatggtttaacatatcaaatattaggtatcttaaaaatcacaaatgctatttcaccctgcaggttagcagtattaaaatagaaacatcaaatcccccatcagtgggggcggggggggggggttgtnnnnnngtntganatnggttngctttngttcccacccaaatnccatttnaattttaaaccccntnggntaaaaganggccntngngggnaanncgggtttncgagggnnaattnntcccttggnggtcncnagaatnngggnnntcattnannngnngggttnaagggtnnacccnttcngnnnnnntgtttnngncccctngaaaaaaangncttnttntnncnttgagg

SEQ ID NO: 17550 - DNA, 567 bp, Homo sapiens
  misc_feature (1)...(567): n = a,t,c or g
ggtgtcaggatccggtgtgcttctaagagacagtcgtataagtgaagtcttcctgcgggaccctacactttacccctgctgaaatttgcctttccctcaggtgacattttgagctgcttaacaggaaacaggcactttcagaagtacaatgactgtctaatgatttctgagtgattccctccagggtgtctanatttcttcctggctctcanaggtagaaggaactctcagaggacatttacctgtcagctccagcactaacacccagaactcttgccttctaaaacatcgcaggaagtggggtggctgttcctgaagctggcatcactgagctggtaggaagagttaccttgagtgagctgctgttgaatgtaaaacagctgtgccatgtgcacatgatttcatcctatgagcttcctcactcactgtcanaggccangctttataaagtantgtcaattgctttacggtttacttaattttggtttttgcatangtaccactaaagcaccgtcaaactaaaccttgaanccaaattgaatcctgnaaaccgccttggggggaagg

SEQ ID NO: 17551 - DNA, 477 bp, Homo sapiens
  misc_feature (1)...(477): n = a,t,c or g
ggttttacagaatctcactctgttgccaacactggagtccactggtgcagtcaaggttcactgtaacctctgcctccaggttcaagtgatttccctgcctcagccacctgagtagctgggattacaggtgtgtgccaccagatctggctgttttttgttttgttttgttttttaagtagagatggggttttgccatgttggccaggctggtcttgaactcctgacctcaagtgatctgcccgcctcagtctcctgaagttttgggattaaaggcatgagccactgcatccagccccgaaaagctagatttttgatgtttgaaacatctacaccaagtaagccctttcaacattttaatattaaatggactcaatttgttcactcaattttgttcatacaaatctgctttttaaacaaaaatgaggtttctgaaataatttaccaccnancctaaaaagaaacttgtcactttggcac

SEQ ID NO: 17552 - DNA, 552 bp, Homo sapiens
  misc_feature (1)...(552): n = a,t,c or g
ggtgnncnnctttgaacccctatgaccngattacgaatttaatacgactcactatagggaatttggncctcgaggcctagaattcggcacgagcattaaaaccctgagcctaaggtaccacagttagtctcatttgcctattgtcctgtgaactccacttagaatgtcattgaacttgggcagacataattctagtgtctgttccaaacgcactgtgtcacagaagctagaattaccattagaggcacaaacccctgagaatacacaagggggcacgcttccagtagatgtgttggggaaggaggagggcagaggggacaggggacaggattcagctttgtggtgggtcctgagggttcctaccaggggtagccaggatctgggaaacagatcagcgactctagtctgaagtggctgctggttcgggggctgcttcagcaagattcaggcaggagagacggaaatagccaccttccaggccgtgagtcctggagataaaaatggattttaacctaggactgccggagctggccttcgcggctgctcaaacta

SEQ ID NO: 17553 - DNA, 332 bp, Homo sapiens
gcactaaaacaaggtataaagctttatttagataaaaatattaggaaatcgaagagtcaaataaaccatgataattcacgggagctttctttgctgtgattattagattgttactaacagtgttacatacactgaaagcatttgaagacatgatttcaaagatctgtgtaataaaatcactccaacaggaaaactgcttcaaagaaaatagaagatcatggatgtgactaagcatgacagggaaaagctttatcagtcccaagacctgggttctattcactttttaacaatttgttttcaagcaactgacttagcttccctgagctttttac

SEQ ID NO: 17554 - DNA, 365 bp, Homo sapiens
ggacacctggagggcttggcggagtagtcagccagacttggggtcagaacggggaccctgtgcaggccacagcccgtgcatgtgggacatgggctcagtgaatcagatgaggctatgggacaagcttttcagccaggtgaagctcgtctacagctcagggcctcgggtccctgcggctgcccctgcccagcctcacacaggacacctgagcagctgctgagagggaggctggggtccccgggagtgtgtgcatgggtcttgttgctgggccaaaggcacgggacgaggctgctcgcccctctcttagccaccagtggcaaggcctcagcctagtgctgctcccctgagacccctggtcgccgccg

SEQ ID NO: 17555 - DNA, 312 bp, Homo sapiens
gacaactttttaaaatgtatgtgtagatataacttaaatatggagctttcaaaaagcacaaataggctggacatggtggctcatgcctgtaatcccagtactttgggaggctgaggtgggcaaatcacctgaggtcaggagttccagaccagcctggccaacatgatgaaaccctgtctctactaaaaatacaaaaattagccgggcatggtggtgcacatcggtagtcctggctactagagaggttgaggtgggaggatcacttgaacctgggaggtgggggtttcagtgagctgagatcatgccactgcg

SEQ ID NO: 17556 - DNA, 896 bp, Homo sapiens
  misc_feature (1)...(896): n = a,t,c or g
ttatgacatgattacgaatttaatacgactcactatagggaatttggccctcgaggccaagaattcggcacgaggaaaaacctaaaaatgcccaaataaacattcgcttacatattatatatcttgggcttctttttatgacagttcattcagggacccagtcagtaaacaggtagttaacttcgtgtaaccaagcaagggttttgtttatcttttttaaagtagaaaaaagtgaggctcaaactctctctttctccttgtcataactattggtttacagtctttatttgtttaaaagtaaagcacattgtatgtatttatttggcaatacatgaggccattaaaaccctgagcctaaggtaccacagttagtctcatttgcctcttgtcctgtgaactccacttagaatgtcattgaacttgggcagacataattctagtgtctgttccaaacgcactgtgtcacagaagctagaattaccattagaggcacaaacccctgagaatacacaagggggcacgcttccagtagatgtgttggggaaggaggagggcagaggggacaggggacaggattcagctttgtggtgggtcctgagggttcctaccaggggtagccaggatctgggaaacagatcagcgactctagtctgaagtggctgcctggttcgggggctgccttcagcaagattcaggcaggagagacggaaatagccaccttccaggcgtgagtcctggagataaaaatggattttaacctaggactgccgggagctggccctccgcggctgctcagactanggctgtgtgtgctggctctcgcctgtttccggtgtctaactggcttgtttctctttatggcttggcttcattccgacctggggtggggccacatc

SEQ ID NO: 17557 - DNA, 350 bp, Homo sapiens
agtgtcagaaactgcacagactcctccctgttcagctggtagggagcaattctattatttggcattgcatggctgggttgaattaaaacagggagtgagaacaggtgagtctagaagtccaactctgaaaaggaccactgtacatttgaacacacggctgtgttaaagatgctgctaatgtcagtcactgggtgcactaaaggatctcttattttatgtaaaacgttgggattgacaagatagatctgacactctgttaagttaccctctgaagctacttcttgtgaaatactaatgacagcatcatcctgccaagcgaaagaggcaggcataagcaaggacaaattaaa

SEQ ID NO: 17558 - DNA, 537 bp, Homo sapiens
  misc_feature (1)...(537): n = a,t,c or g
gcctgtagggcggcacaaccagggagggcgtggaagctctgcatcccttctcccataccttgctctacacatctcttcatctgtatcctctgcagcatccttgatgataaaccagtaaatatgagttttgatcatcctgagaaaaatgggccttggcctgcagacccaataaaccttccctcccatggataatagtgctaattcctgaggacctgaagggcctgccgcccctgggggattagccagaagcaggcttgttttcctgctcanaacaaagtgacttccctgaacacatcttcattatgattcacaccaacctgaanaaaaagttcagctgctgcgtcctggtctttcttctgtttgcaagtcatctgtgtgtgcaacganaanancaaanggagttactatgattccttanattgcaaaccaagaatccaggtgttaaanagtctggngaaattggcatcgggtccgnttccnngtctgttccnnatcatcaaccaaggaccccanaggggcgcaaaactccgaatctca

SEQ ID NO: 17559 - DNA, 416 bp, Homo sapiens
ctcggttgacaatggtctccaggatggtctctaccatgctatctggcctactgttttggctggcatctggatggactccagcatttgcttacagcccccggacccctgaccgggtctcagaagcagatatccagaggctgcttcatggtgttatggagcaattgggcattgccaggccccgagtggaatatccagctcaccaggccatgaatcttgtgggcccccagagcattgaaggtggagctcatgaaggacttcagcatttgggtccttttggcaacatccccaacatcgtggcagagttgactggagacaacattcctaaggactttagtgaggatcaggggtacccagaccctccaaatccctgtcctgttggaaaaacagatgatggatgtctagaaaacacccctgac

SEQ ID NO: 17560 - DNA, 355 bp, Homo sapiens
gacgcaacatgtctgccatggaacgcttccgcaacatggacaagagagccacaactgaggaccgcaacacggccttggagacgctgcaccagaatagcatcactcaagtctctatttatgaggtggacaagcaagattgtcgcaaattttgcactactggcatcgatggagccatgacaatttgggatttcaagaccctcgagtcttccatccagggcctccggataatgtgaagctgagtgagcctccgccatccagcatgacaaactgtggccgaccgcagctgtgccgtggcacgatggcgaggaagccagccccaaggaaacactgaaaacacatatcacgccaatgccgg

SEQ ID NO: 17561 - DNA, 423 bp, Homo sapiens
gtagggctcggcgtggggggaatatttttttcacaattaatgaaaacacaatacagccagtaagttaaaatgtgaatgtgagtttcaaacgttgcatagtcattaggctaatcattagtcattagtcatttgtggttgacaaggagggttataatttgacacctggcaaaaatcaagtagatttcagagaacttagagttgggaaatgagatggaaaaaacaccctctttttccctaggaggtcccatgaagtaacgtttgcaaaacctcttttctctccccagaagtgaatgacccatgattcagggctgtggtgtctccatctctgcctgctggaccacccctacccccaccctccagagccttgtatgcactggccaaagaattgcctcagaaggttctccgaagtgaacctctgggagg

SEQ ID NO: 17562 - DNA, 377 bp, Homo sapiens
aattcggcacgagctttctttctttctttctttgtaagccattgtcagaaacaatgtactagatccagtcaaaatcaaacaggccatcttgaaaaacctaaaagcttcctgggctagctccttgtctttgcatctgtttaagcagtgtttggaagacttggaaaagtttctctaccccacgttgacctatctgatgaaggagggaactgaagactttaaggagccatccgaatcctgtgatcctatgagaacttctttcaatcttactcggtcaagcaagtttggggctcaccactgtaaatctacacgggatctgggggtcagctgaatcctctattgtcccattcaggttcgttttgggatcattcctttatcct

SEQ ID NO: 17563 - DNA, 508 bp, Homo sapiens
  misc_feature (1)...(508): n = a,t,c or g
atgggagagtggggagagctatcctgtgcataacacaatgtttagcagcattcctgacctctatccattagatctaagtagcaccctccccgacagcatgacaaccgaaagtttctaaacatcaccccagctgagaaccaatgttctatctagatcaatggatccaaacctcatgggtcacataaatttttttgataatcttatgaaatgatacactatttctccccctaaaacccacatttataaatttctataatacttcaatattttatttcaagagcttttggtccctgagaccataaatggagtcacaggaactcaggttaagaatttctgcctacattccttcagaaacaggaaaaaaacnaaaatgctaaaatttgatagaaccacaaagacccaaatagccaagcatcttgncaaaaggacaagtggctctcaaaacttctgcttcagattctacnagcttagaccaacacnaggactgctaaaccgccctngncaagaa

SEQ ID NO: 17564 - DNA, 1158 bp, Homo sapiens
ggtggtggccttcccccgaagaaatttggtaatcctggggagcgtttgcgtaaaaaaaagtgggatttgagtgagctccccaagtttgagaaaaatttttatgtggaacatccggaagtagcaaggctgacaccatatgaggttgatgagctacgccgaaagaaggagattacagtgagggggggagatgtttgtcctaaacccgtgtttgccttccatcatgctaacttcccacaatatgtaatggatgtgttgatggatcagcactttacagaaccaactccaattcagtgccagggatttccgttggctcttagtggccgggatatggtgggcattgctcagactggctctgggaagacgttggcgtatctcctgcctgcaattgttcatattaaccaccagccatacttggaaaggggagatggcccaatctgtctagttctggctcctaccagagagcttgcccagcaagtacagcaggtggccgatgactatggcaaatgttctagattgaagagtacttgtatttatggaggtgctcctaaaggtccccagattcgagacttggaaagaggtgttgagatctgcatagccactcctggacgtctgatagatttcctggagtcaggaaagacaaatcttcgccgatgtacttaccttgtattggacgaagctgacagaatgcttgatatggggtttgaaccccagatccgtaaaattgttgaccaaatcaggcctgataggcagacactgatgtggagtgcaacctggccaaaagaagtaagacagcttgcagaggatttccttcgtgattacacccagatcaacgtaggcaatctggagttgagtgccaaccacaacatcctccagatagtggatgtctgcatggaaagtgaaaaagaccacaagttgatccaactaatggaagaaataatggctgaaaaggaaaacaaaacaataatatttgtggagacaaagagacgctgtgatgatctgactcgaaggatgcgcagagatgggtgagtatagcaccaaggcaattaacctctggttttatagttaactggaaatttctaaattggtattccaaatgttgtgtaatatttcaataatgcctatccatgcagtttgctcttttaatgagcacagtcatct

SEQ ID NO: 17565 - DNA, 438 bp, Homo sapiens
ggtgtgtgtttgagacacagtttcgctcttgttgcccaggctggagtgcaatggcatgatctcagctcactgcaacctctgcctcttgggttcaagcaattctcctgcctcagcctcccaagtagctgggattgcaggcatatgtgccaccatgcccggctgattttgtatttttagtagagatggggtttctccatgttgctcaggttggtctcgaactcccgacctcaggtgatccacctgcctcggcctaccaaagtgctggggttacaggtgtgaaccactatgcccagcctaagattgacttttgagagatattctacttacctctacttaccaagaggaaaagagatataaacatattaaataacaagcattttatatacatttcccagttaatctacgtaataaccctgtgaatacagatgagaaaactac

SEQ ID NO: 17566 - DNA, 116 bp, Homo sapiens
gcagtgggtatttatctctatgaaagtgccttttactcagcctgcacagagccatctctttgcccttccagatgtctgactgggaccttgcttagtgatgtgtttttttttttttt

SEQ ID NO: 17567 - DNA, 321 bp, Homo sapiens
gataaaactcaacatctcctgaagacctttcttacctttttttaaaaacaaaaaatgaaattattttgcatgctgctgcagcctttaaagtattgaagtaactggagaattgccaatacagccagagagaaagggactacagctttttagaggaaaagttgtggtgcgttatgtcaccatgcagttgccagtgtgattagtgcctaggggtctccatttagcagaaatggtaatgacagtgatataatgcctggaacctggttgggcagtaggggagggaggtagaaggaaaagtgtgagatttctaccttttagttttta

SEQ ID NO: 17568 - DNA, 340 bp, Homo sapiens
  misc_feature (1)...(340): n = a,t,c or g
gtccaaaatagcaatttggtaaagcctatagcccctatcttagagtgttttaaaatgcaggccaggcacagtggttcatgcttgtaatcccagcactttgggaggctgagatgggcgaatcacctgagatcaggagttcgagaccagcctggccaaaatggtgagaccttatctttactaaaaatacaaaaattggccgagcgtgttcatgggtgcctgtagtcccagctaaggctgaggcaggagaattgcttggacctgggaggtggaggttgcagtgagccgagatggtgccattgcatccagcctgggcacaanagtgaaactncgtntcaaaaaa

SEQ ID NO: 17569 - DNA, 845 bp, Homo sapiens
ggcccgcgtcagtgaccgaaggaagagaccaagatgaatacagagcccgagaggaagtttggcgtggtggtggttggtgttggccgagccggctccgtgcggatgagggacttgcggaatccacacccttcctcagcgttcctgaacctgattggcttcgtgtcgagaagggagctcgggagcattgatggagtccagcagatttctttggaggatgctctttccagccaagaggtggaggtcgcctatatctgcagtgagagctccagccatgaggactacatcaggcagttccttaatgctggcaagcacgtccttgtggaataccccatgacactgtcattggcggccgctcaggaactgtgggagctggctgagcagaaaggaaaagtcttgcacgaggagcatgttgaactcttgatggaggaattcgctttcctgaaaaaagaagtggtggggaaagacctgctgaaagggtcgctcctcttcacagctggcccgttggaagaagagcggtttggcttccctgcattcagcggcatctctcgcctgacctggctggtctccctctttggggagctttctcttgtgtctgccactttggaagagcgaaaggaagatcagtatatgaaaatgacagtgtgtctggagacagagaagaaaagtccactgtcatggattgaagaaaaagggcctggtctaaaacgaaacagatatttaagcttccatttcaagtctgggtccttggagaatgtgccaaatgtaggagtgaataagaacatatttctgaaagatcaaaatatatttgtccagaaactcttgggccagttctctgagaaggaact

SEQ ID NO: 17570 - DNA, 362 bp, Homo sapiens
gccctgcacccttctgtgaagaacccctgtgatttcaatcctgcagtgtgaagttgccacgactgagccagcatctctatccaagtctcctgggtgatagaacgcatatgtaggccaaactctgcagcactgatgcagctggtgatgactaaacatggcagatttacctagtcagtgactttatgcaggaagaaaccgaatgcatgtgcgcatcttgagatgcgtgggccttctgtcctgtgtgcagctgcgtgtgctcccccactggcccggcctgcgcgcttttctgccccggcactcgccagctgcccagtccagctcaagccgggattttccacggctgcctctgaacggtctccaag

SEQ ID NO: 17571 - DNA, 352 bp, Homo sapiens
ggaacatttatggaatcaacacttctgtagctcagtgacaggtggtggttgtttaagtgcagagcaatattaaaatgtactggtgactagtacatgtatttctccataagcagagttgccgaatcaataaacatgcaagtttgtactttgatctttaccaggtcagtggattgcttcaaaagcagagttttgtgcaagcactcactgtgctctctgaaagagcctgaggccgggcgtggtggctcacgcctgtaatcccagcactttgggaggccaaggtgggcagatcatgaggtcaggagatcgagaccattctggccaacatggtgaaaccccatctctactaaaaata

SEQ ID NO: 17572 - DNA, 498 bp, Homo sapiens
  misc_feature (1)...(498): n = a,t,c or g
tcccttcccccccaacagctatgacatgattacgaatttaatacgactcactatagggaatttggccctcgaggccaagaattcggcacgagtgagggataggttccaaaaccctcggtggatgcctgaaaccatggatcctatggaaccctagatacattatgtttttccaatctgataaccgagtagtctgttcagtaactcaggagagtgtgtgtccacagcatggatccgctgcacagaaggatgatccacgtgcacgtgcagggctggacagagcaggacggtgggagatttcatcacgcgacttagaaccgcgctcaattgaaaacttatgaattagctgggcagggtggctcacacctgtaatcccagcatgttgggaggctgaggcaggcagatcacttgagcccaggagtttaagaccagcctgggaaacacagggagatagctctaccagaaaacaaacaaacaacaacaaccnanaaatcagccagg

SEQ ID NO: 17573 - DNA, 382 bp, Homo sapiens
gaatctggtgaactatattcagccagtcaagtttgagtcatttgaaatttcaaaaaaaagaaataaaagttttgaaatgtcttccttcgtggaaaccaaaggacttgaacaactcaccaagtctccagtggaatttgtagaatataacaaaatgcagcttagcaggatatatccaaaaggaacacgtgtggattcatccaactatatgcctcagctcttctggaatgcaggttgtcagatggtggcacttaatttccagacaatggacctggctatgcaaataaatatggggatgtatgaatacaacgggaagagtggctacagattgaagccagagttcatgaggaggcctgacaagcattttgatccatttactgaaggc

SEQ ID NO: 17574 - DNA, 385 bp, Homo sapiens
cacagaactgccaaaggccctgcaaggacaaggtagactgggtacaatgtgatggtggctgtgatgagtggtttcatcaagtttgtgtgggtgtatctccagaaatggctgaaaatgaagattacatctgtataaactgtgcaaagaagcaggggccagttagcccaggtccagcaccacctccttccttcataatgagctacaaactaccaatggaggatcttaaagagaccagttagcagatgcttggttagtttgggacatggggggacatggaccacattgagaccttagtcatcaagtaaggtggtttatatccacttggaatgttgcttcaaagatgaatggccttcagagaaagtccccttagtgctggcttcctctt

SEQ ID NO: 17575 - DNA, 393 bp, Homo sapiens
gcccagggcttctcaaagtgtggcctcagacttcccaccttaaaatcatgatgggaatagaaagaagggtttgttaaatgcgcatgcccaggtcctgcacccagagggggacatggcccctggggctcccctaggcatccctgtgtgcacctgcacaaacggcagacacggtcctgggggctccgtgggtgacaccccagggaggggcttcacaggtgccatatggtaagaggtagacgaaagtacccactgcgtcgtggggtgaggtgtccaggcacaggcttcccagggatgggatcgccgcagggcacaggtggagggaggcagccctgggccggggagcagagcccacaaagggggcccaggaagctgctggctgtgaaggtgtaagaa

SEQ ID NO: 17576 - DNA, 395 bp, Homo sapiens
  misc_feature (1)...(395): n = a,t,c or g
ctggtctcgaactcctgacctcgtgatctgcccacctgggcctcccaaagtgctgggattactggcgtgagccactgcgcccagcccaagcatttattctttcatacctccatgtctgtgtacgttttgtttcttctgcttggactgcaggacccttccttgctcatctcctttccctcacctctccctcctcattttcctaatcatcccttatttttctgtatgctttcagctcaggtgtcatcactggaattgccttaggtaagtcttttccgttctctgctttcccctagtttaggagttcccttctttgagctctagtagcactttatatatacatagcaattatattgnattgaaatttaaaatcttcatatcttaaattatgagctctt

SEQ ID NO: 17577 - DNA, 506 bp, Homo sapiens
  misc_feature (1)...(506): n = a,t,c or g
tttggaancccanattgtatgacatgattacgaatttaatacgactcactatagggaatttggccctcgaggccaagaattcggcacgaggggagaggaggtgctgaaatccacatttatctaaacctttcagacccatgtgcatttctccatttttaccacattgtcccctccttggtgacagcctgggctgctgctcctgcctctcactggcctctctgcctccaagctgcctgtgccttaggaagctccatgttgcactttcaaaccagcagcccaatccatccctcacctacttgtgcctttcaatgactctcattgtcctcagaaaatgaccctggctcctaggtgtccacacctctgtggccctgagcaggctgacagaaataaaactgcatgcctcctttccttccagtgaaaagaaatcactggatattgcaacaaaatttaaacttatcatttgggagaaatcagagtatcctctttatagacaaaaaaaacagtat

SEQ ID NO: 17578 - DNA, 347 bp, Homo sapiens
gtaaaaatacagtgttataatcttatgggaccactgttaatatggtgcagtctgtcattgactaaaacatcgttaatgtggtagatgactgtggtatcaatattgagtgcttttgtgtatgccatgcttgtatttctacattttctataatccacacacaaccctggagggtggggattttcatccctgttttacaaatgaggaaactgtggctcagaggttaaacagtttccttgggagcattacagctaataaatgacaaagtgtttaaagtcaggcctgctaactccaagctccccatttcagaactaatgaaaagtggttgctctaaccttggtatgctttcg

SEQ ID NO: 17579 - DNA, 224 bp, Homo sapiens
gccacgccttcccacccagcgtcttccccaggttcccccactacctctccctcagatccaggccctcagctcagcatgggtggttctccctccaggaaagggggaggagggaccaggacctgagttgcatagcggctgcctggatgggcttagaagcctttttgagggacctccctgcccctatcctggggcttggatacctttccaagtccttggaattgccc

SEQ ID NO: 17580 - DNA, 184 bp, Homo sapiens
ggtgtcattgagcaaacacaaagtcgggctcatccaaggatgagattttgccagagaaaggatgagcagcaagtcagggagcttaaggtaattatgagacagtgactatctaaaattgcttaggtagaaggagacagattggatttttgtgtgtttggtatttgggataagagggatgtgggtg

SEQ ID NO: 17581 - DNA, 435 bp, Homo sapiens
gcggtgaccagtttgtccatgggcctagtgacgaaccagtcccagcagctttagaatctgcagtttaaggccgggcgcagtggctcacgcctgtaataccagcactttgggggccaaggcaggtggatcacctgaggtcgggagttcgagaccagcctggacaacatggcaaaaccctgtctctactaaaactacaaaaattaacctggtgaggtggcgggtgcctgtaatcccagctacttgggagctgagggaggagaatcacttgaacccaggaggcggaggttgcagtgagccaagatcatgccactgcactctagcctaggtgacagagcaagactccgcctcaaaaaaacaaaaacaaacaaataaaataatctgcagtttatctttggtggatcccttcccctttccctcgcagggtcctggtgcaca

SEQ ID NO: 17582 - DNA, 490 bp, Homo sapiens
  misc_feature (1)...(490): n = a,t,c or g
gtgttcttccttcctttcttccctcctccccctcatccttccgagtagccgggaccacaggcctgcgtcaccatgcctggctaatttttgtattctcttctgatagagatggggttttgtcatgttgcccaggcctgtcttgaactcctgagctcaagcgattcacctgcctcagcctcccaaagtgctaggactacagccatgagccaccgcacccagcccctttcattcattttggaaaattctcatccattgatatggtttgcctgtgtccccacccaaatctcatcttgaatttccatgtgttatgggagggaccaagtgggaggtaattgaatcatgggggcaagtgtttcccatgctgttctcatgacagtaagtctcangagatctgatggttttaaaaatgggagttccctgcanaaacgctctctcnccttggctggngcaancaatccannagntgactgttccccttgcttccaacaag

SEQ ID NO: 17583 - DNA, 333 bp, Homo sapiens
gggcagggcgggggcggtggggcctcccctagccttccctccccctctccttcactgtccttccagcaggcacaggaaggtgaggcaaggtgtttccagccggcaggatggaggacgaggaaggccctgagtatggcaaacctgactttgtgcttttggaccaagtgaccatggaggacttcatgaggaacctgcagctcaggggagagtggggcagggaagacagaagccagtaagcacatcatgcagtacatcgctgctgtcaccaatccaagccagagggctgaggtggagagggtcaaggacgtgctgctcaagtccacctgtgtgctg

SEQ ID NO: 17584 - DNA, 464 bp, Homo sapiens
gtgcttgagcccaggagttcgagaccagccggggcaacatggcaaaaccctgtctctactaaaaatacaaaaattagctgggtgtggtggtgcatgcctgtagtcccagctactcaggaggctgaagcaggacaatcgcttgaaccagagtggcggaggttacggtgagctgagatggtgtcactgcactccagcctgagcaacagagtgagactcaatctccaaaacaaaacaaaaaaacaacatctgtgaagggaagatggattgggcagagagcgaaattgaactgtgatgcaggcccgatcaagtacccaccaactcagtagggcacgcaggagcttgaagcacccactggaatattttcatggaggactaaaatggctgggtctctatgctcccgcgtagctcagttcccagaggcagctgcctggggagggcagggtgttgggtggggcaactctctg

SEQ ID NO: 17585 - DNA, 1108 bp, Homo sapiens
gaaaattaaatgtgtcctgggcagatggagggatttcctggtgtgcatcactttctagcatcagctcttcaggagcccacgggaggaacccctgtattaaagtcaatgcaccaaaggcagctagggtttccatacagacaccatggtccaagccctcatgaaagggtgaggacctggagtttgtcggggatttgggttcttgtacacagatacaacacggccgccaaggaagagtgaggaagatgggaaggagtaccactttatctcaacggaggagatgacgaggaacatctctgccaatgagttcttggagtttggcagctaccaaggcaacatgtttggcaccaaatttgaaacagtgcaccagatccataagcagaacaagattgccatccttgacattgagccccagaccctgaaaattgttcggacagcagaactttcgcctttcattgtgttcattgcacctactgaccagggcactcagacagaagccctgcagcagctgcagaaggactctgaggccatccgcagccagtacgctcactactttgacctctcactggtcaataatggtgttgatgaaacccttaagaaattacaagaagccttcgaccaagcgtgcagttctccacagtgggtgcctgtctcctgggtttactaagcttgtagaatgggggaacccactgtatgcccctctccagcatttggaattccacccgccttgctttaagacaaacagggctgctccaactagttttgtgtcagcttccagctctctgcagctatcctaattcagccagtaaggttcagtcttcttgctcaggctcctgaagggttgattctcctgatagatggggccccactgatctggatttgaaaaggatttctagaaattgggggtaagaagtactaccaaaatgtaactgctaatcaagggtgatgcacagcaaaagcaatggaccccatccctctaaagcctgccctcctttgccttcaactgtatatgctgggtatttcatttgtctttttattttggagaaagcgtttttaactgcaactttctataatgccaaaatgacacatctgtgcaatagaatgatgtctg

SEQ ID NO: 17586 - DNA, 305 bp, Homo sapiens
cttacatgaaattcctactcttccattcaaggcatttgacatgaaagctcaaaatgctcaaggctcagtttcattttaaaataaaaccaaaggaccatattagttgcctataaaataaaaactgaatgcagttccccacttctccatattcccctctttcccaactgacaaatgcatacagtatgctaatatacatatataatcatttatttaatcacaaatatcttctgaaaactccctaaaacactataagtaattatttgattacttggtaatcaagtgactatcaaataaatatttgaaac

SEQ ID NO: 17587 - DNA, 344 bp, Homo sapiens
gcagaaatcttatgaatcatacatacactcaacaaacattaaagttgtaggaaaaagacagttggaaattggtaagggaactgagtacttcaaaccagcacagggaacttaggttagtgtggcaagcctttcctcttctggtctttcctcttctgtttatggagaaataatagaaagtagtaagtcgttaacttagtgtaagaagggtcttagagaacatctaaccttctaggatttcccaattctgtgatagagtaatgacaccagttttcctgtcatgacaagcctctgtgatgttacatatggaaatggttgaatcttgaaaaatctaaaattgttgcaaa

SEQ ID NO: 17588 - DNA, 486 bp, Homo sapiens
  misc_feature (1)...(486): n = a,t,c or g
gnnnnnnngnnnnntnnnnttnnnnnatntgnanaccgttatgacatgattacgaatttaatacgactcactatagggaatttggccctcgaggccaagaattcggcacgagaaactattagagtatttcccttccaaagagggatgtttgaaaaaaactctgaaggagaggaggaattagttgggatgccaatttcctctccactgctggacatgagatggagaggctgagggacaggatctataggcagcttctaagagcgaacttcacataggaagggatctgagaacacgttgccaggggcttgagaaggttactgagtgagttattgggagtcttaataaaataaactagatattaggtccattcattaattagttccagtttctccttgaaatgagtaaaaactagaaggcttctctccacagtgttgtgccccttcactcatttttttttgaggagaagggggtctctgttaacatcta

SEQ ID NO: 17589 - DNA, 229 bp, Homo sapiens
gcttcaccctggtaaagagaatctgcagaagctgctgttcacacttaaggcacagtgttaaatgggaggttcacagtatagactctgaacaaacactgaacgtctttgagcttcaatcttctcacccatacaatggggttaagaatatctgacatagttggtataaagatgatgcaagacaacatatgtaaaaatgcttccttataaattgaaaaacttatataaatgg

SEQ ID NO: 17590 - DNA, 475 bp, Homo sapiens
tatgacatgattacgaatttaatacgactcactatagggaatttggccctcgaggccaagaattcggcacgagttttcttaagatctttctatcacgttttccctaaaccactttcccattgccgtctctttctgtgagttgtagtgttctttaacgggcaaggaggtaaacctctgactgtgtttctcatggttttcttagttggccgttggtggtttgtaattttattttttgtgttgctttttgccacaaagggtttctttgttttgttgtttttaatgtaataatccaataacttcttgattttaattcccatccttgacaacaaaagaaccaagggcaaccaggggtggcgggtttcctccatcctccttgctgacctcccttgtctgcctcccccagataccatggcctgggagaccatcctgatggatacactggaggacaacatcccccgtgctcggctgccactgc

SEQ ID NO: 17591 - DNA, 403 bp, Homo sapiens
  misc_feature (1)...(403): n = a,t,c or g
gtgtnnnnnattgaaacgntatgattgattacnaatttaatacgactcgtacacatatcttcataaaagagtgtactgctgggactctaagattttcttctgaactactgatatcagtcctgaaagttttttatgcttgttggtgcaaagtttatctaccagaaggtgtacacagtaggtttttagacaacaaggtctcgtgtttctctttcaaatggtcctaaaacatttcttgactgaaacattgaagagttgcaattaactaaaatatagtcaaacacaagacatgaagtgccaacattgcacagagcttcaattgaagtgaggaaatcctgagcctgtacacacaggcaacagcagccacatcactaccaccacttggcagccatcatttggaggctgg

SEQ ID NO: 17592 - DNA, 333 bp, Homo sapiens
  misc_feature (1)...(333): n = a,t,c or g
ggtgacttccaagtagaatttaatctccccattgagtgtgtcatggtacaaatcactattcgtttttggtgttttttagggatgtgcaatgtgcattacataatgacagaaatactgagaaggttctgtgtgcccatttgaaaggagtgggaggaatacagcagtttgtttttcaacatgaatctgatattgatttaaactgtgtttcacttacaagttttaaaaaaatgacagggtttaatggagccgtgcataaaaatgtactgttttcaccttttgcttatatgtaaatgtttgtaaagtatatgggcctatctgtaagnggataagctg

SEQ ID NO: 17593 - DNA, 478 bp, Homo sapiens
agaattcgtaaacttgcatttatggaagtgtgtgatgaagacagctttttgtaaatgaatgttttgctagtgtcagccacataaatcaagtaagtgatgtgtctctaaggaaaagtcactttaaaacatcatgtaaacttcattcactcttcataaaataattgacacctacatttattacaagttgtgatgactcactcattctctgttaaagaaaaaagtgtttttgtttttgtttttaagaaattagtaggacatttagctcccctgacaaactagctagtgctatgtttatatttccccaatagctacaaggtggaagagttggacatagaagctgaatgtagtactatgcagtgtgactctgagcttcttggagaaaggtcaggaaatagcaactattttcttttgattatgtgaagcaatactttaggagacaaaaataaatttacaatagagaaaactgaaaagaaatata

SEQ ID NO: 17594 - DNA, 553 bp, Homo sapiens
  misc_feature (1)...(553): n = a,t,c or g
ttnnnntngtnnatactnnnaaaccctttgacatgattncgaatttaatacgactcactatagggaatttggccctcgaggccaagaattcggcacgagccaatttcctctccactgctggacatgagatggagaggctgagggacaggatctataggcagcttctaagagcgaacttcacataggaagggatctgagaacacgttgccaggggcttgagaaggttactgagtgagttattgggagtcttaataaaataaactagatattaggtccattcattaattagttccagtttctccttgaaatgagtaaaaactagaaggcttctctccacagtgttgtgccccttcactcattttttttgaggagaagggggtctctgttaacatctagcctaaagtatacaactgcctggggggcagggttaggaatctcttcactaccctgattcttgattcctggctctaccctgtctgtcccttttctttgaccagatctttctcttccctgaacgttttcttctttccctggacaggcagcctcctttgtg

SEQ ID NO: 17595 - DNA, 59 bp, Homo sapiens
cccctgatccacttgagaaggagagtgggtgagggggttactatggacatgggacaggg

SEQ ID NO: 17596 - DNA, 496 bp, Homo sapiens
  misc_feature (1)...(496): n = a,t,c or g
tatgacatgattacgaatttaatacgactcactatagggaatttggccctcgaggccaagaattcggcacgagcaaatacttaagcacggaatgtatttctgtttatgatatggaattcaatacaccccttcagtggtataaagacattcctggatttctttaggatagggtcagagttggtttactatctggccttcagtttttaaaaggggcgattctttgatatagcaatagcgtcaattttttttttcttttacctttacaggtgagaaaccttaccactgtgactgggacggctgtggatggaaattcgcccgctcagatgaactgaccaggcactaccgtaaacacacggggcaccgcccgttccagtgccaaaaatgcgaccgagcattttccaggtcggaccacctcgccttacacatgaagaggcattttttaaatcccagacagtggatatgacccacactgncagaagagaattcagtatttttt

SEQ ID NO: 17597 - DNA, 331 bp, Homo sapiens
gacctgatgaagagtgagaagaaggtggtggtggaacagctcaacctgttggtgaagcggatctcccagcaagcggctgccggaaacaacatggaggacatctttggggagcttttgctacagctgcaccagcagtacccaggtgatatcggctgctttgccatctacttcctgaacctgcttaccctgaagcctggggaggccatgtttctggaggccaacgtaccccatgcctacctgaaaggagactgcgtggagtgcatggcgtgttcagacaacacagttcgtgctggcctgacacccaagttcattgatgtgccaaccctgtgtg

SEQ ID NO: 17598 - DNA, 447 bp, Homo sapiens
  misc_feature (1)...(447): n = a,t,c or g
gnggnnttnnnttntttganacgagagactcttnnnacatgnttacgaatttaatacgactcactatagggaatttggccctcgaggccaagaattcggcacgaggaaggatagtggcttccagatgaaccagcttcgacccaagaagtcctgccacacgggtctaggcaggtccgctgggtggaacatccccataggcttactttactgtgacttacctgagccacgtaaacctcttgagaaagcagtggccaatttcttctcgggcagctgtgccccttgtgcggatgggacggacttcccccagctgtgtcaactgtgtccagggtgtggctgctccacccttaaccaatacttcggctactcgggagccttcaagtgtctgaaggatggtgctggggatgtggcctttgtcaagcactcgactatatttgagaacttggcaaa

SEQ ID NO: 17599 - DNA, 463 bp, Homo sapiens
  misc_feature (1)...(463): n = a,t,c or g
ancctttgnnnacngctatgacatgattacgaatttaatacgactcactatagggaatttggccctcgaggccaagaattcggcacgagggcagcttctaagagcgaacttcacataggaagggatctgagaacacgttgccaggggcttgagaaggttactgagtgagttattgggagtcttaataaaataaactagatattaggtccattcattaattagttccagtttctccttgaaatgagtaaaaactagaaggcttctctccacagtgttgtgccccttcactcatttttttttgaggagaagggggtctctgttaacatctaacctaaagtatagaactgcctggggggcagggttaggaatctcttcactaccctgattcttgattcctggctctaccctgtctgtcccttttctttgaccagatctttctcttccctgaacgttttcttctttc

SEQ ID NO: 17600 - DNA, 337 bp, Homo sapiens
gaataatgtaatcaattggtcatacctttgtaatgaaacccctagacatgggttcggagagctaacatgctggtgagcacagcaaggtgctaggagggtgatgtccctggtgtggcagctccacgcctgccctccttgccacccctcagctcccacccccataacttgtcctatgcattgcttatgtttggctgtttgtgagttgtatcctttataataaattggcagtagtaagtactttcctgagttctatgagtcgttttggcaaattattgactcttgatggcgaatgtgggaacttccgagtttatagccatgttggacagaagcaggcagc

SEQ ID NO: 17601 - DNA, 337 bp, Homo sapiens
gttaaaagaaaaattttaaatatgaaatatcagggataaggattataaaaacaagacatcaaaataaaattgtcttcaaaaataaattttgtcaagaagaggcccaattttatgggattcctctggaggtcattgagaagtattaaatccttggctgggcacggtggctcatgcctctaatcccagcactttgggaggccaaggcgggcagatcagaaggttaggagctcgagaccagcctggccaatatggtgaaaccccgcctctactaaaaatgcaaaaattagccgggtatggtgatgggcacctgtagtcccagctactcgggaggctgaga

SEQ ID NO: 17602 - DNA, 370 bp, Homo sapiens
tgcagatgtcctacgccatccggtgcgccttctaccagctgctgctggccgcgctcatgctggtggcgatgctgcagctgctctacctgtcgctgctgtccggactgcacgggcaggaggagcaagaccaatattttgagttctttcccccgtccccacggtccgtggaccaggtcaaggcgcagctccgcaccgcgctggcctctggaggcgtcctggacgctagcggcgattaccgcgtctacaggggcctgctgaagaccaccatggaccccaacgatgtgatcctggccacgcacgccagcgtggacaacctgctgcacctgtcgggtctgctggagcgctgggagggcccgctgtccgtgtcggt

SEQ ID NO: 17603 - DNA, 395 bp, Homo sapiens
ggttgattgttacccatctagtctctgcaattccagggtcctaccatccccactgacactaagaattcctcacctttacatgttgtgttgcctcggtgaaaagagtggcctctggacttcccatgggaatgtagtcttctagtaggttctctgatcttgcataataactacaatctaacatgctaatccctctgagacttctgactccttcagtattctgccaaggaagtttctggcatctctacttcatttccgaaggtcgtaattgtgtccaagtttcaaagaagcatctcagaagcatgtgaaaatggttttatgtatccttgattggatgttaatccctgaataatgagagtgcccccagattgatacattcttacaaccctctcctcaca

SEQ ID NO: 17604 - DNA, 1121 bp, Homo sapiens
  misc_feature (1)...(1121): n = a,t,c or g
acgaatttaatacgactcactatagggaatttggccctcgaggccaagaattcggcacgaggggtgtttccagaattggtaaaaacagcagctcatagaattttgagtattccatgagctgctcattacagttctttcctctttctgctctgccatcttcaggatattggttcttcccctcatagtaataagatggctgtggcatttccaaacatccaaaaaaagggaaggatttaaggaggtgaagtcgggtcaaaaataaaatatatatacatatatacattgcttagaacgttaaactattagagtatttcccttccaaagagggatgtttggaaaaaactctgaaggagaggaggaattagttgggatgccaatttcctctccactgctggacatgagatggagaggctgagggacaggatctataggcagcttctaagagcgaacttcacataggaagggatctgagaacacgttgccaggggcttgagaaggttactgagtgagttattgggagtcttaataaaataaactagatattaggtccattcattaattagttccagtttctccttgaaatgagtaaaaactagaaggcttctctccacagtgttgtgccccttcactcatttttttttgaggagaagggggtctctgttaacatctagcctaaagtatacaactgcctggggggcagggttaggaatctcttcactaccctgattcttgattcctggctctaccctgtctgtcccttttctttgaccagatctttctcttccctgaacgttttcttctttccctggacaggcagcctcctttgtgtgtattcagaggcagtgatgacttgctgtccaggcagctccctcctgcacacagaatgctcagggtcactgaaccactgcttctcttttgaaagtagagctagctgccactttcacgtggcctccgcaatgtctccacctacacccctgtgctcccctgcaanactgatggtcaanaaaangntggaaaacctccagaaacatctctggcccaaaaagnctctctctcctcctctctcatgaggnananccaaccaagcgccatgttganccagtgggcaaccncaaacaaaa

SEQ ID NO: 17605 - DNA, 351 bp, Homo sapiens
gcaccaggcatgaacctgtttactggagcctgtttactggagcctggtgcatcatataggtatactgtggtctcatgatgtaataggaggtctccctgttccctagacccagatcagaagggcttcatgcacataggcattcatcatctatagccaagtagccctagagaaggtgcccagcaagccttgctataaagagggagggctgggtgtagtggctcaggcctgtaatcccagcactttgggaggccaaggcaggaggatcacttggggccaagagttcaggggccagcctggacaacatagcaagactctgtctctacaaaaaacaaaaacaaaaaattagctaga

SEQ ID NO: 17606 - DNA, 378 bp, Homo sapiens
  misc_feature (1)...(378): n = a,t,c or g
gcatgagcttcaataccctgtcaaaatactttaaaatattctgtaatttttaaagaaatgctctctagttctctatcacaagcctggctggacagaaagcagtttgtaacactgctgcttataaagggttcatgagaagaccacaattttaaaacccaagtgctgtcctttgggagactgacctttgaaaggaaaaaaggcccagccaagaacctgcccataatggcagatggcaattggagcgggggtatggggatcatgctttcactggtagcaccacaacatagaaaccttttttgcctgtcaagcaccaaagatctgcaaatgaaactttcatcttanggtttttgagcttgnngccatgctnaatttggatct

SEQ ID NO: 17607 - DNA, 445 bp, Homo sapiens
tttgactgattacgaatttaatacgactcactatagggaatttggccctcgaggccaagaattcggcacgaggcaccgagctgggggcgacctcatgcaccgagacgagcagagtcgcacgctcctgcaccacgcagtcagcactggcagcaaggatgtggtccgctacctgctggaccacgcccccccagagatccttgatgcggtggaggaaaacggggagacctgtttgcaccaagcagcggccctgggccagcgcaccatctgccactacatcgtggaggccggggcctcgctcatgaagacagaccagcagggcgacactccccggcagcgggctgagaaggctcaggacaccgagctggccgcctacctggagaaccggcagcactaccagatgatccagcgggaggaccaggagacggctgtgtagcggccgccacgg

SEQ ID NO: 17608 - DNA, 462 bp, Homo sapiens
  misc_feature (1)...(462): n = a,t,c or g
ttgnanaccttgatgacctgattacgaatttaatacgactcactatagggaatttggccctcgaggccaagaattcggcacgagtgaaatttcttgccaggaatgttgcgataagttcttttcagttttgaaattcctgtccaactttgtgcaagggaaaaagcattgatccataaatcaggaggccttgattctatggtttgttaactttctgtgtatcattgaagctttatggattttagtttcctgctctctaaaaaatgagtaataatatttgtcttgccatggagatggagtagataaaattacaaagacacgtaaatgctgcatctgcaaggaattattattctgatgattgttctatatagctgttgcaaagagttaattcattctttccttaaagattccaaatctatgcaagacggctggggggagagtgacgggccagtcacaggagctcgc

SEQ ID NO: 17609 - DNA, 90 bp, Homo sapiens
ggtggcagtggccccccgcactacagaagaacaatgcgaggcgagctcaggcgcgctgatggtggtttccgatacaactccccactcaaa

SEQ ID NO: 17610 - DNA, 448 bp, Homo sapiens
  misc_feature (1)...(448): n = a,t,c or g
gcaaangaagaatgtttaaagattgagacaatgaacaactctgtcaaatgctgctgagagatgaagtaaaaatgaggacagaaaatggatccttgatttaacaacatggtagtcattggtgacttagagaactgttctgtggagtggtaaaggtaactggagtgggtttaatagagaatgggaagagagagaaatttcagacagcagtttaggcaaggctntcaaggaatctggctataaagaaatggggcactggtggatacaactagtatggaggaaattatttataatgactaggcacggtgaagagagttgctagagcaatacttgtgagcagangtggtggcctttgttaggtgcatgacctatttacaaacagtnntatangagatagcagggtgcatacacagagatgcngagattacttcatttcttncagtgaaaataa

SEQ ID NO: 17611 - DNA, 524 bp, Homo sapiens
  misc_feature (1)...(524): n = a,t,c or g
gcgtgctgccacatgttcaaagtacactgaacttccttatggcagagaagatgtcctgaaagaagctgtggccaataaaggcccagtgtctgttggtgtagatgcgcgtcatccttctttcttcctctacagaagtggtgtctactatgaaccatcctgtactcagaatgtgaatcatggtgtacttgtggttggctatggtgatcttaatgggaaagaatactggcttgtgaaaaacagctggggccacaactttggtgaagaaggatatattcggatggcaagaaataaaggaaatcattgtgggattgctagctttccctcttacccagaaatctagaggatctctcctttttataacaaatcaagaaatatgaagcactttctcttaacttaatttttcctgctgtatccagaanaaataaattgtgtcatgattaaagtgtatttacngtccaaattanaaaatatattttanggcccggcacggtggtcaancccgntaanccaatacttgggaaggc

SEQ ID NO: 17612 - DNA, 345 bp, Homo sapiens
atctttgcaactttttctgctaatctaaaatcaccccaaaataaaaagcttattcaataagaagacacaggggccaatttgaagctcccactctccaaatctaaaacaaagcatcgaaataagtaatggtagtaggaatgcagcataacccattgaactaaataggaaaccatgagcctatattgccataaataaatgaataaactgaatgcttgaaggggaataggatatttaaacagtctcaaagaatttcccctcaaaatccttatagattacaagcagaaaactttacatggagatgcctggcagataccactttaatcaaagggaatcaaagtgatcaag

SEQ ID NO: 17613 - DNA, 361 bp, Homo sapiens
gcaatataatatcatatgtttttattccaggcccacaaataggtggtagtactgtgatgtccctactcacgggtcctttccctctttatttgagggacaaggaacttcccaccagcctagggaaaattatccatcctaagtatctttaaacatttgatttgattaagtcctacaaggaacaagcagagttatgctagccacagcgtggtatttggaattccttttgttattaaaaaattccatgctggttgtatgagttcaggaagcctgaggagggataagaaatagaccttttgtctagtgctattttaacacacttcttcaggtgttggtgggcaaactggccttgaaaggccttgag

SEQ ID NO: 17614 - DNA, 914 bp, Homo sapiens
ttctgactgattacgaatttaatacgactcactatagggaatttggccctcgaggccaagaattcggcacgagtcttgacgaggctgcggtgtctgctgctattctccgagcttcgcaatggtaagcttcaggggtgtgaagtcgccggcgttcttgggtttgaggactcagtggggagagccttcggcgggagcgctccttggcctgccggcctcggttgcagggcgggcgcggttattgcttggcccatgtgctctggtggtggagtttgcgggggctgagggcgcagtattaggggactttggcgctatttgaggacctggttgcattcccgctgccctcctacagccgcctaaggacgacaagaagaagaaggacgctggaaagtcggccaagaaagacaaagacccagtgaacaaatccgggggcaaggccaaaaagaagaagtggtccaaaggcaaagttcgggacaagctcaataacttagtcttgtttgacaaagctacctatgataaactctgtaaggaagttcccaactataaacttataaccccagctgtggtctctgagagactgaagattcgaggctccctggccagggcagcccttcaggagctccttagtaaaggacttatcaaactggtttcaaagcacagagctcaagtaatttacaccagaaataccaagggtggagatgctccagctgctggtgaagatgcatgaataggtccaaccagctgtacatttggaaaaataaaacgtcgacgcggccgcgaattccagatctatgaatcgtagatactgaaaaaccccgcaagttcacttcaactgtgcatcgtgcaccatctcaatttctttcatttatacatcgttttgccttcttttatgtaactatactcctctaagtttcaat

SEQ ID NO: 17615 - DNA, 492 bp, Homo sapiens
  misc_feature (1)...(492): n = a,t,c or g
tattgaancccatctgaancccaacagctatgacatgattacgaatttaatacgactcactatagggaatttggccctcgaggccaagaattcggcacgaggttacatcctgagctggggcctgttctgaaatctctagtgctgtgcagtgtagttaggtcagcaccaggcccaatgtgacccacggccttggatatccttctagctttgaatttcgcagctcagtcccattggagaaaaatgctagatgtttccctggtctattcccgtctaccttcagctgaacttagaatttagaagccactcttgttttggggagttcaagcatcttccctttgacacagattatgtttgcctggagtagcaggtaaggtgtcttatgtttagtgtcctcatagaccattgtgagtagtttgattgtgtattctataatttatttgtgtagacctaggttttcatatcgagttggttttaggtgtaccaggacagatt

SEQ ID NO: 17616 - DNA, 324 bp, Homo sapiens
ttccttggttcttaagcctctcaacttgggctgagacacgcctgagcttctctggttctccgacttgcagacgggctattgtgggacttctcggccttcataatcacaggagccaattctcctactaaatcctctctcatgtatccatacaaatatatattctgttggttctgtctctctagagaaccctaatatatccagagtcaaggcatctctttgaactagggcattcacataattcccacagtacaagacaaatacagatatgcgctcatgctactggaattcaacatcgtatatgaatagcttttaattaaacttacg

SEQ ID NO: 17617 - DNA, 435 bp, Homo sapiens
gggttagacccagccagtcgggtcagagacatgtgatggtcagcgtgaccagggtgacaagccagacatggctggctccatgactgaacagccagaaagcagtttgtagacagccagccacagaaaaagtacagcccaggccaggctcagtggctcacgcctgtaatcccagcactttgggaaactgaggcaggtggatgacttgaggtcaggagttcaagaccagcctggccaagatggcgaaatcccgtctctactaaaaatacaaaaattagctggccatggtggtgtgtgcctgtaattccagctacttgggcggctgagatatgagaatcgtgtgcacataggaggtggagtttgcagtgagccaacattgtgccactgtgctccagcttgggtgatggagtgaaactctgtctcgaaaaaaaaaaaaaa

SEQ ID NO: 17618 - DNA, 455 bp, Homo sapiens
ctctatgacatgattacgaatttaataccgactcactatagggaatttggccctcgaggccaagaattcggcacgaggaagcaatgagttctcactatgttgccaaagctggtctcaaactcctggcctcaagcaaccctcctgccttggcctcccaaaacgctagaattacaggcataaaccactggctgaaaaaattttaaaaaaatgtttttaatgctaatgtcatgaagcataaagagaagctaaagaacggtcccagattaaaggagactaaagaaacatgacaactaatgtaatttgtgatccttggctgaaggggaaaaaaaaaacaaataataaaagtttattgacaaaattggaatatgaatagtaaattattgtatcaatgctaaatttcttgaatttgataactatacttaaattagtaagagaatatccttgttcttaggaaa

SEQ ID NO: 17619 - DNA, 341 bp, Homo sapiens
ggagctgaagatgacagtatttttctttacatgcttggttatgacttttaaagttttatttaaataaatgttgaagctcaagtttaaagaagcgttgcagaggcccacggtctcctgggtcccggccacctgtccatattccacatttgctgactgtgctccctgcactccactcaagttgagagttcaaatagtcttgaaggggaatcagcttcaggatggaaggacccaggagaggccccgaggtgggagggttctgtaaatacagactactgcgagtgtccagagctctctgccatgatacttccttgggactgacttggctgagaacgtgttctgtc

SEQ ID NO: 17620 - DNA, 929 bp, Homo sapiens
ttggataacgcttgacatgattacgaatttaatacgactcactatagggaatttggccctcgaggccaagaattcggcacgagagaaaagaacgtgcctcttccagtgattgctgagctgcctcccaaagtgagcgtcttcgtcccaccccgcgacggcttcttcggcaacccccgcaagtccaagctcatctgccaggccacgggtttcagtccccggcagattcaggtgtcctggctgcgcgaggggaagcaggtggggtctggcgtcaccacggaccaggtgcaggctgaggccaaagagtctgggcccacgacctacaaggtgaccagcacactgaccatcaaagagagcgactggctcagccagagcatgttcacctgccgcgtggatcacaggggcctgaccttccagcagaatgcgtcctccatgtgtgtccccgatcaagacacagccatccgggtcttcgccatccccccatcctttgccagcatcttcctcaccaagtccaccaagttgacctgcctggtcacagacctgaccacctatgacagcgtgaccatctcctggacccgccagaatggcgaagctgtgaaaacccacaccaacatctccgagagccaccccaatgccaccttcagcgccgtgggtgaggccagcatctgcgaggatgactggaattccggggagaggttcacgtgcaccgtgacccacacagacctgccctcgccactgaagcagaccatctcccggcccaagggggtggccctgcacaggcccgatgtctacttgctgccaccagcccgggagcagctgaacctgcgggagtcggccaccatcacgtgcctggtgacgggcttctctcccgcggacgtcttcgtgcagtggatgcaagagggggcagcccttgtccccggagaagtatgtga

SEQ ID NO: 17621 - DNA, 444 bp, Homo sapiens
  misc_feature (1)...(444): n = a,t,c or g
gcgacatgccttctcttgtcttctaacgggacagttggggcttgcagaaggggactgagaataggggtgtgagtgacaggttcctggggtcttgttttgagatgaccggtggggggatttggagaaagactcctggagaccagcagctaacgaaggtgtctagaaggatttagggacctagtagggctttgggaaggagagagtaaggaaactccactgattccctgctgggatctgacatctataacgttccaagtggagatgtactttgtagccactcttttgagcctgtacttcggcgctttatctgaaaccgtataatttagaatactcttttgtagtgntcattctgaaaaacataanagaatatcatagagaagggccttaaatgtatttagtagtttaggntcatgaactacgacatncnngaaatcttgtaaggaa

SEQ ID NO: 17622 - DNA, 434 bp, Homo sapiens
  misc_feature (1)...(434): n = a,t,c or g
acctttatgaccngattacgaatttaatacgactcactatagggaatttggccctcgaggccaagaattcggcacgaggggaaatcccaggctgccgcggctcctgtgtgctttgaaggtaactttcctttgctctcgcgctccttgggctcagtgccctttcagtctgatgagatctgggcggttttcttcaagccttctctgacaattccatcactgtcctcaccctcttcttttttttctagaactttggttagccagatacagactctcctggtttgattctgtctcttttcattctacattctagaagatactcttaactttatatttcagtcatgttaatgaatgtcttcttttaatgccagcaattgcatttttaatgtccaagctctctgtctcattagtagcattttttatttcgtaagtgcaga

SEQ ID NO: 17623 - DNA, 424 bp, Homo sapiens
gagcatggacttcgtggcctaccgccacctggtgggcgtgtgctacacggaggatgaagctaaggagctggctgcggaggtggaggttcaagacggccccaatgaagatggggagatgttcatgcggccagggaagctgttcgactatttcccaaaaccataccccaacagtgaggctgctcgagctgccaacaacggagcattgccccctgacctcagctacatcgtgcgagctaggcatggtggtgaggactacgtcttctccctgctcacgggctactgcgagccacccaccggggtgtcactgcgggaaggtctctacttaaacccctactttcctggccaggccattgccatggcccctcccatctacacagatgtcttaaagtttgacgatggcaccccagctaccatgtcccagata

SEQ ID NO: 17624 - DNA, 332 bp, Homo sapiens
gggcaacagaaagagactccatcacccacctacacacacatatgaatctcaggaaggtggaaagtataaaggtgatcagcagacactaggaagaaaaggggtgggatagggaatgaagacaagtggataattgtgtcccaaaatacagaaagatggaacaagtgagttctagtgtttgatagtacagtatgaaaattttagttcacaagaattgcttgcatatttccagatgctttggtaagaagcttcctaactttctcattatgctggtttttaagctcttctctttccactcttgaaatcatgcataatgagaaagttaggtcgaccgc

SEQ ID NO: 17625 - DNA, 418 bp, Homo sapiens
  misc_feature (1)...(418): n = a,t,c or g
ggggtgacagagcgagactctgtatcaaaaaaaaagaaaaaagaaaaaagaaaagaaaagaaaagaaagaaaaatgatgtgggtagcactcacttagcatgatgtctggtacacacgggcaatggtatcttgtatcatcatcatcatcctcttcattttttgttattgtcatttaaagtctttcagccagtaagcggcaaagctagcatttaaatcatagacgcttgcctctgcaaagctgcaaaaacaaataaaaataataataaatcacagaccaagccaggtgtggtggcttacgcctgtaatcctagcactttgggaggccgaggagggaagatcacgaggtcaagagagggagaccatcctggccaacatggtgaaacaccgtctctactagaaatacnaaaattaactgggg

SEQ ID NO: 17626 - DNA, 1048 bp, Homo sapiens
  misc_feature (1)...(1048): n = a,t,c or g
gaagcaactctaccagatcctgacagactttgatatccggttttatatgtatgaactacttaaagctctggattactgccacagcaagggaatcatgcacagggatgtgaaacctcacaatgtcatgattgatcatgagcacagaaagctacgactaatagactggggtttggctgagttttatcatcctgctcaggagtacaatgttcgtgtagcctcaaggtacttcaagggaccagagctcctcgtggactatcagatgtacgattatagtttggatatgtggagtttgggttgtatgctggcaagtatgatctttcggaaggagccatttttccatggacatgacaattatgatcagttggtgaggatagccaaggttctggggacagaagatttatatgactatattgacaaatacaacattgaattagatccaccgtttcaatgatatcttgggcagacactctcgaaagcgatgggaacgctttgtccacagtgaaaatcagcaccttgtcagccctgaggccttggatttcctggacaaactgctgcgatatgaccaccagtcacggcttactgcaagagaggcaatggagcacccctatttctacactgttgtgaaggaccaggctcgaatgggttcatctagcatgccagggggcagtacgcccgtcagcagcgccaatatgatgtcagggatttcttcagtgccaaccccttcaccccttggacctctggcaggctcaccagtgattgctgctgccaacccccttgggatgcctgttccagctgccgctggcgctcagcagtaacggccctatctgtctcctgatgcctgagcagaggtgggggagtccaccctctccttgatgcagcttgcgcctggcggggaggggtgaaacacttcagaagcaccgtgtctgaaccgttgcttgtggatttatagtagttcagtcataaaaaaaaaattataataggctgattttcttttttctttttttttttanctcnaanttttcntanctnaggggattccctgaaaaat

SEQ ID NO: 17627 - DNA, 338 bp, Homo sapiens
gactagaccttttgtaaggagttagaatggggggcaatggcccagaaagggcatctaagaaatgtagctgcttaaccccagtgcctgtgataacctgtgtctgacaaccataaattttcttaagtcaaagaatgttttccatactaaacttttttttctaactgcttcctaaagaaatgaatacctcagtcactaatgcagagaaattacttttcatagaggcagctgcttcaacacctagaactctcaacaattgctggaatatagtattggtaaaataaaataagttttagcagctctaggtttaaatacaacaaaatgatttctttgataagatt

SEQ ID NO: 17628 - DNA, 501 bp, Homo sapiens
  misc_feature (1)...(501): n = a,t,c or g
tttnanattganaccgttatgactgattacgaatttaatacgactcactatagggaatttggccctcgaggccaagaattcggcacgagtatttttaaattgcatttgctacaattctcctgcctcagcctcccgagtagctgggactacaggtgcatgtcgccaggcctggctaattttttgtattttagtagagatggggtttcactgtgttgcccaggcttgtcttgaactcctgagctcaggcagtctgcccgcctcagcctcccaaagtgctaggattgcaggtgtgagccaccgcacctggccactactttttggaactctattttgtacttgctgactttcacaaaaagtttgaggcagcttacaataggatgtaataggatgaaagaagaaacaacaatatattaatacgtggccagaattagtgtgcttcagaggttgtagaagccttattaacctttctcacgtttttcaagggaaagccttgcaggcaat

SEQ ID NO: 17629 - DNA, 359 bp, Homo sapiens
gttttgcataataatatgaatataatttaagtctatcaatagtcaaaacataaacaaaagctaattaactggcactgttgtcacctgagactaagtggatgttgttggctgacatacaggctcagccagcagagaaagaattctgaattccccttgctgaactgaactattctgttacatatggttgacaaatctgtgtgttatttcttttctacctaccatatttaaatttatgagtatcaaccgaggacatagtcaaaccttcgatgatgaacattcctgattttttgcctgattattctctgttgagctctacttgtggtcattcaagattttatgatgttgaaaggaaaagtgaa

SEQ ID NO: 17630 - DNA, 526 bp, Homo sapiens
  misc_feature (1)...(526): n = a,t,c or g
ttntgaanccctaacagctatgacatgattacgaatttattacgactcactatagggaatttggccctcgaggccaagaattcggcacgagtggagcctcggcactggagatctcctacaacggggagcctcagtcctggttccagaggcagctccggggcgcacagtaccagcccatcctcagggaccacatctgtaaggacatgagtgcattggtggctgcccgcatgcggcacatccccttggccccagggtcagactggcgcgatctgcccaacatcgaggtgcggctctcagacggcaccatggccaggaagctgcggtatacccaccatgacaggaagaacggccgcagcagctctggggccctccgtggggtctgctcctgcgtggaagccggcaaagcctgcgaccccgcagcaggcagttcaacaccctcatcccctggtgcctgcccacaccgggaaccggcacaaccactggctggcctctatggaangctcgagtggacggcttcttcacacac

SEQ ID NO: 17631 - DNA, 473 bp, Homo sapiens
  misc_feature (1)...(473): n = a,t,c or g
gtnnttgaancctttgaatgaccgaatttaatacgactcactatagggaatttggccctcgaggccaagaattcggcacgaggtggatgacaagaagtttgtgagcaacataaccaggttgagctcgggtcctttccggaccatcacggtgcgagacacgatgtccgacctgccggaggtgcggaatggagcctcggcactggagatctcctacaacggggagcctcagtcctggttccagaggcagctccggggcgcacagtaccagcccatcctcagggaccacatctgtaaggacatgagtgcattggtggctgcccgcatgcggcacatccccttggccccagggtcagactggcgcgatctgcccaacatcgaggtgcggctctcagacggcaccatggccaggaagctgcggtatacccaccatgacaggaagaacggccgcagcagctctggggcccttcgtgggg

SEQ ID NO: 17632 - DNA, 360 bp, Homo sapiens
gtggagggttgccatgttatatagagtggtcaggggagctatttctccagtggtgatttgatcagacctgaaaaaaaagtgagagactagccaagcacagggctgggagaagcagtccaggcagaggaaggaggaaatgccaaaggcctaaggaggtgatgtgatctgattggttattagttgaacataggtcctgtttgtatttcaaaagtgatgatggacttgggcatgtttgctctctccgtctacttacccagcccctagtgatggtgagtaggatgcttaggatgatagaggtggcagctggagataaaaacacattcccagccttcatagagagattggtgctgtgatggatga

SEQ ID NO: 17633 - DNA, 394 bp, Homo sapiens
gtttaaaaagctacaatcacatcatgttgtaactacgtaaaaaacagagctgtaaatggaactgcttggctttgaccatacacatttctgcccagcccttacagaatctgcacaaagaaatatctccctttgctccagttaattgttcttgtatgtaagttgctttctattccagtatatccagagtggtgaaataacaaggccagccacgtagccaaaggtcgctccaagcgtacaggagatgggccatacctgccatggtctttcccaatccagtggaataggaagtgctccaagccatgctcctacaaagctagaaattgtagtgatctggagactattctcccatatggatgtaactccatttctactgaacactcttagccatgctttg

SEQ ID NO: 17634 - DNA, 528 bp, Homo sapiens
  misc_feature (1)...(528): n = a,t,c or g
tttggananccttntnantnattgnannacngntatgacatgattacgaatttaatacgactcactatagggaatttggccctcgaggccaagaattcggcacgagatctggcctgtgtaaacatgagaatgtccatgcctgaggccttggccgctgccaccatcaatgcagcttatgcactgggaaagtctcacacacacggatcgttggaagttggcaaacagggagatctcattatcatcaattcatcccgatgggagcatttgatttaccagttcggaggccatcatgaattaattgaatatgttatagctaaaggaaaactcatctataaaacatgatagatttgaaaagagaagactttttgactatatgaaataagtcaatatagttatattaaaagttaaaacaccttaatatttacaagaattatatcacttaaacctgaatgtacttcaatgtctttttaagtcactcaaaaaacccaagggatagatttattttcatttaacacatgcatttgacat

SEQ ID NO: 17635 - DNA, 361 bp, Homo sapiens
gtgcttccacaaggggacatttgtgttactttgctccaggggtctgtcataaaaacaatggtaactacttcatccctaggaagcccaagacttcagggcactgttagctgattggtaaataagggacacgatattcacgggaattgtttactgctccccactagtaattctcatggggccacttttttaactctttctaattaacacctcttctcagcatagagcagaggatgcagtcatttctctgttgaaatctatgtagtatttatgtagaatgtcattatatgaaaagcgaattcagaatcctaactctgggaaagcgctctctggaaatgtagtttgataatagtgtcttataggg

SEQ ID NO: 17636 - DNA, 357 bp, Homo sapiens
gatccgtagctagaggattaacctcgacattgcctgtgaccttcatagacctcttactgtgacacaaaaccagtttgtcctgaatgtatatgaagtgctgtcccaaatctacattaatagatttgattgaagactgggaagagaaatgctaacaaatttggctaggtgtggctattgatggttcttttattttcctctaatttcttgctgataaagcaattatttgcctgtgtcacatggcagctggaacatagcaaggtggtttacaagctccacattctgtatctggtgtagtttttagttaaatggcaggtcttgctctctctccattttgctgttctatgggttaaaacacac

SEQ ID NO: 17637 - DNA, 805 bp, Homo sapiens
  misc_feature (1)...(805): n = a,t,c or g
ggtactgggagggcattgaccagcctcttccacctggtgttactgtgacctcctggctgggcaaaccctggaaacctggtgacaaggagccctgtgcacatcccaactctcgattttgtgccccggctcgccagtgccccatcatggacccagcctgggaggccccagagggtgtccccattgacgccatcatctttggtggccgcagacccaaaggggtacccctggtatacgaggccttcaactggcgtcatggggtgtttgtgggcagcgccatgcgctctgagtccactgctgcagcagaacacaaagggaagatcatcatgcacgacccatttgccatgcggcccttttttggctacaacttcgggcactacctggaacactggctgagcatggaagggcgcaagggggcccagctgccccgtatcttccatgtcaactggttccggcgtgacgaggcagggcacttcctgtggccaggctttggggagaatgctcgggtgctagactggatctgccggcggttagagggggaggacagtgcccgagagacacccattgggctggtgccaaaggaaggagccttggatctcagcggcctcagagctatagacaccactcagctgttctccctccccaaggacttctgggaacaggaggttcgtgacattcggagctacctgacagagcaggtcaaccaggatctgccaaagaggtgttggctgaacttgangccctgganaacgtgtgcacaaatgngacctgaggcctaatctaancagaagacttannccttantttg

SEQ ID NO: 17638 - DNA, 338 bp, Homo sapiens
gctgcgaggtggcggggcgccccgcctgcagaaccctgcttgcagctcaggtttcggggtgcttgaggaggccgccacggcagcgcgggagcggaagatgttggagctgaggcaccggggaagctgccccggccccagggaagcggtgtcgccgccacaccgcgagggagaggcggccggcggcgaccacgaaaccgagagcaccagcgacaaagaaacagatattgatgacagatatggagatttggattccagaacagattctgatattccggaaattccaccatcctcagatagaacccctgagattctcaaaaaagctctatctggtttatctt

SEQ ID NO: 17639 - DNA, 345 bp, Homo sapiens
gggagatcctgctaattaaagctgcaaaggcacggggcttgccagtgacctgcgaggtggctccccaccacctgttcctaagccatgatgacctggagcgcctggggcctgggaagggggaggtccggcctgagcttggctcccgccaggatgtggaagccctgtgggagaacatggctgtcatcgactgctttgcctcagaccatgctccccataccttggaggagaagtgtgggtccaggcccccacctgggttcccagggttagagaccatgctgccactactcctgacggctgtaagcgagggccggctcagcctggacgacctgctgcagcgattgcacc

SEQ ID NO: 17640 - DNA, 441 bp, Homo sapiens
ggtgggcttgaggacctggagagagtagatcctgaagaactttttcagtctgctgaagagcttggaagactggagacagaaggcagagtctcaggctctgaaggtataaggagtgtgagttcctgtgagaaacactcatttgattgtgaaaagacttgaattctatgctaagcagggttccaagtagctaaatgaatgatctcagcaagtctctcttgctgctgctgctactcgtttacatttattgattacttacgatgattcaggtactgttgtaagtgctttacatgctgttatacgagactcttgggagaaatcactttaatgaagcttgagacacatggcattgccatgcaatgatttttcccccctcttcacgggatcagagggaactatagaatgtgacaatgattctttaaccagggactgctgaggcttctg

SEQ ID NO: 17641 - DNA, 384 bp, Homo sapiens
  misc_feature (1)...(384): n = a,t,c or g
caccaacgtactgggagactccctgggagctgggattgtggagcacttgtcacgacatgaactgaagaacagagatgttgaaatgggtaactcagtgattgaagagaatgaaatgaagaaaccatatcaactgattgcacaggacaatgaaactgagaaacccatcgacagtgaaaccaagatgtagactaacataaagaaacactttcttgagcaccaagtgttaaaaaccattataaaatctttccatctcattacagctcattcgctccagcaagcccgtcatcttccctttcctcccttctgataagactggaaaatagtcctccnaaacacaagggaggatttggggtggccnaagtgtacaattttcattccacaatg

SEQ ID NO: 17642 - DNA, 452 bp, Homo sapiens
  misc_feature (1)...(452): n = a,t,c or g
ccctnnnatttgaaancncttgactgattacgaatttaatacgactcactatagggaatttggccctcgaggccaagaattcggcacgagcccatttgtagttggagaggcgtacaaaaacaggctatgggctgcatttggcccatgggccgttatttactgatcttagatattggaggaccagtgctgaaaccactggaacttcagctttaacactagcactgtcattttcagaagccgcatcaaactgctggctgcttctgacaaggtggtcagttacacttggtcttctccaccccccatcccccgcccctccgccatttcctgacaaagctgtctctctaacctgtgggtatgtgttctgccgaaaacaagcagccataccacagcagccgtaaccataggactttgaaacaaatgcaatgaatggcatccactagtttcaagtttga

SEQ ID NO: 17643 - DNA, 1011 bp, Homo sapiens
ctctcagggagcgtcagagagaggaactcagtaaggttacttccaacttgggaaagatgatcttgaaagaagagatggaaaagtcattgccgatccgaaggaaaacccgctctctgcctgaccggacacccttccatacctccttgcaccagggaacgtctaaatcttcctctctccccgcctatggcaggaccaccctgagccggctacagtccacagagttcagcccatcagggagtgagactggaagcccaggcctgcagatctatccctatgaaatgctagtggtgaccaacaaggggcgaaccaagctgccaccgggggtggatcggatgcggcttgagaggcatctgtctgccgaggacttctcaagggtatttgccatgtcccctgaagagtttggcaagctggctctgtggaagcggaatgagctcaagaagaaggcctctctcttctgatggcccccacctgctccgggacggcccccttacccctgctgcttcagggtttttccccggcgggttgggaggggcaggaggtggggtggaaatagggtgggctcctttcctcaggtagagtggggggccaaaacctctgcagtccccggcagtgagctatggactttcttccccctcacaaggctgggggcctcctgctctcgtccctggccctccctgcacagggcaaagccagtctgggctctggcacacagagttcatgtttgcgccctctccctgcccctcaccccagagggtgaggaggaatgaggggcattggtggttaggccggttggctgtcttgaacagctggagggaagatgcaggggtgggaagcggccaggcagaaagagctccaggctcttgtgtcgcccacccagccctcccatactcactcctgacagctttcctgcactgcagcttcctgctcctctgactctagtgggaacaggccccagctcagcctccggcagggaggtcacccctccacttcagcttgccctgacctccgctc

SEQ ID NO: 17644 - DNA, 427 bp, Homo sapiens
gccctgggggatttgtcacttcgtcttccagagctacaatttctggcactgtaaaacggacctactgagctgtgtcatgtgtctggtggggctgctgcgatagagtgtggaagcccagcacagacagcgagtgctttccttatagaggtggggaattctgggagctgaggccaaagcccaggagacagccatgtgtgcgagctgcagaaactggaggtctcctggtattgaccccagctggcttcccatgcctgtggcagacgttgcaagttggtcacagctcctcttcccagtgagcgagttctcagactcagcctctgtctcaggcccaccgctgatggaagctggcaggtggaatgaaacccacttgcaccctagcagggcagtggcatcaaaggcctggacctgataagggatgaaagtaacc

SEQ ID NO: 17645 - DNA, 416 bp, Homo sapiens
ggaatttacaaagtacggttaatgtatgccaatggtttctcagtttggatatggagatccttagatggaccatgaagctggtaataattttatagctaacttttgttaagtgcttactatatgccaggcactgttctaagcattttacgtgtattcattcattcagttctcacaactcttttaattaggtattattatgatctccattttacagattagaaaacagaggcacaaagaggttttttgtttttgtttttgtttttgagacggagtctctctctgtcacccaggctagagtgcaagtggcacgatcgtggctcactgcaagctccgctcccgtgttcactccattctcctgcctcagcctcctgagtagctggtagctgggactacaggcacccaccaccaggctggcg

SEQ ID NO: 17646 - DNA, 245 bp, Homo sapiens
cgacacacatgttagagcccttctgaaaaagtatcctgcttctgatatgcagttttccttaaattatctaaaatctgctagggaatatcaatagatatttaccttttattttaatgtttcctttaattttttactatttttactaatctttctgcagaaacagaaaggttttcttctttttgcttcaaaaacattcttacattttactttttcctggctcatctctttattcttttttttttttt

SEQ ID NO: 17647 - DNA, 455 bp, Homo sapiens
  misc_feature (1)...(455): n = a,t,c or g
gggnnngnggnntgnatngnncannnaataccctntnngaccgantacgaatttaatacgactcactatagggaatttggccctcgaggccaagaattcggcacgagaaagaggatccacagactttctattatgctgttgctgtggtgaataaggatagtggcttccagatgaaccagcttcgaggcaagaagtcctgccacacgggtctaggcaggtccgctgggtggaacatccccataggcttactttactgtgacttacctgagccacgtaaacctcttgagaaagcagtggccaatttcttctcgggcagctgtgccccttgtgcggatgggacggacttcccccagctgtgtcaactgtgtccagggtgtggctgctccacccttaaccaatacttcggctactcaggagccttcaagtgtctgaaggatggtgctggggatgtggcc

SEQ ID NO: 17648 - DNA, 1002 bp, Homo sapiens
ggcgcccgctgcgcgcgcatgtttcctcttttcctggtttctcaagagtgctgctgctaacgcggtccccggcacgcaccatctgttgccatcccggccggccgaggccattgcagattttggaagatggcaaagttcatgacacccgtgatccaggacaacccctcaggctggggtccctgtgcggttcccgagcagtttcgggatatgccctaccagccgttcagcaaaggagatcggctaggaaaggttgcagactggacaggagccacataccaagataagaggtacacaaataagtactcctctcagtttggtggtggaagtcaatatgcttatttccatgaggaggatgaaagtagcttccagctggtggatacagcgcgcacacagaagacggcctaccagcggaatcgaatgagatttgcccagaggaacctccgcagagacaaagatcgtcggaacatgttgcaagttcaacctgcagatcctgcctaagagtgccaaacagaaagagagagaacgcattcgactgcagaaaaagttccagaaacaatttggggttaggcagaaatgggatcagaaatcacagaaaccccgagactcttcagttgaagttcgtagtgattgggaagtgaaagaggaaatggattttcctcagttgatgaagatgcgctacttggaagtatcagagccacaggacattgagtgttgtggggccctagaatactacgacaaagcctttgaccgcatcaccacgaggagtgagaagccactgcggagcatcaagcgcatcttccacactgtcaccaccacagacgaccctgtcatccgcaagctggcaaaaactcaggggaatgtgtttgccactgatgccatcctggccacgctgatgagctgtaccccgctcagtgtattcctgggatattgtcgtccagagagttgggtccaaactcttctttgacaagagagacaactctgactttgacctcctgacaatga

SEQ ID NO: 17649 - DNA, 260 bp, Homo sapiens
  misc_feature (1)...(260): n = a,t,c or g
gggctcggcgtggggtgatgaagagttcagttttggtaacattcagtctaaggtgataaggcaatcacacagaaagagcaggcaggtgactatatgagtttgagcctggcataaagcttgtgctagaaatacagatttggaagtcgtctgcatatattttttttatttaacccaggacagtgggtgagattgccaagatcgaagtgaggattgaatttatgaagattcattgagactcctcantttaaggatctaggctg

SEQ ID NO: 17650 - DNA, 320 bp, Homo sapiens
ctactctgtgcctgactaagcactaggagcacaaaaatgaaacagatgtggtctctgctctcaaaagagtgcagtccagttggaagaaaaacataaaaccaatggcagttgatataaaaggaatcctccaggagatgggatgctctgacctcaagaggaaaagggagtggtcagctcacttcaggaaaccaagaaggtttcacagagtagatagctgacgcttgagccgaggctctgaggcaaggaggatgggaccatgattcctttgtaatttttaaataatcagtttagcccagaaatagaatagaaggttaaagtaa

SEQ ID NO: 17651 - DNA, 390 bp, Homo sapiens
  misc_feature (1)...(390): n = a,t,c or g
cccccttcattctctgttcatctttctttttcttcattcacttaccgctacttgaaatcacgttacatattttttattgtccacttctttactagattgtaaactagaaactagatgaatggagggttttatcattatggttctctactaatatacatacagttggtgctcaaaaaacagctgttggaccaacaaattaatatgaatgggagtgcaaattgatatactttctttttttttttttgnaanggnnnttnnnttttngnccccaggnnnaaagnncnaggggggatnnnagctnnntggcnccncggntaaanggantntcnnggcnnancnnnccaanacnnngggantnangggaannncccncacccccnggtnattttt

SEQ ID NO: 17652 - DNA, 326 bp, Homo sapiens
ctttattgagatatatatatatgaaacgggtgaattttgaaatagtgacagacatagatgagtgcaggcagatacatatagagaggtaaaatatatctatttaataaccaacaaaattcacccattttgagtgtacagcttgatgagttttggtcatcatatacattgtgtaaccatcactgtgatcaattccaccactccccaaagttccctgtacccatttccatcaactcctccattcacgctcctgccccaggcaatcacagatctgccttctgtcattagctctgcattttctacaattttattatgaaattttaaagcac

SEQ ID NO: 17653 - DNA, 372 bp, Homo sapiens
gggtggggaggagggctgggggagggatagcattaggagaaatacctaatgcaaatgacgagttaatgggtgcagcacacaaacatggcacatgtatacatatgtaaccaacctgcacattgtgcacatgtaccctagaacttaaaagtataataataataaaaaaagaattgcattctaatgcaagcttaaaagcaaaaagaaaaaaaatgaacagcaatgaccaaaattttaactggagaagaagatagtttgtgaaaagtacactatcaccactctgtagtatcagtgaaatggaggaataaaaagcaactctgcccaatatcagactaacataataataaaaaacgatgtaaaacagaatttttttct

SEQ ID NO: 17654 - DNA, 457 bp, Homo sapiens
gaagtaaaaaccttctctgcatccgtttataattggaaattgacctgcaccagggaaagagagtagcccaggtgtctggggcttgttcccattagatcttccccaaggggtttttctccttggtggctggcctgtggggcccctctccaggaggcattggtgaagaaactaggggagctggttgccacagacagtgatgtactaatcttctctgggaagacagaagaaaagtccccagggaagaatactacagacttggccttagggacagctaggggtgcagattgctgccaactgcattttttctgaagttggccatatggttgcagtgaatggatttatagacagagtatttctgtgcatataagagcaattcagttgtaagttgatatggataagtgaaagttaagcacttctttctaaaaagagaatgcaattcattttcccctaatcattc

SEQ ID NO: 17655 - DNA, 376 bp, Homo sapiens
gaattattaaaataactgaatttttaagtcattcctttccattcctatttactttatagcttgactaatttagtgtttggaacttaacccttattcaagtttaatgcctgatcacaaattttataaactgtgcacgttactaagagaaagattgagaaatggatggctgattagatcagtaactcctgcaataatgatctaacatcattaggctaaaacattagatatgttattgtcatttgattgctaaagttgtctaatgatagttgttacctctaaacatcccttcaagtgaaattgtacagcatgctcactgaccaggtagcatcattaataaactacttctcaaaatgatgagggctaatctaatcttaac

SEQ ID NO: 17656 - DNA, 344 bp, Homo sapiens
  misc_feature (1)...(344): n = a,t,c or g
aagaaacaagacctagtaatgtatcactgctcttgggagccttacagtctagtgtagtttagttaactgggaaataattttgtttnantnnnnntgnctnttatntttacacttnnantatatgaattgtatnntnagtaaatntntcattatngntgttnataaaatccttcaggccanatgtatnncntttagcatactttttctgcaaagaatcagatagtaaatattntaagctttnnnagccatacannatctgttccaactattcaactctgcactgtantgaangtngccatagatgtatgtanattgaatgcatgtggctgtgttccaatanaact

SEQ ID NO: 17657 - DNA, 449 bp, Homo sapiens
tttgaaaacccctatgacatgattacgaatttaataccgactcactatagggaatttggccctcgaggccaagaattcggcacgagataccctggctttgcatgttccaatatgcatgaatttcagttactgtggtttagctaaacaacaccagtcacccaataccacaattcaagtacaatggtatattaaatatgagtaattacataaaatacattctttagcctacaaatcactatgtaaataacagatacacaacatgttcagcaaccaatcacgcacttctttcccagactttaggtgactggtcactgcatcagttactcagttcacagacagtaaagcatgtacttgtattgcctccttatctttcagtgataaagcacacgtggcataactggataaatgaaagagggaattgagcaacaaaaatgaaaatgctgataatg

SEQ ID NO: 17658 - DNA, 318 bp, Homo sapiens
ctttatttaccaagattgcagttccaagccccattaatctcatttatcttatttttataaaaaagtaacatgcatttaatactctttggaaatgccacatgttctttgacttgtgcatcataacaacagtaatgtcttaagaaagaaagttatcttcaactaaatatttcagaaataattatcttcttagttggcattagatcttctacttgccctttctttactgtctctgagtcagattttgttgaactagactaatggaaagaagactatttgccatatttttgcataggtttagagatattcttaagataaata

SEQ ID NO: 17659 - DNA, 386 bp, Homo sapiens
gggatcacttgaagccaggagtttgagaacaacctgggcaatatagcaagatcccatctctacaaaaaataaaaagttagatgggcatggtggtgtgtacctgtggtcccagctacttaggaggctgactcaaaggatcacttgagcctgggaggtccagcagagagtagtgatagtgccactgcactgcagcctgggtgacaacctatctttagatagatagatagattagatagatgcctgaagattgtatctcttttactcctgagcctttgcatagcatcacgttttatactctttgagcatctgccacatgccaggctctatcctggtgcaaggaatggtgtggtgagcaggcaggaatgatccctgcttcatgaagtgta

SEQ ID NO: 17660 - DNA, 499 bp, Homo sapiens
  misc_feature (1)...(499): n = a,t,c or g
accntnntctgaataccngntatgacatgattacgaatttaatacgactcactatagggaatttggccctcgaggccaagaattcggcacgaggttttatgttgcatggcaagctgtaatctccctgttcctttttcctttcccccttgcctgtttcctccttcctctttccaccccgacctcaatatgaatctggaagccgttcatatatttcctgatggacatgagccagcggaaaagtttnnnnnnnnnatnggtgaaacanatagggtggcattgtaggaataacangtaagggggaaacaaagatcctgacagtgtattcangagaactgtcaacgttgaggctattnttagttaccagagggacaaacatgaagaggagaaacaaaaattgataatanaaacaganagtgatcctatttaacatgcagcaatacagtcatttgtgttactgaatttcanantgatttgntagctctttaagtctaaaccttaa

SEQ ID NO: 17661 - DNA, 371 bp, Homo sapiens
  misc_feature (1)...(371): n = a,t,c or g
gcagtccatgcccttatcttttctcagctgataatgggataacctcctaaatatttcccatttcttctgacattaatcttagtcttttgtttttcaaattatgattcatgttcctgtaggttataaactcaatttacttgttcatgatcataactttttagtgatgtaaaatagaacatatacacaatattggagtacatggcacataataagagatttcatgaaattgttttaattatttacatatgtatgctaagtgttaacttaccacttgtaatgggagattataattgtgttggttgtcctttggaggggcatctatctagcatctgaacctttccccatgattagaatattcnggattatatgag

SEQ ID NO: 17662 - DNA, 544 bp, Homo sapiens
  misc_feature (1)...(544): n = a,t,c or g
tncctttgannccntgaanccctaacagctatgacatgattacgaatttaatacgactcactatagggaatttggccctcgaggccaagaattcggcacgagcttcatgagatttcatccatttactaatactgtatttttggtggactaggcttgcctatgtgcttatgtgtagctttttactttttatggtgctgattaatggtgatcaaggtaggaaaagttgctgttctattttctgaactctttctatactttaagatactctatttttaaaacactatctgcaaactcaggacactttaacagggcagaatactctaaaaacttgataaaatgaaatatagatttaatttatgaaccttccatcatgatgtttgtgtattgcttctttttggatcctcattctcacccatttggctaatccaggaatattgttatcccttcccattatattgaagttgagaaatgtgacagaggcatttagagtatggacttttcttttctttttctttttctttttttctttttgagatggagcaca

SEQ ID NO: 17663 - DNA, 429 bp, Homo sapiens
  misc_feature (1)...(429): n = a,t,c or g
gatggatttgcctattttggacatttcatataaatagaagcatgcactatgtggtgtttttgtatctggcttcttttacatagtttaatttttcaagatgcatctatgttatagcatgtatcagtagttcattcctttttatggctgaataatattcatggtgtggctatactacattttgtttatcagttcaccattgatggacatttgagttgtttctactttttggctgtttgaataatgctgaagagaacatttgtatacaagttttgtgtggtcatatgtgttctgttcacttagacacagagctaggagtggaattactgagtcatatggtaactttatgaattaactggacttttacttgaactcctgagtcttctcaaggnatgaaaataaagnagataaggcaatttttaaggngggccg

SEQ ID NO: 17664 - DNA, 532 bp, Homo sapiens
  misc_feature (1)...(532): n = a,t,c or g
gagnncctcnttgaanccctttgactgcntacgaatttaatacgactcactatagggaatttggccctcgaggccaagaattcggcacgagaaatgagtttggagatgttctggacatacagtatcttaatggcattctgtggatattttctcccatgttttttggagaagtgtaggagctacccacaaagtgcttgagggccatagtattgttcataatgtgaaaacttcttttttttttttaaattnnnnnnnnnnnnnnnnnnnntttanccctttnttantacccannnttaanntnanccaccnanngannnttttttanttnggcctgtantnaaatggttanntnttcgnggnttttaaangtttttgnancatgnggnaaatcnttaatanaagncatngttntngnnccntttaaaantggntaattncncccntggnaacaangncttanaaccnttngcttaaaatttaaanggtanntnanaggctnggnnttccncntttnagggggtgggganatttt

SEQ ID NO: 17665 - DNA, 351 bp, Homo sapiens
  misc_feature (1)...(351): n = a,t,c or g
gctaggacatcccttctctctgactttcttagggatgaggttgacacacacacacacaccgcttggagacatgtctctaagtagacactgtgaggtgtgggtggccaaacagcctctgtgtgcacattgtcccagtgttgttaccaatagtgccccttccactcaccagcgcccgactgtgtgatcctggcgatctgacattgcccccttggtggtggtgcnaggtctngnnctgcnctngagtgcnttntantcgntagcttngatnggntantgtnnggtnnntnatgatgcnntgnngtnntcntntntnannnngnnnnttncncctnnncnntncnntcttntgga

SEQ ID NO: 17666 - DNA, 402 bp, Homo sapiens
  misc_feature (1)...(402): n = a,t,c or g
gagaaagactaattttgtgtgaagagtacaatgcataattggaaatgaacccaaagatgtacagcaaactgctgagaaatgggaagggtatgaactaaggcagtaagcaggcatagaacaatctgacatataaaataaatagggcacaacagttgctttgatggagtggtgaaagagataggaggtgagaaagggcataagcaagatttgatcattgactatgcgagggtgacaaggaaaaagaggggctgacctacatcagcaattcctgcttctggcatatagatggtatcacttctgttgcgaanactcatggacagtanncancatgctgtatatatttctagcatgtgaaaccgaagtagggccntnggaaaaaatccctncgntcctactttttac

SEQ ID NO: 17667 - DNA, 581 bp, Homo sapiens
gtacaacccctggatggacatcaggcaacgggaagacgtccaagccttaaacatcagtgtgccgtatggtccaattcctgtggactttcagcggaaaatccgccagagctactttgcctctgtgtcatatttggatacacaggtcggccgcctcttgagtgctttggacgatcttcagctggccaacagcaccatcattgcatttacctcggatcatgggtgggctctaggtgaacatggagaatgggccaaatacagcaattttgatgttgctacccatgttcccctgatattctatgttcctggaaggacggcttcacttccggaggcaggcgagaagcttttcccttacctcgacccttttgattccgcctcacagttgatggagccaggcaggcaatccatggaccttgtggaacttgtgtctctttttcccacgctggctggacttgcaggactgcaggttccacctcgctgccccgttccttcatttcacgttgagctgtgcagagaaggcaagaaccttctgaagcattttcgattccgtgacttggaagaggatccgtacctccctggtaatc

SEQ ID NO: 17668 - DNA, 421 bp, Homo sapiens
  misc_feature (1)...(421): n = a,t,c or g
tntgnnaccctttatgacccgattacgaatttaatacgactcactatagggaatttggccctcgaggccaagaattcggcacgaggctgattaatggtgatcaaggtaggaaaagttgctgttctattttctgaactctttctatactttaagatactctatttttaaaacactatctgcaaactcaggacactttaacagggcagaatactctaaaaacttgataaaattaaatatagatttaatttatgaaccttccatcatgatgtttgtgtattgcttctttttggatcctcattctcacccatttggctaatccaggaatattgttatcccttcccattatattgaagttgagaaatgtgacagaggcntttaaagtatggnctttnctttttcttttnctttttctttttttctt

SEQ ID NO: 17669 - DNA, 464 bp, Homo sapiens
  misc_feature (1)...(464): n = a,t,c or g
ttggncnncnnnttgctnancagatncccngatnaacnncncgtncggcctncgttcgaggncgcatgngcggacgcgtgggaacgagaagagaaactagaagatcttaagctgctttttgtacacgtgcatcatcttatagatgaataccgaccccaccaagcaagagagaccttgagagtcatgatggaggtccagaaacgtcatcggcttgaatcagctgagagatttcaaaagcacctggaacgagtaattgaaatgattcagaattgcttggcttctttgcctgatgatttgcctcattcagaagcaggaatgagagtagaaactgaaccaatggatgctgatgatagcaacaattgtctggacagaatgaacatcaaagagaaaattcaggtcataggagagatcagattatagagaaagatgctgccttgtgtgtcctaattgatgagatgaatgaa

SEQ ID NO: 17670 - DNA, 378 bp, Homo sapiens
gaggcagtctcagttcaggctcccgcaggagctgcctttggtagtacaagttgacatggaaagagaacaatgttctcactgacataggggattaaaccccaactcctggctcttaacgtaagttttttcttccttttgacttgtgctcctctctctttccccctccaggtacaggctgagaggctgagaaatcatcccctgaataactttttcctctcgattcccatccccaatttaatattaaattaacaggcaagccggcccccacctctccctgggggtctcagggagaacctttcacggcaccctttccctaccttttccttctttaatctcctggtttaccattgatgacttcgcctctgcatctactgactt

SEQ ID NO: 17671 - DNA, 382 bp, Homo sapiens
aacaaggccggaaaacttcctaggagagattgagatgtggaatgaggctgagaagcaactgcagaacagcttgatggactttggagaaccgtggaaaatgaacccaggagatggagcattttatggccctaaaattgacataaaaatcaaggatgctattggcagataccatcaatgtgctacaattcagctggacttccaactgcctattagatttaatctcacatatgttagtaaggatggggatgataagaagagacctgtgatcattcatcgagccattttgggatcagtggaaagaatgatagccattctttcagaaaactatggcggaaaatggctttctggctatctcctcgtcaggtgatggcatccctgtggg

SEQ ID NO: 17672 - DNA, 474 bp, Homo sapiens
  misc_feature (1)...(474): n = a,t,c or g
tttggnnanntgganaccctatgacatgattacgaatttaatacgactcactatagggaatttggccctcgaggccaagaattcggcacgagccatgtcgatgcagtgaactttctaggtgtacgagagtgcttttcattgggatgaatacacatttcaaacttaacctcctctctttgcaaactctttcctcttcaggcttctctaagaatctagtgcctccatccatcaagccagaaatcaacgagttctccctatgtcatctcctccctttttcacttcatccatctccaaactatccctccccttgtcagccccacacagacttttttaggatttttttttgttttgattgttggaataccctactaatttgttcttaacagtcatccattctttacctagcataaatcaaggcctgttacttcactggttcagactttccaaggctgtccagtgcacttagaataaaat

SEQ ID NO: 17673 - DNA, 464 bp, Homo sapiens
cttgacatgattacgaatttaatacgactcactatagggaatttggccctcgaggccaagaattcggcacgagaattatcttaattatctaattagttgaatatgttaaaaggaatcttccagaattttttgacttattaagtgattgccccaaatcagcttagagatattatcaagtattttgctagtaagttatgtaaactaattaatagaaaatacatgaaataatcttattttctcttagttttatagatggtatggaaaaaggtacagaattgtcaggtaggatatttattattattttttccatttaactcatcaaaatgtattgaatgtttattatatgccaggagcaggtctaggtgctggagatagagcagtgaacaacacaaaatttctgccttcatggaatttacattttagtggaagagacagaatataagcaaataagcatgtccgtatat

SEQ ID NO: 17674 - DNA, 541 bp, Homo sapiens
  misc_feature (1)...(541): n = a,t,c or g
ggcaattaaattgtcagtcacttcttcaaaaccttacagtccttcctaagttactcttcatgagatttcatccatttactaatactgtatttttggtggactaggcttgcctatgtgcttatgtgtagctttttactttttatggtgctgattaatggtgatcaaggtaggaaaagttgctgttctattttctgaactctttctatactttaagatactctatttttaaaacactatctgcaaactcaggacactttaacagggcagaatactctaaaaacttgataaaattaaatatagatttaatttatgaaccttccatcatgatgtttgtgtattgcttctttttggatcctcattctcacccatttggctaatccaggaatattgttatcccttcccattatattgaagttgagaaatgtgacagaggcatttagagtatggactttcntttcnttntctttttcnttttttctttttgagatggagtcacactctccangctggantgcatggcacaatctcggccacggaattt

SEQ ID NO: 17675 - DNA, 322 bp, Homo sapiens
  misc_feature (1)...(322): n = a,t,c or g
tccacctgcatttttaatgaaatatcttccctttaaaaatctgttttagatcttcaagttatagtttttttttttttnnaaanaaagnntcgttgggtnncccatgctgnagggcaaggncnctntntnggntnattgaanccaccgcntcnngggttaaagcgattntgcagtntnaccctccngagaannnggggncnacccggccgnnanttcnanannnntnaatngaanatccngaaaaaccccgnaggttnnnttaaanngggcatnggncccnatctcaatttcttnaattaanacanggtttggccttctttta

SEQ ID NO: 17676 - DNA, 349 bp, Homo sapiens
  misc_feature (1)...(349): n = a,t,c or g
gatggcagagatgctgacagggaaaactctgttcaaggggaaagattacctggaccagctgacccagatcctgaaagtgaccggggtgcctggcacggagtttgtgcagaagctgaacgacaaagcggccaaatcctacatccagtccctgccacagacccccaggaaggatttcactcagctgttcccacgggccagcccccaggctgcggacctgctggagaagatgctggagctagacgtggacaagcgcctgacggccgcgcaggccctcacccatcccttctttgaacccttccgggaccctgaggaanatacggangcccagcagccgtttgatgattcctta

SEQ ID NO: 17677 - DNA, 519 bp, Homo sapiens
  misc_feature (1)...(519): n = a,t,c or g
gttttcttaattctgaaagtgaatctactgttgacattaaacttgtatttgcttattggtgtgtagtttgtaacctgacaccatcacaattttttgggagtagctttgtaggaatccaggtagttatttgaggcaggattactctcaatgatctcctcctgataaggacataagatactgccatgttctggagaacaccttattttggaaggtgcccccaaagtattagatagtggaggtgacagcaaaagcggcaaaatggggtttcatcgcagaatctacttactcagttcttttacacaaaaaagtttctcctatatttagaaaagtgtcaaaagaggccaggcacggtggctcacgcctgtaatcccagcactttggagggtagaggcgggcagatcacctgaggcaggagttcaagaccagcctggccaacatggtgaaaccccatntttactaaaaatccaaaaattantnngcctggngnnngnccntnaaatccantttttngnaaggtta

SEQ ID NO: 17678 - DNA, 382 bp, Homo sapiens
ggaaggaactcaaggtggctggagatggctgctgctcaccctcctagcctgctctgccactgggacggctcctgcttttggggctcttgatcagtgtgctaacctcactgcctcatggcatcatccattctctctgcccaagttgctctgtatgtgttcgtcagtgttcatgcgaattcttgcttgaggaaacttcggttgcagattgaagcatttcaggttgtgcattttgtgtgatgcatgtagtagcctttcctgatgacagaacacagatctcttgttcgcacaatctacactgccttaccttcacttaaaccacacacacaaggtgctcagacatgaaatgtacatggcgtaccgtacacagagggacttgagccag

SEQ ID NO: 17679 - DNA, 332 bp, Homo sapiens
cctggtcatacaccagtactaccaaggacagcttttttcctgcaagatctgttacctaaagcaataaaaaatggccagaggatcagtgtccgatgaggaaatgatggagctcagagaagcttttgccaaagttgatactgatggcaatggatacatcagcttcaatgagttgaatgacttgttcaaggctgcttgcttgcctttgcctgggtatagagtacgagaaattacagaaaacctgatggctacaggtgatctggaccaagatggaaggatcagctttgatgagtttatcaagattttccatggcctaaaaagcacagatgttgcca

SEQ ID NO: 17680 - DNA, 402 bp, Homo sapiens
gagttcactgggtggcttttgaagaacgtgccacaatcagagaaggtctgagctgggaaatgcaacagaggccttctcctccttgaccagtggggaaacagaggctcttaaaactggcatagatccagcttcctgcccctagtctctgtctttcccattccatcaggaccagatctcagaataggggattggcattttcatgctggggagctgggtatcattttcttttcagagacttagtagaaaataaaaggatccctgagaaattctttatgtgcaggtgcttgtcgatggtaggggtgacctcaggaccgcactgtctgcccatgaccaaggagtgagactgcttggacattgtccttgtgtcccccctgggggtctggatcaaagcccaccctgaag

SEQ ID NO: 17681 - DNA, 389 bp, Homo sapiens
tctacacatggcaaaactattaacacatctgaaaggtggtgccccatctggggctgtggagaaatgggttttgaaagcctccagcaataacacttccagacttaggagtaggataacattttcttgtaaatcagctgcttgaaatttggattatattttcatttgggaataatatgaataaccaaatgccaatagctgggtgggtaccatcttttatgagatgaagtatcataaaaccattaagcgttttgtcgacgcggccgcgaattccagatctatgaatcgtagatactgaaaaaccccgcaagttcacttcaactgtgcatcgtgcaccatctcaatttctttcatttatacatcgttttgccttcttttatgtaactatactc

SEQ ID NO: 17682 - DNA, 382 bp, Homo sapiens
catcctttcactgaaattgagaggtactcattggcaacttgatatggagaatttggggcaaattccttttttaactctagacatcaacaaacaaaaatggctgcgagaaattgtggggttttttgtttgttttttgttttatgacacaaagtagttaagagcaaggcttggattagtttcctgtgaaatggttggaggaagtagaaaatatgtaagtgaatattatctctggatttatggctgcactcattgtcaatttttgagctctcattgaaagagatggcagaaagagttagcaggatttcatctcctgtcttaaggatttaacaaaaagaaatgccaactccatatttgctgagctataacaggtggttgattcttc

SEQ ID NO: 17683 - DNA, 356 bp, Homo sapiens
ggtgttgtgtgaaatcaaagaaaaaacaggatacaaagttctgttcggcacagagtactctcctctgcttctacctccgggaaccccgttaccccccagcccacacaccaccaccccagttttgggtggggagaaggcaaaggctgggctagctggatgatgcctttttatctggttaaagaagagtcaccaggcaggaaatgatggtagagagatggaagactacaaaacccttgccaaattctgcactttttgttagtttgtttgcactgcggaaggatgaagacagtgagacagttactgagaccatcggctgctgtggacatcacagtgggagcagtctactgggtgggagg

SEQ ID NO: 17684 - DNA, 481 bp, Homo sapiens
  misc_feature (1)...(481): n = a,t,c or g
tttgnnancagctatgacatgattacgaatttaatacgactcactatagggaatttggccctcgaggccaagaattcggcacgagagaaagaacattgaaatcaaagtttactaaaccagtaaccttgtggcaacttcctggtgagaacctcattcttcaggaatgtgaaaagcataaaattaaaagagtcgaaagtttgtagattgcctaaacataatttaccacaggcagacaacgaacaagacaaaacatgtcacttaatattatttgcaagtcaagatgtcatcctggtgccagttgcatcatggtttcaggaagagatttccaggtagaatggcaatgacctatgccttctattgctacgccatctggggnggttttgcccatggaancattggtatccncggcttgaacttggacgngtttgttaacaggtttcnccatccccatagnggcaatggntcctntanaanaattccg

SEQ ID NO: 17685 - DNA, 465 bp, Homo sapiens
  misc_feature (1)...(465): n = a,t,c or g
ttgganacccttggnacacnattacgaatttaatacgactcactatagggaatttggccctcgaggccaagaattcggcacgagctggaagatgaaaaataattggatgagcaggaaccaactcagcacactgaagaaagctgaattttaaactggtagtggagagagccaagaacacacctgtcaccacttaagaatccttaaatagttcaggaactgataatttcacttaccttcagaaataaatgtgaagggatggggttaaaataaggcaaatcagttgaaggctgtctaaaagccaatatgatttttaaataccctccctcacaatatgctatggggtaaaagataacttgccaatcctggtagaaaacttgaggctcattgtcagaagatggggaatgccatacatggctgaagatatgaacactgtttctgaaagcaaggaaactaagagaatactaa

SEQ ID NO: 17686 - DNA, 309 bp, Homo sapiens
gttttagttttcattttatcaagtattattccaaggggtccagaagatcttttttatgtaggatatattctagctatactaactttttttctttttttcttttttttgttgggagacagagtcttgctctgtcatccatgctgaagtgcaatgaagcgatctcggcccactccaacctccgcctcccggttgaagagattctcgtgccttagcctcccgagtagctgggactgcaggcatgggccaccacaccaggctaattttttgtattttagtggagacggggtttcaccgtgttgcccagggtgg

SEQ ID NO: 17687 - DNA, 441 bp, Homo sapiens
tatgacatgattacgaatttaatacgactcactatagggaatttggccctcgaggccaagaattcggcacgaggcaggactagggcccaggaggctaaggctgggagagaaagggtgccaacaggtcccttgggaatgagttggctctggacgtttctgccctgttccccgatcagagctcctctgcaggaaacaggcaggatgcccctcccaacccctcagtccctacgtcaagcggagtggataaggctgagatgagtgctgggagtggtggacattcctgctcgtgcaaagatggccactttccccgcagctgcagggcctcgcgctcggccctcgccaggccagccccactccttgtaccaagtgtgaactggggtcattcggtctgtgatctcgttgcactgctccaagtctggctgtgtccaggcggtccatgtt

SEQ ID NO: 17688 - DNA, 336 bp, Homo sapiens
ggtcgtttgttttggaattggactattcaaaattttttttttccaccactgtcttatggtgctgaggactcttcatattctcttattttaacctttccagaagatatacttacatatttgctttccctgaatatattttaatccaaggcttttttgtcattaggaatattccaatttctatattacattatttaactggccagttcatacccatttctgttcagatttagtttgtttgtttattcatttatttttaggaggttatatagaaatggatatttgttaaaaaattaagggttgggcatggtggctaaagcctgtaattccagtactttg

SEQ ID NO: 17689 - DNA, 414 bp, Homo sapiens
gatcagggaggctgtggagttgtgtgtgatatggagtgtgtatcatgagcctgtggtgatggctgatagcgcccgtttccaccttagggccctgcatggtttctagaaatgctccccagggatggttgtggaaggagggtggagtccagtggctcgtccagtgtggtgttgtcaagtcccctctcccacacaacttctctctctatcctggccacgtcccctgccttcctaggattggatattgggccccattggcactattaatcctagcaggcacggatgggtcttggcaaggcttctgcatcccctcttctgcaggtggcttctacactttcttaccatttcttctgccttccgtggagtccacttctggcagtgggtggcctcattgctgtggtttcttcggcatgccac

SEQ ID NO: 17690 - DNA, 446 bp, Homo sapiens
  misc_feature (1)...(446): n = a,t,c or g
anatcnntatgacatgattacgaatttaatacgactcactatagggaatttggccctcgaggccaagaattcggcacgaggagccattgttacgagcagcaccgcccagcccttccttgcctactgtcagtggctttgccaagatgggaggaggccagtgcccacttgcccaccgacctgagcctgagtaagtggctgtcacctgagcctgttctttctgtcctggtgtggtgctgctccctcacctccaaaagagcaaaagtactttcaccacagtcaacccaaaagggaaagaatttctgtaattgccaacccactttgtagaagaggcatgagcccttgaatttcaggcaccttttatctaatgagagtttttacagctcatcattcaaataacgcacaaaaaacaaaagccgctatgaccggcgttgctctactttgaaaga

SEQ ID NO: 17691 - DNA, 397 bp, Homo sapiens
gaaaatcgggtctacctgattcctaggatttcccaccctgctttgcatcaggagctcgatcaatatcacacaagctgcctcctgcatagtcacgtcgctggtgcagaaggagcaaggtggccgtgtggcgaggcactgtggctccggcacgtccagctctggctccactgttaaccggttgtgtggccttgggcaggtcacgtgctctcagtggcagaggcccaggacctctgccaggcccacctcggctcagacccgacctgcccagtggaatgaatggaggaggtagagcagtttcccctggggctgaggacacttgtgtcaccagatgccttcgctgatatgcctggagatgggaccaggccagagttgagattcacagatggaccagcctctg

SEQ ID NO: 17692 - DNA, 327 bp, Homo sapiens
atgacacacttgttcccacgtcaagtcacatacaattctgcaatgaggaatgttcaaaaccatgaaatattccaagttgtctcacaattccagaacttgacattataactacccttatttgaagctcggaagtattttataacaaagtaaaaaatccttccctgatgttttgtcttagtgaagtgactactaagcactagtgaaatgaattctttagttgaaagaaaaagaaaaaaaattcaatgagtcagcatctgtcatgccagaccatgctttgtctcccaccaccctacccagtacttttaccctctgaagtacctgagatgc

SEQ ID NO: 17693 - DNA, 462 bp, Homo sapiens
  misc_feature (1)...(462): n = a,t,c or g
cctgggctcaagccatcccccaaccttggcctctcgagtagatgggattataggcatgtgccacggtgcctgacttgagtttcttattctagaacacttggagcctgaactctgaccaggcccctcacttgagcctttgctttctgctccttgtaaactgccatattgggtgcacttgccctgccacagtaatgctatatatttctgagcattgtttttctctagataattttatatttttgagtataccccacttccaagtgttttttgttttgttttgctttgtttttgttgtgttgttttgagacagggtctcactgtgtcccccaggctggagtgcagtggcacaatgacgactcactgcagcctcaacctcctggggccaagtgatcctcccacctcaccttttaagtggtgggacccncagaaagtcaccaccatgccngggtttttttttttttt

SEQ ID NO: 17694 - DNA, 379 bp, Homo sapiens
  misc_feature (1)...(379): n = a,t,c or g
gggaggccatggccttcgccagcatctataagctggacaaccttgtggccattctagacatcaatcgcctgggccagagtgacccggccccactgcagcaccagatggacatctaccagaagcggtgcgaggccttcggttggcatgccatcatcgtggatggacacagcgtggaggagctgtgcaaggcctttggccaggccaagcaccagccaacagccatcattgccaagaccttcaagggccgagggatcacgggggtagaagataaggagtcttggtatgggaagcccctccccaaaaacatggctgagcagatcatccaggagatctacagccanatccagagcataaagaagatcctggnaacccctccaca

SEQ ID NO: 17695 - DNA, 378 bp, Homo sapiens
gtggagctgagcttgccttcccgggctgcggcgctgtccttcgtgtcgctggtggacggctatttccgcctgacggccgactccagccactacctgtgccacgaggtggctcccccacggctggtgatgagcatccgggatgggatccacggacccctgctagatggggtttcatcagattggccaacctggtcttgaactcctgacctcaggtgatccacccgcctcggcctcccaaagtgctggtattacaggcatgagccaccacgcccggccatgactgtcattgtgtgttgaggttgtcattgcacagaactggtgattttcatgggactgtgtgttaccctgacgctggtgaccattcaggcgtatgttgga

SEQ ID NO: 17696 - DNA, 362 bp, Homo sapiens
gaacgcagaccagctggcctccaagctggaggagacgctgcccgtcatccgctcagtcagcgaacagttcaaggaccctgagcagacaactttcatctgcgtatgcattgctgagttcctgtccctgtatgagacagagaggctgatccaggagctggccaagtgcaagattgacacacacaatataattgtcaaccagctcgtcttccccgaccccgagaagccctgcaagatgtgtgaggcccgtcacaagatccaggccaagtatctggaccagatggaggacctgtatgaagacttccacatcgtgaagctgccgctgttaccccatgaggtgcggggggcagacaaggtcaacacct

SEQ ID NO: 17697 - DNA, 426 bp, Homo sapiens
  misc_feature (1)...(426): n = a,t,c or g
gggcgcagtggctcacgcctgtaatcgcagcactttgggaggccgaggcaggcggatcacgaggtcagtagttcgagaccagcctggccaacatggtgaaaccttgtctctactaaaaatacaaaaaaaaattagctgggcacagtggcgcacgcctgtagtcccagctactcgggaggctgaggcaggagaatggcttgaacctgcgaggcggaggttgcagtgagctaagatcatgccactggcactccagccttgagtgacagagcgaggctctgtatcaaaaaaaaaatttgcgggggggtgctcaatcttaactgcagaggatctacagatgaaaaaaaatntggggaaatgctttaaaaaaatacaaaatgtgcaactttcttanaaaattgttancgttaggtacttctanatatttta

SEQ ID NO: 17698 - DNA, 439 bp, Homo sapiens
  misc_feature (1)...(439): n = a,t,c or g
accgntttgacatnattacgaatttaatacgactcactatagggaatttggccctcgaggccaagaattcggcacgagggttcttgtcacatgaccaggaaaagttacgcacacagaccctttgaagggtgaggggttatggaatctattgggcaaaaaggaaaaagactctcagcaaagcaagatgagtttttatgaacaggcccccatctcacagattgaatcccaactcaccacccaggaacaggagaggccaggctcctagctgcaaagggtgagaacttcctgaggctccatcccctcctcccagtgcacaggctggtgggagactctccagggaccttcccccttatcttcctcctgcatcgatcattactatgttccagacactgcatcaacaactttatatgcagctttctttgccaaagaagtctcacca

SEQ ID NO: 17699 - DNA, 378 bp, Homo sapiens
cccccacaaaagccctgtaggtttaatttaatttagcaattccctctctacttttctaccaggttcctgttaccaatgcaattatttcgtggccttttgcctgaattattctaagctgcttctccagaggaaatgagtcagaagaaataggcttgatgtgcatttctgcctttggagacttctcttgatatggtgtaaatccgtaaggtttcattaatgccttgtctgcatattttttcaatctgcttttgataacaaggtctgtttctagggtacttcaaatttaaaaccgtagggtatgtgtaaaatatcaccactagaaaatggagagatgcaaatgggttcccccttctgtagtccctcctaatgtcagaatcc

SEQ ID NO: 17700 - DNA, 443 bp, Homo sapiens
cgatgcagagacctatggagaagagaatgatgaacagggaaattattctaaaagaaagattgtctctaactgggatcgatatcaagatattgaaaaagaggtcaataatgaaagtggagagtcacagaggggaacagatttcagtgtcctccttagctctgcaggggactcattctcacagttccggtttgctgaggagaaagaatgggatagtgaagcttcttgtccaaaacagaattcagcattttatgtggatagtgagttattggttcgagcccttcaagagctgcctctctgcctccgactcaacgttgctgccgaactggtccagggtacagttcctttagaggttcctcaggtgaaaccaaagagaactgatgatggcaagggattagggatgcagttaaaggggcccttggggcctggaggaagggggcccatct

SEQ ID NO: 17701 - DNA, 364 bp, Homo sapiens
  misc_feature (1)...(364): n = a,t,c or g
gtgtattacctcaatccttgtaacaatcctatgaggtaggtagtattctcatttaaagatggaagaatttgaggctgagagatgaattagctttccacagccatagagctagttggttaccagagacgtagatcagtgtgattctaataactgtactttcccccatacctcactacacatgctactgtgacaggccaaaactaggacatgggcttattatgccacaaactgcctgtaagaatgtaatgacgactgagtnngtatgctcttcaccacctnccacttatcagnctnngantgggananngacagncnccttcagngcaactgttnnatntcnnangnnnaccnnngncntgnagta

SEQ ID NO: 17702 - DNA, 406 bp, Homo sapiens
  misc_feature (1)...(406): n = a,t,c or g
ggtatactacaattattcgggccaggtgaaatgcctgaatatttcagagacagcaactagcagtctgggaacactgggttggagctatcaggcctgcacagaagtagtcatgcccttttgtactaatggtgtcgatgacatgtttgaacctcactcatggaacttaaaggaactttctgatgactgttttcaacagtggggtgtgagaccaaggccctcctggatcactactatgtatggaggcaaaaacattagttcacacacaaacattgttttcagcaatggtgaactaaacccctggtcaggaggtggagtaactaaggatatcacagacactctggttgcagtcaccatctcaganggggcccaccacttanatctccgcaccaagaatgccttggatcct

SEQ ID NO: 17703 - DNA, 397 bp, Homo sapiens
cccacgcgtccggttgatgttagtgaagattcacctcctcccctacctgaaagaactcctgaatcgtttgtgttagcaagtgaacataatacacctgtaagatcggaatggagtgaacttcaaagtcaggaacgatctgaacaaaaaaagtctgaaggcttgataacctctgaaaatgagaaatgtgatcatccagcgggaggtattcactatgaaatgtgcatagaatgtccacctactttcagtgacaagagagaacaaatatcagaaaatccaacagaagccacagatattggttttggtaatcgatgtggaaaacccaaaggaccaagagatccaccttcagaatggacatgattcagggagctagaagacactttaagttatactggaaaat

SEQ ID NO: 17704 - DNA, 597 bp, Homo sapiens
  misc_feature (1)...(597): n = a,t,c or g
aaccgttatgacatgattacgaatttaatacgactcactatagggaatttggccctcgaggccaagaattcggcacgagccaccatgcttggctaattttttgtattttggtagagacagagttttgccatgttggccaggctgttgtaggactttcttcttagttcaattaaaaatggggtccttgtcacacaaccaggaaagattaggctcgcggacacatagaagggtgaggggttatggaatctattgggcaaaaaggaaaaagactctcagcaaagcaagatgagtttttatgaacaggcccccatctcacagattgaatccccaggttaccaccctggtacgggagaggacaagctcctccctctgcaaacgggtaaacctcccgaggctccatcccctcctcccagtgcacaggctggtgggagactctccagggaccttcccccttatcttcctcctgcatcgatcattactatgttccagacactgcatcaacaactttatatgcagctttctttgccaagnaagtctcaccaaaaaaacttcttcgaagnatctgaacacncaaactcangngnctacatttacagg

SEQ ID NO: 17705 - DNA, 336 bp, Homo sapiens
ctcagactgaaacgacgttgtactacatctctgatcaaagaacaggagagttcccaggccagtacggaagaatgtgagaaaaataagcaggacacaattacaactaaaaaatatatctaagcatttgcaaaggcgacaataaattattgacgcttaacctttccagtttataagactggaatataatttcaaaccacacattagtacttatgttgcacaatgagaaaagaaattagtttcaaatttacctcagcgtttgtgtatcgggcaaaaatcgttttgcccgattccgtattggtatacttttgcttcagttgcatatcttaaaactaaatg

SEQ ID NO: 17706 - DNA, 358 bp, Homo sapiens
gcattccctaattctacagaagagatcaaggcctactgtgacatggaagctggaggaggcgggtggacaattattcagcgacgtgaggatggcagcgttgattttcagaggacttggaaagaatataaagtgggatttggtaacccttcaggagaatattggctgggaaatgagtttgtttcgcaactgactaatcagcaaacgctatgtgcttaaaatacaccttaaagactgggaagggaatgaggcttactcattgtatgaacatttctatctctcaagtgaagaactcaattataggattcaccttaaaggacttacagggacagccggcaaaataagcagcatcagccaaccc

SEQ ID NO: 17707 - DNA, 439 bp, Homo sapiens
accgtttgacatgattacgaatttaatacgactcctatagggaatttggccctcgaggccaagaattcggcacgagaactggagaaaaattacaataaataaaagattgccaaaagcaccaagtaaatgtattaaagaatcctagatcaacctagaactttcatattaaaagagaaaatacagatacacgttgagcagaaatgacttttagaagtttttagtagaactaataacccttttttatgacgtgttttgggataggattgaggttgaaattgtctctttatttgcaaacaactcagtattagaaagattctttaagtatttattagtcccagtaaccaactgagaaatagagtcgttgaagtgtatgtataaaaataaaatggtgaaagctaagatttatgcgctcttaccattttgatcttgttttcagtga

SEQ ID NO: 17708 - DNA, 190 bp, Homo sapiens
gcataactgtaattatccggtggggcttggtttgtgctgttttccacctcttcgtcatattttggaaaactgaggccaaaagcaaagttcattttcccctttaaaagcttctttaaaaaaatgatgaaagagctttatcaatgttttgaataacccagaaaatatttcttattgttgataatctgcagtt

SEQ ID NO: 17709 - DNA, 499 bp, Homo sapiens
  misc_feature (1)...(499): n = a,t,c or g
tttggaaaccccnttttncatgaccacgaatttaatacgactcactatagggaatttggccctcgaggccaagaattcggcacgaggtatgatgcttacctggctcccaataacctgaagcctgtggtggcagagttctatgggtcaaaagaggatccacagactttctattatgctgttgctgtggtgaagaaggatagtggcttccagatgaaccagcttcgaggcaagaagtcctgccacacgggtctaggcaggtccgctgggtggaacatccccataggcttactttactgtgacttacctgagccacgtaaacctcttgagaaagcagtggccaatttcttctcgggcagctgtgccccttgtgcggatgggacggacttcccccagctgtgtcaactgtgtccagggtgtggctgctccacccttaaccaatacttcggctactcgggagccttcaagtgtctgaaggatggtgctggggatgtggcctttg

SEQ ID NO: 17710 - DNA, 975 bp, Homo sapiens
ggccgagcgcctagaggctgaccgtatggctgcactgcgggctaaggaggagctggagagacaggcggtggatcaggtaaagagccaggagcagctggctgcggagcttgcagaatacactgccaagattgccctcctggaagaggcgcggaggcgcaaggaggatgaagttgaagagtggcagcacagggccaaagaagcccaggatgacctggtgaagaccaaggaggagctgcacctggtgatgacagcacccccgcccccaccaccccccgtgtacgagccggtgagctaccatgtccaggagagcttgcaggatgagggcgcagagcccacgggctacagcgcggagctgtctagtgagggcatccgggatgaccgcaatgaggagaagcgcatcactgaggcagagaagaacgagcgtgtgcagcggtagctgctgacgctgagcagcgagctgtcccagcccgagatgagaataagaggacccacaatgacatcatccacaacgagaacatgaggcaaggccgggacaagtacaagacgctgcggcagatccggcagggcaacaccaagcagcgcatcgacgagttcgaggccctgtaacagccaggccaggaccaagggcagaggggtgctcatagcgggcgctgccagccccgccacgcttgtgtctttagtgctccaagtctaggaactccctcagatcccagttcctttagaaagcagttacccaacagaaacattctgggctgggaaccagggaggcgccctggtttgttttccccagttgtaatagtgccaagcaggcctgattctcgcgattattctcgaatcacctcctgtgttgtgctgggagcaggactgattgaattacggaaaatgcctgtaaagtctgagtaagaaacttcatgctggcctgtgtgatacaagagtcagcatcattaaaaaatgagctcaaatggattttttaat

SEQ ID NO: 17711 - DNA, 392 bp, Homo sapiens
ggaactggaccctcgaccagcatcacattgccaatctgtgtgactccctcaaccacttccttactcagactggtcacgtgccccctcaagggggtacccaccgcccaccagcccctgcccgtattgctgactcctgtgccctcaccagtggcaaacaggagtcagccatgagccaagtggtgaggactgacagcttctgcagaaagccttcatgcctgcaggagctacagaacagggcagggaagagagaaggaggatgggagcaaggtgaactcttatgggcacccacaagctccccacctctaccctggcccatcaccaatgtacccaatccccacccaggactcagcaggatacaatcgcccagcacaccatatggtccctcggcatca

SEQ ID NO: 17712 - DNA, 430 bp, Homo sapiens
cggacgcgtgggaaataaaattagaactgcgttttaagttctaatttgcatttattaatttgtccaaaagcaagaactcttggaaatccttgaaaatataagctggaatgttttacttagccatgcaagtcatttatgtatacatccagccagctggaaatctgagaagtaaagaggtaggactggaaggaaggagaaagcttgagtctttaaggctagagcccagctgtgctgcctgccatcttctcaggaatggcagtgcgtattttctggctgaaaagtaaagcatgtatccaccgctttctcatagcctcgaaacatggagaaaagcaacttgcttttgccttggcaagcatgctaacctaagttaattcaagtttttttttaacttaccctttccttcactggaagatttttccataagagaatt

SEQ ID NO: 17713 - DNA, 379 bp, Homo sapiens
tttctcaagagaagcatgatgtggagctaaaccttaaagccagggcatcattccacaatggtgaagggctttcttcttccctaaccaaagagaggagatatcttaactctaaaactattaaattttccagaatatgacaactacttacagtattagataaaacaacttttctttctttttaaacacctgcaatagtctttcaaaaattcagtttggttaaaaaagtaaacaaaaattactatcctgcatttggattttcataagttaaatccatggtctttttaatataaaaagtaattgtttcatagttttagtgttcaatgaactctagtagtcctatttgaaccatatcttgatatagtaaatctaattagaatgc

SEQ ID NO: 17714 - DNA, 346 bp, Homo sapiens
gccaggagacaaaaatcaaggaaaccagtttgctaaagatgaggcattccagtaaggactctacacatacacagtggacagtgaacaacacagccagactccctgtgaagcctcgtaaatcttaaaaccctctcccatcattctgcatgagaaaaattatgcttctctagagaacaaaagggtctggcttaagtaagtcaagcagccttctaggtctttcctactcattcagcacctgtttcaaaatcacaccctgaataattttgcaatcttagtcagttctgtaagtaatctaggaaaacataattaggacccactgcctgaaaccaaccaacttttaccataa

SEQ ID NO: 17715 - DNA, 424 bp, Homo sapiens
aaaaataatttgttataaaaattctgtttgcaaattaaactggaaaagtatccagagtctcaaaaggcaatgatttgtgagataatatggcatgcccggagccctgctcatcaatgaaaaacccatatgtaataatcgaattcatttaacatgaatcttgagtacgtggaccattgcttgcatgttaactttttgttttgttttgttttgttttgttttgttttgcatttttaactccagatatcctaaagctcaattgtttggtctctggttttcatccttagagaagccatggagaacagacttgaaaagtttaggaaatcataatgtggcagaggtggtgggaagaagaaagttgagctttttccccttgagaaacttctgcatttagtttctatctttccaggcaaaacaaatgggtatt

SEQ ID NO: 17716 - DNA, 361 bp, Homo sapiens
gcacaatgaaattatctgttagattgacagacatttaggttatttacagtttttgttactatagatcatactgctatgatagtcttatatgtctcacagctgcacaattccagtttctccacatctttgccaacacttgttatttcctgtggtttttaaaacagtagccatcccaacgggtgtgaagtggtatctgtgatttgttttttgaaaggtctcccattactgatttttgtcttcttgatctattgagaattgtgtaaaaatttccactgcgatggtggatttaaaaatttccactgcgatggtggatttgaaaatttctccacataggctgggtgcggtggctcacgcctataat

SEQ ID NO: 17717 - DNA, 915 bp, Homo sapiens
gcctgaccgaccttcagcagggctgtggctaccatgttctctcgcgcgggtgtcgctgggctgtcggcctggaccttgcagccgcaatggattcaagttcgaaatatggcaactttgaaagatatcaccaggagactaaagtccatcaaaaacatccagaaaattaccaagtctatgaaaatggtagcggcagcaaaatatgcccgagctgagagagagctgaaaccagctcgaatatatggattgggatctttagctctgtatgaaaaagctgatatcaaggggcctgaagacaagtggtgctattcattcctccattgctaaacagatgaaaagcgaggttgctacactaacagcagctgggaaagaagttatgcttgttggaattggggacaaactcagaggcatactttataggactcattctgaccagtttctggtggcattcaaagaagtgggaagaaagccccccacttttggagatgcgtctgtcattgcccttgaattactaaattctggatatgaatttgatgaaggctccatcatctttaataaattcaggtctgtcatctcctataagacagaagaaaagcccatcttttcccttaataccgttgcaagtgctgacagcatgagtatctatgacgatattgatgctgacgtgctgcaaaattaccaagaatacaatctggccaacatcatctactactctctgaaggagtccaccactagtgagcagagtgccaggatgacagccatggacaatgccagcaagaatgcttctgagatgattgacaaattgacattgacattcaaccgtacccgccaagctgtcatcacaaaagagttgattgaaattatctctggtgctgcagctctggattaatgaaaatcaagttccatcctcagacaaga

SEQ ID NO: 17718 - DNA, 302 bp, Homo sapiens
  misc_feature (1)...(302): n = a,t,c or g
caaactggaaactgtggaataagttttaagaatacatttcaaccaaatgtaaataaatttataaacatattctagactaatttaaatagaaattcagaatgaaataattctttgaaataaagactacggaacttaaaactatcagaagcacttaatgttcttaatgtaaaaattagggctttgtaggcttcttataaaatcttacctcaggccacgcagtggctcacgcttgtaatcncagcactttggnaggccgatgtgggcagatnacctgnagatcanggtntgggaccaagtcaggc

SEQ ID NO: 17719 - DNA, 352 bp, Homo sapiens
ggaacctcttcagaaagtgtgctttatgctgaaacagaatactgttaaaggaaaaaaaagaggggggaagatcaggtcatactatctactctcctcatctctaacagctcaggatctcttagcattttaattagatgtaattgtttgtctttaactgtcaaaaagtttggttctgtgtctgtgttttaataagacgagaggacgagcgattgaggtgtatggagagaaaacagacctaatgctccttgttcctagagtagagtggagggagggtggcctaagagttgagctctcggaactgcatgctgctggacagtatcactgtctttcctagatggcagtcactgaatta

SEQ ID NO: 17720 - DNA, 386 bp, Homo sapiens
ggaaaagggggccttcagtctaatgcctcacttagcctctgccattgctgtcagttgcaaccagtaatccaaaagcagagcccaaaaggtgaactcaagggtaacctgtattaaatgtgggacctggaggaactagattcaagctggagagaccatcaatatccactttcttgtttttcccagattcacactgaacttttctattctgtccaacacacaggaccctggacttgctgatggctcgagcacatttgccgacctctgcaggttttctgctgactcttctctttatgtctctctcaaaagagcaagggcctcccgtgcgtgaacaaaatacctatgtgcaaaggaatgaggatgctggcaggagaatgccctgcctggca

SEQ ID NO: 17721 - DNA, 569 bp, Homo sapiens
  misc_feature (1)...(569): n = a,t,c or g
ttggaaccccttgacatgattacgaatttaatacgtttgactancgggaatttggccctngaggccaagaattcggcacgagtgtacatttatgagccagtatcttaaattagtagtagatactgctatggtcccgatagtgggaaagttccaaatcaagaagtttaacttgaatttgtgtacctcctgtctcccattttgtgtaatggttagcatggcttgcattgggcacttattttgtttgattatgtatatgatcaaattgagtatccctggagggataaggaaaaggnnnnnnggcatcttctgtncattgaagtaatcgngcncaganaggncatgtaactgaacccgtacggtggtcatgatgggggancttatgactnttgactcantntttactatgctaaacttacccaatccncacctagatcatnangtggcttgcactgggatctttttgactttcaatgggcntattcgnataggtaaatgcntttttttactnnggaagggtttatnctgacagattcatnttaggtccgggagcattatttntncccnaaagg

SEQ ID NO: 17722 - DNA, 247 bp, Homo sapiens
gcaggaggtaagcaggaggatcccccagcccaaggctcacccccttgaatctctatcacttgccctggtgttctctgtggccttctgttttctctctcactgggctctgagccaaccaagggtgggcctggctacattccagggtctaccagtcttaactcaaggagcaaactgaatggctgcttggctaaggtaccagcctccctcttggtttagactcagtcaataattcaggaggtacatagtg

SEQ ID NO: 17723 - DNA, 437 bp, Homo sapiens
  misc_feature (1)...(437): n = a,t,c or g
ntttgganaaccgctatgacatgattacgaatttaatacgactcactatagggaatttggccctcgaggccaagaattcggcacgagagtgccttccataattatgacagttatactgtcggttttttttaaataaaagcagcatctgctaataaaacccaacagatactggaagttttgcatttatggtcaacacttaagggctttagaaaacagccgtcagccaaatgtaattgaataaagttgaagctaagatttagagatgaattaaatttaattaggggttgctaagaagcgagcactgaccagataagaatgctggttttcctaaatgcagtgaattgtgaccaagttataaatcaatgtcacttaaaggctgtggtagtactcctgcaaaattttatagctcagtttatccaaggtgtaactctaattcc

SEQ ID NO: 17724 - DNA, 368 bp, Homo sapiens
ggttgggcaaattactctatggcatgtgatagttaatggggtcagtggcttttaaagctcctggcactggttggcatttttctttggtcaaacttctacactcagctgccacccaggtttctacttgacattgttcacttagctttcctcatactaaaaagaaaagcagatttaacacaagctgaatggacttgcttgtgatccagaccggaacagatgaggcagtgcgagtataaactcagcttgtaaaagccaggctgtcacataaactgaagctgccttggccaggcccacagtaactgcaagttgatggcagaattgagagcagatcaagggcttaccttgctagttgtacttccttatgcatg

SEQ ID NO: 17725 - DNA, 328 bp, Homo sapiens
gcgtattctttgagtcaaacgtggtgacacacacctagctccaattactggaagaattaaggattgcttgaggctgagttcaataccagaaacatagcgagactctgtctctaaaaacttgtaacttttgactatcacaccttcagaagtctgtaaatatttaaacttcagttattctgcaaaaatatattatatgtctgctatagggcagataccgctttacacagatgtttgggatacttctatgaatataacagacccaaaacaacaaaatctaaaaacccttttcctatggaattagcgtgctattgaatgtacatgcactaaa

SEQ ID NO: 17726 - DNA, 332 bp, Homo sapiens
  misc_feature (1)...(332): n = a,t,c or g
attttttctgatttatgagggtttgaaagaaagaattcacctaaaagattccatttccagttttataatgtatttcaggttctgaataacaatatttttccaaattgaaagtaaatattccagaagttgatagcctggttaaaagttagatcctctattaccattctaagcacattcacttctatattgaagttttggtaaaaattcttttttcttttttaataaaaaattaggttattactttttttataaccagatttttaaagcactaggttttaaatcagtgggnatcataaaagccatatataaaagatcctttcttatagtaagac

SEQ ID NO: 17727 - DNA, 488 bp, Homo sapiens
  misc_feature (1)...(488): n = a,t,c or g
gaccgaggcggggatgtcctcggatgctcatcctctgtttcctaataaaaactggaagtactcagaaggctgaagcaggaggattgcttgagcctaggagtccaagcctacagcctgggcaacattgcaagaccctacctcttaaaaaaaaatgcaagcctggtctaaccctcaagtaggcagagcttggtccccgtggactcactcaatgattgtccatgtgcgactctgccattcccaagcacatagcctccccaggcctggaaggtcagctctgcctgggtggtgaattctccctgagcaccacgtacactcacgtgagagggctactgtccctgttgctgaccctcctcaacagggagaactgagagcagcaggtattcccacccaagtcccaactatgacccaagagtgggagacccanaagacaggcagttcaggaatctncatgatcancctggnttnncctttgaaaactcggatgccca

SEQ ID NO: 17728 - DNA, 360 bp, Homo sapiens
gcggcgcgcgcggggtgggtcatttaaaaataaagttcctttatatttctgtcccatcaggaaaactgaaggatatggggaatcattggttatcttccattgtgtttttctttatggacaggagctaatggaagtgacagtcatgttcaaaggaagcatttctagaaaaaaggagataatgtttttaaatttcattatcaaacttgggcaattctgtttgtgtaactccccgactagtggatgggagagtcccattgctaaaattcgtcgacgcggccgcgaattccagatctatgaatcgtagatactgaaaaaccccgcaagttcacttcaactgtgcatcgtgcaccatctcaattt

SEQ ID NO: 17729 - DNA, 336 bp, Homo sapiens
ggcatccaaagtcggactggaatacagaatatatgagagtgaattaaatattccatttatacatacttcactagatcgctaaacaaagagaatgtcaacctccagaaatagcctgttttgcaatgtttaatatttagtatctccaaagtctgctggaatggctgcatagcaaaagggcccaatttttgcttagagacttaaaaaaaaatgttttgggttattggtcagcggaggaattagttttccctaaatttaaaacagaaacacaaacaacccaaatatttatcaataggtgaatggataaacaaattgtggtctatatccatataatggaat

SEQ ID NO: 17730 - DNA, 427 bp, Homo sapiens
  misc_feature (1)...(427): n = a,t,c or g
gagagtgagaaactttctccctgaaggggctccctggacttttgctcttggcgagttgctggcagatactgacactagaaataagtgtcagagaggtctgatatcacttcagtttcagactgaccccagagcaacccttgaggacagcagtgtgtaagctcagaaaagattgttctaattttgatgaccctcatagttaaggcttgtaggggaactcttctttttcataaaaatccgtctgtgggtggtcactgtgttgagagatgagaatttatgggttgaagttgtttttatgatttcagaataagtgcttctacaacgggatattgggcttgggagtgtagacgttgtgggaccaggagctttgcaaacttcccttgttcccaatttcttggattttttttttncatcccttcattcagttgat

SEQ ID NO: 17731 - DNA, 273 bp, Homo sapiens
  misc_feature (1)...(273): n = a,t,c or g
gcacctccatcacattggaagtaaggtttcaacatatgaatctgaggggagacccaaacattgagaccatagcagtggttaattcatatttttagggacaaaagaaacacacctgcaaagctggacacgacctgtgggcttccaggttgcgatccctgctctatgctgattcttgtctgaagtccttaagctctcataaaggaaaatgatagtctaaatgctaaattcatggttctcanactggctggatggggtatcacccctgcagcttta

SEQ ID NO: 17732 - DNA, 456 bp, Homo sapiens
  misc_feature (1)...(456): n = a,t,c or g
tttgaaancntttatgaccngattacgaatttaataccgactcactatagggaatttggccctcgaggccaagaattcggcacgagaaatttaattaggggttgctaagaagcgagcactgaccagataagaatgctggttttcctaaatgcagtgaattgtgaccaagttataaatcaatgtcacttaaaggctgtggtagtactcctgcaaaattttatagctcagtttatccaaggtgtaactctaattcccattttgcaaaatttccagtacctttgtcacaatcctaacacattatcgggagcagtgtcttccataatgtataaagaacaaggtagtttttacctaccacagtgtctgtatcggagacagtgatctccatatcgtacactaagggtgtaagtaattatcgggaacagtgtttcccataattttcntnatgncatggcctcc

SEQ ID NO: 17733 - DNA, 447 bp, Homo sapiens
  misc_feature (1)...(447): n = a,t,c or g
ggtgcaaattataaaaggacatccttcctctttactgccatctgctgacaaatgtttaagatgtccacaaagtgaaaggtaccctcttagaaggcatacctgtgtgcagtgtccagtctatacaactacataccagccttattaaactaccactgaaagggattttttaaaacatgaaaatgaattctacattctgtttatgataaaaccacaaaataaaactgtatacaccttttcactaaaaaattcatgtttgcagttttgaacttcttgaggatttgagcaccatgtggacaatatttttatattttttagatcctatacagtcttagaaccctactttactattttacaagttcccttacagggaacaatttttgtntcctgtactttcttgctgttaagaatatttaaagttttgaggantccaattgccantttaaaaac

SEQ ID NO: 17734 - DNA, 363 bp, Homo sapiens
ggagtccagtggtgaggtcatggctcactgcaacctctgcctcccaggctagagtgatcctcccacttcagcctcccaagtagctatgaccacaaggcatgcaccactatgcctggctaatttttgtatcttttgtagagacagggtttcaccctattgcccagactggtcttgaactcttgagtgcaaaggatctgcccacctcggcctcccagagtgctgggattacaggtgtgagccaccatgcttggccatctcagccatcttctttgcataagacattggtgccctttgcagacctgggtggtgagagggagtccatccttgttgagcttgaatctcacttgctggcaagtgatgccc

SEQ ID NO: 17735 - DNA, 324 bp, Homo sapiens
  misc_feature (1)...(324): n = a,t,c or g
gaggagttccatgtagaggcctgattccattccagtcaggttattgggtacgaatacctcagagctggtgctatgtactccctactgtgtggcatcaacaagcaggtggtgtctggctgctgcacatttagagattctttggattgatcggtgggtttaggtggtatcagctgatccctccattataaaaatccggtcagtctttcacctaagcggttttagcatccattgatggtcgttgcttagatccattatttccttctgcatctgttagctggaattctttaacaaagaccttttccttatcactttnnnnnnnntctg

SEQ ID NO: 17736 - DNA, 342 bp, Homo sapiens
gaacctgaggacttataaagaaacaaatcatgttggacaaacatgaattatggtgaaaaatgcagcagacatgttatacatttgatattttgaattatctttgtcacatcgtgttatgaaaacatccttgtaaaactggggcaaattgactatctgaagatacacagcataaaaccagaaacagttaatagaaatggcaggaaatatgcaaagagaaagctccaggaggccgggtgcggaggttcacacctgtaatcccagcactttgggaggctgaggtgggcagattgcctgaggtcaggagtttgagaccagcctgggcaacatggtaaaaccctgtct

SEQ ID NO: 17737 - DNA, 333 bp, Homo sapiens
tgaccctgtgaatgtattacatcaattacagactttaaaatggtgaactgtatggtaggcaaattacacttcaattacgctctttcttaaaaaaagctaagcaatctctgttaatcagaatcattaaataacgagtttttcagctgtccagtattagaacaaagcaaataagaaaacaatgatctcacagacattttttttctcagatatcttgctatactgattcaatccaaccttctggataagatgttgtccagcagaaatatatataagccacaagtaatttaaaaattttaagcagccatactgaaaaaaaagtttttaataaaaggg

SEQ ID NO: 17738 - DNA, 346 bp, Homo sapiens
ggaccctacaatctaacagttctcctaggtgcatatcccagagcaagtctcacattgatgcagtgagatagtgaataggaaagttcatagcaccattatttttaagtagtaagaacccggaaacaatctaaatatccatcagtaatagatatatgtgatagtcatacaatggaatactgtggcaataaaaaataattagagctacatatgaaatagggatgaaacatggatgaacaaagaatgttttagaggaatatgatatttaaaatttgaagcatgaaaaatatgtgtttatgggggcatatatagtggaagaataaatgaatagaaaagaaaagcccaaatc

SEQ ID NO: 17739 - DNA, 349 bp, Homo sapiens
ggaattttgtatttctgtagagacagggtttcaccatgttggccaggctggtcttgaactcttgacctcaggtaatccgcccgcgtcggcctccggaagtgctgggattacaggcgtgagccaccgggcccagctcctatcctttatttctttatcccaaccttcatctctgtaaaacagtacataaatggaccagaaaagggtctttatcctggtgaatattttacaatctatactaactcatggaggtaaaggcaaacattactattcttcattcaatcaatacttactgatcacataccacatgtcaagcattaaatacagaggatacagcagtgaacaagttcct

SEQ ID NO: 17740 - DNA, 400 bp, Homo sapiens
ggaattcacccataaagaagactgccatgacgcacggaggaggggtgtctgtggagcttcaggagacgtgataatccacaaactgtcctgggttgaacttagctattattctgccaggaaactgtctggagaaggtccaggaaagtaccaagaagtaaagaagtacctgagagtgctcagctcccagtgtgtcccttggcacctgccagtcacagcttggttggttctggctgtggggccggccttcctgagacccttgtcagggggctcataccctggtgctctgttttcactgatgatgaagcctcagagcccttggtcccctcatgatgttctgcgggaaaattgtgcacacttttgttgtgtgacttaagttctttaactcaggctggttgacatg

SEQ ID NO: 17741 - DNA, 526 bp, Homo sapiens
ggagttcactataaatggtgtttttttaatagaatataattatcggaagcagtgccttccataattatgacagttatactgtcggttttttttaaataaaagcagcatctgctaataaaacccaacagatactggaagttttgcatttatggtcaacacttaagggttttagaaaacagccgtcagccaaatgtaattgaataaagttgaagctaagatttagagatgaattaaatttaattaggggttgctaagaagcgagcactgaccagataagaatgctggttttcctaaatgcagtgaattgtgaccaagttataaatcaatgtcacttaaaggctgtggtagtactcctgcaaaattttatagctcagtttatccaaggtgtaactctaattcccattttgcaaaatttccagtacctttgtcacaatcctaacacattatcgggagcagtgtcttccataatgtataaagaacaaggtagtttttacctaccacagtgtctgtatcggagacagtgatc

SEQ ID NO: 17742 - DNA, 340 bp, Homo sapiens
gaactggctggatgcaataaaagcaatgcttcaaaggaaatatattgccttaaatcatttaatgttgaggctttctcctttgagtttcaattctaatattagagaaagttcaacatagaaatccaaagaaagaagaaaatatactttaaaaataagagcaagagcaaaagcctgcgcaacatagtgagacctcatctctaccaaaaaaaaattttttttttcttaattagccaggcatgatggtacatgcctgtagtcccagatactcaggaggactgaggtgggaggatcacttgagcccaggaggtcgaggctgcagtgagttgtgaacacaccactg

SEQ ID NO: 17743 - DNA, 391 bp, Homo sapiens
tctcaatcaggaaagatacccaaataatagtatgttcaatgaggtatatgggaaaaacctgacatccagctccaaagcagaactcagtccctcaatggccccccaggaaacatctctgtattccctttttgaagggactccgtggtctccatcacttcctgccagttcagatcattcaacaccagccagccagtctcctcattcctctaacccaagcagcctacccagctctcctccaacacacaaccataattctgttccattctccaattttggacccattgggactccagataacagggatagaaggactgcagatcggtggaaaactgataagccagccatgggtgggtttggcattgattatctctcagcaacgtcatcctctgag

SEQ ID NO: 17744 - DNA, 350 bp, Homo sapiens
ctgttgcatgatttcccaaatgaaatactgccttggctagagtttgaaaaactaattgagcctgtgcctggctagaaaacaagcgtttatttgaatgtgaatagtgtttcaaaggtatgtagttacagaattcctaccaaacagcttaaattcttcaagaaagaattcctgcagcagttattcccttacctgaaggcttcaatcatttggatcaacaactgctactctcgggaagactcctctactcacagctgaagaaaatgagcacacccttcacactgttatcacctatcctgaagatgtgatacactgaatggaaataaatagatgtaaataaaattgagttctca

SEQ ID NO: 17745 - DNA, 328 bp, Homo sapiens
gatgaacgatgatgaagcgtggtgtgtactgatgctaggctatgattctgtgtgctcttatttgtattgtactcttcctattgagaagtaacataccatctaatggtaacttacataacatagaaaggtaactacatcctgtgtgacacgtgtgatatatattattaaatccattagattcaggaaattttagagccagagaagaccttactaatcatatattctaaaagtacccattcatttacacagacaggttagataatggctgagacacattcagtgactgagctagttcctggtttgttttagggggaggggaaggcctgtg

SEQ ID NO: 17746 - DNA, 355 bp, Homo sapiens
ggagaaggtgcgggtcttggttgcccgcctgggacactttgctcctgttgatgctgtggccgaccagcgagccaaagacttcattcacgattctctgccccctgttttgactgatagggagagggcactaagtgtttacgggcttccaattcgctgggaggctggagaacctgtaaacgtgggggcccagttgacaacagaaacagaagtccatatgcttcaggatgggatagctcggctggtgggtgaggggggccatttgtttctctattacacagtggaaaactcccgtgtgtatcatctggaagaacccaagtgcttggaaatatacccccagcaagctgatgccatggaa

SEQ ID NO: 17747 - DNA, 1086 bp, Homo sapiens
  misc_feature (1)...(1086): n = a,t,c or g
gctgaaatgaaggaagaggagactctgcgcagagcactttgggtccggagggcgagactccggcggaagcattcccgggcgggtgacccagcacggtccctcttggaattggattcgccattttatttttcttgctgctaaatcaccgagcccggaagattagagagttttatttctgggattcctgtagacacacccacccacatacatacatttatatatatatatattatatatatataaaaataaatatctctattttatatatataaaatatatatattctttttttaaattaacagtgctaatgttattggtgtcttcactggatgtatttgactgctgtggacttgagttgggaggggaatgttcccactcagatcctgacagggaagaggaggagatgagagactctggcatgatcttttttttgtcccacttggtggggccagggtcctctcccctgcccaggaatgtgcaaggccagggcatgggggcaaatatgacccagttttgggaacaccgacaaacccagccctggcgctgagcctctctaccccaggtcagacggacagaaagacagatcacaggtacagggatgaggacaccggctctgaccaggagtttggggagcttcaggacattgctgtgctttggggattccctccacatgctgcacgcgcatctcgcccccaggggcactgcctggaagattcaggagcctgggcggccttcgcttactctcacctgcttctgagttgcccaggaggccactggcagatgtcccggcgaagagaagagacacattgttggaagaagcagcccatgacagctccccttcctgggactcgccctcatcctcttcctgctccccttcctggggtgcagcctaaaaggacctatgtcctcacaccattgaaaccactagttctgtcccccangagacctggttgtgtgtgtgtntatgtngccttcctccatcccctggnccttcccttccttccgaggnacannnagacagggcaagntccacgtncccantgtngnggcnnnnaaannaaantgttttnnnnngggccttnttta

SEQ ID NO: 17748 - DNA, 346 bp, Homo sapiens
gtgataagcacagttgagactgcagcagtaaattccaaatatgtgtttctaatttgacgtgaaagatactaaaaatttatatttgtatatttaaatcctggctcatcctgtgacatagatttactgaataggaacaaaggcccaattttaaacaaaaacctaggccgggtgtggtggctcacacctgtaatcccaacactttgggaggccaaggcaggcaaatcacctgaggttgggagtttgagaccagcctgaccaacatggagaaaccccatctctactaaaaatagaaaattagccaggtgtggtggtagatacgtgtaatcccagctactcgtgaggctga

SEQ ID NO: 17749 - DNA, 384 bp, Homo sapiens
gcaagttttttctgtggtcacctttttggttgaatattggtcaattccagaacagtttcatttttccctacaacgtagggctacttctctgtagcctgcaagggtggcattaacggttattaaagccgcacagtggctcgcgcctgtaatcccagcactttgggaggctgaggcgggtggatcgcttgagcccaggagtttgagactggcccgggcaacatggcgaaactccatctctacaaaaactataaaaattagccaggcatggtgtgtgtgcctgtagtcccagctactcaggaggctgaggtgggaggatggcttatgccagagaggccggaggttgtagtaagtggagatcatgccaccggcctccagcctgggggg

SEQ ID NO: 17750 - DNA, 357 bp, Homo sapiens
gcttcacttgtttaatccagcagcatcagcgccatctaggagcttgttctcaggccccatcctggaccctctgagtcgcgctctgggggtggggccggggatctgtggtttagcaagctctccggggatctctgaagggtgggaccagatccgcagctggactcatccacctgatcccgaccatctgtctggcttttgcagatctcaggtgtacatgcaccccagcctgtcaccgcccagcaccatgatcctctctgggggcacagccttgaagcctccatactcggcgttcccaggcatgcagcccttggagatggtgaagccgcagtctggctcaccctaccagcccatgagcgg

SEQ ID NO: 17751 - DNA, 483 bp, Homo sapiens
  misc_feature (1)...(483): n = a,t,c or g
attggnananccctntgacatgattacgaatttaatacgactcactatagggaatttggccctcgaggccaagaattcggcacgagacgaatcttacgacccatcgatggaagtgatagacttgaaacatagcaagaacccctaaagatgttgttattccccataagacacagcaggctctgagccgcagccctgcaatgagcaccccaggcagtgtggggaggaagactcaccctgcggttgtgattgtggtccacggagtgcaggtgccgctggaggagctgcggctgtgcaggaattagcatgtcgcaggccaggcagtgagcagcctcgatcttcttgaagaagtgctcctggccaatccctgccaggaaacgcatgtcttgtaggatctgggacagcaagtgatgctttcctcctactccccatccgggcccacgttttctccctgcaactctaaggaatcagaagggcacagcctgc

SEQ ID NO: 17752 - DNA, 364 bp, Homo sapiens
ggcagacactcactagactgctggcagcccgtggagccaccatccaggagttgaacaccattcggaaggccctgtcccagctcaagggtggggggctggctcaggccgcctaccctgcccaggtggtgagcctcatcctgtcagatgtggtgggggaccctgtggaggtgattgccagtggccccaccgtggccagttcccacaatgtgcaagattgcctgcatatcctcaatcgctacggcctccgtgcagccctgccacgttctgtgaagactgtgctgtctcgggccgactctgacccccatgggccacacacctgtggcatgtcctgaatgtgatcattggctctaatgtgctggcgcta

SEQ ID NO: 17753 - DNA, 325 bp, Homo sapiens
attgattataaatcagtcctgtgtaaaatccttccccacccgccctcagtttctaagccacctcatggctcttgtttgatgtagaagttggcagagccattgctttcctgatcagacgctccttgaaggaaattataatcctctccatccagcaactcctccttcagctgcagtgttgtcattttcttatgtcctttgtattgctgggacttagcctttttcttctgttttgatgaagctgattggttttctcttgatgactgtgatgctggaggctgtagttgatatccagttaactgacaccaccctacaggatagaggtcag

SEQ ID NO: 17754 - DNA, 972 bp, Homo sapiens
accgtttgacatgattacgaatttaatacgactcactatagggaatttggccctcgaggccaagaattcggcacgagcatacttgctggtctgagccatgcacaagacggggctgctaggcctctgtgcccgggcttggaattcggtgcggatggccagctccgggatgacccgccgggacccgctcgcgaataaggtggccctggtaacggcctccaccgacgggatcggcttcgccatcgcccggcgtttggcccaggacggggcccatgtggtcgtcagcagccggaagcagcagaatgtggaccaggcggtggccacgctgcagggggaggggctgagcgtgacaggcaccgtgtgccatgtggggaaggcggaggaccgggagcggctggtggccacggctgtgaagcttcatggaggtatcgatatcctagtctccaatgctgctgtcaaccctttctttggaagcataatggatgtcaccgaggaggtgtgggacaagactctggacattaatgtgaaggccccagccctgatgacaaaggcagtggtgccagaaatggagaaacgaggaggcggctcagtggtgatcgtgtcttccatagcagccttcagtccatctcctggcttcagtccttacaatgtcagtaaaacagccttgctgggcctgaccaagaccctggccatagagctggccccaaggaacattagggtgaactgcctagcacctggacttatcaagactagcttcagcaggatgctctggatggacaaggaaaaagaggaaagcatgaaagaaaccctgcggataagaaggttaggcgagccagaggattgtgctggcatcgtgtctttcctgtgctctgaagatgccagctacatcactggggaaacagtggtggtgggtggaggaaccccgtcccgcctctgaggaccgggagacagcccacaggccagagttgggctcta

SEQ ID NO: 17755 - DNA, 423 bp, Homo sapiens
ggcttaaaccagtggaaatcaaccagaaagttgaccatcaggaggccaagcaatacagagactccctggtattgagacccaggattcactgatctcattgctaccaggtccaccttctaggcagccagactggaaaagagggcaggaaaggggagcaggaccctcccctttaagtgcacagtcaggaacttggccacctcacttatctctacttggctggaatgtggtcacatggtcacacctagctgcaagaaacactgggagatgtagtctttatttctggcagcaatgcgcccagctgcaagttttcactagagaaaccagatggcagatatcaggggataaccagttatctccaccacagcagcatacagacagcctctcacctgccctgtgggacacctgagttcaatgcccagctag

SEQ ID NO: 17756 - DNA, 601 bp, Homo sapiens
  misc_feature (1)...(601): n = a,t,c or g
ggctagcaccatgagcttcaataccctgcgttcccccatgaaagcagactgcccattccctgcacagcgccaggaggcgggggcacacagcacggcagaaaacagaaacacttgacaagtgtttctcggttttcttctcctaaagaaaaagccacaggaaagcagacatcagggcataaacagaagccctagagaacaagagtaagaaggggcttcctcaccagcctcagagagtggcaggaggagagacttccatgggagcaaagaggaggcaggtgccagccctgcgggagaccgcaaggtcccaggcgggagacagccactgtcacatctgagaaaagagcctcaaagcagggtgggaactatgacagtggccaagcctgaagaggctgtcccagccaggacaagggacacttctctggcaaccatgggctaagaccaagggcccaacccctcccaaaaacaagcanaggctgtctgctgggtaacaagatctcaggactcggctgganaaaaggtggttttgctggggcncattctgatcanattgcttggtntntgataacacagaatgctggaaccagggaagggancccctacc

SEQ ID NO: 17757 - DNA, 259 bp, Homo sapiens
  misc_feature (1)...(259): n = a,t,c or g
gagagaatggctgccagtggctgatgggtcccggtgatgggaagggtatcaggttgccggggagtttccactcttctctggtgattgttccttccctcccttcctctcccaccatgcgatgagcatcctttcaggccagtgtctgcagagcctcagttaccaggtttggtttctgagtgcctatctgtgctctttcctccctctgcngcttctcttgntntgagcctnccttnnncattncatncnnntctttcccctg

SEQ ID NO: 17758 - DNA, 433 bp, Homo sapiens
agctatgacatgattacgaatttaatacgactcactatagggaatttggccctcgaggccaagaattcggcacgaggagctggacgtcgcggtgtgtcctctgtgcccacggtctgagctagctagcgcaccgccgagttaaagaggagaaggaaaacatgctgctctggtgcacgcctgagcgtcctccatcttccaggatggcagcaatggcgctgtgcggcctcaccaggcccacgaggagcagcagcgctcggcccggagcagcaggaaggcccctctgtggagcgcccgccgtctgctccggggtggttcagtcactgcttgttgacatcaacatggcaattgcactcatgtggactgggaccgtgcgagctgccgtgtggttaatccgggtgccaggacaatgaaatactccagcacgtgtggctga

SEQ ID NO: 17759 - DNA, 399 bp, Homo sapiens
gagcgtgtccacagagtttgtagtaaatattatgattttatttaaactattcagaggaaaaacagaggatgctgaagtacagtcccagcacatttcctctctatcttttttttaggcaaaaccttgtgactcagtgtattttaaattctcagtcatgcactcacaaagataagacttgtttctttctgtctctctctctttttcttttctatggagcaaaacaaagctgatttcccttttttcttcccccgctaattcatacctccctcctgatgtttttcccaggttacaatggcctttatcctaagttccattcttggtcaagtttttctctcaaatgatacagtcaggacacatcgttcgatttaagccatcatcagcttaatttaagtttggagg

SEQ ID NO: 17760 - DNA, 518 bp, Homo sapiens
  misc_feature (1)...(518): n = a,t,c or g
tttnnnnnctttgnannccaacagctatgacatgattacgaatttaatacgactcactatagggaatttggccctcgaggccaagaattcggcacgagagctgttgtaatgttgtagtgcagtgtattactcacatgtttgtggtgatgctggtggaaacaaacctcctgcactgccagccctgtaaaagtgtaggacataacattatgtatagtgcataatacttgataaagataatgaatgactgtgttactgatttttgtatttgctatactatttattattttagagtatattcctattactcatatttaaaaagttaactgtaagtcagacatggtggctcacgcctgtaatggcagcacttagggaggccaaggcgggcaggtcatgaggtcaagagatcgagaccatcctggccaacatggtgaaaccccgtctgtatgaaaaatacaaaaattagttgggcgtggtggtgcacgcctgtagtcccagccactcgggaggctgaggaagga

SEQ ID NO: 17761 - DNA, 514 bp, Homo sapiens
  misc_feature (1)...(514): n = a,t,c or g
anncctttganaacngctatgacatgattacgaatttaatacgactcactatagggaatttggccctcgaggccaagaattcggcacgagagcggcctgagtctcagcggacttgtccacccggagttgagtcggagtggcgagctggcagtacgggctctggagcagtttgccactgtggtggaggccaagctgataaaacacaagaaggggattgtcaatgaacagtttctgctgcagcggctggcagacggggccatcgacctctatgccatggtggtggttctctcgagggcctcaagatccctgagtgagggccaccccacggcccagcatgagaaaatgctctgtgacacctggtgtatcgaggctgcagctcggatccgagagggcatggccgccctgcagtctgacccctggcagcaagagctctaccgcaacttcaaaagcatctccaaggccttggtggagcggggtggtgtggcaccagcaacccacttggcttctgaatact

SEQ ID NO: 17762 - DNA, 556 bp, Homo sapiens
  misc_feature (1)...(556): n = a,t,c or g
gtggggtnnnnttnnantnttnagncnnnatcncttatnacgaatctaatacgactcactatagggaatttggccctcgaggccaagaattcggcacgagtgtaaccttgaatggactgcattgaatgtaagagggttctcagccgtgcagtcaaaagcccagtgagaccatattgggggataatttctccctttctgaagagccaggcacaaccaacttttcctggcagtctctggcttttatttgtgtcagtcagagacttcagtccttcggcaccttgccttgtccctttaattacgacccactcctgggctcaactgtgtgaataattaaggccatctgccacggcagctcccagacctcactcaaactaggtttgaacaggatactctccaaggtgggcctctcaccttgacttatgcctgcaatcccagcaccttgggaggccttccccttgcggacccttgcgtgcctgtgaaagccgcatttatttggancgtgtggaggganctaccgagattcttggccgaatcttcccnnntnttggtnaacccg

SEQ ID NO: 17763 - DNA, 356 bp, Homo sapiens
acatgattacgaatttaatacgactcactatagggaatttggccctcgaggccaagaattcggcacgagaattgcaaatagcagagaaaaacaacacactggacttcaattcccactaaatgacttatcttgccaaaatgaaacaaatgcggagaattattgatgcttgacatgaggaggggacatccagaggttaagaaaggatgctgacagcaccaggagaaacattgaggtatgcaagatgttagcccgttggcacctgatagaccgggcaggtctgtaagtgcaatacgttgctttgtaggtaagaaaaataaagcccagccaggtgccaatgtgacatggagttgggcctc

SEQ ID NO: 17764 - DNA, 376 bp, Homo sapiens
gaggaatttgaattcgctctgtcactcggagaagaaactattgaaagttcttgacaaagggagataagcgatttaagtggtatcctgaataatcggttgatcgttactttggcactagggtgaaagtagagacaggtaagttattagaggaccaagtctaaaacattgaaatgaaagaaggagcaaatcctgattataagattggcattgaagaggagaagaaacgaagttaaaattgagttcaagggtttgcacttggaggactggaaaaccagtactgccttttgacgtcagggaagaggatctgggacagctggagttggatatgtttgatgtcagacctatcagcggtcaacaggacgtccccgtttcctgc

SEQ ID NO: 17765 - DNA, 439 bp, Homo sapiens
gcttcatagaccataaataaaatatcaaagctagtaagtccaacagatatttccatttatttcagtggtatattaacagattgagacagttttcacaataagggaaagggaaagaaagcagttcacctagaagtacaaatttatccagcatctgatagtgaccaattacactatgattttatggctccagttctctgagtctatgcctaaaaaatggatgctaaagtgctaggccattagatatctgtcaaaacattttatgctgaagaacacatattttgaaacttggagtgagatctggtcttgtaaaattaaaactgtgtttcataaaaaagatttaaaaatagaataaggatctgcctgggcctttctggacacacaatgaaaacatccagaagacaagaaaacgacacaggtgggatcattacattgccccagg

SEQ ID NO: 17766 - DNA, 405 bp, Homo sapiens
ggctgcagtttgaaactaagctgggcatgaactctcccttctgagccactggctgtggtggctgtagttgcccccgtccctggggctaaagccagacccatttctgaacaggggagtttgtatcatgaatgtttccaggtttgctcctgcacccgtggcactggaaacccagctccccgtgtcagaccccgctgtcttcctgagccctggggctcactgtggaggagctgacggcctgggcccttggccagtcctggctcttccctgggcctcaccagggacactcttgaatgtatggcctcaggcgctccctagaggggccctaaaccccctcacctgtgagctaccccctttagggatcccttgcccccttggagatcccttgcccccagtgcctctgctcgg

SEQ ID NO: 17767 - DNA, 422 bp, Homo sapiens
gggagactcctggcacagaaatctcttctaaatagggctgctgtcctccgctgcatgttgcccgtggtagcaggcatctcgtgggagggatctgctaaatcaacctaaccccttcacccacaccctgctgagaagctgcaggttgaagggaaatctgcatgataaaagtttcctgctgagcgggagcttcccctgcacaaagctgctctgagcccagcctttgttccccgacaccccagccgtagcagggcccatctgtgcctctttcattcattccctggtgaacattaaactcactgcaggctggggtgtgcaggaggctgcagagcacagaccacgagacgactctggaggtcagggccctgagtccgccctcatgtggccctgggaccaatgagagcctggaaaaaaaaaatctacat

SEQ ID NO: 17768 - DNA, 410 bp, Homo sapiens
  misc_feature (1)...(410): n = a,t,c or g
ttatgacatgattacngaatttaatacgactcactatagggaatttggccctcgaggccaataattnnncacaangtagagcgtgtgctccgagatcttcgcatcttccggatctttgaggggacaaatgacattcttcggctgtttgtggctctgcagggctgtatggacaaaggaaaggagctctctgggcttggcagtgctctaaagaatccctttgggaatgctggcctcctgctaggagaggcaggcaaacagctgaggcggcgggcagggctgggcagcggcctgagtctcagcggacttgtccacccggagttgagtcggagtggcgagctgtacgggctctggagcagtttgccactgtggtggaggccaagctgataaaacacaagaaggggattgtcaat

SEQ ID NO: 17769 - DNA, 351 bp, Homo sapiens
ctcagagaagacctccaaaccctgtcttgttattagatagtatgcaataattttccttatttccactcaccttattttgtaatcacatacttgtcttattatcagcttagtatctgcagccttgactagggtacaagtagtgagcaggctagaataatgccccttttatttaaacccctgaggtcctagcccaggggtttctataatacccattaggagtagatgtgcagtaaatatttgatggaatcagcccatgggcccaaaattgagagctgagaagcccattgtctcagctcatataatttcatacagttggctctgcttccatgccaccgctgggataagagaata

SEQ ID NO: 17770 - DNA, 458 bp, Homo sapiens
  misc_feature (1)...(458): n = a,t,c or g
tttgaacagctatgacatgattacgaatttaatacgactcactatagggaatttggccctcgaggccaagaattcggcacgaggtactttatatagcataactttagctcatttcttgcttatcatatcatccacacttgccatttacatttatatatatatcacctaaatatttgagacttaaaaattcagtccattccattccttttctaaatcatagactgccttattctttgataaatttttcctgattacttttgttttgcattttttggatctgagtcaaaatcgtgtgaaggctccagggaatagctgcaaactacattattactttaaaattcaaaaaaatgtttaaagcatatggtacgaaaaattgtcttctgatctaacttacctgatttggggagttagtgntcatggaattgtgctgagcttcaaacaaatactaggtgaactat

SEQ ID NO: 17771 - DNA, 415 bp, Homo sapiens
ggagacagggtttcaccatgccggccaggatggtctcgaactcctgacctcaggtgattgcccttccttggcctcccaaagtgctaggatcacaggtgtgagccactgcacccgggctcaacttttaaccgagcaagaatattttaaaaaccaaaaccatctaccatcggcacctttttataaaagagcattttaatgacacatatgtgaaaagactaaatctcagaatgaaatataatgtgaaatcagataaataaatgaaagatgtattgcttacttttctcacatcctcatggcaaactttgttagccacttgcacctgtccatacacagatctttgggaatcactaatttagaccacttcatgcccacccttaccctgcccccggctttattgagcatttttatcacaata

SEQ ID NO: 17772 - DNA, 299 bp, Homo sapiens
caaacaccaagttttctggactcgtaatgcttagagttgcatcttctcatctatggcacatgcatctcccttagatgaggttctgattgtgtgaccctcccagtcctagagagcctggaacaattgctctctccaaactgcagagctcatgaaatcagtcgcatgaaggcagatcagaagggaacatacaagtcatcaaatctgcaccagcaattctcctttcaatgtttgcatttcctcactcccattggactcattctgaggttccccattcatgcttgaatgactcttatgattta

SEQ ID NO: 17773 - DNA, 989 bp, Homo sapiens
  misc_feature (1)...(989): n = a,t,c or g
ggggcttcatgaaggaacctggagtagagcgtgtgctccgagatcttcgcatcttccggatctttgaggggacaaatgacattcttcggctgtttgtggctctgcagggctgtatggacaaaggaaaggagctctctgggcttggcagtgctctaaagaatccctttgggaatgctggcctcctgctaggagaggcaggcaaacagctgaggcggcgggcagggctgggcagcggcctgagtctcagcggacttgtccacccggagttgagtcggagtggcgagctggcagtacgggctctggagcagtttgccactgtggtggaggccaagctgataaaacacaagaaggggattgtcaatgaacagtttctgctgcagcggctggcagacggggccatcgacctctatgccatggtggtggttctctcgagggcctcaagatccctgagtgagggccaccccacggcccagcatgagaaaatgctctgtgacacctggtgtatcgaggctgcagctcggatccgagagggcatggccgcctgcagtctgacccctggcagcaagagctctaccgcaacttcaaaagcatctccaaggccttggtggagcggngtggtgtggtcaccagcaacccacttggcttctgaatactcccggccagggcctgtcccagttatgtgccttccctcaagccaaagccgaagcccctttccttaaggccctggtttgtcccgaaggggcctagtgttcccagcactgtgcctgctctcaagagcacttactgcctcgcaaataataagtcgacgcggccgcgaattccagatctatgaatcgtagatactgaaaaaccccgcaagttcacttcaactgtgcatcgtgcaccatctcaatttctttcatttatacatcgttttgccttcttttatgtaactatactcctctaagtttcaatcttggccatgtaacctctgatctatagaatttttt

SEQ ID NO: 17774 - DNA, 346 bp, Homo sapiens
  misc_feature (1)...(346): n = a,t,c or g
gcaggaagattgcttgaacccgggaggctgaggtagcagtgagctgagattgcgccactgcactctgggtgacagagcaagactctgtctcaaacaaaacaaaaacagtcaatctacagccaaacccagagccaaggaacatttccgaggatcctgccattgttgggtgccttcatgcattatgtccatgaggaaggaaagagcttccctttgcaggaaactggctcaacttggcccagatctaatgctgataattggcagaaccgcttcccactacaccatgatcatgcaggtgttcccgtgagtgtgacttanctgttgggtgtgaactgagagaggagatttt

SEQ ID NO: 17775 - DNA, 491 bp, Homo sapiens
tgacatgattacgaatttaatacgactcactatagggaatttggccctcgaggccaagaattcggcacgagccttgggaaaggataaagttttggaatatatttttattcatgaacctgctctctttaagacttctgaggaaaagagctgctgggcagatgagtagaatatgttactactgttccgacatgtctacccatcaaaactagctgatacagtacactttaatgacccttctatagtcaaaactgacattgacattgacattaacagaaaagatttgggacaaagaactgtgttcatgcagcaaatcagcctcaaacttcaccacaagctgcacattttatgctactgtattctgcttaagcacttatttgtatttatgtaaactgaatgatcctttaatacttaaggactttattctgggtgagttagaatcacactgttttggcaggaaaactctttgataggaaaaactgtatggcttgata

SEQ ID NO: 17776 - DNA, 419 bp, Homo sapiens
gggtgcattgaattgtgtacttcaaatgggtgaaccttaataatatgtaaattatatcccagtaaaggtgttaaaaaatagtactttaaaggaatctatggtagttttgaaaataaggcagttttccatactttgttaaactctggagaagatgacactttactactggtacctgctagagtaagacttatctagtattaacaaaattagggtttattaatggtataggatgatccaggtaatgggggaaaaaaaccgagcatcctgttatctaatgtactatccagtaaactactctagctttttttcatgaactttttctaaaggctttctagggcctcgtcttggtttgaaagttcacagctacccttcagaaaagaaaacaaaaatccatggagtaggcagatacaagtactcat

SEQ ID NO: 17777 - DNA, 506 bp, Homo sapiens
  misc_feature (1)...(506): n = a,t,c or g
acgagggaaaatcccagtcaagctattgaatggctaatgcaggtggtcagtgttattccaaccgatcctcaagttttatctaagctaggagaattatatgatcgtgaaggagataaatctcaagcatttcaatattactatgagtcatataggtattttccttgtaatattgaagtcattgagtggcttggagcctattacattgacacccaattttgggaaaaagctattcagtactttgaaagagcttctcttatacagcctacacaagtgaaatggcagctgatggtagctagttgtttcagaagaagtggtaactaccaaaaagcattagatacttacaaagatactcacagaaaatttccagaaaatgtcgaatgtctgcgtttcttagtcgtctctgcacagatcttggttaaaagatgctcaagaatatgccagaaaactgaagaggtggaaaatgaaagaaataagggacaggcataaatcagnagaatgnagtgggg

SEQ ID NO: 17778 - DNA, 486 bp, Homo sapiens
  misc_feature (1)...(486): n = a,t,c or g
gnnnntnngnnnannttnnntttgtttncnnacnagatacttttntgacatgactacgaatttaatacgactcactatagggaatttggccctcgaggccaagaattcggcacgagggaaaatagagtgtgtatcagcagagaccaccgaagactgcatcgccaagatcatgaatggagaagctgatgccatgagcttggatggagggtttgtctacatagcgggcaagtgtggtctggtgcctgtcttggcagaaaactacaataagagcgataattgtgaggatacaccagaggcagggtattttgctgtagcagtggtgaagaaatcagcttctgacctcacctgggacaatctgaaaggcaagaagtcctgccatacggcagttggcagaaccgctggctggaacatccccatgggcctgctctacaataagatcaaccactgcagatttgatgaatttttcagtgaaggttgtgcccctgg

SEQ ID NO: 17779 - DNA, 401 bp, Homo sapiens
  misc_feature (1)...(401): n = a,t,c or g
gaacggtgggggctccagtgattgggctgaatgactctgggggagcacggatccaagaaggagtggagtctttggctggctatgcagacatcttttctgaggaatgttacggcatccggagtcatccctcagatttctctgatcatgggcccatgtgctggtggggccgtctactccccagccctaacagacttcacgttcatggtaaaggacacctcctacctgttcatcactggccctgatgttgtgaagtctgtcaccaatgaggatgttacccaggaggagctcggtggtgccaagacccacaccaccatgtcaggtgtggccacagagcttttgaaaatgatgttgatgccttgngtaatctccgggatttcttcaactacctgccctgacagcaa

SEQ ID NO: 17780 - DNA, 337 bp, Homo sapiens
cttaaattcacataaaaatagcatttttacaaccatattgaaatttaatccttttacacaggttaacaaaatgtatcacaagaaaaactaaacgttgggtttaacaaaacaatacttttgaagtaaaacaatgaaaaattttttcaaattttttacaaatggtcacctctgggtcaatttactaaactaggggaacaaagagatgttaaaatatagctgtgctcagcctcgccactcacctgtccacagtgtaaggagtgaggtgggctgagtcttgctgctggtaatagtttcttatgtaaataagatggcgtctatgcaagtcgacgcggccgcg

SEQ ID NO: 17781 - DNA, 374 bp, Homo sapiens
gtgaggcttataaaattagaatgacttataacccaatggtgacatctattggaaaacctccctagatttaatattctcaaaagagtttattaaatctagagtttacttgcttattattgaccaattaatctaatgtatgtaattccgctactacaatctttgtttctatctctgtaacttcctgatatcctgattggaccttttatgagggttttggggtattattttaatattaaatttttctttttataaaaaagtatggttttgttatttggtcgcttaaacttttacctttttatttgattaaacttcttaaggtattacatagattcctctgccaaaatgcacttcaaaatattttgcatttataactg

SEQ ID NO: 17782 - DNA, 362 bp, Homo sapiens
gctaatttggggaaggttactcagttagggagtaattgagctgaagtaggaatgcagtgctgacttctgtaatctttttttttcagttttaccaaaatggactcattctgactcatttgggggttttacaagttagccctcggtaacaagtgcccagcagccttgcctgtattcagctcttctatatttgtgtgatgggcacagaacaccttcatatgtatgctttcttatcctcatgatcagccaacagaggcatgaatctaccaaaagaggcaaattcctccttaaaaaatgcagaattttaggctgggcacaatagttcatgcctgtaatcccagcactttgggaggtgaggagggagc

SEQ ID NO: 17783 - DNA, 348 bp, Homo sapiens
ggtttcaccgtgttggccaggttggactcgaactcttgacctcaggtgatccacccgcctcagtctcccaaagtgctaggattacaggtgtgagccaccgcgcctggctgtgatgtgttttttaacctacagtgtacatcctttggtgtccctctttagtgggacagctttgggaataagcatagtcactatggaatgattggttttagcagggctgtctttcagtgtctttttctaatttctctgttaatctgtcagcctctgttatctcacctaatcattagtttgcactaatttcagactgattactctattggttttgaccatgtccaggggcataaattgcct

SEQ ID NO: 17784 - DNA, 399 bp, Homo sapiens
agagtatggcggggtgatggtcagcttcccacgctctggcacacagagcgacaaagtcaccctcaagggcgccaaggactgtgtggaggcagccaagaaacgcattcaggagatcattgaggacctggaagctcaggtgacattagaatgtgctataccccagaaattccatcgatctgtcatgggccccaaaggttccagaatccagcagattactcgggatttcagtgttcaaattaaattcccagacagagaggagaacgcagttcacagtacagagccagttgtccaggagaatggggacgaagctggggaggggagagaggctaaagattgtgaccccggctctccaaggaggtgtgacatcatcatcatctctggccggaaagaaaagtgtga

SEQ ID NO: 17785 - DNA, 331 bp, Homo sapiens
gcttatatactatcatcaatgatctagttacccagtccagtggcttttgaggttttttgttcgtttgtttgagacagggtctcactcagttatccgggctgaggcgcagtggagtggcgcagtcgtggctcgctgtatcactgtagcctcaacctcccaggctcaagtgatcctcccaccttaacgtctcgagtagctaggaccacaggcatgtgccaccacacccagctactttttaaatgttttatagagacagagtcttgctatgttgcccaggctggtctcaaactcctgggctcaagcaatcctctctcctcagcctcccaaagtg

SEQ ID NO: 17786 - DNA, 309 bp, Homo sapiens
tttgcttttaaagactctactccttgttcttctccatcccttcttctaactcaaattctgtgtctttaaggaaggcgcctctaattaaaccattcctcattaatatctgttcatctttaaatgtttaccatacctatttgtgtcacacaattcaaagtatctaagctatatcaaagaagcttttctaatcccaaatgtagctagagtcaactgagttcagaaaactggggttctgatagtcacacattccaagttggaatatttgaaatcagaagtatcttgggaaatctattatttccctaaggcatt

SEQ ID NO: 17787 - DNA, 438 bp, Homo sapiens
attccctggccgggagcggaaggggatggcgtcgggcctgggctccccgtccccctgctcggcgggcagtgaggaggaggatatggatgcacttttgaacaacagcctgcccccaccccacccagaaaatgaagaggacccagaagaggatttgtcagaaacagagactccaaagctcaagaagaagaaaaagcctaagaaacctcgggaccctaaaatccctaagagcaagcgccaaaaaaaggagctgggggacagctctggggaggggccagagtttgtggaggaggaggaagaggtggctctgcgctcagacagtgagggcagcgactatactcctggcaagaagaagaagaagaagcttggacctaagaaagagaagaagagcaaatccaagcggaaggaggaggaggaggaggatgatgatgatgatgattc

SEQ ID NO: 17788 - DNA, 185 bp, Homo sapiens
atggagccactgcactgcagcttgggtgacagagcaagaccctgtctcaaaaaaaaaagttatacacatgtaattattgcatgttccttcattattagttttaacatagacttgttaatcccaattagcttaattagcatttgagtttattgctaaaacttctttatgagttttaataatgaggc

SEQ ID NO: 17789 - DNA, 367 bp, Homo sapiens
gaactggtgaatctgcggcagatataaatgggagttcattgtactattcttgtaacttttctctaggttttgatttttttccgaaataaatttaaaaaaaaaaatctgtcaaccctaaaactgtactttgtggaaattaagccatttctgaaagaaaacaaaaacaaaaccttaactcctagattcttctctccctttctcttcgtaatccataccatcaattaggtttaacaccattaataaaaaggtttcagtatcaaaataaacattttgccaaaggaatccccaatttacaaatgggatatgttccaaaagcctatttgtaagtcagctatttagaatggggaatgactttcactattaccaa

SEQ ID NO: 17790 - DNA, 381 bp, Homo sapiens
gaaggcacgctggatcgtctatctgattccaaagctggcctttgccatctcatcccttggcctgctccccaaccctgaggatgcccctgccatccccccaacctcctcatattgcctctgaacccagatggcaatccatcccggttctctctgagggccacgggcttgggtagtggaaagggtgtttgggaaattgttaaatcagttacccgtagtagagctatttcttgtacttctaagttttctagaagtggaaggattgtagtcatcctgaaaatgggtttacttcaaaatccctcagccttgttcttcacgactgtctatactgagagtgtcatgtttccacaaagggctgacacctgagcctggattttcactcat

SEQ ID NO: 17791 - DNA, 462 bp, Homo sapiens
gagagagctagcaccagaaataggtgtgtgagctccaggttggactggaccaggcattgctagggtctcagcttggggcaaggctgcagacatattaaagatgggttgagagttagaccttaaaatactggaaactcatggacccaagaaaggcagtagccagaggggctgctgtccttctcccagggaggaaatccaagaggccagcgtgtgagaggttcatcctcaccaaggcaggcatcttcctggctgctgcagatggcgccctgcacccatcagcgggcctttcccactggcgttctgtccagttgggaattctttctaggctcacatgccatggatgttcttgagacagtgcagatgtggcttccgtgtctggtggacccaccgaggtaccatgcttcatctgtgtgcctcctgattgaggctgttgccggcatctgggtgtccggtgcaaaataa

SEQ ID NO: 17792 - DNA, 408 bp, Homo sapiens
  misc_feature (1)...(408): n = a,t,c or g
ggggatgatgtatataactatctattcgatgatgaagataccccaccaaacccaaaaaaagagatctctcgaggatccgaattcgcggccgngtngacctttnancngccttntangtgacntgnnannaaagtgtnnaatttanaanatttnaaagnctgtatcatgtgactgaatatgtcttanntacttctgatatattgcaagaacataagcctangctaaaaaatttaaacagtatggaaggatnttnggtgagaaacacagtcattccttcctataccttattcccactccttggnnaaggtttacctctgnncantatntcctgagagcttactgtctatatgtaaatgatgcatagcctcttattttttacacaatagggaacaaatagttctgcacttt

SEQ ID NO: 17793 - DNA, 234 bp, Homo sapiens
ctcgaataagtttgacttgtgttttatcttaaccaccagatcattccttctgtagctcaggagagcacccctccaccccatttgctcgcagtatcctagaatctttgtgctctcgctgcagatccctttgggttccatgttttccttgttccctcccatgcctagctggattgcagagttaagtttatgattatgaaataaaaactaaataacaattgtcaaaaaaaaaaaaaa

SEQ ID NO: 17794 - DNA, 417 bp, Homo sapiens
ggcaaacgtctgtgtagtgttgatgccacactgcagttgttaacatcgcgtccttttctgccctgttaggttggtttctctcttaaacagggcagcgctgtcatcccattcccccgcctggtccttcctcttccccctagctggttactgaactgactgccattcaggcactgatgggaaatcacttccagaacttgcaaaaccatagagaccggaggttttctgaaggaggctttggtgctgaaacattgctgctgaaacattgttgcagaaatgtggggtggagcctccttcctgcccgtctcacccaggggatgtggtttgcttcccgtgtggtcagcgctgtgctgcgagctctgagaggtgaccttttcctctgccttcccacagctgccctgagttggcaaaaagtgcttt

SEQ ID NO: 17795 - DNA, 440 bp, Homo sapiens
gcggcacgagatttttctctataatgtgctgtgattttttttaatttaattacattttatatgagcttatttaatcactgctttaatttatgactgtgtagtttttaaaatgtatatagtagaatcaaaatggccaaagctttatgttacaatctttttgttctcgatgctaagataagctgaaggcaagagcttctcttaactgcagggtgtatctttagctttttcttagtaggtacttcaatgtgtgctgtaaacactgccaggtccccctcagaaacttgtacatgccaaagtgagtgtttcaagatagtcctttttgtcatttagacagaagaaaggcattgttcatgttcttcctttaatttattaatttttttttagaaaagattactttgcaggtaagacctgaaattccaaagaatttgagacttttttaa

SEQ ID NO: 17796 - DNA, 607 bp, Homo sapiens
tttaatacgactcactatagggaatttggccctcgaggccaagaattcggcacgagcggcacgagcaaccgcaggtcgaattgttcgtgaaggctggcagtgatggggccaagattgggaactgcccattctcccagagactgttcatggtactgtggctcaagggagtcaccttcaatgttaccaccgttgacaccaaaaggcggaccgagacagtgcagaagctgtgcccaggggggcagctcccattcctgctgtatggcactgaagtgcacacagacaccaacaagattgaggaatttctggagacagtgctgtgccctcccaggtaccccaagctggcagctctgaaccctgagtccaacacagctgggctggacatatttgccaaattttctgcctacatcaagaattcaaacccagcactcaatgacaatctggagaagggactcctgaaagccctgaaggttttagacaattacttaacatcccccctcccagaagaagtggatgaaaccagtgctgaagatgaaggtgtgtccgacgcggccgcgaattccagatctatgaatcgtagatactgaaaaaccccgcaagttcacttcag

SEQ ID NO: 17797 - DNA, 418 bp, Homo sapiens
gctacatcgttcattattagaattaaaaaaatttttttttgacttgtagttccttttgaggtaagagattaattttgatttctttagcttaactgaaagtgtataattttacttgtttttacattgtagctcttgaattttttgaaaccacgctaatttcataagtgaatcaacttggacaatcagctaatttaatgcttccttttttatactttggaaacatgctctgtactacacagcttattaataagagtaaataaggtttatatacatattgacaaatatttgttgtactatataattcatattaatgaacaattgaatgccaaccagactatgcaaattagtggactttttgcttaatgaaagaacccactatatcagagttcctcgataatccacgtaaatttggctctgg

SEQ ID NO: 17798 - DNA, 328 bp, Homo sapiens
gctggcatgccagcctcggcaaagacagccactgcatgttcctgggtggagaagatgctgcagctagaccactgctcctgaacacccagggagaaaagggtctcaatgaggatggccgtctccacagttatttgcaggcagtcagcaatgcaggcacccttcagtggcctggaggccgagtaaagctcctgcatgcccatcaaacccggcatccattctccacaatgtctagggccttgtgtccccaggtggccaggccgatgtcagcaactttgtagggcagtttgtcagacatgctggcggcacctttgatggacaagggcaaagg

SEQ ID NO: 17799 - DNA, 407 bp, Homo sapiens
tgccagccgacccaatggaactgaaaaatctggagtataggccagtgaaggtcagggggtgctttgaccattccaaggagctgtatatgatgccccggaccatggtggaccctgtccgggaggcccgggagggcggcctcatctcctcctcaactcagagtggggcctatgtggtcactcccttccactgcaccgacctgggagtcaccatcctggtaaatagagggttcgttcccaggaagaaagtgaatcctgaaacccggcagaaaggccagattgagggagaagtggacctcattgggatggtgaggctgacagaaaccaggcagccttttgtccctgagaacaatccagaaaggaaccactggcattatcgagacctggaagctatggccagaatcacaggg

SEQ ID NO: 17800 - DNA, 369 bp, Homo sapiens
gcggcacgaggctggtatttaaacttccaggaatttcattaaaaaattcagctttccagcttctcttgaaaaattaggaaacgtggccacacccaggcagcctctgtgcatgtggacattcggcaggggttgggagcgtggcccctctggaaaggctgtgctcttcagcctgccacactccccaccgctccctgcagcccgcccctggtccacctcctccacgttgcagcgtcgtggccctgctgagggcacgcagttggcggagtcagtcatttagaagtagcttcttttaaaagttcctctgagtcttatttgggattcagactctgtgttcccatagaaacagggaagtggaagttgtatttctaa

SEQ ID NO: 17801 - DNA, 332 bp, Homo sapiens
cggtcatgtccggcagaggaaagggcggaaaaggcttaggcaaagggggcgctaagcgccaccgcaaggtcttgagagacaacattcagggcatcaccaagcctgccattcggcgtctagctcggcgtggcggcgttaagcggatctctggcctcatttacgaggagacccgcggtgtgctgaaggtgttcctggagaatgtgattcgggacgcagtcacctacaccgagcacgccaagcgcaagaccgtcacagccatggatgtggtgtacgcgctcaagcgccaggggcgcaccctgtacggcttcggaggctaggccgccgctccagct

SEQ ID NO: 17802 - DNA, 374 bp, Homo sapiens
  misc_feature (1)...(374): n = a,t,c or g
gctggaagtccctgctcgagacaggagctatgcctggttgcttanctggctcacccgccacagtacccgtactcagcacctcagtgtcgagacttcgtccagccctggaaaccattttatctggtatcgggggaaatggattcgggtagaacgaagtcgagagatgcagatgatagacttgcagacggggactccttgggaatctgtcaccttcacggccctgggcactgaccgaaaggttttcttcaacatcctggaggaagctcgagagctagccttgcagcaggaggaagggaagaccgtgatgtacacagctgtgggctctgaatggcgtccctttggctatccacgccgccggcgaccactgaattctg

SEQ ID NO: 17803 - DNA, 350 bp, Homo sapiens
gacaggaagaaatgaaacaatccctttagtcataattcagttttaaattggggtctgtcccccgcagccgtcattttatcctttgtaaaatatcttgtcctccactttctgaccccctttttggtcattttctgggatgaatgagcgcaggacagagaatttctgttgttaggaataatgacagtattctccgcagctctcctggcagtgatgggtcctagtcctagcgcaggaatttgaagctcgattagatcaaaagaaatggggccaaagtgtttttgactcatgctcgatattgacacagtgggtgggtgtcagggttttgctgtccaggggcaacagttggaggt

SEQ ID NO: 17804 - DNA, 443 bp, Homo sapiens
cggacgcgtgggctctctcccctgtcctctctctccgggctcccaccgccgccgcgggccggggagccaccggccgccaccatgagttccttcagctacgagccgtactactcgacctcctacaagcggcgctacgtggagacgccccgggtgcacatctccagcgtgcgcagcggctacagcaccgcacgctcagcttactccagctactcggcgccggtgtcttcctcgctgtccgtgcgccgcagctactcctccagctctggatcgttgatgcccagtctggagaacctcgacctgagccaggtagccgccatcagcaacgacctcaagtccatccgcacgcaggagaaggcgcagctccaggacctcaatgaccgcttcgccagcttcatcgagcgcgtgcacgagctggagcagcagaacaaggtcctggaagccga

SEQ ID NO: 17805 - DNA, 352 bp, Homo sapiens
gtgacaacaaccgctattgcaccttggaatttcctgtggaggtgaacacagtactacatggctttgccggctactttgagactgtgctttatcaggacatcactctgagtatccgtccagagactcactctcctgggatgttctcatggtttcccatcctcttccctattaagcagcccataacggtacgtgaaggccaaaccatctgtgtgcgtttctggcgatgcagcaattccaagaaggtgtggtatgagtgggctgtgacagcaccagtctgttctgctattcataaccccacaggccgctcatataccattggcctctagccctgcgtgccaagtgtccagagcct

SEQ ID NO: 17806 - DNA, 339 bp, Homo sapiens
ggagctgtttgactatctcacagagaaggtggccctctctgaaaaggaaaccaggtccatcatgcggtctctgctggaagcagtgagctttctccatgccaacaacattgtgcatcgagatctgaagcccgagaatattctcctagatgacaatatgcagatccgactttcagatttcgggttctcctgccacttggaacctggcgagaagcttcgagagttgtgtgggaccccagggtattgaagctcatggtgcagctcttgggcctcccctactgtcctctcatgctctgggtctctcctagatctccaggctgctgcaggtggatcctgaggcac

SEQ ID NO: 17807 - DNA, 422 bp, Homo sapiens
gtatatattctaggtacgagtcgttggtggaatatgtggtttacacatatttctctcagtatgtagctttttacaaggtcattgcacagcaaaagtttttaattttaatgaagcccagtttatcagttttttcttctgtggatcctgattcttctttcaagtctaagaactctttgaatagctctaagtcccaaagattttcctcttaggttttcttttaaaagttttatggtcttatgttacatttaagtctgtgatccattttgacttacgattgagttaaaagatgtgaggattagctcaaggttctttttgtgtgtgtgtggcctgtcgatgccagttgctccagcagcattattgaaagatgatcttaccttcattgaatgctttgcatctttggaaaaatcagttggcatatctgg

SEQ ID NO: 17808 - DNA, 427 bp, Homo sapiens
gacaaagtagtcacaggtgcattcttgcatatctcctacaatcaaaaattcaaaacttatgttattcaagaattgtttttgtgttgggatgttcgtgtggagggtatgcttggagcttgtataatcattgtagtacattcctgctttaatgctgctctttattttctcagcaattttctctaatattttgttgactgttcctttatagtagtttttttttcattcttcagagttttattatatttaactcctaaagttactactcagggtcacatttataaccttgagcattaacatgaccacttagtgacattgagtgatactgttaggggttatcaagaagattttacatttatattaatagtaagtgataaaataacaggaatcactgaaatccttgtagaaatatgggtctggccgggcgtgg

SEQ ID NO: 17809 - DNA, 338 bp, Homo sapiens
tggttgtgtaataatccactgcggcctgagcatcctctgtggttgccatttcaataaatgcctgaaattatacaaaaagttatttctctgttttttccaatcagctttctcacattgaactaaagattttttttcctaaaaaataacaatgccccaaatcttttcagatatatttaatcattaagtagaaaatactttcaagaatcaaaatacaaaacaaaagaggctgggcccagtatctcatgcctgtaatcccaacacttcgggaggccgaggcaggcggatcacgaggttgaaagatcaagaccatcctggccgaccaacatggtgaaaccccg

SEQ ID NO: 17810 - DNA, 344 bp, Homo sapiens
ggcaagcggaatgcccaacacagactggactggggtttgtgtcagcctgaattcattttcatcctttgacctgctttcacttctgacatattttctcctagaatctactgatgcagggattcaccttcctgtgtataaactttggagaaacattggcactttccagttaggtggatcccatgagatctttgcttcctggtcagagtagctcattgtttcagctaaaaatagttgtattctttagttaatataaattcatttctaaactaaatgcaaactcatttccccctttctgtgccatgtgtccttcagccgaggaactgcgtactcgcaaaatgactgcc

SEQ ID NO: 17811 - DNA, 383 bp, Homo sapiens
  misc_feature (1)...(383): n = a,t,c or g
gacagagagtcatatttttaatttcagagccagccagtgtcaaacacgtgcaaaagagccgggccggattttttcagcttgtcctatggtagtcacttgtcagcctgagtttactggcctggtccttttgtctccactgtaagtactgaagccttctggtgtagttgtatcaccttaatgtccagcatttaactaggaaaggagactacaatgaagagttggtggccaattaagaaaaataatagactacatcataaatcatttcaggacttgagtggccgcagatcactggccctgatagcatgtttcaaccttggnatacattttttttaagangccctaattantgggggggggcttttgnttttnaacccatnaaatgg

SEQ ID NO: 17812 - DNA, 344 bp, Homo sapiens
gcacgcattgttggaggaacaaactcttcttggggagagtggccctggcaggtgagcctgcaggtgaagctgacagctcagaggcacctgtgtggagggtcactcataggacaccagtgggtcctcactgctgcccactgctttgatgggcttcccctgcaggatgtttggcgcatctatagtggcattttaaatctgtcagacattacaaaagatacacctttctcacaaataaaaggagattattattcaccaaaactataaagtctcagaagggaatcatgatatcgccttgataaaactccaggctcctttgaattacactgaattccaaaaaccaatat

SEQ ID NO: 17813 - DNA, 499 bp, Homo sapiens
  misc_feature (1)...(499): n = a,t,c or g
attaatntgaancccnnactnaatcccnntcagctatncacatgattacgaatttaatacgactcactatagggaatttggccctcgaggccaagaattcggcacgagagaaagtgctgtctggctccaactccagttctttcccctgagcagcgcctggaacctaacccttcccactctgtcaccttctcgatcccgccggcgctttagagccgcagtccagtcttggatccttcagagcctcagccactagctgcgatgcatgtgatcaagcgagatggccgccaagaacgagtcatgtttgacaaaattacatctcgaatccagaagctttgttatggactcaatatggattttgttgatcctgctcagatcaccatgaaagtaatccaaggcttgtacagtggggtcaccacagtggaactagatactttggctgctgaaacagctgcaaccttgactactaagcaccctgactatgctatcctggcagccagga

SEQ ID NO: 17814 - DNA, 330 bp, Homo sapiens
aatgtgctcccctgagttctatgagccactatagcaaattactgaacctcaggaggcattgtgggaaccccaagcttatagctagtctgtcagacatacaggagacctgtacttgtgactggtgtctgagtggggagcagtctttagggacctgtggggtcttaagctaactccaagtggttaatgtcataattaaattatagacaagttggtatctgcacagtcggaaaatggttagtatgggggaaaacccaacacatctggtgtcagaagcattgggagctgtttccttttatatgtaaagagcacagcactggctgatgtataatc

SEQ ID NO: 17815 - DNA, 422 bp, Homo sapiens
  misc_feature (1)...(422): n = a,t,c or g
ttgaannncctgctatgacatgattacgaatttaatacgactcactatagggaatttggccctcgaggccaagaattcggcacgagccaatgtgatcatttcaaaagtggagcctttgagaattagttagggttacattagttcatgagggcggggcccccatgatgggattaatgcccttataaaaagaggaagaaacaggagatctctctgctctctgccatatggcaacttggaagaatggcctcaccagacaccagatctatccacaacttaatcttggacttcccaccatccagatcataataagtaaatgtttgttatttaagccatgcagtctatgataatttattatagcagcccaaactaagacacccaaataaaatagaaatattaaaataagggcaaagttgatactgtag

SEQ ID NO: 17816 - DNA, 304 bp, Homo sapiens
tttagaccctccagaagtttgcagttcctattcttcagtctgtgggcttcatcaattatcacacagctccagtgaatcttcttcaactctgggcagtctgctaggatcatttcaaatgttgtgatgacgacgtggaacttgaagactcctgaaagggggtttccctgggcgtctctgtacaccatttcatactgctggatcatctgcctgctgatctggctgccgtggtacacaatggcattcgtcgacgcggccgcgaattccagatctatgaatcgtagatactgaaaaaccccgcaagttc

SEQ ID NO: 17817 - DNA, 347 bp, Homo sapiens
gaaatagcttttgtcataacatcacttgtgtgctgctatttggctcataagtgatctgtcacattcattttaagttaaagtggatatgtgacaggtggaatctacaattgttttattgggctggatgtaaaaataatgaccttgatgttgctattcagaatattatgtggcatctgggaccccgatagtttcccaatattattaataagtgatattactacctctccattacatgcatggttagtgatcaaaatttttttttttatttaaatttttgaatgattttagaaaccatatgcatggagatgtattaagatatataagcttcttgtggtgaggttattggg

SEQ ID NO: 17818 - DNA, 540 bp, Homo sapiens
  misc_feature (1)...(540): n = a,t,c or g
tccccncccctctnnngaccccctntngaacccnnttacgaatttaatacgactcactatagggaatttggccctcgaggccaagaattcggcacgagcttatctcaaaagaacaacaaaaaatgaggaatcctttagccccctgagactcagctctgctagcagtcttggtactttgtaaatgacacatctctttgctctgcagtacaagggtcaggtgcctgagaacgaggctaacgtcgtaatcaccacactgaaagtgactgatgctgatgcccccaataccccagcgtgggaggctgtatacaccatattgaatgatgatggtggacaatttgtcgtcaccacaaatccagtgaacaacgatggcattttgaaaacagcaaaggtttgtatggtacctggcaagatgcanaaactggcatcctcacagctgttcatacccttgcccctggtatcttcttagaagtagattcgctttgcagnggcacagggtgacttttccagattgtnggggaccatgtgngatttacnggggct

SEQ ID NO: 17819 - DNA, 528 bp, Homo sapiens
  misc_feature (1)...(528): n = a,t,c or g
ttggataccnnttgacatgattacgaatttaatacgactcactatagggaatttggccctcgaggccaagaattcggcacgaggcgaagttaagatggtctcaagttgtgatcccgtgggtggaggtggttctgcagtgcttgcaattttctgtttcttgagctccactttggttacctgttagttcactttgtaataatacattaaaatattcatttgctttatgcactttcatgtatgtgggttatattccacaatgaaaattttccaattttaacaaatgaagacaaaaagaagcaagaatgatttgtagactttatatcttaccttgtttcaagtaacggcttgccttgttaaacaaggaacagattgtggttattgccacttactttgcatgaaaaagaaaaactttgtggtgattcttangcctgtaggggctttcccccgacagntgtgtccctatcacatgagctcacttaagctggtatcaaagcacttggtaaatccccaggaccatctgatccagat

SEQ ID NO: 17820 - DNA, 492 bp, Homo sapiens
aacagctatgacatgattacgaatttaatacgactcactatagggaatttggccctcgaggccaagaattcggcacgagatttttctttgatctttttatttcatgagcagctttgtgagtacattctcaggtctaaagtcctcaccctcttctcctattcccccagggcccccagtgaaacacacacatacattaaacagtgcagtttgttatttcaggcctttttctttgcatttatgaaagtaggtcggcatgctgcctcacacctgtaattccagcactttgggaggccaaggtgcgtggattacttgagcccaggagctcgagaccagcctggccaacatgatgaaaccacgtctctgctaaaaatacaaaaattagccaggcgtggtggcacgtgcctttaatcccggctacccgggaggctgaggcatgggaatcacttgaacccaggaggtggaggttgcagtgagctgagattacaccactgg

SEQ ID NO: 17821 - DNA, 364 bp, Homo sapiens
ctcttctgtcagcctgcaactgagccaggattgaatacttggaccccaggtctggagattgggatactgtaatacttctttgttattataacataaaagcaccactgttctgttcatttcctagctgttctaattaagaaaactattaagatgagcaaccacatttagaaatgtttattgacaggtcttttcaaataatgcttttctaattaatagccaaagatttcatatctaactttgtaaccagaattatacagtaagttgacaccacttagatttaaaggcagacagttttgctttagtacaatagtatacattttataatgatgaacttataatgattaagggacatttctataaaaat

SEQ ID NO: 17822 - DNA, 334 bp, Homo sapiens
  misc_feature (1)...(334): n = a,t,c or g
ggagaatcaaaacttgaggggaaccttgaaggatggggaatagtcaataaatcaggagaaaatagtgatggtgcagggcatttcaggatggcttctccaagattcattggactggttcggtaggagatgaggatattgataggatattggggtgggggcagggtggacacttcagaggaggttacagattgagctaagaagtggaggctggtctgtgcagcantgttcaaggcgtggtaagaanagttgggaatctcccacggctggcagaacttgtgancccccctgccctnaaaggactacnagacccctaatgagaananacttctcccag

SEQ ID NO: 17823 - DNA, 916 bp, Homo sapiens
ggtgaccttgggcaaatcacaacctcagtgggtctttttgtcttatgggggtcaaagcatggagttgttattgggccctgacaccaccccactgccccaggtatacacgtctgggaaaggcagcagcgcagctgggactgacagcctcggtgatgagggacccttcgtcccggaatttcatcatggagggcggagccatggtcctggccgatggtggggtcgtctgtattgacgagtttgacaagatgcgagaagatgaccgtgtggcaatccacgaagccatggagcagcagaccatctctatcgccaaggctgggatcaccaccaccctgaactcccgctgctccgtcctggctgctgccaactcagtgttcggccgctgggatgagacgaagggggaggacaacattgacttcatgcccaccatcttgtcgcgcttcgacatgatcttcatcgtcaaggatgagcacaatgaggagagggatgtgatgctggccaagcatgtcatcactctgcacgtgagcgcactgacacagacacaggctgtggagggcgagattgacctggccaagctgaagaagtttattgcctactgccgagtgaaatgtggcccccggctgtcagcagaggctgcagagaaactgaagaaccgctacatcatcatgcggagcggggcccgtcagcacgagagggacagtgaccgccgctccagcatccccatcactgtgcggcagctggaggccattgtgcgcatcgcggaagccctcagcaagatgaagctgcagcccttcgccacagaggcagatgtggaggaggccctgcggctcttccaagtgtccacgttggatgctgccttgtccggtaccctgtcaggggtggagggcttcaccagccaggaggaccaggagatcttagc

SEQ ID NO: 17824 - DNA, 325 bp, Homo sapiens
gaaagaaagaaagaaaatattgaaagcttattttccaaatatttctcttgagtagtcttaaccgctcttcccatgatcatttcatgcctttctagtaaattaatttttctccctagagaaagtaaaaactgatatagtatatatttcactctaaactctttaaaagactagggttctgctctataaaataaaaggaaactaaggggggaaaagtacgtatgtgaaaaaacacatatgtgaaagaagataggcagaaaatgaatcaaaatattaggagtggttatcagtggtagcataattataagtgacttatttttcataactc

SEQ ID NO: 17825 - DNA, 491 bp, Homo sapiens
ggagatcctcaatgtcacgctggtgccctacggaaacgcacaggaacaaaatgtcagtggcaggtgggagttcaagtgccagcatggagaagaggagtgcaaattcaacaaggtggaggcctgcgtgttggatgaacttgacatggagctagccttcctgaccattgtctgcatggaagagtttgaggacatggagagaagtctgccactatgcctgcagctctacgccccagggctgtcgccagacactatcatggagtgtgcaatgggggaccgcggcatgcagctcatgcacgccaacgcccagcggacagatgctctccagccaccgcacgagtatgtgccctgggtcaccgtcaatgggaaacccttggaagatcagacccagctccttacccttgtctgcagttgtaccagggcaagaagccggatgtctgccttctcaaccagctcctcaggagtgtttgcttcaagtgatggccggtgagctg

SEQ ID NO: 17826 - DNA, 194 bp, Homo sapiens
cttttgaattcccatgattacgaatttaatacgactcactatagggaatttggccctcgaggccaagaattcggcacgaggagagcagcatcaataccctgggtgtacacacagtacacccagggacacacatgggaccacacatatggggttgtgcacacatgagcgcacacagaagcacacacatgagcgca

SEQ ID NO: 17827 - DNA, 536 bp, Homo sapiens
  misc_feature (1)...(536): n = a,t,c or g
cccccnttgaanccctaacagctatgacatgattacgaatttaatacgactcactatagggaatttggccctcgaggccaagaattcggcacgagcggcacgaggcacctgtgtgttttagtgaaagggagaatgaaacttgtatgcatttgacgtgagcaggtattcacacagctaggaaacaggaaaagacggtaggatggcaacatcaccttctattgcacatttagtttaagacagcactttccgttgaaacacaactaccccaatggcatagtcttgtgatgtgggacagctaacgtgatggacgtctgcgcagcaggcccgaggttaggacggccactctgttagtgcaggtgagtgtaggtgcctcctcagctacactatctggaggatgtcacctgagtgcaactgggcaggcccttccccaacacatgatgtaagtcagccacgccaaaaacaaaggcaacccagaaagttaaattacggcagttaaagaaaaatccattccaacagttttaaatttggctgtgcaa

SEQ ID NO: 17828 - DNA, 420 bp, Homo sapiens
gactggaagactttatgcaacagtctgaagcatgataaggcgagaaaaatgactttgtaatttcgtcaagctctgatgggtaataaagtatcgggtgaaaaagcaggcagaaggtgaaaaacccaagtgctgtttacagaataaccacataccttcttttattgctcaaagaacattccacactttatggagtggtgctttccaggtaagtgttgacatcataatatagtcaaactggaaaacttgctttttaatctcaaagcagtatctaaaatgcacaacaaaagcatcttatatccaagggaacataaaaatttaagttttagtgagaggcctaaaaccattcaggaagaggtacaatggatacatttacttacattaaaaacttattttcctctacaaaaattttgaacatggcat

SEQ ID NO: 17829 - DNA, 352 bp, Homo sapiens
ggtatattcaaaaatctatgccaccatcatccccatcgaccgtggaacatttcatcactccagagagaagcctttccgccgccctccctccctccagtcctggccaccggtcatctcctttctgtccctgggttccgtcttctgagcttccatacgaattaaaccatggaacgtgtggtcgtttctgtctggcttcttcccctcggcgtgtggtttccgggttcgtccgtgttgcaccctgtcccagggcttcattccttgctgtcactgaataatgtcccaccaggtggaggcaccatgctgtgcttatggattcagcatttggtggacttctgagcggtgtccacctttt

SEQ ID NO: 17830 - DNA, 510 bp, Homo sapiens
  misc_feature (1)...(510): n = a,t,c or g
gcacagatgcccttgaaagaccttgtgtagaatcgtgtgtgtggtgcccacacaacacgtgctcagtgaatgaacacagcgtgggagaattagtgtgtgtggtgcccacgcggcgcgtgctcggtgaatgaacacagcgtgggagaatcgtgtgtgtgtggtgcccacgcggcgcatgctcggtgaatgaacacagcgtgggagaattgtgtgtgtggtgcccacgcagcgcgtgctcggtgaatgaacacagcgtgggagaattgtgtgtgtgtggtgcccacgcggcgcgtgctcggtgaatgaacacagcgtgggagaattgtgtgtgtggtgcccacgcggcgcgtgntnggtgaatgancacagcgtgggagaattgtgtgtgtggtgcccacgcggcacgtgctnggtgaatgaacacaacgtgggagaantgtgtgtgtgntgccncncngngtgtgcncggngntnnacacacnntggnnnantntnttttttngggncccc

SEQ ID NO: 17831 - DNA, 486 bp, Homo sapiens
ggaacattcccagtgcccctggctaggggcagagggcactgccaggctgtgttcagttagcacagctcacctcattaggagctcagcctctctcctcactctgcctctttgtgtctctttttctcctctctgagcctttgtctattgtgttcctgtcacccaccctttcatcatctttttgccaggcattcctggctgtcacttggagccaacagtaacttgccaccttaaggcagggtcatccccgggccaggaggatgaggttgtcctgaggggctccaaagaagacaatagttcccactcatgattttccgttacaaacaggcagctggggcatggttggcctccaatgatttcattcaaggccaaagtcctgagccccctccgctggtcccagtccagctcttatcaactccccaaaggaaaacccactggttcttagctctgtgggtaggaaggggccctagaaagggcctagttactatc

SEQ ID NO: 17832 - DNA, 566 bp, Homo sapiens
  misc_feature (1)...(566): n = a,t,c or g
agcagagaccttgttggtattcagctgtgatggatatagagaatcagaggcaccttgttttcacaactaggataaaaatatctgcagggtcctttccattcctatttagagggagtcctggctccatgaccccctcccgagtggactgtccaagcagataggctcacacgagaaacagtgaggctgaaagggggggctatggaagagcggtagggagtccacggagaagatgcagtgaatgcttgcatgcattcacacgtgtgtgtgtcccagctagttcactcctttcgccgtgcgtggtggaggctggcctctctggctgggtgcagtgaatggccagcgggtttcttttctgctgggccaaggcgctttgggggtggagggggtggtgctggtgctgcactgggctgactgcggcgctgacgcagcgtttccccccatccctgttgcctgtgtgttgtgtggatctgttcctagtatangcaacataatgagatactgtgcttcccacctccccttcagttcaganccaaaatgggtctaaaatctggcactttactcatttc

SEQ ID NO: 17833 - DNA, 365 bp, Homo sapiens
ggacccccggccccgccgtggctatccagtcagttcgctgctattcccatgggtcacaggagacagatgaggagtttgatgctcgctgggtaacatacttcaacaagccagatatagatgcctgggaattgcgtaaagggataaacacacttgttacctatgatatggttccagagcccaaaatcattgatgctgctttgcgggcatgcagacggttaaatgattttgctagtacagttcgtatcctagaggttgttaaggacaaagcaggacctcataaggaaatctacccctatgtcatccaggaacttagaccaactttaaatgaactgggaatctccactccggaggaactgggccttgac

SEQ ID NO: 17834 - DNA, 332 bp, Homo sapiens
gtcacagcttccccatcagagccagatgtgtgaaggaaatgtcccagatggcagtagtttctcggcaaggaggggaatcctggagatggttcatgtctgtgatcccagtgctttgggaggctgaggtgggaggattgcttgagcccgggagttcgagaccagccctgggcaacatggcgagaccccatctctacagaaatttaaaaaaaaaattagccagttgtggtgtcaagcgcctgtggtcccagctacttgggaggctgagttgggaggcttgtctgagcccaggaggtgaaggctgcaatgagccatgattacactactgtacccca

SEQ ID NO: 17835 - DNA, 323 bp, Homo sapiens
gggtgcatttgggcctcaggaaccagtggaatagaggcttgaatgtggtccgcacaccctctcgctgtcttgtccctcaagttgactttattctctctcacttcagattggctttcttcaaaagacatggcaataagcttggccttcaagatttcccagattttatgttctgtcctatctgcccctggaaaaaggctaatttcagttctgtggaacacaagttctttgaaaaggtcctgaatgaggaagagacctactgttgtaggcaaataatatgaatcatattacatatgtcttttcccttcatatacatctgtttagtt

SEQ ID NO: 17836 - DNA, 376 bp, Homo sapiens
  misc_feature (1)...(376): n = a,t,c or g
ggtgnattgaacccttgactgattacgaatttaatacgactcctatagggaatttggccctcgaggccnagaattcggcacgagaagtggtgtgcgctgagccaccacgagaggctcaagtgtgatgagtggagtgttaacagtgtagggaaaatagagtgtgtatcagcagagaccaccgaagactgcatcgccaagatcatgaatggagaagctgatgccatgagcttggatggagggtttgtctacatagcgggcaagtgtggtctggtgcctgtcttggcagaaaactacaataagagcgataattgtgaggatacnccanaggcagggtattttgctgtacantggtgaanaaatnnnntttgcctncctg

SEQ ID NO: 17837 - DNA, 541 bp, Homo sapiens
  misc_feature (1)...(541): n = a,t,c or g
tggcgtgtgtgaggaactttgcctgggagataaaattagacctagagctttctgacagggagtctgaagcgtgggacatggaccgttcactgggatggcaagggaattctgtccctgaggacaggactgaagctgggatcaagcgtttcctggaggacaccacggatgatggagaactgagcaagttcgtgaaggatttctcaggaaatgcgagctgccacccaccagaggctaagacctgggcatccaggccccaagtcccggagccaaggccccaggccccggacctctatgatgatgacctggagttcagacccccctcgcggcccagtcctctgacaaccagcagtacttctgtgccccagcccctctaacccatctgcaagcccgcacccatggggcaagcttgatcctatgaatnctctgangataccagggtntggggctttgaccttcccaccagtccncgaaagtccggaaaaaggtttgactttccctatggggcagaaatntggctggcaaatccccttncatanctttc

SEQ ID NO: 17838 - DNA, 492 bp, Homo sapiens
  misc_feature (1)...(492): n = a,t,c or g
gctttctgaatctttgtcctgaggttgccacaaactggtggtgtgtgggagccagcttggcttatattgactctgagcctgctgcacgtgtctatccaacttcacattcagtaatgtcatgctggcagcttgaaattcaccatggtgggagcatttacaccataggaattggcaaacagtggagatcagggttttttttcttcatagagccggttgttaaacatttatcacactaatgagtgtgaccctggaccacttgaaaaaatttttttggccgggcgcggtggctcacgcctgtaatcccagcacttcgggaggccgagggaggtggatcacctgaggtcaggagttcaaggaccaacctgaccgacatggtgaaaccccgcctctactaaatatacaaaaattaactgggcatggtggtgggtgcctgtaatccaactactcaggagctgaggcagganaatccttgancccaggaggaaaaggtgc

SEQ ID NO: 17839 - DNA, 369 bp, Homo sapiens
ggattaaagacaagacagctatctgtcttgtctcatttttgatacaccagctgataattgggctatatctgagtctaaaaataacacatagtacattaaaataatattccttggctacaattccaaagtggtattctgggatttctgtgcattaatcctgtaacaataacaggatttgggcttttaactcccctggtgtagctttgaaaatctagcctaaagcagctaatgttgccgtttaaatcatcctctcactatccttagggaaatgtggaaattaaaaaaatgacagcccaactgctcaaatgacctatacctgggagaataagagaaacaacctatttcctctcaggaactgggccgatcaat

SEQ ID NO: 17840 - DNA, 332 bp, Homo sapiens
ggtcttattcctatgtaaaacagacattaacataattatttaatctattagacctacaagaatcttcaaaattatgattcaactcttcatttgactgaaaaactgacacaggttcttagaagtgaagtgaaattttctcaaatcacatgcttgatgacaggggtgggttttttttgtttgttttttgtgtgtgttttttgttttttgttttttgagacggagtcttgctctgttgcccaggctggagtgcagggacgcgatctcggttcacgccattctcccgcctcagcctcccgagtagctggcactacaggcgtctgctaccacaccca

SEQ ID NO: 17841 - DNA, 390 bp, Homo sapiens
aaaattactaaacgaataaacatagacaatttaggttgcatgaatgaatacaaagaagaacatattatcattcctaattatcacaatttctaccacaaacatgatgacttgtaacacttgcatgtatgtactggaccagtttttataaaccatcccagctatggtctgctgctcaatgggactgatgactcttcagacgtatggtctgggatcaaccacattcttgcaggccaccaagaggaggcatccatctccacagaagagagacgagctctgggctcctgcaccttcacagtgaaggctcaacggggcacatggatctctgtgttgccctagataggacatttttacatttttgacttttcaccctgtagtgggggttaagggcag

SEQ ID NO: 17842 - DNA, 458 bp, Homo sapiens
  misc_feature (1)...(458): n = a,t,c or g
agctatgacatgattacgaatttaatacgactcactatagggaatttggccctcgaggccaagaattcggcacgaggtacctgaaagccttggagggtttcattgccgtggtgacccaagatggcgacatgatctttctgtcagaaaacatcagcaagttcatgggacttacacaggtggagctaacaggacatagtatctttgacttcactcatccctgcgaccatgaggagattcgtgagaacctgagtctcaaaaatggctctggttttgggaaaaaaagcaaagacatgtccacagagcgggacttcttcatgaggatgaagtgcacggtcaccaacagaggccgtactgtcaacctcaagtcagccacctggaaggtcttgcactgcacggccaggtgaaagtctacaacaactgncctctcacaatannctgngtggctcnangagcccctg

SEQ ID NO: 17843 - DNA, 554 bp, Homo sapiens
  misc_feature (1)...(554): n = a,t,c or g
ggagagagctagcaccatgagcataccctgtaagagcatctgtgtaatgcaggctcagtgtttgccaagttaatatttacttctattagaagcttctaaatgccaaaatgaacttattaaaatgtcaccagtgactgtgtgcaggattacaggcaggttttcttctttccaccttttggaaattttccagattaaaaaagaaaaaaaaaaaccctagaaacaaaaaaacctgacacgcaccacttacttttatgatacaaaacaaaagtgaactattaaaaaacattttttagccaggcgcagtgactcatgtctgtaatcccagcactctgggaggccaaagtaggtggactgcttgaacccaggagtttgagaccagtctgggccacgtggtgaaaccctgcctntacaaaaaatacaaaaatttgccacgtgtggnggctaatgcctgtggcccagctactcaggaggcttgttaanaatntganattacttacgcangacacagatctntcagnttcctaatttgaaatatcantncttttttttttttt

SEQ ID NO: 17844 - DNA, 333 bp, Homo sapiens
  misc_feature (1)...(333): n = a,t,c or g
ggtcttccagacctttttctatatgtgcactttttttttaaagcacaagaatattatcattattccattgcagtatatgagcttcttaaggttttttttttaatggctacagactgttccataatacagacataccaatttatttaaccattcccttagctatagatactcagtaatcttcagtgtttgtcattaaataaagcagcagtaaagttttcttacatatatcctaacattcttctgtttccataggtagagtcatagatgtgaaattgcttggctagagactcctttttttttctngctttttttttaaanggagtctngctctgc

SEQ ID NO: 17845 - DNA, 374 bp, Homo sapiens
gctgatcggtcctgctgaactctccaactgattgtccatatatgtgaaataggtactttatactccagcagaggtgagttgacagacaagtttcagaacatgtagtgtttgccccgttctttctgcctttgtacatgctattactgactgtcttgagctttccttcctctgcatgttgagctgataaagtctttgactcctaaaaatgttcccaggcctagagggattcctccttcctcagtgtttctgtggtaccctttactattggaaactcaggttctgctgttcactgcttgaaagctagattcaagagacaagagttggtggaaggaaaaacaggtttatttgaatacatccagctgacaacctgagga

SEQ ID NO: 17846 - DNA, 345 bp, Homo sapiens
ggggatatagtagagggggagagggctgttttatacacttataaatggtatacaccatttatacacggtggtcatagaagctctgatcaggtgacgtatgtacagaaagtcactgtggcctgagtagagtcaaggagaaggagcagcaagagttgagcttagggaggtggagaaggggtggaatagatcaagcaaggccttggccctggtagggatctgggattttgagtgagaggacaaccgttgggatgttttgagcacagaatggttgtaagaagacacgattcaggaggaccacttaggcctctgtgtggagggggcaagcgctgcacccagcccaggaat

SEQ ID NO: 17847 - DNA, 457 bp, Homo sapiens
  misc_feature (1)...(457): n = a,t,c or g
gagtctttatatttgaaaaatgctttataatcattttaattagtggtttctcaccaaagccctggatgtggtattattggcaccattttctgagaagaccgtgtgccattgagatggaattgacacaagatgttaatgggttagaagctggtactagaatcagaatgataggccataggactcagcaagccatgctatttactgtcatcttagagggctaggtagggtggagggaaggagttgatgactgattgttataagtgaaaagggcagcagtgacccaaaacaccattgcaaatgttaacagaggcctgttacagagttaaagctgggttttccaaaacaacacatctgagtaaaagcgcccttggtacattagccagtatggagccagcacctgagatcacactggggttggcccttttttgnaatgggtnttngggnctggtngcttgct

SEQ ID NO: 17848 - DNA, 495 bp, Homo sapiens
  misc_feature (1)...(495): n = a,t,c or g
tttgnnncccnatntgaancccntnngctatgacatgattacgaatttaatacgactcactatagggaatttggccctcgaggccaanaattcggcacgaggtgattcaaaacccagatctagcctaggccgtccatgtgttagatgcttctccaccccaggagacagggcctggagttggtctgtgtgcttggagctcatgaggcaatgacctgagctgcaaatcttcagctgtgcacccacaaagctgccccagaatcctagccatagtgtttcaggccagacctcaacttttcctcggatcatgggttatactccagattttgaactggacagctggacaacctttaggaaccctcccctagaactgggaaaactcctaaaccaagctcctgcctgacccactctccaggctccacctttcccctcttctttatttgtttatgatggagtcttgctctgtcgcccaggcttgagtgcagtggtgcgatctca

SEQ ID NO: 17849 - DNA, 405 bp, Homo sapiens
gtttcaaaaaaagtcttttaattgttcaaaatagcacaaaacgacatcgcactatggtaatattgagtcacaggggttactctacaatagtgaacggtgtactctcctcagaaacaaatcaataggcgcgcgagagaagggatggggtaaaacaacaggaccaggtgagtgggctccaaggtgactaaacgtgacattttccacagcgaaatatactataatacaacaaaccagaggccctggaggacacaggctgctgcgtctccaggcagaggtcggtaggggagggctggaaagattggctgctcggttcaaatccttctgacttgctggcaagccttgctcctcgacagaagtttggggtggggggcagaaaactccaagcagatcccccagcctcggagc

SEQ ID NO: 17850 - DNA, 368 bp, Homo sapiens
ctcaaattatatttttcttatgcttccatggtagtttcacctcttagaatgtaatctttctttgatttattcttggttctcctgctgggacagatatatccctacggatgtgcaaagccacagggtaacatgtatctttcaggaatgtgaattttacttggggaaaaatacgtatacttgtctgtgtgtgcacacgtatacacatattaaagtattaggcaagcataaaaatgtgcaataccggaatctatcatggaagagtatagaaagtttgcatggatttgaaaattaagcctgcatagactgctttcataaggagatggagtatctacttctttgctcttagaggttgtttactagaaaaggtg

SEQ ID NO: 17851 - DNA, 330 bp, Homo sapiens
gatacgataagcaaacatctttcactaaatacctctgccctcattgctgaccttctcttttgaatttctaagtttacatgattttatgtgttaatttcatcaccaccaccagttataaggagagattatattttttatttatgaattgtagcagtatgaagacattactagggtaaatgctttaaaataaggatcagttgatgaatgttgctagtagtttgttctttccatcaataacagcaatctggagtgccgttagctaaaggaactttgattacccactgctacaaagatcttggattcatggatttcatttgcagtttggtgaca

SEQ ID NO: 17852 - DNA, 327 bp, Homo sapiens
ggaacagaggagcaattacatctggagcctgccacttgtcgactggccgtcctgtggcccattggtctccttaaagagcaatgccacttcagggctcagcaatgatctgtgttgcaggaaggttggacatgcaggggcagtgacagctccgttgaccttggttaacagggagtccatgctaatgggccgtctacagcctgcctccatcactgtgcctgtcacaccagttctgggctggccggtgatgaagtccagctatcaactggctgagttttcttgactgcttggttgttctacacctcttccatgaggattgcattctgggga

SEQ ID NO: 17853 - DNA, 408 bp, Homo sapiens
aattcggcacgagtgaccagtcaggcaaataagggaccaaggagataactgtaatcaaatcaaagtcctggtatcaggaggtatagtagggtaacgggtcaaggaaaggcatggtcttctgtggcccagagaaagcagtggtcttggcaggtcgtgggctggcaaggtatggaggagacagattcagaagctaagcagacaaggacaaggagccctgaagattagagtgtggagctggggcctgaccttagggcagtgactcttgcccttctgcttctgttctgctctgcttggattgcatatggcttcaggccctggagttacaggtttggagagagtgctctagagtgtggttaaaagtcattggctgggtgcagtggctcacgcctgtaatcccagcactttggg

SEQ ID NO: 17854 - DNA, 355 bp, Homo sapiens
gagttccatcacttaggcataattgattaaatcattgacttctggtgattgagtgtaatgtctgtctcccttcccctcctaggaggtcaggaagtgggactgaaatttccaatcctcttatcacttggttggttcctctggagaccagcccccattctgaagctagataggagccttgtcatcagtcacctcattagcataaactcattatagtcaaaagaatcttgttatgaataacaaaagacaaccctgtcactcaggaaattgggaggtcagtgacaggaactgggaacaaagacctaatatatgtttttattataccgcagacttaaacatctgacatggtagactggat

SEQ ID NO: 17855 - DNA, 375 bp, Homo sapiens
ggtttgttgatttcatatgtgtttactttcatctcttgcccatttatagacattttggttgtcagcccgactatgtgtgcacttttatatttagctttttactcttagggttacattgtaaacaattttccatcttgccacctggtctttataatgatcttttaatgatagtcgttaagttgctatgccgtaattcacttaaccattaccccaggaagaactaatagactagaatatacaaatttagaattgcctgccttgttaatgaattctcaactacaggaggtaatttaaaaggctggaaaatactttgaattgttttagaggggattttagctctagatgggaattgaactaaatatatttttaaaatat

SEQ ID NO: 17856 - DNA, 574 bp, Homo sapiens
aatttaggcattggaggagctgtggttgtaacactctacaagatgggttttccggaagccgccagttcttttagaactcatcaaattgaagctgttccaaccagctctgcaagtgatggatttaaggcaaatcttgtttttaaggagattgagaagaaacttgaagaggaaggggaacagtttgtgaagaaaatcggtggtatttttgccttcaaggtgaaagatggccctgggggtaaagaggccacctgggtggtggatgtgaagaatggcaaaggatcagtgcttcctaactcagataagaaggctgactgcacaatcacaatggctgactcagacttcctggctttaatgactggtaaaatgaatcctcagtcggccttctttcaaggcaaattgaaaatcactggcaacatgggtctcgctatgaagttacaaaatcttcagcttcagccaggcaacgctaagctctgaagaactccctttggctacttttgaaaatcaagatgagatatatagatatatatccatacattttattgtcagaatttagactgaaactacacattggcaa

SEQ ID NO: 17857 - DNA, 414 bp, Homo sapiens
  misc_feature (1)...(414): n = a,t,c or g
ggctgttctctcacctgagcggaaattgaacacacagcttgttttattctatatcataggttctatgggcttgtcctctctttataggaaataatagaaaaccttcaacagatcggccgggcacggtggctcatgcctgtaatcccagcactttgggaggccgaggcgggcggatcacaaggtcaagagattgagaccatcctggctaacatggtgaaaccctgtctctactaaaaatacaaaaaaaaaaaaatttggcnaggcntggngggaacctgtnnnccnanctacccgggaggctaaaccaggaaaatggcntgaacccgggaggcggaccttgcattgacccganntcacccnactgcatncnaccctgancgacagattgagacnctgtcccaaaaaaaaaaaaaa

SEQ ID NO: 17858 - DNA, 173 bp, Homo sapiens
ttggatttgcttgaaaccgggaaaactgttcccattaggcttgttaatgtcagagtgacactattatgaatctttctctccctttcctctgcctgtttcttctctctttctccttcaaacttgctctgcagctaaggaaggtgagtctactttccctgaggctttggggcaaa

SEQ ID NO: 17859 - DNA, 375 bp, Homo sapiens
gcttatatggttaaaacagacgcacacctaaaaaaccctccctttgctccctttagggtttatacattgaccctatcattgttattgaaattgtcacattactcttgtctttgggttaaaaaagactttaaagactcctcgttttacaatagcaataataatagcaatagcaatcattgtaaatctttattgagcactcactatatgccaggcgctgtaattagtaatttatgccttatctcatgtaaagtttccagcagccctattaagcagacacatggcatttccatgttacagatgaagagactgaacacacattagctcgccttgcccagggacacatggtgggagccagaactaggagttgagcccagg

SEQ ID NO: 17860 - DNA, 452 bp, Homo sapiens
gtctatgacatgattacgaatttaatacgactcactatagggaatttggccctcgaggccaagaattcggcacgaggaataaatacctgttggcaaagtggaaacaacccaaatattcatcaacagaagaatggatagacaaattgcggtttgtttgtataatgaaatgctactcagtaataaaaaggaatgaaccactgacatgcaacaacatgaatgaacctcaaaaagattacattgaagaaaagaagccagacacaaaagagtacatactacatgattttgtttgtacgaagctctagaaccagcaatactcatctgtatgacagaggtctattataggctgaatgttggtgtatccctccccaaattcctatgttgaagccctaagcccctgtgtagaagtttatttggaaatggggcctccagggaagtgattaagggtaaatgag

SEQ ID NO: 17861 - DNA, 542 bp, Homo sapiens
  misc_feature (1)...(542): n = a,t,c or g
tttgannncccctttgaaaanccctntgacatgattacgaatttaatacgactcactatagggaatttggccctcgaggccaagaattcggcacgagaaacaaaaaaaaaacctcagatttcagggcctcaagcctacagtttttaggtcaaggtgggatagaatttgtatgtctaacaagttcccaggggatgctaatgctgatcagggaccacactttgaggagcacttgcctaagggatggacatttgagccaagccagactaattgtccttatctggtattgttcatactggaattaggaaaagcagcccttggcttcactggccatatgccataaggacatgagacctaaagtgccatgtactcctgccatgcagagaagccagatcaaaagaatctaacacaggggcaaaagccaagagataaagaaagcttaattgtggcactagcgcccccgattcagtcatccgtcaggccaaatccaccactgccttcgcacagtagaagtaagccaataaatttacctgaatatggnatac

SEQ ID NO: 17862 - DNA, 520 bp, Homo sapiens
  misc_feature (1)...(520): n = a,t,c or g
ntttgnnnaacagctatgacatgattacgaatttaatacgactcactatagggaatttggccctcgaggccaagaattcggcacgagccccgcagagcgtatgagctacctggagctgatggagcaccccttcttcaccttgcacaaaaccaagaagacggacattgctgccttcgtgaaggagatcctgggagaagactcataggggctgggcctcggacccgtctccagctgctgagatcctggactgagggggcctggatgccccctgtggatgctgcttcccctgcacagcaggctgccagtgcctgggtggatgggccaccgccttgcccagcctggatgccatccaagttgtatatttttttaatctctcgactgaatggactttgcacactttggcccagggtggcacacctctatcccggcttggngcgggtacacaaganngggatgantgtgtgaataccccaagactcccatganggagatgccatgagccgccaaggccttccctggc

SEQ ID NO: 17863 - DNA, 504 bp, Homo sapiens
  misc_feature (1)...(504): n = a,t,c or g
ttganttgatncccatcagctatgacatgattacgaatttaatacgactcactatagggaatttggccctcgaggccaagaattcggcacgaggggattcataggaataagccagcataccagcagatggtgctagtctcttaacttttcagaaaccaaaacctatatcttacttctaaaggtaatagctataaatgattaaatttctttggaattctcagaacatcttagggtattaaagtggttttatgaagagataagagaacaagtttatctttaacaatttctgtctctttcctcatgcatcaaattgtgctattctggttacagtgtatttaaaaaaccttttgtgatagaaatataactgacttttaaagtattgtgatctataacagctactatttattgggtgcttattgtgcttggatactgtgctaagtgttttatgtatgtaatgttgggataagaccaggattatttctccatgagaaggtttaacttaaa

SEQ ID NO: 17864 - DNA, 423 bp, Homo sapiens
  misc_feature (1)...(423): n = a,t,c or g
ttttttttgggttttggggaagaacaccttagagaacaggaggcttaagatggctgcccgttagttaacttactcatttagtatgcacctatgatgtatcagcttttatagcaagtgctaaaaacacaaaaatgagcataagattgtgtcgacgcggccgcgaattccagatctatgaatcgtagatactgaaaaaccccgcaagttcacttcaactgtgcatcgtgcaccatctcaatttctttcatttatacatcgttttgccttcttttatgtaactatactcctctaagtttcaatcttggcatgtaacctctgatctatagaattttttaaatgactagaattaatgccatcttttttttggcctaaattcttctganaatatattacgaggnttaattgaactttggcttttcgcca

SEQ ID NO: 17865 - DNA, 351 bp, Homo sapiens
gaggccgtgaaacagccgtttgagtttggctgcgggtggagaacgtttgtcaggggcccggccaagaaggaggcccgcctgttacgatggtgtccatgagtttcaagcggaaccgcagtgaccggttctacagcacccggtgctgcggctgttgccatgtccgcaccgggacgatcatcctggggacctggtacatggtagtaaacctattgatggcaattttgctgactgtggaagtgactcatccaaactccatgccagctgtcaacattcagtatgaagtcatcggtaattactattcgtctgagagaatggctgataatgcctgtgttctttttgccgtctctgttc

SEQ ID NO: 17866 - DNA, 358 bp, Homo sapiens
gctctagcccaactaagctttcctgttaaacaagtgctttgagagacccattcagagtacttttcactagaaggacctttattgtgttttgtgagaaggaaggacaggcacaaacatgctgttagaatgtgccatggagaaagataagcccacaggttcgagtggagtaactttaccctttgtgtaaagattcagcaaagattctcagaaatgagcgggaatgttttcagtgctatgggatgagctctgtcgtttcctgatgaacacacttctcagcatgtgttctgggaaacactagtttttgtatttttggagttttcttgttgtttgtttgtttgtttttgttttgagatggagt

SEQ ID NO: 17867 - DNA, 422 bp, Homo sapiens
  misc_feature (1)...(422): n = a,t,c or g
ggcaggcaaggagattccgggccagggtcgcggcggcagtcggcaagcgttcgattctctggcgttggatcgcgagcggtgtctgcttgtcccgccgagggctcccaggacagggcagggatctagggggtttgcgcacctgctttttaatgccccgccccccctttttttttttaaaggggagggggnnaaagtgagggaggaaaanggncanaatactgactggaacgttaattcnancntttcatatgcaaaaagcggaatancagttccgnattnttcttttcagttnctccattaaattancttcattttcaaaggctccgttttgcangctnaattttgaaactancccgnggtttggcaaaatttgantganttcaggggtgaaagttngatccagtccangggtatttgaattt

SEQ ID NO: 17868 - DNA, 391 bp, Homo sapiens
gcgcagtgatgtgtgcttatgtcccagctacttgggagcttggagtgggaggatcccttgagcccaggaggtcgaggccacagcaagctatgattgcaccactgcactccaccctgggtaacagtgtgagactctcgaaaaaaacaaaagaatgacatctgcttcaaaaagtaagagtgtgtgcgtgtgtgtgtgtgtgtgtgtgtgtgtaaccccctttggcaatggagtagtctgttgtaggcctggagaaagcagacatttgaattgatccagttccaggcatatgggagtggcaagagaaatgggatgttactagtagtgattgaaatgaatgagctatggagtctagagagagaagaaagtgaatgtgagaaaggactgataggca

SEQ ID NO: 17869 - DNA, 465 bp, Homo sapiens
  misc_feature (1)...(465): n = a,t,c or g
cnaacagctatgacatgattacgaatttaatacgactcactatagggaatttggccctcgaggccaagaattcggcacgaggcaccccttcttcaccttgcacaaaaccaagaagacggacattgctgccttcgtgaaggagatcctgggagaagactcataggggctgggcctcggaccccactccggccctccagagccccacagccccatctgcgggggcagtgctcacccacaccataagctactgccatcctggcccagggcatctgggaggaaccgagggggctgctcccacctggctctgtggcgagccatttgtcccaagtgccaaagaagcagaccattggggctcccagccaggcccttgtcggcccaccagtgcctctccctgctgctcctaggacccgtctccagctgctgagatcctggactgagggggctggatgccccctgtggatgctg

SEQ ID NO: 17870 - DNA, 453 bp, Homo sapiens
  misc_feature (1)...(453): n = a,t,c or g
cccttnnatttgaaatccctntgactgatnacgaatttaatacgactcactatagggaatttggccctcgaggccaagaattcggcacgaggttactaaaaacgctgactgaaaagaatagacaatggtttactcttttgccacgaacaccctgtgatgacacttcacttactcatgccgatatgtcaactgcttctttggtgactcctcagtctcagccaccatctaagtcaccttcacctaccccagctcctcttggatcttctgctcagaatcctgttggcttaaatccatttgctttatcacctcttcaggtgaaaggtggagtatctatgatgggacttcagttttgtggatggcccactggtgtggttacttctaatattccatttacatcatctgtacctagtctaggatcggggttagggttatcagaaggaaatggtaattcat

SEQ ID NO: 17871 - DNA, 331 bp, Homo sapiens
gctccctgttctatttcctggacctagtgccatccagacaactctaactcgtgaaaaggggtaatggtaattacaagtgaccccttgcctttatcggctccctcaggtccttggttatcctgtgacagaaaactctaaagtcagaaaaattttcaatccacttggcaccccagtaagagattgaacatctgccactcttggagccagttggtttctcaccctccagaaatgggagatttctgttgaacaagaacagcagggttgggaatgccttcacttggaggatgtgtcagtgcaacggtggaagccttcttgcaatagcttcaggatc

SEQ ID NO: 17872 - DNA, 513 bp, Homo sapiens
  misc_feature (1)...(513): n = a,t,c or g
tttnnnnccnaacagctatgacatgattacgaatttaatacgactcctatagggaatttggccctcgaggccaagaattcggcacgagagtgcaacccctgtctctacaaaagagaattaactagttgtggtggtttgatcttgttgccccagctactcgggaggctgaagtggaaggatcatttgatcctgggagttcaaggctgcagagagctaagatcacaccactgtgctccagcctgagcaacagagtgagaccctgtctcgaaaggaagaaagagaaaaaggaaaaagagaaagaggcatgtgatgaattagtttagtactattctagtttaggaaaattggccttcattagtttatcatgtatttctattcttttattcattcttaggtaaacattgaataccttgagagcatagggcagatggtaaatgctttcttctggggtgattggggaaggcttagcagagatcacatttaaatcaagtcttgaaggaggaagtagggttt

SEQ ID NO: 17873 - DNA, 371 bp, Homo sapiens
ggcccagagaggatcctttaagttggaagcactaggaagccaaaggagatgatgagacacccagttatctgctacctgatgagatacctggttaacaaaggaaatgggatgtgcccgcagcaggggctttggggatcccttattgacagccacagccttcttctcaactatgcctggactgaccctgcgtaacactcaggtgaataatgccacagcggcatgtctcatatgtgtgcatttatctttaaaaggcctagactagcagctgagaatatggactctagggctggctggactgctatttgcatccagccccagttcatcagcttaccttggctgtgcacctgaggcagatcacttaaaatgtttgg

SEQ ID NO: 17874 - DNA, 293 bp, Homo sapiens
  misc_feature (1)...(293): n = a,t,c or g
gcaaattacttctttgtttttcttaatgatggcaatttttaaactttaattttattgtgatctcttaaagcagaggttagactttacctttctgactctgtcgtccaggctggagtgcagtggcgcaatctcactgcaagctccacttcctgggttcatgccattttcctgcctcagcctcccgagtagctgggactacaggtgcccgccaccacgcccagctaattttttgtatttttagtaaaancggttcaacngtgtaacccaggatggnctcnanctccngaccttgg

SEQ ID NO: 17875 - DNA, 354 bp, Homo sapiens
gctgggtcttatttctggtctctactaagcctaagagcaaagttttgttttattttacattatgaatttaagatattcctccaaagcatgtttcttttaccaagcagaatataataatgtgggcttcataaaacagtgacaggttgggcatggtggccaacaaagccttctgtattcctgtagtcagaaacagaaagccccactcaaactctcttgaacaaaaaaagtttactcacctacatacctagaaagtcaagaggcagctttggtgccttttgccagcagcctagtgataataccatgtccactacagcaactcttcttctagtgaaagaacccctctcttcctcccct

SEQ ID NO: 17876 - DNA, 482 bp, Homo sapiens
  misc_feature (1)...(482): n = a,t,c or g
tcccccccccccttttnanntcntatgacatgattacgaatttaatacgactcactatagggaatttggccctcgaggccaagaattcggcacgagtgaaggagatcctgggagaagactcataggggctgggcctcggaccccactccggccctccagagccccacagccccatctgcgggggcagtgctcacccacaccataagctactgccatcctggcccagggcatctgggaggaaccgagggggctgctcccacctggctctgtggcgagccatttgtcccaagtgccaaagaagcagaccattggggctcccagccaggcccttgtcggccccaccagtgcctctccctgctgctcctaggacccgtctccagctgctgagatcctggactgaagggggccnggatgccccctgnggatgctgcttcccctgcacagcaggctgcagagcctgggaggaaggccaccgcttgcca

SEQ ID NO: 17877 - DNA, 450 bp, Homo sapiens
  misc_feature (1)...(450): n = a,t,c or g
ggaaggatctaactagataaactttgtctttaagacagtcctgactctcagactccacaggtgggtgcaaacaacagtgctccccactggagatcctggggcccactttggcttgccttcagaaagggaagacaaagtgtccctcccaagttacaaacgcaggttgtatactgtggcttttactctctgataaccaaattagccttctaaacaactattctcagcagaagtaagggtggtcttgatttttgtgtttttttttgccatccatactagtctgcttcctgtcttttcagagagcaaggctgtttgtaagaaaaatgtgtgaactgaaaaccaccactaccacctattagatgagtacaagaataacccgaaaaccaaatacgaaaatganctgtcagaanctgtttgataacctctctttntttgaaaggaaaaattaaaaat

SEQ ID NO: 17878 - DNA, 413 bp, Homo sapiens
gaaaattaatgttcctggcctgttatttctaaactgaacctttcattactttctttagccaaaaaacaggcctgctgcatgtacaggaggaagatagcaatgtttcagcctaagggtccaaccggagaaactaatatgcagagatggggctgtgagatggccctattgggttggaatcagaactagaagtcacacaaccttgaacctgggaggcggaggttgcagtgagctgaattcacgccactgcattccactctgggtgacagagcaagaaaaaagaatacttgtacaacaatgagagtattcagttaatgagtgactcttgcccaattctgtaactttagagtaacaagcgttggaagaagagaagaatggatactggggagcaattggcaatctttatgacaatacca

SEQ ID NO: 17879 - DNA, 345 bp, Homo sapiens
ggagaacatccataatttggggccctgagttttacccagactcaaggagttggtaaagggttaatagccagatagtagaaccagtgaggagatgcggccaaagattctttatatctgaaccaagatgtgaaacaagaaatgctttgaggctttctaagcgatcctcctgtctaatttgcacctttgtctggatgcacacttctgaccttgctgccacaacctgtggggtctgatgtgtcccttgatgggtgctgccctcagggactgcaccctgacaagtgttaaggcaacattcctttcttgtgccctgggccaaaaccaatgctgatgaccttatcagcttcc

SEQ ID NO: 17880 - DNA, 394 bp, Homo sapiens
ggaagtccaggccatcaagcacttcctccgcatcagcgctatatgggcagccactattgctttctgtccccaagcacaagttaacccttgagtctttgtaccaggctgtttgtgatcgtatcagccgctatgtgaaacagcctttacctgatgagtttggcagctcacccttggagccaggggcctgcaatggctccaggaacagctgtgaaggagaagatgaggaagaaatggagcatcaggaagaaggcaaagagcagctttcagaaacagaaggcagtggggaagatgagccaggaaatgaccccagtgagaccacccaaaagaagatcaaaggccagccctgcccaaaaaggctttttaccttcagtcttgtgaactcctatggaacagg

SEQ ID NO: 17881 - DNA, 366 bp, Homo sapiens
  misc_feature (1)...(366): n = a,t,c or g
gcaaaattacttatcctcacctagctcctaccactcttcttagagactctccagtcagaagtgtgacgcatagttccacctccacacctctctgctgccagcacattcatgcagaaaagtcttttcacctgtctcagtcttccgcaggcttacctgcgccaggaagtctaaccaaggaacaagaatctcactatcagaggcacaaatctgggacctgtctttccaactaaattggaggctttggaagggcagctttgtcctatactctctccaccctgaaaagttccagaaagccccttccctccaagcagngaattaataaccagcaggtgcctatcactgagaacagaagagctganttaggcg

SEQ ID NO: 17882 - DNA, 1100 bp, Homo sapiens
accgttatgacatgattacgaatttaatacgactcactatagggaatttggccctcgaggccaagaattcggcacgagcagaagggctacaatgtcaagtccgacgtctggagcctgggcatcaccatgattgagatggccatcctgcggttcccttacgagtcctgggggaccccgttccagcagctgaagcaggtggtggaggagccgtccccccagctcccagccgaccgtttctcccccgagtttgtggacttcactgctcagtgcctgaggaagaaccccgcagagcgtatgagctacctggagctgatggagcaccccttcttcaccttgcacaaaaccaagaagacggacattgctgccttcgtgaaggagatcctgggagaagactcataggggctgggcctcggaccccactccggccctccagagccccacagccccatctgcgggggcagtgctcacccacaccataagctactgccatcctggcccagggcatctgggaggaaccgagggggctgctcccacctggctctgtggcgagccatttgtcccaagtgccaaagaagcagaccattggggctcccagccaggcccttgtcggccccaccagtgcctctccctgctgctcctaggacccgtctccagctgctgagatcctggactgagggggcctggatgccccctgtggatgctgcttcccctgcacagcaggctgccagtgcctgggtggatgggccaccgccttgcccagcctggatgccatccaagttgtatatttttttaatctctcgactgaatggactttgcacactttggcccagggtggccacacctctatcccggctttggtgcggggtacacaagaggggatgagttgtgtgaataccccaagactcccatgagggagatgccatgagccgcccaaggccttcccctggcactggcaaacagggcctctgcggagcacactggctcacccagtcctgcccgccaccgttatcggtgtcattcacctttcgtgttttttttaatttatcctctgttgattttttcttttgctttatgggtttggcttggttttcttgcatggg

SEQ ID NO: 17883 - DNA, 500 bp, Homo sapiens
  misc_feature (1)...(500): n = a,t,c or g
tttgnnttgataccgttatgactgattacgaatttaatacgactcactatagggaatttggccctcgaggccaagaattcggcacgaggattattaacatatgtttttggagggggattttgcgagttgcatttatatgtgggtatcctagatgtcctggggatacacaccaggtaaaagagaagaaagtaagatggtataccttctgcaactttgtcaattctttgtgcttttgctcagtgtaccagggagatggaaaaaattctaatcaaatgtctcataaaaacatttatatgcccataccagaaaatggcaatcaagcatgctagatttcactcctttttattcctcatgctatttattttccacatgtgatcttttccattactttgaagggtttgtctaaaaactaattatttccttcttggcactggggctgcaattcaggtagcggccacctgttaaataattaggcctttttattgactccatagctatag

SEQ ID NO: 17884 - DNA, 337 bp, Homo sapiens
gctgaaaccaaacaacttgttgctagatgaaaatggagttctaaaactggcagattttggcctggccaaatcttttgggagccccaatagagcttatacacatcaggttgtaaccaggtggtatcgggcccccgagttactatttggagctaggatgtatggtgtaggtgtggacatgtgggctgttggctgtatattagcagagttacttctaagggttccttttttgccaggagattcagaccttgatcagctaacaagaatatttgaaactttgggcacaccaactgaggaacagtggccggacatgtgtagtcttccagattatgtgacattt

SEQ ID NO: 17885 - DNA, 252 bp, Homo sapiens
gggcaaggcttccaggccagttggcccaggcccctggcagggctcccggaggggcccaggaaggcctgggcagagaccctgtaggatggggtcaggaagggttgcctgcagggacttttgctctgctgtcctggaccctgtgtgcctcataagggctattctttctttcacgtgcaaaacatttttctgaaatagcaaacaacctacatgtttgctgataaaagattggctaaacaaatttttttttttttt

SEQ ID NO: 17886 - DNA, 381 bp, Homo sapiens
  misc_feature (1)...(381): n = a,t,c or g
gtaaaaatcagtattggccaggcacagtggctcacgcctgtaatcccagcactttgggaggccaaggtgggcggatccganactgtgncagcaccctgnccaatatgnaaaannctnattngtnctaaaantacatgnttatctggctatggtagctacatgccttttcctanctcctcggaaggntgangcaggagaatcacttgaacctgggaggtggaggctgcggtgagccgagattgtctcattgcactccagcctgggcaacaanagtgaaactctgtctcaaaaagaaaaagaaaaaggaaaaaaanntcagtaatacttgggcacagtggctcacacctgtaatcctagcactttgggaggccaaggcaggca

SEQ ID NO: 17887 - DNA, 1082 bp, Homo sapiens
ccacgaatttaatacgactcactatagggaatttggccctcgaggccaagaattcggcacgagcgaaaatgtcaaggttccagaagccaatatcttgggacaaattggacatggctataagtatgccatagggagtctcaatgaaggtagaataggaattgctgcacagatgctgggactggcgcaaggatgttttgactacactattccatatattaaagaaaggatacaatttggcaaaagactatttgattttcagggcctccaacaccaagtggctcacgtggccacccagctggaagctgcaagattactaacatacaatgctgctaggcttttagaagctggaaagccattcataaaagaagcgtcaatggccaaatactatgcatcagagattgcaggacaaacaacgagtaaatgtatcgagtggatggggggagtaggctacaccaaagattaccctgtggagaaatacttccgagatgcaaagattggtacgatatatgaaggagcttccaacatccagttgaacaccattgcaaagcatatcgatgcagaatactgacgtctataggagtgggacccctccctggtgtcactgctgtaaaattttaaacggttgtgtcttgttgggagtaagtgccttgcgtgggaataaacttccacagcattcgaatattttaatgaagcccttagtcagggtcctggtgttggcctttttggttttctcttttcaggctgtttaacttaggcacaggagatccacttttaaacttgggaaataagcacctgtatttttttccaaaactgtttttaaagctgtatacgcatacatatatatatttttactctgtcttactctgtcacccaggctagagtgcagtggcgcgatctcagctcactgcagccttgacctcctgggttccagtgattctcatgcctcatcctcccaagtagctggaactacaggtgtgcaccaccatgcctgggtcaattttgtgtttttagtaaaaatggggtttaccatattgcccaggctggtcttctggcttctgggatatcgccaacttggctcccaa

SEQ ID NO: 17888 - DNA, 383 bp, Homo sapiens
gctcactgggaatacaaaagttagctgggcgtggtgacatgtgccctgtggttccagctactggggaggctgaggcaggagaatcacttgaacccgggaggtggaggctgcagtgagccgagatcgccactacactccagtctgggcaacagagcaacaccctgtctcaaaaatgaaagagaagagaagagaagagaaaggagggcagggcggtgctgggcagggcggggagacagtacaatacagtacaccacagggtaggtagagaagacagtacatacaatacaccacagggacaaggcagtccagtgcatgtgctggccctgaccctgtgctggagggaaaaacatgctgtcgtggatactaacggaaccactgaggaa

SEQ ID NO: 17889 - DNA, 426 bp, Homo sapiens
atcttcttcagctatccacatgattacgaatttaatacgactcactatagggaatttggccctcgaggccaagaattcggcacgagatgaggtaactgcctcaggcacaaaattttgacaggtgcaaaaaaatgcagtaatcaaataatattttaatacaatattttaaaaatcaaaattaatgcaaaaaggtatgatgaacaaaatgcccaaattttaaataaaagcaggatcagtagttctaatttttccttttgccctgagctccaagatggctatattctgcactattattcaccctgcctttatttaaaatttgggtatttgagtcattgtgtgttttttcatattaattttcatcttataaaatattgtggctggtcgcaatggctcacacctgtaatcctggcactttgagaggctgag

SEQ ID NO: 17890 - DNA, 451 bp, Homo sapiens
agtaacaggacctctttctagctctcagaagagtttgagaagaaaggagccctgcgttcttataagctgagcagcagatactgtgatgatggattgcaagtgcaaagagtaagacaaaactccagcacataaaggacaatgacaaccagaaagcttcagcccgatcctgccctttccttgaacgggactggatcctaggaggtgaagccatttccaattttttgacctctgcctccctctgctgttcttctagagaagaatttccttacgacaatgacaaaacatgtactagctgcatccttttctatgctctccctgctggtgataatgggagatacagacagtaaaacggacagctcattcataatggactcggaccctcgacgctgcatgaggcaccactatgtggattctatcagtcacccattgtacaagtgtagctcaaagatgg

SEQ ID NO: 17891 - DNA, 469 bp, Homo sapiens
gcaatattgagcaagcagctctctgtgccaagcactgagcataggggctgcagacaaaggtacagagataacttaagcactttcaatgagggtgatgaaaacatgcctaccttactatactccaaggcacagtgtgtcataaaagaaatataaaccaagtactatgctagcctggagaagagaaggattaattcttaccgagggaattagacaagactttaaaaataggaggtagcctttaagccagcctttgaaagatgaggagaattttgacagatcgagattggaaggaaggatcttcctggcagaggaatatggcatgagcagtggctcaaagacatgaaagtacatcgatagcattatgtggctggggagctgaggccacaagccagattggaagaggacgtggcagtgaaagatgagatggaaaaggtggtaaaaaattgggaggccatgaatacatactaag

SEQ ID NO: 17892 - DNA, 371 bp, Homo sapiens
aagtattaatatctcttttatagattatcccattatgagaggtacagagtaataacaaacccaattaaagacatagaaagatgaaatatgaaggaaggattcaaacccaaggcagcctgactccagaaacaaaggattaaccacacaatgattacaactcacagattattacaattgcaagaagtacctaagcatgtggttataggcgggaaggaaacatgacctgctatagtaaccagaccagattggtgttctccccacttacaaagtattatttatttatttatttatttattttgtgatgaagtcttgctgtctcccaggctgggctgcagtggcaagatcttggctcactgcaacctctgcctcca

SEQ ID NO: 17893 - DNA, 193 bp, Homo sapiens
aattcggcacgagcacctattcaacccagatctgttcttctccatcttccctatctcagtaactggtaccgcatttgctcaggtgcgggggatcgggcaggcttcctccctactcctcatcctgtgtcagtcctcagccaagcgttggttccttgtgctttgaagaacgtttctaggaattgaacactcctcc

SEQ ID NO: 17894 - DNA, 630 bp, Homo sapiens
ctccctgagtgagacttgcctgctgctctggcccctggtcctgtcctgttctccagcatggtgtgtctgaggctccctggaggctcctgcatggcagttctgacagtgacactgatggtgctgagctccccactggctttggctggggacacccgaccacgtttcttggagtactctacgtctgagtgtcatttcttcaatgggacggagcgggtgcggttcctggagagatacatctacaaccgggaggagttcgtgcgcttcgacagcgacgtgggggagttccgggcggtgacggagctggggcggcctgctgcggagtactggaacagccagaaggacatcctggaggagaagcgggcagtgcccggacaggatgtgcagacacaactacgagctgggcgggcccatgaccctgcagcgccgagtccagcctagggtgaatgtttccccctccaagaaggggcccttgcagcaccacaacctgcttgtctgccacgtgacggatttctacccaggcagcattcaagtccgatggttcctgaatggacaggaggaaacagctggggtcgtgtccaccaacctgatccgtaatggagactggaccttccagatcctggtgatgctgga

SEQ ID NO: 17895 - DNA, 318 bp, Homo sapiens
ctcgctctctcgtcgccaggctggagtacactggcgcaatgtctgttcacggcaacctctgcttcccgcattgaagcaattctcctgcctcagcctcccaagcagctgggactatacaggcttgtgccaccatgcccggctaatttttgtatttttagtagagagggggtttcaccacattggccaggatggtctcgatctcccaacctcgtgacccccccccgcctcagcctctcaaagtgggattacatgtgtgagccactgccccggccttcacgtgtcatttctttttgtaggaaccaattttaaaagaaagcc

SEQ ID NO: 17896 - DNA, 335 bp, Homo sapiens
ctgatttttatatctggcaatattgctgaattttctcttgagttctagaggttttctgttgatccagttggttttcaagggagacaagcaatttctctgcaaatattttaactctttccttctagtctttgtcgacgcggccgcgaattccagatctatgaatcgtagatactgaaaaaccccgcaagttcacttcaactgtgcatcgtgcaccatctcaatttctttcatttatacatcgttttgccttcttttatgtaactatactcctctaagtttcaatcttggccatgtaacctctgatctatagaattttttaaatgactagaattaat

SEQ ID NO: 17897 - DNA, 442 bp, Homo sapiens
gatgaaaaaggctccagtaaatggagccaagtcttggggggacaaggggaacttgatccttcagggaagaatcatctccaaaatgactccccatctggtttcttctaccacccaattctactaggaaaggagcacttaggaggctcttgggatgcatcaagtcccaggcaatgccagcatttcatgggggctgaggcagaacccaggagctccaagaaaggccacccatagagctcatcctctgtggaatcactgccggttagaacactgaggtcaagccagtcctcccatggtcatgccacccaccagggaagcatgcctgatctcttctttactgccagccttgaggagagcagaagcctccatttttaaagacaataaagacctccaagggtacttctttggaaatgaaatgtagcacaatcttacctacgttaccagg

SEQ ID NO: 17898 - DNA, 410 bp, Homo sapiens
gcagacaggttttcctaggagcaggattccaactcttagaatcttgactgactttgatttgaaaggattggccagctttttatgacctctggtaattgcagctttggggaacttgaaccttttgttctgtacatcatggtacatgaacgctatagaccttgctccaaaccctaatgaccctgggttttggtagggttgctgtggggcagattgggttttgtattttcatgagtgttaactccttaagcaagtatgtgttgacataaggtgggcaggagctatgtaatgccacagagggctttctggggatgaggtactaggctggatcttgacagaagttaatcatatgtagtaagcctgtgagaggagggcagcagcagccaggaactgtgctctgcactggaggaatg

SEQ ID NO: 17899 - DNA, 346 bp, Homo sapiens
gagtttcttcaaagctcctttcagaggatcatctaagttagcaccattttcccattgactgttcacttctaattccaggttatcatcatccgttgtgtcttcttcaagcacagcagcctgatctttcatcattggcaagtgtccagtcagggtcttgatgtgattttctttatcattcagaacttgttctgcgtgtactttggagtcttcaaatgttattttctgtttattaagttcactcacttgtcctttccatacttcagcttcttgctgaaaaagctgtttatggcttgtctgaagttgagaattttcattcaaagcatcttttattgctatagcccgtcgg

SEQ ID NO: 17900 - DNA, 539 bp, Homo sapiens
  misc_feature (1)...(539): n = a,t,c or g
cngttatgacatgattacgaatttaatacgactcactatagggaatttggccctcgaggccaataattcggcacgaggcggatgggacggacttcccccagctgtgtcaactgtgtccagggtgtggctgctccacccttaaccaatacttcggctactcaggagccttcaagtgtctgaaggatggtgctggggatgtggcctttgtcaagcactcgactatatttgagaacttggcaaacaaggctgacagggaccagtatgagctgctttgcctggacaacacccggaagccggtagatgaatacaaggactgccacttggcccaggtcccttctcataccgtcgtggcccgaagtatgggcggcaaggaggacttgatctgggagcttctcaaccaggcccaggaacattttggcaaagacaaatcaaaagaattccaactattcagctctcctcatgggaaggacctgctgtttaaggactctgccacgggtttttaaaagtnccccccaggatggatgcccagatgtacctgg

SEQ ID NO: 17901 - DNA, 710 bp, Homo sapiens
ggaatttgtgagagagattaagcattcatcatttggaagaaatgtatttgcaatttcatatataccaggcttgctctttgcagtgaatgggaagcctcattttggggaccaagaacctgtacaaggatttgtgatgaacttttccaatggggaaattatagacatcttcaagccagtgcgcaagcactttgatatgcctcatgatattgttgcatctgaagatgggactgtgtacattggagatgctcataccaacaccgtgtggaagttcaccttgactgagaaattggaacatcgatcagttaaaaaggctggcattgaggtccaggaaatcaaagattctgaacacaaactcgagacgagttcaggaagagtactgggaagatttagaggaaagggacagtcgaaaagggtttgaccggcttagcactgagggcagtgaccaagagaaagaggatgatggaagtgaatcagaagaggagtattcagcacctctgcctgcgctcgcaccttcctcctcctgaaaaccaagctttgatttagattgagtaagatttacccagaatgtcagattcctttccctttagcacgtttaaagttctgtgtatttaattgtaaactgtactagtctgtgtgggactgtacacactttatttacttcgttttggttaagttggcttctgtttctagttgaggagtttcctaaaagt

SEQ ID NO: 17902 - DNA, 340 bp, Homo sapiens
gtgtagaggaagagtagaagcggcctgtctctgggagttcagggtgcctggatggggggtgaggggttgagaagctggaggaaggtgctgatgacttgggaaacaggagggttggctgatgggccctcccagcttgaggcgagcatgttagatgtggcccccattctactgcctatttccaaaatgaaatcttacgtccccttcaacccagagatttaacccagaggagacatttgttggagatgaaatagagcctttcttaaaagtagaagggaaataaacctgtcttggagggctgccacaggggtccactctgctggaccttggcagtgagaacagt

SEQ ID NO: 17903 - DNA, 395 bp, Homo sapiens
gctttgagccacagaattgaagctgaaaatattcttagaccaaacattttgtgagcacctgctatgtaccagatctcatagctgggactaatcagaggaagaggaatagaataagtgttcttgccaatgtgaaagacaaacaaataattctactccttgtgaggacagctataacagagggctatagaaactatcatgtgttgttcctggtttttgtttgtttttttttccccccaaaacagggtcttgctctgctttccaggctggagtgtggtggcacaatcataactcactatagccttgaactcctgggctcaagttatcctctcacctcgacctgcagagtagctgggactacaggcgtgtgccaccatgtccagctattttaaaaaatc

SEQ ID NO: 17904 - DNA, 359 bp, Homo sapiens
gctcaggcttcatcctgtttccaaaccctctttgatttgttcaaggtgcctgattctctgtgttctatccttgagttcagacgacactcaagcagacagccttactccacggatcagccatttatatatctggtaggcaagagaatactcttctgtcctctgacttaggatttaactcatgatgcttgctattttcttacctacccttcatcctttgtttagagctccaatcattataaacattctcatatcctgttctctgctatttgcacatcccagtcacataggatcactaataatagaagcatttactcaaaaccaaggtggtccccatgcctagaggctgagaatcccaagaa

SEQ ID NO: 17905 - DNA, 350 bp, Homo sapiens
gcctccatagctcactggtactcatgcaggggcatctgtgggataatgcctagaagtgaagggtctggaccaaaggacaaatgcatctggaattttgttcgatttgtcaaagttccttccagtgtataggggcctgattccccagattcctcacttctacaaactctcatccactgttgtttgcttagggatttcagcagctgtttagtccaacattttagccccagacatgggctgacccaagatttcctgcggttctgtctccctctaggaatatccgcgtggctgtccttccttgctctgaaagcacaacctgcctgttccggacccggcctctggacgcctcaaca

SEQ ID NO: 17906 - DNA, 1011 bp, Homo sapiens
gaaaaccctatgactgattacgaatttaatacgactcactatagggaatttggccctcgaggccaagaattcggcacgaggaagtaatgtgcaggactccttacatcagctcctctgagtctcttgattcagccttgcctccctctctccccctttgccccctccccgtcccacccttaggcgctgggagaagggagggtggggaggtcaggggcctctcagaggggcctcacttgttaacccagcccccatttcaggtctgaaggggcgtctcgattacctgagctctctgaaggtgaagggccttgtgctgggtccaattcacaagaaccagaaggatgatgtcgctcagactgacttgctgcagatcgaccccaattttggctccaaggaagattttgacagtctcttgcaatcggctaaaaaaaagagcatccgtgtcattctggaccttactcccaactaccggggtgagaactcgtggttctccactcaggttgacactgtggccaccaaggtgaaggatgctctggagttttggctgcaagctggcgtggatgggttccaggttcgggacatagagaatctgaaggatgcatcctcattcttggctgagtggcaaaatatcaccaagggcttcagtgaagacaggctcttgattgcggggactaactcctccgaccttcagcagatcctgagcctactcgaatccaacaaagacttgctgttgactagctcatacctgtctgattctggttctactggggagcatacaaaatccttagtcacacagtatttgaatgccactggcaatcgctggtgcagctggagtttgtctcaggcaaggctcctgacttccttcttgccggctcaacttctccgactctaccagctgatgctcttcaccctgccagggacccctgttttcagctacggggatgagattggcctggatgcagctgcccttcctggacagcctatggaggctccagtcatgctgtgggatgagcc

SEQ ID NO: 17907 - DNA, 353 bp, Homo sapiens
cagaaagcaggattagaaggagtaagcattgggcccttttctggactgggaattagaagtcaaggagcatggggagagttgagaagttcaagggtgttagccagttattatttcatagttgggcagaggtgagtaaaactctgtttgcaggccattattagttctggcaataggtgagggagaaggtcaaagctaatattttaaagaatagtttggaattattgatggttttcaattatctctgctaaatcattttatttagggagtatctgcacagaattaacaaggaaagagagcaaaggtcgacgcggccgcgaattccagatctatgaatcgtagatactgaaaaaccc

SEQ ID NO: 17908 - DNA, 231 bp, Homo sapiens
gaaaaaatttttggtgtgagttttcacatactttatttccatgaaatgaagacatcattgattgtaaaacattattttgtataccacggagaaagaaaactgctaattagtcattaagatgccaccaactggaagatatctcctgactttgacaagatgaaaaaatgtgcaactgaaaatcaatgaaatctggtacatttcctaacatcaaaccaactttgcattctttag

SEQ ID NO: 17909 - DNA, 355 bp, Homo sapiens
gcacaaaaatctataggatcatcattttagggtaaaaaaatgtttaaactgaaaacacttagctttaagaaatactttctacattacctatttttctctttttccttcagacccagagaaacattagtcatgcgatctgtccctatctgcccgccctggccaaggacttctttctctatgcttgtttgttgggactaggggaggctgcatctgagactcaagcatggcactattggtaccttgagttcaacataccttgttgcctattcaggggacctgagaataaatctcaggggctgctaaccctgtccagcatgttttgaatttagatagggctttcctagtgggctgcctg

SEQ ID NO: 17910 - DNA, 443 bp, Homo sapiens
  misc_feature (1)...(443): n = a,t,c or g
gtaaatatttggagaacactaacaggattaaagccaaaagtatttcctagtctccctcatctcccatgcctctgcaacctttatctcatcacaggtaagacatgctgttatcctgttaagcaattccattgacttgccacatattttttcaggtttttaacgttttcttaagtttttgttatatgtttgcaaaggaactaaagttttatcacttcattgaagtctaatatgttgacacactctcacatgaatttgcccagaacacttttatgatccatctgtgttgcacatatctgtggtgtgagtcctttaagtcctgnggtagatatgnctctgtatgtatgtttccttatgagaaggtatgntcctctcttgtnaggaagaccnttggnttcaaattggaaacctcggaaacttanaaagnttttaggccctttnngggc

SEQ ID NO: 17911 - DNA, 454 bp, Homo sapiens
  misc_feature (1)...(454): n = a,t,c or g
tttggatanccntattnnatgatnacnaatttaatacgactcactatagggaatttggccctcgaggccaagaattcggcacgagaagatatccccatagcgaaagaacggacacatttcaccgtccgcctgaccgaggcgaagcccgtggacaaagtgaagctgatcaaggaaatcaagaactacatccaaggcatcaacctcgtccaggcaaagaagctggtggagtccctgccccaggaaatcaaagccaatgtcgccaaagctgaggcggagaagatcaaggcggccctggaggcggtgggcggcaccgtggttctggagtagcctccagctcggaggacttgtgttcaggggtcctgggccccgggcgaggtcccgccctcccgtggtcactggctccgtccccagcaccaggcgcccagtggagccgtttgggagaattgcctgcgcc

SEQ ID NO: 17912 - DNA, 514 bp, Homo sapiens
  misc_feature (1)...(514): n = a,t,c or g
tnnnttgganncttganncaaagctatgacatgattacgaatttaatacgactcactatagggaatttggccctcgaggccaagaattcggcacgagccttccagcccgcggaccgatgctgccggcggccgctcgccccctgtgggggccttgccttgggcttcgggccgctgcgttccgccttgccaggcgacaggtgccatgtgtctgtgccgtgcgacatatgaggagcagcggccatcagaggtgtgaggccctcgctggtgcacccctggataacgcccccaaggagtacccccccaagatacagcagctggtccaggacatcgccagcctcactctcttggaaatctcagacctcaacgagctcctgaagaaaacgttgaagatccaggatgtcgggcttgtgccgatgggtggtgtgatgtctggggctgtccctgctgcagcagcccaggaggcggtggaagaagatatccccatagcgaaagaacggacacatttcaccgtcgc

SEQ ID NO: 17913 - DNA, 301 bp, Homo sapiens
gttggatgatatggtttatctcacggctgccagcaccactctgtaatatttgaaatgcacatttttatcttacaatagaataatgtgagagcaccttagggcagattattttatgttccttccatgtaccttatacacatcatatactcaagtgaatctgtaagcttgaatagtgggaacatttacagagcaacagactgctgcttccaacaaaactgttattttagtcttttgtttttttcaagattcagtatctctatgatattccattcttttcgtttcatgttcttatagtaagtgc

SEQ ID NO: 17914 - DNA, 1002 bp, Homo sapiens
ggtggctcacacctgtaatcccagcactttgggaggccgaggcgggcgcatcatgaggtctggagttcaagagcagcctggccaacacggtgaaaacccatctcaggtgcctgcgtactaagacctgtgttcaacagcggcggcagcagcagcggttgggctcgcggcgagcggacggggtcgagtcagtgcgttcgcgcgagttggaatcgaagcctcttaaaatggcagatgacttggacttcgagacaggagatgcaggggcctcagccaccttcccaatgcagtgctcagcattacgtaagaatggctttgtggtgctcaaaggccggccatgtaagatcgtcgagatgtctacttcgaagactggcaagcacggccacgccaaggtccatctggttggtattgacatctttactgggaagaaatatgaagatatctgcccgtcaactcataatatggatgtccccaacatcaaaaggaatgacttccagctgattggcatccaggatgggtacctatcactgctccaggacagcggggaggtacgagaggaccttcgtctccctgagggagaccttggcaaggagattgagcagaagtacgactgtggagaagagatcctgatcacggtgctgtctgccatgacagaggaggcagctgttgcaatcaaggccatggcaaaataactggctcccagggtggcggtggtggcagcagtgatcctctgaacctgcagaggccccctccccgagcctggcctggctctggcccggtcctaagctggactcctcctacacaatttatttgacgttttattttggttttccccaccccctcaatctgtcggggagcccctgcccttcacctagctcccttggccaggagcgagcgaagctgtggccttggtgaagctgccctcctcttctcccctcacactacagccctggtgggggagaagggggtgggtgctgcttgtggtttagtctttttttttttttt

SEQ ID NO: 17915 - DNA, 514 bp, Homo sapiens
  misc_feature (1)...(514): n = a,t,c or g
ttgaanncnttganncctaacagctatgacatgattacgaatttaatacgactcactatagggaatttggccctcgaggccaagaattcggcacgagtggctgtgcactggggaggcctgtggcgtagaggaagggcagggtggtttgagagggtgaggctgagccactaaactggtctggatgactgtttggggaaggtatcttggaggaagtgctgtttgaacagagttgtgaatgactaagtgaagcaggtggagggatcgcaaatctaagccagctcccggtggcaacggctggatgtgggaaggggctggaaacagaagcccagagccaaggtctgaggggcagggcccagtagggtggctgagggcttccatctttatctcaatagtgaaagccactggagcaccctcgctctggctgcaggatcaacccccgcccccttttacctgtctgatcattcttcctcttttgcaatctggccaccctagaatcctggttgtccttaaacac

SEQ ID NO: 17916 - DNA, 388 bp, Homo sapiens
gacttgaaccctggaggtggagattgcagtgagccaagatcacgccactgcactccagcctggtgacagggcgggactctgcctcaaaaaaaataaaaataaaaaaggacattcctatttcagatatgttataaaaaatatgcatctagaattgatgaaccatgatagcatgttaacttttcagtgatattttatactgatggtggggggtgattttattttggggactggcttttccattatacatcttgtttattagaaataggacttaggccagtcataagtcctattacaggctcacgcctgtaatcctaacactttgggaggccgaggacggaggggattgcttaagccaggagtttgacagtagagtgagcaatgattgccc

SEQ ID NO: 17917 - DNA, 422 bp, Homo sapiens
  misc_feature (1)...(422): n = a,t,c or g
ggatgatttgttaattatttacacagcgtcggccccgcagaggactgcgctgacaggagcggctgtcacaggcctggccgtggggcagaagtgagcagccgtcttcccctggcagtcctcctgaaaaggtctgcatggcaaggcctgagggagtcctgcacattttatgcccccgccccccaaagccatttgggtttcccttaaactggcttgttttcctgagccggtggagagatccttgtcctccggaagtggctatcgctctggggcggcttctctgccagctcgtcacaccctanacccagctgtagtctgtgtggtgggagagggtgtcaccaggctctggaggtccactcctctgtagtcacctcatgcaaggagggcttcacaggggcccagcctctactccctcatccggaaaa

SEQ ID NO: 17918 - DNA, 326 bp, Homo sapiens
gacacttctttctcctacttgcttactgtgttgaaataaatatggttcccctccctctaagcataaagcttcatttaaatatcatcacaatttttaaaaactaattggtactagatgtgtcattctttttcattactaatataaattaaatggttaatgattcacaggaatatttttcctaaatcacatgccattaagattgccattaaattttcttggtagaatacatggcctgaaatgaagacaaataatagacttttttttttaaagaactgaaattataatgaagaagaagaagaaagaagaggaagtggaaagaagaggaa

SEQ ID NO: 17919 - DNA, 501 bp, Homo sapiens
  misc_feature (1)...(501): n = a,t,c or g
tgattacccgttcngacatgattacgaatttaatacgactcactatagggaatttggccctcgaggccaagaattcggcacgagcggcacgagtgataaatgagaaatggatatttcagttctttttctttctggcctatggtcattaacaggcttttgggacctttcagtagtattttcagaaaaatgaaaatttaaattcttagtaattacagtgagaaaactgtcatctggaggtaagacccctctccaaaggcttcacaaagttttggtgtattaaacctttccggattaaaaaattgtttaaaaggccagatgtggtggctcacacctgtaaaacccagcactttgggaggctgaggctggatcacttgggcctaggagttcgagaccagcctgggcaacatgtggaaatctcatctctacaaaaaacataagaattagctgggcatggttgtgcatgcctgtagtcccttctactcgggaggattacctgggccc

SEQ ID NO: 17920 - DNA, 407 bp, Homo sapiens
ggcctggcgtatggtcagtgctccataggtatgtgtcggatgcacaaggctttgggtgtaaccctcttgacgggtgggatcaacaggtctgggactcaccatcttctcaaacagagccttcctcctccactgctagccatggtccaggacgctgggcgagacccactgtcttgctctttgtaaggctgaagtccatttcccaggcggctacacccaacagatgctgagcaggctgggccaccctgggatccaagacacagagagaaagagcccctgtctggcgcctgaagcacatgccagaggacaggagccagcaggagcctgtttcagcctaactggggatttcattctggaggcgtgagatctgggagcccaaggctttgaactgggggaggtttggggtgttt

SEQ ID NO: 17921 - DNA, 144 bp, Homo sapiens
  misc_feature (1)...(144): n = a,t,c or g
gattcccttacnacatgattacgaatttaatacgactcactatagggaatttggccctcgaggccaagaattcggcacgagctaaatattgaaaagaagtcagttctctttgtactcctgggaagacaggaaaaaaaaaaaaaa

SEQ ID NO: 17922 - DNA, 348 bp, Homo sapiens
ataagcacaaaatttaccagtttacatttaaaaaacaaacaaaaaacgacaacaactcaagcacccgctctgtgcatagcactattctaggtgcaataaaagggaatcttaaccttagaaatatgagttcactttctggaattgtattatctccttttccagagagtaaaaataaataaaatcaccattgtttactacagatctgccccaaaccacatctggttcacagaaaggctaatttctgccaaattaaagatgtaatgaactcagttcctgctttcccaaaaacacgaaagcagaattccttttcactgaaaaaaataaacagttttccatgcaagggcagtt

SEQ ID NO: 17923 - DNA, 418 bp, Homo sapiens
accgttatgacatgattacgaatttaatacgactcactatagggaatttggccctcgaggccaagaattcggcacgagtgggatctgtagtgagccttatatgaaatatgtatggaatggtgaacttctggatataattaaaagtactgtgcatcgtgactggcttttgtatattattcatgggttctgtgggcagtcaagtatcctttctgaagaaaaagtaagatacatattactaaacttatgatgtatcaatttgtagacagctacatatgaattatatgattataataccactctggcaccccaacaggaaaacctgcccatgatactatgtagcagaaatacaaagaagaatgcagactatttgaacaggcctgttatatacacataaagatgaataaataacaaggaagaa

SEQ ID NO: 17924 - DNA, 521 bp, Homo sapiens
  misc_feature (1)...(521): n = a,t,c or g
tttgnatnctctganacccgntatgacatgattacgaatttaatacgactcactatagggaatttggccctcgaggccaagaattcggcacgagcaggtttctctgcaagctcctttgtaggttggcgcagctttgacaacatcccttttggttctcagagctcttctggagactttagttgtgggctgcctgctccttaggttcaagtaactggtaacacgcctacggtgctgagtgctccctgggagagcgtgtgaatcagaggtcagtttcagaggcacattctcaggggtcgtattcttcacccaggccaatgaccactgaagtcttcctgcacattgttctttgcagggacagctagctgctgggcacaatggggcacaaactggataaggctcctgcccattcaggagcttaggtcagtaattttcctagttcttctgcaaagaattgaactgtttcccctccctgcattctggtatccttttcagtgaggattccggaagagtctgagagaagg

SEQ ID NO: 17925 - DNA, 534 bp, Homo sapiens
  misc_feature (1)...(534): n = a,t,c or g
taaattgaaacaanngatccttngctatgacatgattacgaatttaatacgactcactatagggaatttggccctcgaggccaagaattcggcacgagtctagtattgtgtttatgaggattgaaggtggttacatctgtaaagtgctcagaacagtgtctggcacatggtaagatctgtgttcaggtttgttaggtaaggggcattgggctggtagtgaagtggggcgagcagacacacacgtgcgttctcatccccagcgatgccaggaccctgaacctgtgcagtgggtgagcccgacatggatggtcccgccgaaaacctcaaagccagtgtttccatgtacactaacaccagccaccatatgccggcttgccagacacaccgggaactttgcattcattttctcatcatgcagttcttatcaggctccatataaagtgtttatagatgaggaaactggggcttaggggcaataagcatcttgccaagctcccgtagcttgtaagtgccggagccaggaattgagccgaa

SEQ ID NO: 17926 - DNA, 819 bp, Homo sapiens
  misc_feature (1)...(819): n = a,t,c or g
ggagatctagcgactgaagcagcatggccaagccgtgtggggtgcgcctgagcggggaagcccgcaaacaggtggaggtcttcagacagaatcttttccaggaggctgaggaattcctctacagattcttgccacagaaaatcatatacctgaatcagctcttgcaagaggactccctcaatgtggctgacttgacttccctccgggccccactggacatccccatcccagaccctccacccaaggatgatgagatggaaacagataagcaggagaagaaagaagtccctaagtgtggatttctccctgggaatgagaaagtcctgtccctgcttgccctggttaagccagaagtctggactctcaaagagaaatgcattctggtgattacatggatccaacacctgatccccaagattgaagatggaaatgattttggggtagcaatccaggagaaggtgctggagagggtgaatgccgtcaagaccaaagtggaagctttccagacaaccatttccaagtacttctcagaacgtggggatgctgtggccaaggcctccaaggagactcatgtagtgagtggatagtccaccagccttttagctgggtgtgggacgaggaggtgtggaggaagaagtcctccttgtcttgtttgtgactttcccaatgtggagaatattaagctaaaagcattacctagaaaaactggtttgggcttcaacaaccttgacccttttctctgctcagtcctttgggatcctatttcttggtgctaanaaggggttcattctcangttaacctatttcctataaaaggaa

SEQ ID NO: 17927 - DNA, 349 bp, Homo sapiens
ggattgaaatcctatgtcgtgctcctccaccatatatctgttttcccccagcgttaaacaacagcttttattgaagtggcagtgtacagcagcggcagaggtactgcccctgtgtgcccagagtagctctctaccatatatcttgcagagaaattcttttgactcatatttttagatcttacatttttctagaatacctcccttgaatatgtaagaaaaaacttatttccttgaaatatatttaatactcagcttgggcaacatggcgaaactccctgtctcaaaaaaaacaaaaaaacaataattatctgggcgcagtggcacatgcctgtggtcccagctactccag

SEQ ID NO: 17928 - DNA, 383 bp, Homo sapiens
aattcggcacgaggtatttcttgctgcttggaactactttgcagtgattacttggttgcagtccaagtactctcgtttagtctgagcctggagatgttctagacttgcttctcccacctctgagattaggacaggaaaaatgtgaaatttcccaattacaggattatacggtaccatcacatcatttgtggaaattggggtgactgtatagctgggattgggctaaggactgtggtcttatctgtccacatacagccaaaatgcctatccaaaaatccagttcgttggaaaggaaaattggtactcctgtgccacaggggttccagaaaagggaagtcactttaccttgcggtggtgggatcctgatgtctttcatccatttg

SEQ ID NO: 17929 - DNA, 481 bp, Homo sapiens
  misc_feature (1)...(481): n = a,t,c or g
cccaantgctatgacatgattacgaatttaatacgactcactatagggaatttggccctcgaggccaagaattcggcacgagaaatatggagacaaggggaaaatattttacgaagctctgtgttctcaacgccctcatgaacttttcagtaggctgtctggtttatgtgtggtcaacttgaaaaactaattgaatctaggtctctgtattgttcctgtttctaccctgactgtttccgtcacaccaagcccttatctggggcgcgtcttcctgcccaggtggaacactggcattttgttgactgtcaggttaggtgtcccttagtcgtcatcagaagctgaagccttcctttccacaccctcatcagattcatctccactgataaccggttccttgatgcagacatagnttagctttctttgactgcagagatgnctcattccacagacatttcttgaacccatttgatgtgtccaatag

SEQ ID NO: 17930 - DNA, 350 bp, Homo sapiens
ggccggcgggaggccgagcggggctcgacagagcaggatcgagatgaccacagccacccctctgggggataccaccttcttctcactgaacatgaccaccaggggagaagacttcctgtataagagttctggagccattgttgctgccgttgtggtggttgtcatcatcatcttcaccgtggttctgatcctgctgaagatgtacaacaggaaaatgaggacgaggcgggaactagagcccaagggccccaagccaaccgccccttctgccgtgggcccaaacagcaacggcagccaacacccagcaactgtgaccttcagtcctgttgacgtccacgtggagacacgat

SEQ ID NO: 17931 - DNA, 499 bp, Homo sapiens
  misc_feature (1)...(499): n = a,t,c or g
tttgaanccatcnttnatgacatgattacgaatttaatacgactcactatagggaatttggccctcgaggccaagaattcggcacgagagaagaaaaaaaaaccaaacttttgtccccaggagaatagtttgactggtttcctcatttctctttcaaatatatatttaagagatcttttatttcagcataacaataattatttgcaggagtttttgtgttagcgactaatttagaacttgtagatttgagctgcctgaattggccagacagctgtaatcgcactcctctattcttaatctctttatctgggcagcagctgccatatggccacagtcagctggatcagatgtttataagcttccttcttcgtccctctctgtcctctcagcctcctaatttgatcacggctaccttgtgagctgcctccaatctttatttttagccttctcaaggattaggattgatggtagctgtggggcacttaaagtgattgnattg

SEQ ID NO: 17932 - DNA, 356 bp, Homo sapiens
gtccaagcccactttgtataatatgtggcaacaagctatccaacaaagccatgaaaccttcaaaaccacttcactggctgggcacagtggctcatgcctgtaatcccagcacttacagaggccgaggtagatcacctgaggtcaggagttcaagaccagcctggccaacatggggaaaccctggctctgcaaaaatacaaaaattaaccaggcatggtggtgcacacctttagtcccagcttctcgggaggctgaggcatgagaattgcttgaacctgggaggcggaggttgcagtgagccgagattgtgccgctgtgctttagcctgggcgatagagcaagactccaaaaaaaaa

SEQ ID NO: 17933 - DNA, 239 bp, Homo sapiens
cgcaaaggtggaaataagaacaataaacagaagtagcctaagggagagagggcttagatttttttggcaaatgatagagaaatatagaaagatctcaaaggaggaataaatggaagacaggatggatccagatgaagggatgcaagaaaatgctgtcaagaccaaagtagagaacccatgtgcagctgtgcgtgcgtgcctgtgcgtgtgtgtgtgtgtgtgtctgttgctgttttttc

SEQ ID NO: 17934 - DNA, 435 bp, Homo sapiens
  misc_feature (1)...(435): n = a,t,c or g
gtggaaacgttgcttctgaggggagcccaagatgaccggttctaacgagttcaagctgaaccagccacccgaggatggcatctcctccgtgaagttcagccccaacacctcccagttcctgcttgtctcctcctgggacacgtccgtgcgtctctacgatgtgccggccaactccatgcggctcaagtaccagcacaccggcgccgtcctggactgcgccttctacgatccaacgcatgcctggagtggaggactagatcatncaanaaaatcttgntgggacccatgatgcccctntcnnatgngncgaagactgttcagaantnanngcnnnggtcactgtaanttnnttnatacagttnntntgtagttcnaganttcttntgttnagtgccantgncatcttnttnagnatacnccctccatnggnttgta

SEQ ID NO: 17935 - DNA, 320 bp, Homo sapiens
  misc_feature (1)...(320): n = a,t,c or g
ccgtctcaccccagctcctttggctcccaccccacccacacctgctgcccaccaccccggcagcacctttccctgcccaggcttcagagtgccctgttgctgctgccactgccccccacactccagggccatgtcagagctcccatctaccctccaccagcatgccgctcctgaagatgcccccaccattctcgggggcagccacccctgcagcgggcactgtggtgggcactgnanngggnnttctnntcctacnttctagntgtnagtctntcnntnctngtanaggtannggagnnntaanangtnnnntngttcct

SEQ ID NO: 17936 - DNA, 341 bp, Homo sapiens
gaattatgtcagctaaaatagtcaagaaaaaaagtccacccaataagcacacttagcacgcagatttttgtttctaatacccctccccactaaaggagccagggctctcccagaaaaataggtgactccaggactggagcagggctggtacaagatgagtctgaaacattttgttaggccagaatttaagaaattgcccaacaaaatgatgggatcatgccccatcctttacacagaatccaagtttgaggaactctcactggccaaatgtggtgtaagtatcaaaataactggctgggcgtggtggctcatgcctgtaatcccagcactttgggaggcca

SEQ ID NO: 17937 - DNA, 539 bp, Homo sapiens
  misc_feature (1)...(539): n = a,t,c or g
atttgaaaacctntgganacccttatgactgatnacgaatttaatacgactcactatagggaatttggccctcgaggccaagaattcggcacgagcaatggaattttaccaaaatattatcttgcatcttgcccttttttcacttattgctataataaggcagcttgccatgttggtacatgtagctctctcatatttttaatgtctgcatagtatcccattgtatgattggatcatagtttatttaacgagatgtctattgatggatgtttagattgacccatgtttttactcataaacaatcttgcagggaatctcctcttacacagcttatctaatgcatttggtgaatgaatattctcattcatggagtcaaacttggtaactatattgttgtattttgaatattagtgatttagtggatttaagcagaaaatattttaatgaaatttaatggctaagtaacaaaagatcgcctttatttgcacaagaaacattcttacagatggtgaaagtgtacagaagccagttaattgggt

SEQ ID NO: 17938 - DNA, 326 bp, Homo sapiens
gtccgttagaggcgtgcgggcttcggaggcgtgcgggcttcgggtgccatggggactcctcccggcctgcagaccgactgcgaggcgctgctcagccgcttccaggagacggacagtgtacgcttcgaggacttcacggagctctggagaaacatgaagttcgggactatcttctgtggcagaatgagaaatttagaaaagaacatgtttacaaaagaagctttagctttggcttggcgatattttttacctccatacaccttccagatcagagttggtgctttgtatctgctatatggattatataatacccaactgtgtcaacc

SEQ ID NO: 17939 - DNA, 475 bp, Homo sapiens
  misc_feature (1)...(475): n = a,t,c or g
ttgcccccatnggctcngagcagctatgacatgattacgaatttantacgactcactatagggaatttggccctcgaggccaagaattcggcacgagataccctgttcgctagactcctacctcagcggcttcctctccctatctcacatgcccaccttacagccctggctttacaggcccctctgcttgaaccagtcttccccttgatcatcacttaggttttggctcaaatgtcactcacttcttctggggcacccttccaatatctgctaaagccacctctaccactgggcatagtgtcagcacatcatcactaaagaaatcagcagagaactgtggaggcacctgaagagtaaggcgattctcacactcacccaggataaacatccctacaacagtgctggtatgcagngggtgcttgatgaatgaatgaatgaatgaatgactgaatggcnaacaaaccaatgaggacaa

SEQ ID NO: 17940 - DNA, 381 bp, Homo sapiens
cccacgcgtccggaattaagtgattttattagctatctacaaagagaagctacaaacccccctgtaattcaagaagaaaaacccaagaagaagaagaaggcacaggaggatctctaaagcagtagccaaacaccactttgtaaaaggactcttccatcagagatgggaaaaccattggggaggactaggacccatatgggaattattacctctcagggccgagaggatagaatggatataatctgaatcctgttaaattttctctaaactgtttcttagctgcactgtttatggaaataccaggaccagtttatgtttgtggttttgggaaaaattatttgtgttgggggaaatgttgtgggggtggggttgagatggggg

SEQ ID NO: 17941 - DNA, 919 bp, Homo sapiens
gtggaaacgttgcttctgaggggagcccaagatgaccggttctaacgagttcaagctgaaccagccacccgaggatggcatctcctccgtgaagttcagccccaacacctcccagttcctgcttgtctcctcctgggacacgtccgtgcgtctctacgatgtgccggccaactccatgcggctcaagtaccagcacaccggcgccgtcctggactgcgccttctacgatccaacgcatgcctggagtggaggactagatcatcaattgaaaatgcatgatttgaacactgatcaagaaaatcttgttgggacccatgatgcccctatcagatgtgttgaatactgtccagaagtgaatgtgatggtcactggaagttgggatcagacagttaaactgtgggatcccagaactccttgtaatgctgggaccttctctcagcctgaaaaggtatataccctctcagtgtctggagaccggctgattgtgggaacagcaggccgcagagtgttggtgtgggacttacggaacatgggttacgtgcagcagcgcagggagtccagcctgaaataccagactcgctgcatacgagcgtttccaaacaagcagggttatgtattaagctctattgaaggccgagtggcagttgagtatttggacccaagccctgaggtacagaagaagaagtatgccttcaaatgtcacagactaaaagaaaataatattgagcagatttacccagtcaatgccatttcttttcacaatatccacaatacatttgccacaggaggttctgatggctttgtaaatatttgggatccatttaacaaaaagcgactgtgccaattccatcggtaccccacgagcatcgcatcacttgccttcagtaatgatgggactacgcttgcaataaccgcatca

SEQ ID NO: 17942 - DNA, 373 bp, Homo sapiens
gatggttatgtatgatccgtgacctttgacgttactgtgaggtgaagttaataaatgttgtatgtgttctgactgctgtaccagctggctgttccctcatctctctctactctccttaggcctccttgttccctaagacacaacaatattgaatgtaggccaattagtaaccctttgacaaggtacatagtcacctaagagctctgttgaagatgtacaagaaaatgttcttttcatacctgctaacaacatccatcctgcagtctgtggatccaggagtcaatttgacatagaagtctgatttaagaaacacctttcgaaaggctatggctgctatacagaggatgattcctctgatggatctggcaaaaga

SEQ ID NO: 17943 - DNA, 374 bp, Homo sapiens
gcacaaatggaagaggcaaaatgaaaattgttccatacaattggactcaatgtgaacaatttgggatttatcatgaaacacagtaatcaaaacaaaaagggtccctgccccagaaatagtttaatatctttgagaagaaaagaaacataagtggtaataggttagcctacgtgttctaaacttcactctgggaggggcttatagaaatgtcctgagaaaagtcaaggaaacttcaaacctgcttcttccaggtcccaggtttgccaaatccaggagggagtgtaggtgcacagaccctggctgtgccacagtttgttctgctaccaaccacggctgttggaaacattgaatggcgggtgggggtgcattccaac

SEQ ID NO: 17944 - DNA, 322 bp, Homo sapiens
ggggttggtgtctgctggaatggcctccactatccccttgcatggtgccagcaggaccccaggctctgtcatctttagtgtgttgacttttgttctcttgtttgtggcctcatgtcataagatggtaatcatcacttcatatgtcacctctaagtttgaggtgggaagaaggggcaggtggccaggtcagccatggtgcccttatcagtaaatcggatgccttcccagaagccctgggtagacttctttcatctcactgaccagacagtgtcacatgaccacccctactgcgagggaagctgggaaagagggtgttttgctt

SEQ ID NO: 17945 - DNA, 385 bp, Homo sapiens
ggagacaataccctgtctctactaaaaatacaaaaattagctgggagtggtggcgcacacctgtagtcccagctattggggaagctgaggcaggagaatcacttgaacctgggaggcagaggttgcagtgagccgagatcacatcactgcactccagcctgggcaacagagcaagactccgtctcaaaaaaaaaagcataaggtctgcctacctcatgggcacccaaacagttcagggccaaactagtaccagtaaagccatgcctgcctctttcaccaacagtccagagtatatttcaaaaatatctttattaaccaaggaagcaattactgcaaacatcaggacaaaggacattctaatctaggacttgagttaaatagaggg

SEQ ID NO: 17946 - DNA, 495 bp, Homo sapiens
  misc_feature (1)...(495): n = a,t,c or g
tnnnnntttgnnnntttgantacccagctatgacatgattacgaatttaatacgactcactatagggaatttggccctcgaggccaagaattcggcacgagtgctgctatgaagggcaactccacactgaagggcctccggctgccagggaaccgcctggggaatgctggcctgctggccttggcagatgttttctcagaggattcatcctcctctctctgtcagctggacatcagttccaactgcatcaagccagatgggcttctggagttcgccaagcggctggagcgctnnnnnnnggagcctttggtcacctgcgcctcttccaaaactggctggaccaggatgcatacncagccanggaagccatccggaggntncgngctacctgccatgnngttagcnnctcatnggactcatcncagncctttcncatnatgctaccnccatggaatntncccgncctnnggngntctnctnggannnttannttgc

SEQ ID NO: 17947 - DNA, 456 bp, Homo sapiens
  misc_feature (1)...(456): n = a,t,c or g
gcattgcagaaatcaaatactggagttgtgttttgcttggtcaagaggaaagcgtgagccaccgcaccttgccccaccctagccttttaatatgcaaatgcaggtctacacacctggggatatgtgagggcagccacattgccaggaacatgtggggaaagggcaagaaggccgggggaatcaccatgtttgggtggacccagtttctaagggcttgcatttgcatatcaaaggttgccaacctggctctaagagccggggctttacaagaaacttttctggagatgcttcaaaaaaatgaaaactccagcctgaccaacatgtagaaaccccgtctctactaaaaatacaaaattagccgggcgtggtggcgcatgcctgtaatcccagctactcgggaggctgaggccagagaatcgcttgaacccangaggcggangnttttgtaaccaaaac

SEQ ID NO: 17948 - DNA, 494 bp, Homo sapiens
  misc_feature (1)...(494): n = a,t,c or g
gtttaantcnactgtntattcagtagaaccctttcggntatgccatgattacnaatttaatacgactcactatagggaatttggccctcgaggccaagaattcggcacgaggctaggcaacttcatcatgcagaaaaatgtatgaaaagggcttttgatgtgggtgacagcatgtgtaaagagacggtatccaagtgtgtggactttggagtcagactacctagactctaattcacctccaccacatacagctccctgaccttggcaggttacctgctctctttaagcctcacttcctcaccagtaaaatggggttaaatgtgaggattatgtgagttaattgatggatggaaagggtttagcaagtagtagtgccacgtttactggcacattgtaaatgcccaataaatgtgagctcctcttctgtacatccacacagctatggggcagggtgaagacatgacttctgagtcctaattgcattcattggctgc

SEQ ID NO: 17949 - DNA, 413 bp, Homo sapiens
cgcacccgcagcgccaacagcaccctggcccaggccctccactggactcgctctcagctgtctcccctggaggcccccgccctgctctgggggctcctcatggccgtgggggctgtcagatttgtgcaggccctgctagcaccctgttctctccggtcctccccgctggcaccagtcagcggggagaagcgcaggccagcctcccagaaagactccggagctgcctccgaacaggccaccgcagcccccaacccctgctccagtagttcgaggaccacccggcgaaagaagtagctgtgttctcccagctgcacgtcctgagagggccaggtcgccgggagtgctctggcctccggcaggacaggacccagccacttgtgccttagctgaccctgcagggccaggcacaggtt

SEQ ID NO: 17950 - DNA, 393 bp, Homo sapiens
  misc_feature (1)...(393): n = a,t,c or g
gaattaaaaatttggcaaaagacttgaacaatagttcacataagatatgcatattctacaaaatagactgaatcttgaaaacatgctaagtgaaagaagtgtcacaaaaggccacatattgtatgattccatttatataaaatgtccagaaaaggcaaatctatagagaaagaacagtggttccagagctgagtaaaatggggagtgaccactaatgggtacaggatttcttttggggatggtacaagttttctaaaatggtttgtggtgatgattgcacaactctgggcttatattaaaaaccatggaatggtttactttaaatgagtcaattgtatggtatgtgaaatgnatcttgataaagctgttacaggaatacctcagagatattgg

SEQ ID NO: 17951 - DNA, 407 bp, Homo sapiens
ggggggaagccccagccccggagcagtacctcgtgctggaagagctcattgacatgaaccagcaccatctgaatgccctcggcgtgggccacgcctctctggaccagctctgccaggtgaccagggcctgcggacttcacagcaagctgactggcgcaggcggtggtggctgtggcatcacactcctcaagccagggctggagcagccagaagtggaggccacgaagcaggccctgaccagctgtggctttgactgcttggaaaccagcatcggtgcccccggcgtctccatccactcagccacctccctggacagccgagtccagcaagccctggatggcctctgagaggagcccacgacactgcagccccacccagatgcccctttctggattaatctggggggc

SEQ ID NO: 17952 - DNA, 376 bp, Homo sapiens
gttcaatttggaagtctcagaatttttaaaagatgtgttactaaagctacttataagtcatctaaaatcctaccaccttaggcaaccttttaaatttttgcttatttcatataatatatatttatacatagttgttatagagtaagttcctatttattctgtattttcacatgacgtataatttcataatttccccataatttattagactgctttctacatatctaatagacactcctttaattttggacattttaagttttaaggcttttttcctactccacgatgaatgaatgtaccaatttcattctggcattgccaacattacttggtggtagggttttttcccctttctgctaccttagcaagtataaaa

SEQ ID NO: 17953 - DNA, 372 bp, Homo sapiens
caaccatctatattcatgagctctcaatttcatggcaggccatagttctacttatctgagaagcaaatccctgtggagactataccactattttttctgagattaatgtactcttggagcccgctactgtcgttattgatcacatctgtgtgaagccaaagccccgtggttgcccatgagaagtgtccttgttcattttcacccaaatgaagtgtgaacgtgatgttttcggatgcaaactcagctcagggattcattttgtgtcttagttttatatgcatccttatttttaatacacctgcttcacgtccctatgttgggaagtccatatttgtctgcttttcttgcagcatcatttccttacaatactgc

SEQ ID NO: 17954 - DNA, 451 bp, Homo sapiens
  misc_feature (1)...(451): n = a,t,c or g
tttgaatanccctatttntgaccctaatttaatacgactcactatagggaatttggccctcgaggccaagaattcggcacgagtgatcatctttcatttctacaagatattaccctgctctttttcactgattactttgtactgatttgacctggtgagcaagaagtagtagctagacttactggtaagatctttgcatatcataggatagaaaataaatctgacaggccaagcacggtggctcacgactgtaatcccagcactttgggagctgaggcaggcggattgcctgaggtcaggagttcgagaccagtctggccaaccccatctctactaaaaatacaaaaaaattaagccagacatggtggtgtgcgcctgtaaccccagctactccggaggctgaggcaggagaatggcgtgaatccaggagacagagcttgcantgagctga

SEQ ID NO: 17955 - DNA, 369 bp, Homo sapiens
  misc_feature (1)...(369): n = a,t,c or g
gggcaccccctgaatgccaggactgtgagagaggatccaggagagcctgactgcgttgcaaacaaaattctccaagcttggttctatcttcagcttccctttttgcaaggaacatgccctggactgagagtgggtccccactttctttctttctttctttctttttttttgagacagagtgtcgctctgtcccccaggcttgagggcagtggcgcgatctctgctcactgcaacctccgcctcccgggttcaagcgattttcctgcctcagcctcctgagtacccgggattacaggcaccaggcacctgccaccatgcctagctaatttttgtagttttggtggggacagggttttaccccnnnccagg

SEQ ID NO: 17956 - DNA, 643 bp, Homo sapiens
gctgcagcagctgtccctggatagtgccacctttgcctctccccaggattttgggcttgttttgcaaacactcaaagagtacaacctagccctgaaaagactgagcttccatgacatgaatctcgctgactgtcagagcgaggtgctctttttgctacagaatctgactctgcaagagattaccttctccttctgccgtctgtttgagaagcgcccagcccaatttctgcctgagatggttgctgctatgaagggcaactccacactgaagggcctccggctgccagggaaccgcctggggaatgctggcctgctggccttggcagatgttttctcagaggattcatcctcctctctctgtcagctggacatcagttccaactgcatcaagccagatgggcttctggagttcgccaagcggctggagcgctggggccgtggagcctttggtcacctgcgcctcttccaaaactggctggaccaggatgcagtcacagccagggaagccatccggcggctccgggctacctgccatgtggttagcgactcatgggactcatcccaggccttcgcagattatgttagcaccatgtgatggggcccgtacctcacagtctcatgctcggtaccatcagcttgcagg

SEQ ID NO: 17957 - DNA, 539 bp, Homo sapiens
  misc_feature (1)...(539): n = a,t,c or g
agggnnnangnnnnnanannaannnnnnnnnnnctnaannnnnnnnanngnannnnanntncancttcccctttggaantntggaagncccntcanngangcacnnattaccgaatnaantactantgcnnnatagggaatttggccctcgaggccaagaattcggcacgagaggataacctcctagagagttgtaactgtgatatggttttgcagtgagagaaacagacggcactccaaaagtaggataaattgaagacagtttgtacatgagttaaatgtaaaggtgtgggcagggtgaaagaaaaccacaaggaataactcaggatcctggggctaccagcaccaggagttagagctgtcactccaaggcatgtgtgaagaaggtgaccaaaacttcaaagatgaaaactctttatctttgagaagtctccttgatgggaacagtgaactcctgttgacagagccagcaagcctgagggaagccttgcgggaaggaaccagatgaataaatatgccaaacccaatcttcctggcct

SEQ ID NO: 17958 - DNA, 398 bp, Homo sapiens
gagaggctggggttcccatttgactccagtcccaggcagccatggggatctcgggtcagttccagccttcctctccaactcttcagccctgtgttctgctggggccatgaaggcagaaggtttagcctctgagaagccctcttcttcccccacccctttccaggagaaggggctgcccctccaagccctacttgtatgtgcggagtcacactgcagtgccgaacagtattagctcccgttcccaagtgtggactccagaggggctggaggcaagctatgaacttgctcgctggcccacccctaagactggtacccatttccttttcttaccctgatctccccagaagccctcttgtggtggtggctgtgccccctatgccctgtggcatttctgcgtc

SEQ ID NO: 17959 - DNA, 351 bp, Homo sapiens
ggcaggtgttctttcctttcagcattcagttgtaccctaacgagtttccaggtagtgaccctagagattgtcccagagacctgccgaagaatgccgctttgaaattggggtgcatcaatgctgagtatcccgactccttcggccattatagagaggccaaattctcccagaccaaacatcactggtggtggaagctgcattttgtgtgggaaagagtgaaaattcttcgagattatgctggccttatacttttcctagaagaggatcactacttagccccagacttttaccatgtcttcaaaaagatgtggaaactgaagcagcaagagtgccctgaatgtgatgttctcg

SEQ ID NO: 17960 - DNA, 416 bp, Homo sapiens
  misc_feature (1)...(416): n = a,t,c or g
annccctnntttgaaatnccanctatgacatgattacgaatttaatacgactcactatagggaatttggccctcgaggccaagaattcggcacgagagtggtgatgtcccctttatcattttttttgtgtctgtttgattcttcttttcttctttattagtctagtagtggtctattttattaatcttttcaaaaaactggctcctggattcgttgatttttttgaagggtttttcgtgtctctatctcctgcagttctgctgtgaccttggttatttcttatattctgctagctttggggtttgtttgctcttggttctctagttcttttagttgcgatgttagggtgtcgatttgagatctttctagctttttgatatgggcatttagtgctatccatttccctcttaacactg

SEQ ID NO: 17961 - DNA, 453 bp, Homo sapiens
  misc_feature (1)...(453): n = a,t,c or g
accctatgacntgattacgaatttaatacgactcactatagggaatttggccctcgaggccaagaattcggcacgagtagccatgagccactgcacccggcctattgtattttttattactgtttttaatgaataaaatgtcactgagcccctgaattccctctgtaatttgcttagagctccactgctcatgctttgtcttcagtatgtgagaagtaaccacagaaaaaagagcattgaaacttagaaaatcaaaagacaggcaagaatcacattcgttttttaaaagcaagattgccctttttgtatactaataaaaattgtagctttcgaaatacatttagtttagggtttttgatctcctttgttaaaattcgagagcttggcatgccctgtttctcatcgcactgaggagtcacagagccgctgtttggaacacagaccgccggacta

SEQ ID NO: 17962 - DNA, 439 bp, Homo sapiens
  misc_feature (1)...(439): n = a,t,c or g
gtgactcatcgcctcttcaggaggaattttgggtacacactgcggtcagtcaatgacctttatatccagaagcagtttccaatcctgcttgacttcaaaactaaagtaagagagtattactttgctgaggcccagatagctgacttctcagaccctgccttcatatcaaaaaccaacaaccacatcatgaagctcaccaagggcctcataaaagatgctctggagaatatagaccctgctacccagatgatgattctcaactgcatctacttcaaaggtaagaggcacctttacagttctcacagcaaacccacaacatactatttttgtatgtgggtagattgaatgccaagaactgtactgtagctataatttatccaggaaaactagacacaagattgactctggaacggngacagggaaggccaagctgaagtga

SEQ ID NO: 17963 - DNA, 441 bp, Homo sapiens
tgattacgaatttaatacgactcactatagggaatttggccctcgaggcctagaattcggcacgaggacggcaaagaggccatgctgcgacagaaggactatgagaccgccaccctctcggagatcaaggccttgctcaagaagcatgaggccttcgagagtgacctggctgcccaccaggaccgtgtggagcagattgccgccatcgcacaggagctcaatgagctggactattatgactcacccagtgtcaacgcccgttgccaaaagatctgtgaccagtgggacaatctgggggccctaactcagaagcgaagggaagctctggagcggaccgagaaactgctggagaccattgaccagctgtacttggagtatgccaagcgggctgcacccttcaacaactggatggagggggccatggaggacctgcaggacacc

SEQ ID NO: 17964 - DNA, 334 bp, Homo sapiens
  misc_feature (1)...(334): n = a,t,c or g
cccttcccagtcactatccccctattgatttatttttaaacacagtgaaactatacatagggatgatgactcttggttcataagtgagtggctcatgttatctcaggtgagtcttctggaaagagccccagattaggagccagaaaaccgtggttacatcgtggcccggttgctttttagctgtatgaccttagacaaggtaaacttaacttttctggacttcattcctctttggtaaagtgaaaataataatgccctcaccttaaacagctgttgnaagggtcatctggactttattggtaaacnggaatcctttgtaatgggaaacactttg

SEQ ID NO: 17965 - DNA, 327 bp, Homo sapiens
gtttaacaataacctatttcccaaataggggtggatgacaaaagaggacacccttaaagcatggctgaatagaaaatcaaagcctggccaggcgtggtggctcatgcttgtaatcccagcactttgggaggccaaggcaggcgaatcacgaggtcaagagatcgagaccatcctggtgaaaccccatctctactaaaaatacaaaaattagctgggcgtggtggtgcgtagctgtggtcccagctactcaggaggctgaggcaggagaatcacttgaacccaggaggtggaagttgcagttagcagagatcacgccactgcgctctg

SEQ ID NO: 17966 - DNA, 389 bp, Homo sapiens
aattcggcacgaggttgatctatacttttttctccttagcattcctttagctgtgcttccagagctgctcagaaacatgagttttgcttaataatccatagcagagctgaagtcaagaggggaaggacccacaggacttcagctggatctggttgggaaaagctcaagattgggaaatggaactttggtaggcacatgtcagtatgaaacatttgcctcacagccccatacatgattaacctttactttggaggggaaaggctcacagtcttactgcagaatgagaataaacctcatttcagtggtttataaactcttaaatgtaacagaatataggcctaaaattagacattgtattcagtctgagctctgccacttaagaattctgg

SEQ ID NO: 17967 - DNA, 577 bp, Homo sapiens
  misc_feature (1)...(577): n = a,t,c or g
ggccctcgaggccaagaattcggcacgagagagatgtttatagtattctctgatggttatttgtatttctgtgggatcagtggtgatgtcccctttatcattttttttgtgtctgtttgattcttcttttcttctttattagtctagtagtggtctattttattaatcttttcaaaaaactggctcctggattcgttgatttttttgaagggtttttcgtgtctctatctcctgcagttctgctgtgaccttggttatttcttatattctgctagctttggggtttgtttgccttggttctctagttcttttagttgtgatgttagggtgtagatttgagatctttctagcttttagatgtgggcatttagtgctataaatttccctcttaatactgctttagctgtgtcccagagattctggtacattgtctctttgttctcattgatttcaaagaacttcttgatttcttgatttctgccttaatttcctcgtgccgaattcttggcctcgagggccaaattccctatagtgagtcggtattaaattcgtaatcatgtcatagcnggtnnnnaaa

SEQ ID NO: 17968 - DNA, 403 bp, Homo sapiens
ggaactctaatgccctagatgatgctacaaggtagttatctttttccctactttacagcaatgaaataaaagttttaacttatttttcaaggcaaagtggtaagtggcagatctgaaatcacagaactcgagagctctgtgtatttagccctgtgccatcttatttatttagccctgtgccatcttatttaaccccagaaatttatccctgtgccatcttatttaaccccagaaatttagctcttatgtatttagccctgtgccatcttatttaaccccagaaatttagctcatactccttttactcctacctaagagatctgcagcagcttttgaaaatcagttatttgagatctagtatgcttgtctctttttctgtgactctcttgattgaaatgccact

SEQ ID NO: 17969 - DNA, 561 bp, Homo sapiens
  misc_feature (1)...(561): n = a,t,c or g
gggctcacccctgtaatcccagcactttgggaggccaaggcgggcggatcatgaggtcaggagatcaagaccatccttgccaacattctgaaactctgtctctactaaaatacagaaagttagctgagcatgttggtacgcgcctgtagtcccagctactcaggagcctgaggcaggagaatcgcttgaacctgggaggcagaggttcagtgagccaggatcgcgccactgctctccagcctggtgacagaacgagactccatctcagaaaaaaaaatatgtatgtgtgtgtgtgngtgngtgngngtgngngtgtgngnatatgtntgtatatgtgtgtgtatatatacatatatatacacacacacatacgtttttanactgnctaaatggattcttttaantgacctacctactttatgctgctacacaacactcacttccctgtnacacatgtatagactgaangctaaggngtgaaaagagatattcgtaaaacanaaccaaanatgngcagagttttatcttatatcgatgaanngantgaccnaaagagncatt

SEQ ID NO: 17970 - DNA, 377 bp, Homo sapiens
gcggcacgagcgaagggtccatcctcgcagagccggaggagctgaaccagacggagcagacaacctacgaggtggaagggatcggctacgacttcatccccacggtgctggacaggacggtggtggacaagtggttcaagagcaacgatgaggaggcgttcacctttgcccgcatgctgatcgcgcaagaggggctgctgtgcggtggcagtgctggcagcacggtggcggtggccgtgaaggccgcgcaggagctgcaggagggccagcgctgcgtggtcattctgcccgactcagtgcggaactacatgaccaagttcctgagcgacaggtggatgctgcagaagggctttctgaaggaggaggacctcacggaa

SEQ ID NO: 17971 - DNA, 730 bp, Homo sapiens
  misc_feature (1)...(730): n = a,t,c or g
ctatagggaatttggccctcgaggccaagaattcggcacgaggaggcatggggcggcttggactcgcttcaggccacacagcaattcagtggaaaagaatggagcagaacctggtctgtacttctacgtagcagcaatgtacccgatcactgccattttaccagactctggagtgggaaagagctgccttatattcaagttcctttaagggaatcaagaaggctcctaggaaacaaaagctctgactttatcatcccataatctttgagtaaactgaaggctaggttccagctccagggatccggctgtataaccttcagcatctgtactagtgctacttcaaatgtagttcacaagactggcagcctggatgtcacctggaagccagttagaaatgcagactcttgagccccgctccagacttgccaaatcagaatcngtaacaagatcccaagatcaccanatatacatccaaccagctcctcctaaaaacantgcttctnnaancttcagaagttgngncacgatcaacttgcaanggccttgtttaaaaaaataagggttgcccgggccccggccaacccccgaattgtcttgagtcataaantcnggggggaaaggttcancantttggaattcaacnagntnccaagngggctgnnaccggggaacnccccttggggaagtttcattctacaagnaccangncctnncccttccccnaangggg

SEQ ID NO: 17972 - DNA, 422 bp, Homo sapiens
gtgcagtgagccgtgatcgtgccactgtgcttcagcctgggcgacaatgagaccctgtctcaaaacataaataaaatgtggggccagaccccatcagtcctgcccaaaacagggtgtccataactggacctgatttaacagacaaatctgggacaggggagcctcagcagcttttatttaacttctgagctgccctgtactgacccttggttagggcacttggtttggagcaggtactgtacatggaactttgtgtaaaatgccttgggtgacagaagtcagactctaggctcaaaaatctagcctctgtcttgagaaacagaactaggacacacctttccaccctctcatttttccaaagtggatatccattgtaagaactgttcttacaccgcgctgggcgcggtggctcacgcttgtaa

SEQ ID NO: 17973 - DNA, 643 bp, Homo sapiens
  misc_feature (1)...(643): n = a,t,c or g
gggaaaatcgtggagttcacctgccacacagccttcttcgtcagtatcgtggtggtgcagtgggccgacttggtcatctgtaagaccaggaggaattcggtcttccagcaggggatgaagaacaagatcttgatatttggcctctttgaagagacagccctggctgctttcctttcctactgccctggaatgggtgttgctcttaggatgtatcccctcaaacctacctggtgggtctgtgccttcccctactctcttctcatcttcgtatatgacgaagtcagaaaactcatcatcaggcgacgccctggcggctgggtggagaaagaaacctactattagccccccgtcctgcacgccgtggagcatcaggccacacactctgcatccgacacccaccccctctttgtgtacttcagtcttggagtttggaactctaccctggtaggaaagcaccgcagcatgtggggaagcaagacgtcctggaatgaagcatgtagctctatggggggaggggggagggctgcctgaaaaccatccatctgtggaaatgacagcggggaaggtttttatgtgcctttttgtttttgtaaaaaaggaacacccggaaagactgaangaatcattttatatctggattttt

SEQ ID NO: 17974 - DNA, 457 bp, Homo sapiens
gagaagttggcgtgcagctgggagagctagactaagttggtcatgatgcagaagctactcaaatgcagtcggcttgtcctggctcttgccctcatcctggttctggaatcctcagttcaaggttatcctacgcagagagccaggtaccaatgggtgcgctgcaatccagacagtaattctgcaaactgccttgaagaaaaaggaccaatgttcgaactacttccaggtgaatccaacaagatcccccgtctgaggactgacctttttccaaagacgagaatccaggacttgaatcgtatcttcccactttctgaggactactctggatcaggcttcggctccggctccggctctggatcaggatctgggagtggcttcctaacggaaatggaacaggattaccaactagtagacgaaagtgatgctttccatgacaaccttaggtctcttgacagga

SEQ ID NO: 17975 - DNA, 153 bp, Homo sapiens
cttagggctatgaagatctcctgcctctcatctgtgggcagccttagaattttccaggctgattgctggggatcaaatagtcacatggggatctacttggcacctaaactaattcccacattcagggaaccttggcattcatgaggagccagg

SEQ ID NO: 17976 - DNA, 350 bp, Homo sapiens
gccggttaaagaaaacgatgagatcgaggctggcatacacgggctggtcagtatgacatttaaagtggaaaagccagaatattgagttatttcttaacaagtttcgagagagaagggagcaagacaagagcaagcaacggctattaaatgtcacaatcctttaattagaaaccatttattggccggacgcggtggctcacgcctgtaatcgcagcactttgggaggccgaggcgggcggctcacgacgtcaggagatccagaccatcttggctaacagggtgaaaccccgtctctactaaaaatacaaaaaattagccgggcgtggtggcgggcgcctgtagtcccagct

SEQ ID NO: 17977 - DNA, 352 bp, Homo sapiens
  misc_feature (1)...(352): n = a,t,c or g
agaagctgtagggagagatgggctcagtattcccagtgggcttggatcactgctcgtgatcacaagggtgggtgccagttctaaccctttgggtttcttggatcttgatgaattatttactttgtccttttctagcaagactgaatcctggtctttaggctccagtgacaaattctctggaagttccattggctgagaagccactgaatcaatgtctgtgtcgatgtctgggtgagaactcagtggtggtgaaggtgttctgggaggttcctgcaaagggggtatggacgaaatgggtggtgtggtggcaaaagcagtcattacgttagaggcagaggttggggcttncagg

SEQ ID NO: 17978 - DNA, 390 bp, Homo sapiens
gagaagtccagtctttccaggggagccatggtaggcaacagtttaggctgtatgctgaagcacaccatacctgacaaacacatatgtacgggctcctgaaacttttagtcattattctaagatgagccctctagaattttgactcctctttttcaggtggctaaactgatcccaacaggctggggtcccacatttcagcaagaccactctatgagaatatggatttgcatgaaagagaaagagctgggagtaggtacctcctttaaccagggtgcagatccccaggtcaacttaattagtgcagaccacccaagataatcacccttgagatatggccacactgttgacatctttcataggcccctttgggatatcatgtcgacgcggccg

SEQ ID NO: 17979 - DNA, 418 bp, Homo sapiens
  misc_feature (1)...(418): n = a,t,c or g
tttgatncnttgaatgccatgattacgaatttaatacgactcactatagggaatttggccctcgaggccaagaattcggcacgaggaaaacaagaaacccactgcaatccccaagaaacccagtgctggggatgactttgacttaggagatgctgttgttgatggagaaaatgacgacccacgaccaccgaacccacccaaaccgatgccaaatccaaaccccaaccaccctagttcctccggtagcttttcagatgctgaccttgcggatggcgtttcaggtggagaaggaaaaggaggcagtgatggtggaggcagccacaggaaagaaggggaagaggccgacgccccaggcgtgatccccgggattgtgggggctgtcgtggtcgccgtggctggagccatctctagcttcatt

SEQ ID NO: 17980 - DNA, 367 bp, Homo sapiens
  misc_feature (1)...(367): n = a,t,c or g
gatttatatagaaagctgtcatcaaatgaaaactccaaataactcgtattttgtagatggctcttgagagctttatgaaatagcatacagtggggtaatctggaaatgaaatttttttttaaaagtcatgatgtgaaagtatcttgagccagaaggaagtggctttttttcttgggagagtaacctgtaaactcagtcgttttgagtgtatatggacttccatttaaaagaacacacacagtgacatatataattttcagatatttttagtcttgagatatagtgcatgaccttttttaaaaaaaggaaaaaatattggatattatgtaacttaattctctccacatagagattgnnttttattatg

SEQ ID NO: 17981 - DNA, 353 bp, Homo sapiens
gaaaaaaaaatgcaccaagagggatcagggcaatgagatagattcaggcaagacctcatagtgcctgggaccagacagacatcctgatccaaggtggctgcaggatgccagccccaagaatgtgtggaaagccacaggagggctctgcggtcacggggctaggccacactcaccctgtttgcttctccccggtttcgtggctccggctctccaactcacccttccccttccttgaggcttatgcttagaggtgtttccacttggacaccaccccattggcacccttgcttgttacaatctgtcagcctctgctccagctgccacctgcccttgatgctttcagggaaattttg

SEQ ID NO: 17982 - DNA, 499 bp, Homo sapiens
  misc_feature (1)...(499): n = a,t,c or g
ttggantntgataccagtttatgacatgattacgaatttaatacgactcactatagggaatttggccctcgaggccaagaattcggcacgagggaacccaaatccaaaccatatcactggtttatgtataaaagggaattttatgtttttttgtgcttttattttaaattgaatacaactttggcattgaaaaaatttttctgaatatggagacttggtgtttttctcttcttcgttctttctcacctagaatcccatctattcattaccaagttcaaggatctacgcttgtttgctctctacaggtttccatttagctgcaagaaacagcactgtatttttcaaagcactagaaaattctgtggccagtccagaaagacaaaacatagcaccagtgtggcaagaagtggagctaatgcagcattaatgatcctggatgtttctgcactttcttattagaatttaccattcacctctaagcttcagctctgcagtgccc

SEQ ID NO: 17983 - DNA, 340 bp, Homo sapiens
gccatagcctccaccttaagtaactagaaaaaggaataaattacacaccaaacaagcaaaagataagacataataaagatcaaagcagaaagcaactaaatagaaaacagaaatacaatcaaggacatcaatgacaccaaagctttgatgtcatttgatgacacctttgagaagatcaataaaattgataaacctttagctggattgactgtggattaaaaagagaagacagaacaatcaatggtaggaactaggtaatatcactatactacaccacaaatagtaaaagaataataagggaatactaggaacaaaattaggcataaaacatatactttta

SEQ ID NO: 17984 - DNA, 165 bp, Homo sapiens
gaaagcagggagctaattaagagtattaaaacttaaaaccattttttgactctgattttaagtacatttttatatgtcagttgctgcccttcacactaccaggccctgcagccacagtgttctgttggagaaacttggggaagtgttttctgaaccagttctttt

SEQ ID NO: 17985 - DNA, 1079 bp, Homo sapiens
tttgaattcaatacctatgacatgattacgaatttaatacgactcactatagggaatttggccctcgaggccaagaattcggcacgagcgcccacgccctgcactccgggaccgtccctgcgcgctctgggcgcaccatggcccgcggggctgcgctggcgctgctgctcttcggcctgctgggtgttctggtcgccgccccggatggtggtttcgatttatctgatgcccttcctgacaatgaaaacaagaaacccactgcaatccccaagaaacccagtgctggggatgactttgacttaggagatgctgttgttgatggagaaaatgacgacccacgaccaccgaacccacccaaaccgatgccaaatccaaaccccaaccaccctagttcctccggtagcttttcagatgctgaccttgcggatggcgtttcaggtggagaaggaaaaggaggcagtgatggtggaggcagccacaggaaagaaggggaagaggccgacgccccaggcgtgatccccgggattgtgggggctgtcgtggtcgccgtggctggagccatctctagcttcattgcttaccagaaaaagaagctatgcttcaaagaaaatgcagaacaaggggaggtggacatggagagccaccggaatgccaacgcagagccagctgttcagcgtactcttttagagaaatagaagattgtcggcagaaacagcccaggcgttggcagcagggttagaacagctgcctgaggctcctccctgaaggacacctgcctgagagcagagatggaggccttctgttcacggcggattctttgttttaatcttgcgatgtgctttgcttgttgctgggcggatgatgtttactaacgatgaattttacatccaaagggggataggcacttggacccccattctccaaggcccgggggggcggtttcccatgggatgtgaaaggctggccattattaagtccctgtaactcaaatgtcaaccccaccgaggcacccccccgtcccccagaatcttgggtgtttacaaatcacgtgtccatcgagcacgtctgaaacccctggt

SEQ ID NO: 17986 - DNA, 538 bp, Homo sapiens
  misc_feature (1)...(538): n = a,t,c or g
tttgtntgacnacngttatgacatgattacgaatttaatacgactcactatagggaatttggccctcgaggccaagaattcggcacgagaatcggtcctgatatattcgagaagcatgaggccagcccttcagatgcagttgtttatttatactcaggtttagattgggaagaggcccagggaggagcagcaacttgcctgaggtcacacagcccaaaaaaggcaaaggagagtctcgcccctgccgtctcctggccaccccagttgagtgtccgtctgttccatcattcagcagatgcttggtgagtgcctgcaacggaccagacactgggctagaggccagggacaccgctgagagtgagacagtcataagccctgcagtcaaggggtcaagaggggagaaagcgatggtaagggaaactgacaagtaagtgaagtgactgcaggtcataggaaatgctacaaaggagatagatagacagctgaggacctaccctacggggtcagggagggcctctctgggcaggtgaccttcaag

SEQ ID NO: 17987 - DNA, 316 bp, Homo sapiens
gttttattaacccttcaaagagtatctgtggcacctgccaatttctaaggttagagaacaactttaactttctttgttaactgctctgagggccaaactctttcctttttggaatcttttaggtcagttctctactatatcttttgagactgagtctcactctgtcacccaggctggagtgcaattacgcaatcttggctcactgcaacctccacctcccgggttcaagcaattctcctgcctcagcctcccaagtagctgggactacaggcgtgcgccaccacacccagctaattgttgtatttatagtagatac

SEQ ID NO: 17988 - DNA, 415 bp, Homo sapiens
gtgcacgtgggccatctccagcacccccgggcaccgggtcaagctgaccttcatggagatggacatcgagtcccagcctgagtgtgcctacgaccacctagaggtgttcgacgggcgagacgccaaggcccccgtcctcggccgcttctgtgggagcaagaagcccgagcccgtcctggccacaggcagccgcatgttcctgcgcttctactcagataactcggtccagcgaaagggcttccaggcctcccacgccacagagtgcgggggccaggtacgggcagacgtgaagaccaaggacctttactcccacgcccagtttggcgacaacaactacccttgggggtgtggactgtgaagtgggtcattgtggccgaggaaggctacggcgtggagctcgtgttccagacctttg

SEQ ID NO: 17989 - DNA, 339 bp, Homo sapiens
ggcagactgtttttgtaggttatggcccaacatttaagtacaagactaaagtgcctccatttgaaaacattgaactttacaatgttatgtgtgatctcctgggattgaagccagctcctaataatgggacccatggaagtttgaatcatctcctgcgcactaatacctttaggccaaccatgccagaggaagttaccagacccaattatccagggattatgtaccttcagtctgattttgacctgggctgcacttgtgatgataaggtagagccaaagaacaagttggatgaactcaacaaacggcttcatacaaaagggtctacagaagagagacacc

SEQ ID NO: 17990 - DNA, 474 bp, Homo sapiens
gagagaacaagtgttctaggcagagagaataccatgtagagactgccaaatttggggaactgtaaattcctgggtttggctagagcatagattgcacagggtatggggaggggtggcgggatatggctgcctttatggcaaatactcccacttttccactttcttctcccaccccacaattgccaagccaacagacatctcacaaaaatacccttgggaaggagaagaggtgatcacttatacgcatggtattatagtttgatcagattgctctccaccccagaactagagaagatcagctgtttgaagtaaacattttgattgggaaataagtctttggtctcccatccaagtactaaccaggcccaaccctgcttagcttctgagatgagagagaaatcattggggacatgaggcattgtgcaagatgagggaaagttcaggtgcacctgtttggactcagtcagggcatca

SEQ ID NO: 17991 - DNA, 503 bp, Homo sapiens
  misc_feature (1)...(503): n = a,t,c or g
gctggaggtcagcgatttaggttggtcttggctggggtcactcatgctgtttgggtcacctaaccgtttaactgagcttgggaggtctaagacagcttccagcacatgtctccagcaggttggtccaggcttcttcacagagccgcagaagagctccaaaatgagcgtggaagttgcgaggcttcttgaggcctacatgcagaagttgcgcagcatcccttccaccagactttactggtcaaaacaaatcataagatcagcccagattcaagaggtggggaaacagactccatctcttaatgacagaagcagcaaagtcacattgtactgggacaggatggggagaattattgtgatcggcgatcacacaacagataaggggtggcatgagaggatgggggagaatggaagaatttanggctgattggagtaatagaaatgagttttgaggntactgcctttgatcagtganaaatgataaggcctacctaaggtagaatgct

SEQ ID NO: 17992 - DNA, 369 bp, Homo sapiens
gttgagacacagtcttgctgtgtcgcccaggctgcagtgcagtggtgagagtttggctcactgcaacctccacctcctgggttcaagcgatgctcctgcctcagtctcccaagtagctgggactacaggcgcctgccaccacacccggccgatttttgtatttttagtagagacagggtttcactatgttggatagactggtcttgaactcctgacctcgtgatccgaccgcctcagactcccaaagtgctgggattacaggcgtgagccaccgctcctggccctattgaggaataattattcaaatgacacaaatctccattataatacaggtatgaatatttacaaacctatcagctactctaaaag

SEQ ID NO: 17993 - DNA, 333 bp, Homo sapiens
tgagaatgtgacatggaatgtggtccaagcagagttacaaagggggaagaatacagcttctgaagcaatgaattttgcctacctcttcctttaggtcctaatacatttcaagtatggaaacagatgataatcgtattgttagtaacaaagaagatatagggaaagtgaaagtaagagaataaataatattgcttccagtggccactctttaattatccttcttactcaaatttatctgtttatcacctaggaagcctaatcttctcttttacatagggtaaatataaggtactataactatcattataacaatggttataatacttggttgtt

SEQ ID NO: 17994 - DNA, 380 bp, Homo sapiens
ggcaaagcgtttgagggggcagcttccgaggtggcagtcctttccagggctgagctggaaagggaggagtgtcaggagaggaacagcgagtcttacgagcagcatatccatctagaacaccaccagaggcagcaagtggcctaccagaaatactcagaatttttccacgagaaggtggacccggccattgatgaaggcaagctggtggtgcaggacatcgagcaaagtgtatggatccacagtcacgtgggctccaaggagcacagccacatgctgcagaaggtccaggagcacatcaagagggtttcggatatggtggaggacctctacaggcggaaggcctgggctggcgcggaggaggcgatgactcggctggtcaa

SEQ ID NO: 17995 - DNA, 331 bp, Homo sapiens
gcctgagagaggatgtcagcagtggagatagacaaaagcaaagatattcaagaagtatttggggctgggcacggtggctcgcgcctgtaatcccagtattttgggaggccaaggcgggcggatcacttgatgtttggagttcgagactagcctggccaacatggcaaaaccccatctctactaaaaatacaaaaattagccagatgtgatggcgcacgcctgtactcccagctacttgggaggctgaggaaggaggatcacttgaaactggaaggcagaggttgcagtgagctgaaactgtgccactgaaggatctggtttgagttaaaat

SEQ ID NO: 17996 - DNA, 604 bp, Homo sapiens
  misc_feature (1)...(604): n = a,t,c or g
tttaaanccnttcgaatttactacgactcactatagggaatttgggcctcnaggccaanaattcggcacnagtgtaatgtccttctcatacagaaatctattctaagananggncttaggggncttgcattacactttctgantaaaatgaanatcatggtgattaaggatattgaaagagaagacattgaattcatttgtaagacaattggaaccaanccagttgctcatattgaccaatttactgntgacatgctgggttctgctgagttanctgaggaggncaatttaaatggttctggcaaactgctcaanattacaggctgtgccagccctggaaaaacagttacaattgttgttcgtggttctaacaaactggtgattgaaaaanctgancgctccattcatgatgccctatgtgttattcgttgtttaatgaagaanagggctcttattgcaggaggtggtgctccanaaatanagttggccctacgattaactgaatattcncnaacactgagtgggatggaatcctctgcgttctgnttttncaaatctttggaggnattcanttaccttnctgnaaaagccggcngaatccatt

SEQ ID NO: 17997 - DNA, 328 bp, Homo sapiens
gcggcgggggaaacccagactgggttttctgctgaaaatccagttgggaatttgtgctgtgacctacattactctgccaccttccagccccctaactttctctctcctcaaggagcaggagaacataatgtatttcccaaagttaaattactctgcagaaaaccattttaataatgcgctaaatgacagcacggcaaatcactgaagctgtcaccgatttgcggtccagtctcactgagcgaattcttggagtccgagcctccctccacgaacggtacctcacatctccccggggatctctgccatctgcaaagtgtcacgtctctta

SEQ ID NO: 17998 - DNA, 432 bp, Homo sapiens
agctatgacatgattacgaatttaatacgactcactatagggaatttggccctcgaggccaagaattcggcacgagccctgctataatcatatgtacatattttttatatttgaaactcaacaaaacaatgaggaactatcataaaactaattttatccccagatgaacatgcataatttaaaaaatctatctaagtattcttagcaatactaagttttcagacttgcctgctggtgtagatgtactggaaggggctgtactggctgctcgctgatgctgggtgttgcggacagcccactgcattgaacggggagcttgggcagcaccattggcatgggagctatttgtggttctttctaatggctcatcaagcataaaggtctcctgttctatgtcgtcactctgactactactgctatcagaatcacttg

SEQ ID NO: 17999 - DNA, 431 bp, Homo sapiens
  misc_feature (1)...(431): n = a,t,c or g
ggtgaagcacattgttcaccaggccttctgggacgtcttggattcagaactaaatgctgaccctcctgagtttgaacatgccatcaaactgtttgaagaaatcagagagattcttctctcttttctcactcccggtggcaaccggcttcgcaaccaaatctgtgaagttttggacacagacctcattaggcagcaggctgagcacagtgctgttgacatccaaggcctggccaactatgtcatcagtacgatgggaaagctgtgtgctcccgtgcgagataatgatatcagagagttaaaggctactggcaacatcgtggaggtgctgagacaaatattccatgtcctggacctcatgcaaatggacatggccaattttacaattatgagtctcagaccgnacctttaacgccagttggnggaatatgaaa

SEQ ID NO: 18000 - DNA, 364 bp, Homo sapiens
  misc_feature (1)...(364): n = a,t,c or g
gaattaaatgataggccaggcgggtggctcacgcctataatcccagcactttggaaggctgaggtgggtggatcacttgaggtcaggagttgtagaccagcctggccaacatggtgaaaccccatctctattaaaaatacaaaaattagccaagcatggtggcatgcacctgtaataccagctactcaggagggtgaggcggagaatcacttgaaacagggaggcagaggttgcagtgaattgagatcgtgccgctgcactcaggcctgggagacaaagcaagagcctgtctnaaagaaaaaaaataaattaaaaaaaaaaatgatagaccatcctttattggcaggctgatccataaactata

SEQ ID NO: 18001 - DNA, 1218 bp, Homo sapiens
gggattcatccaaccatcatttctgagtcattccagaaggccctggaaaagggcattgaaatcttgactgacatgtctcgacctgtggaactgagtgacagagaaactttgttaaatagtgcaaccacttcactgaactcaaaggtggtttctcagtattcaagtctgctttctccaatgagtgtaaatgcagtgatgaaagtgattgacccagccacagccaccagtgtagatcttagagatattaaaatagttaagaagcttggtgggacaattgatgactgtgagttggtggaagggctggttctcacccaaaaagtgtcaaattctggcataaccagagttgaaaaggccaagattgggcttattcagttttgcttatctgctcccaaaacagacatggataatcaaatagtggtttctgactatgcccagatggaccgagtgctgcgagaagagagagcctatattttaaatttagtgaagcaaattaaaaaaacaggatgtaatgtccttctcatacagaaatctattctaagagatgctcttagtgatcttgcattacactttctgaataaaatgaagatcatggtgattaaggatattgaaagagaagacattgaattcatttgtaagacaattggaaccaagccagttgctcatattgaccaatttactgctgacatgctgggttctgctgagttagctgaggaggtcaatttaaatggttctggcaaactgctcaagattacaggctgtgccagccctggaaaaacagttacaattgttgttcgtggttctaacaaactggtgattgaagaagctgagcgctccattcatgatgccctatgtgttattcgttgtttagtgaagaagagggctcttattgcaggaggtggtgctccagaaatagagttggccctacgattaactgaatattcacgaacactgagtggtatggaatcctactgcgttcgtgcttttgcagatgctatggaggtcattccatctacactagctgaaaatgccggcctgaatcccatttctacagtaacagaactaagaaaccggcatgcccagggagaaaaaactgcaggcattaatgtccgaaagggtggtatttccaacattttggaggaactggttgtccagcctctgttggtatcagtcagtgctctgactcttgcaactgaaactgttcggagcattctgaaaata

SEQ ID NO: 18002 - DNA, 367 bp, Homo sapiens
  misc_feature (1)...(367): n = a,t,c or g
ggaaaatggattgtaggagagcaagagaggaacagggagaccattgggaggctgttatattcatccaggcaaaacatattagtagtttggaccaggctggtggcagtggagatgatgagaagtggtcagattcagggtgcattttggagagaaaggtagttgatagatttcaagagagaagctcaacactaactctcttaaacacaaaaggaatttattggctcataaactaggaagggcagggtggagctgacctgaggcatacgggaaccagggatttgacgacccgtagtgctttgtttctgtggctctttccctgcttttctctgggtgccaggctcattaccccangcttgnccncttccgg

SEQ ID NO: 18003 - DNA, 528 bp, Homo sapiens
  misc_feature (1)...(528): n = a,t,c or g
tgaataccntttgactgantacgaatttaatacgactcactatagggaatttggccctcgaggccaagaattcggcacgagaaacaagttaaaagattgagcaaatttgggggtaaacaaaaaagtaccagcaaggaatagcctccttataaataccttcacctatagtgtgaattgcttagggaagctcagggcacagagaagggctggctgcacatttttgcattgagcatagtgtctgacaccctgtgcattgccctggctgagcgaggaggctccatttgtttatttttcaagcatagatgctattttctgaggactgtagagtaaaaacattagaaatttctagctgcctgccacttagggcttgctggcttctagcccttctgctgaaagtcaaatttaagataggggatcatagaaaatgaagaaaagacatacaagtcattagggagaaaagaggagctggtgttctcttgcagctctggaatcagtatcagataattgtgccctgactgcgcagtcctg

SEQ ID NO: 18004 - DNA, 432 bp, Homo sapiens
ttatgactgacacgaatttaatacgactcactatagggaatttggccctcgaggccaagaattcggcacgaggtggcgaagttacttttgagggtatttgagtagcggcggagtgtcaggggctaaagaggaggacgaataaaagcagagcaagggaacccagggcaacaggagtagttcactccgcgagaggccgtccacgagacccccgcgcgcagccatgagccccgccccccgctgttgcttggagaggggcgggacctggagagaggctgttccgtgaccccaccatgtcctctcctaccacgagttccctggatacccccctgcctggaaatggcccccctcagcctggcgccccttcttcttcacccactgtaaaggaggagggtccggagccgtggcccgggggtccggaccctgatgtccaag

SEQ ID NO: 18005 - DNA, 348 bp, Homo sapiens
gaaaagggtatattttcctcctttggattgcagtggtgcttttgtcatatgttaagtgactatatatgtttggatctatttctggactctgttttgttcccttgatcttttgtcttccctggagctaataccacactatctcaattattctaactttatggcaaatcttgaaatcttattgtataagtcccccatatttgttcttattccacattgccttgcctattctacgtgctttgcagtgccatataaattttagaatcaacttgtcaattttcacacaaggatttgctggggttttgattgggattacattgaatccagagattaattttttttcttttgctt

SEQ ID NO: 18006 - DNA, 316 bp, Homo sapiens
gtggattattcctgagatgagagaacgcatatgagacaaggtaaaggtctgttgaaatcctgtctgtgaatccttctagctatatctctttaagtgaaagagtgttaagtactcagtaaatatgattattattactattattatttgagtcagagtcttgctctgttgcccaggctcgagtgcagtattgtgatcctccttggctcactgtaaccactgcttcctgggttcaagcagttcttgagcctcagcctcctgagtatctgggaatacaggggactgccaccatacccagctaatttttttaaatttttag

SEQ ID NO: 18007 - DNA, 497 bp, Homo sapiens
  misc_feature (1)...(497): n = a,t,c or g
tttgacctttgannccctnctatgacatgattacgaatttaatacgactcactatagggaatttggccctcgaggccaagaattcggcacgaggtttagtagtatcgtcgcccagctccctccagagaaagagcaggaggtgttcttctcagatgtaccagcaatgacaaagcctggcgggtgtcctcctgggtaggtataaatacaagctggtagtttcattggatgactcacacagataagccatgctcttggttaccagtggacttagctgggtctcaaagaatgggctgctttctctggaaagctggggagctggtaaaattttttggtcgccccaccagagacatcctacccattcccagtccctctgtgggctctgacatctctgtccggcgggcaccccctgctctggaacattctgggaatgcttcccactccccttttagtacttgtttgtgttctgtcctgttcctggatttcatggtctccatggt

SEQ ID NO: 18008 - DNA, 346 bp, Homo sapiens
gtggaagaaataagactactcggctgggcatggtgacttactgcctgaaatcccagcactttgggaggccaaggtgagcggaattgcttgaacctgggaggcggaagtggcagtgagctgagatcatgccaatgcactccagcctaggcaacacagcaagactctgtctcgggaaaaaaataataataataagacttctagaagctcctaaatccatagcttttcctctataccagcatcttctaaaaatgtcagcagcagtgaagtttcagtttgggaaataatgcatttcccctctctggagagtgcacagttatatctccaagaagtactgaaattcagaagt

SEQ ID NO: 18009 - DNA, 385 bp, Homo sapiens
acgtgggtgaactgtgcactccagttctctccagatgagagagaatcttttcaacagctggtattgggaagctggggccagggcatgatcctgataaacaccttaaatgtcttgtcaactggatgcaaattttgcaattggtgtcattttttttaaagtcaaattacaaggaagtacccagatcaggcagtggtaataccaaaggtcatcaaacacatacaaggaacatcttgatcatagggcatgtggggaagtttactgggccatcacagacttttgttctagtgattgtatgtattaggagtcatagcatgccctacggcagatctggattcttatacactaagatgtgtcttaagaatcacagtgcgtgcttcatcccttt

SEQ ID NO: 18010 - DNA, 415 bp, Homo sapiens
gaggacctaaacatgccgactttgaggtttagtatttcaaagagctttgaagtttaatgctgtgagattacatgggactgtgagtttttcaaacacccacaaatcacatttaaattcaggcttccaacaaccagtagaaactacatggcaactggaacacgttagaatcagggtcaagaatgaaaagccaccatgatggtaaagcacagtgttttgcaactcgaccagttgtccacaactcaagcaaggagggaccaatctaacaagaacagagatgcaagaaatagaactagccccaggaaattcagtattcaagctaagatgcaaagagccctagcacaccctctccccacatatacctgcaccataagtatgtaccaacagctaaaaagaaatgattttatgtttctttcct

SEQ ID NO: 18011 - DNA, 514 bp, Homo sapiens
  misc_feature (1)...(514): n = a,t,c or g
ggcagggcatgggccttggcctctccagcgtctttgctctgtgcctgggccacacctccagcttctgtgagtctgtggtctttgcatcagcctccatcggcctccagaccttcaaccacagtggcatttctgttaacatccaggacttggccccgtcctgcgccggctttctgtttggtgtggccaacacagccggggccttggcaggtgtcgtgggtgtgtgtctaggcggctacttgatggagaccacgggctcctggacttgcctgttcaaccttgtggccatcatcagcaacctggggctgtgcaccttcctggtgtttggacaggctcagagggtggacctgagctctacccatgaggacctctagctcccaaccccacagcctctccaaggactaagcgccagcagccccaggacacaggggactcaatgtgtgaaacttggcacttcatgtcanaacncgagcngagaggacncaaaccactgggagcctgaactcctaaaaaagtc

SEQ ID NO: 18012 - DNA, 339 bp, Homo sapiens
gagcagatctaacagctgatgtggacttcagttatttgcgaagaatggcacagggaaaagtagcctctctgggcccaataaaacaacacacatttttaaaaaatatgggtattgatgtccggctgaaggttcttttagataaatcaaatgagccatcagtgaggcagcagttacttcaaggatatgatatgttaatgaatccaaagaagatgggagagagatttaacttttttgccttgctacctcatcagagacttcaaggtggaagatatcagaggaatgcacgtcagtcaaaaccctttgcatccgttgtagctgggtttagtgaacttgcttggc

SEQ ID NO: 18013 - DNA, 429 bp, Homo sapiens
ggtgttcaccgagagcctggacatcacgtggtagaaatgtcccagaggccataaggaaatgcctgtccgatggccttgcagcatcctccagggctctgagaggtactctaggatgaggcactggccctttgctgggtgactgtctctgaccaggtaataggactctgagagaagcccaggggagttagcaagagccacacagcccaaagcactgcaatgctctatagaacagcaatcctgaaatgtggactttgtcaccacccttgggtcacagccactcctctgacagcactatgctcactttccattttccattcattgacaaatgcctgttgagtatgctgcatgggccagactccacagggagcggatgggggggtcagcctgcttgctttgcaccctgctgtaaccctgcagcagcccgtggct

SEQ ID NO: 18014 - DNA, 64 bp, Homo sapiens
gacaaaatacaagggcaagagtatcaggaaaggttacttttttttccctctgccctgataccca

SEQ ID NO: 18015 - DNA, 898 bp, Homo sapiens
  misc_feature (1)...(898): n = a,t,c or g
gaacaccccacaaaagctcagaaattggctttaaaaaaaacaaccaccaaaaaaaatcaattggctaaaaaaaaaaagtattaaaaacgaattggctgagaaacaattggcaaaataaaggaatttggcactccccacccccctctttctcttctcccttggactttgagtcaaattggcctggacttgagtccctgaaccagcaaagagaaaagaagggccccagaaatcacaggtgggcacgtcgctgctaccgccatctcccttctcacgggaattttcagggtaaactggccatccgaaaatagcaacaacccagactggctcctcactcccttttccatcactaaaaatcacagagcagtcagagggacccagtaagaccataggaggggaggacagagcatgaaaaccaaaatccatgcaaatgaaatgtaattggcacgaccctcacccccaaatcttacatctcaattcccatcctaaaaagcactcatactttatgcatccccgcagctacacacacacaacacacagcacacgcatgaacacagcacacacacgagcacagcacacacacgagcatacagcacacacacaaacgcacagcacacacagcacacagatgagcacacagcacacacacaaacgcacagcacacacacgcacacacatgcacacacagcacacaaacgcacggcacacacacgcanacacatgcgcacacagcanacacgcaaacgcacagnacacacagggcgcacagcagacangcagacacnngcgcacncactgggcacncttcagaagangggggcngnntcngggngcgcnnnttgngcntnncagngncatnggggnacngnanacngnacggnggcanngcnganagangggg

SEQ ID NO: 18016 - DNA, 400 bp, Homo sapiens
gcggcacgagcactattaaactgaccagcctggagacaaataccgtggtccagacttataatgctggacgtccagtctggagctgttgctggtgtcttgatgaggctaactacatctatgctggactggccaatggttcagttctggtatatgacgtgcgaaacacgagcagtcatgtgcaggagttagtagctcagaaagccagatgcccactggtctccctgtcatacatgcccagagctgcctcagctgcatttccatatggtggggtgctggctggaaccttggaggatgcttcattctgggaacagaaaatggacttttctcattggcctcatgtgctgcccttggagccagggggctgcatagactttcagacagagaacagctcccggcactg

SEQ ID NO: 18017 - DNA, 354 bp, Homo sapiens
gggcaggagaatggcatgaacccaggaggcagagcttggcagtgagccgagatcacgccactgccctccagcctgggcgacagagtgagactccgtctcaaaaaagaaaaaaaatatatgaaatatggttgattctctgtctagggggatttcatcatcaacctcccttcctccttattgtttttctgcctgttggtatcttcattaaaagatgaaggcttgcagtcttcaatttaaggtaaaacacagaaaggcaaatgtatgagcttgttaagacagatttaaacagttattaagcaatgaatagaagtgattatatctgccctggttctcatttagaggtgtggttgaaga

SEQ ID NO: 18018 - DNA, 346 bp, Homo sapiens
gcttgtttatgatggggacactgtttctgttcatagaccaagcttttatgcagacagatttcttaagttcatgaattccagagttttcaagaaaattcaagctttgaaggcttcaccgtctaagaaacggtgcaattcaatcgccgccctaaaggccacttcacaggagattgtgtcctcaattagccaggaatggaaggatgagaagcgggatttgctgactgaaggacaaagttttagcagccttgatgaagaagccctgggatcccgacacaggccagacctggtccctagcactccatcactgtttgaagctgcttccttggcaaccacaatttcatcttct

SEQ ID NO: 18019 - DNA, 180 bp, Homo sapiens
gagctagctagctaggtccatccatatccatgcacatcatctggtttaatagatttctcattatgctgtattcatctgtatatattctaatgttggagaattttctcaaatttaaatatgatttagataaacttaacagagtgtcagcagtacttagataaagcgatttttttttttttt

SEQ ID NO: 18020 - DNA, 408 bp, Homo sapiens
  misc_feature (1)...(408): n = a,t,c or g
gacaataccctgctgttggcagactcgtacatgtccccttccactttcttagcataggctaccaggttttccatgcggcgatcctttagagctgcgggatcaggtgttgggaagatggcttggacgagtttatgcactagatggctccgcaggtcctgagtgacatgttcgtgccagcctttccttacaccggtgctagaaggaggagctgctgttggtatagtgctgagggttccaatgttaccagagttggagccatcgttcatcagtgggtttgtggcccccagggaagtcggaagagctgattctgaaatcaagtttgggggctgctgatctgngtattcctcctgctggaatgttcattggattatttcccagggggttgagagncctnatctgctggtgggg

SEQ ID NO: 18021 - DNA, 408 bp, Homo sapiens
aattcggcacgaggtgtttataagtgtgaaaagagaccaaatagcataatattttgtctctagccttatctagctgcttgttggtatataagagtaagcagagagttgggcttctccaggtttagagttgccatacgtataactgcagcttaccaaggtgccattgagtgtaaaatgcactcttattttgtgaactgagaaaaaacactgtcatttaaactgtggcatgccatagattttataatatatcctgatttctgagctattagttttaaaattgttcattttagaattagtaaaataagtagttgggatacttttgattggaaacaacagaaaacccaaactcagatgcactttaataataaggaggagccaagggggatatgaagaaaatggcagcctgaa

SEQ ID NO: 18022 - DNA, 459 bp, Homo sapiens
  misc_feature (1)...(459): n = a,t,c or g
ttgattgcanccantagctatgacatgattacgaatttaatacgactcactatagggaatttggccctcgaggccaagaattcggcacgaggaagagtgtggtactcacaaggtgctgaacaaatgtcagttgaatgcctgcatgcatgcacttaaaacttcaagaattttccttcatatatgctgttgtattcacccataacttccttatattaacattgcttttaagcaataatttatgaaagatccagatgtctatcttcagcaaggatattgcctaccctttcatccgtccattcaactgtcattagcaaaacaactatgttccctgtaaaatacacaaaattgtgccaggtcaggtgacagatactacacaaagaatcaaaatacaaacacatgtatatatacatttataaaatatgataagagctcanagggaaaatgatttggtgntgtgga

SEQ ID NO: 18023 - DNA, 365 bp, Homo sapiens
  misc_feature (1)...(365): n = a,t,c or g
gtctaggttgtcaacaggtactatttgtcacataactaactttcgaggcactggaacatacctgaactaagaattaaatcttttactttatactcacttaaaatcaagaatcccatctaaaacacataggtaccttatctgaaactcttgcacttccccaaccagggcagaaatgaggtgggagaagtttgactaaaatgagggatgggggaaagtaaaagatgtttttttttnnnnnaaactcctttnggcccccaggnngnanggcaagggcnnattttnagntncccgaancntcngcntccnggtttaangcaattttcnggcntaaccntcccnagaaattggaatnncnggccctgcct

SEQ ID NO: 18024 - DNA, 425 bp, Homo sapiens
  misc_feature (1)...(425): n = a,t,c or g
ggcaaaagctcctcagttccctctctgcaaggctctaagaaggcagggctctcttactttcccctcctctctccctctttcctgtttctcttgcaagctgctcttcctccagcacatggcctttgccccggctggtccttctgcctggaagattcttcctgtttttctcagggctcagtgtcacctctacaggctttggctcaaatgttaccttcccagtgaggtcaacacaaccaccctatttaaagttgcaaccctccatcaccacactcccaatcccttttaccctgatctctctgataaccttcattgcacttaatggctttcaaacttacgaattcacttatcttgtgtatgatgttctataagttcccccttgctagcctgnaaactcccaagaggccgggcatantggctcacgcctg

SEQ ID NO: 18025 - DNA, 478 bp, Homo sapiens
  misc_feature (1)...(478): n = a,t,c or g
cttcaataccctgtacaatatgattancttcactacactttcaaagctatcaccanttttgactagncnaaaaaaaaaaananggtttgcggcctggtttaaaaggcttaaggttnaaaaaanaaggaaacataacnaattttgtgtgtgtgtgtgtncnnctttttttncttttttgnnnnnnnnnnnnnnnnnnatntaggncaggnnggccnnaaaccccngggccnaannganccnccaaccttggcccccnaaagngctgggattanaancatgaccnaaagcacccagcctaacctttancgcnaancccaaaanggaattncaaaanaggctacctanaaaaananactgcttgnaatacncggcaataatttaanaaangcaaaaactaaantttttgnaantaactgggttanttttacccctaagganagtaaaaatannnggggaaattaaatgggggaaccagggt

SEQ ID NO: 18026 - DNA, 584 bp, Homo sapiens
  misc_feature (1)...(584): n = a,t,c or g
gagcttcaataccctgtacaatatgattagcttcactacactttcaaagctatcaccagttttgactagtctaaaaaaaaaaacatggtttgctannnggtttaaaaggcttaaggtttaaaaaataaggaaacataactaattttgtgtgtgtgtgtgtttgananancatcncactctactgtgcctggctaatgtgatcttcttttttttcttttttgtaaananagggtcnccctatgtaggtcaggcnggnctcaaacnccngggctcaagtganccncctaccttggccncctaaagtgctgggattacaagcatgagccacagcacccagcctaacctttaatgccaacctcaaaactgaatttcaaaataggtacctataaaaatacactgnttgtaaaacncggaaataattnagaaaaacaaaancttanaatttttgcnaaancgggttgtttccccttaaanaggaacaaattnggggaataantggggaacaaaganttntgggtnccttttantaagggggggagggnattcccntngnnggggggtttttttggnccagnngncctttt

SEQ ID NO: 18027 - DNA, 482 bp, Homo sapiens
  misc_feature (1)...(482): n = a,t,c or g
ccatnngnnnnnttnngancnaaagctatgacatgattacgaatttaatacgactcactatagggaatttggccctcgaggccaagaattcggcacgaggcctcagcctcccgagtagctgggattacaggtgcataccacaatacccagctaatttttttttagagatggggttttaccatgttggccaggctggtctcgaactcctgacctcaaaggatccgcccaccttggcctcccagtgctgggattacaggtgtgagccactgtgccccgcctccacctactttctaatttgacaaatagtttatcaggcaaccttacactgtactgactcagctatagttgctttctgtgatatgtacacaatgttactaaagtgaaattctgctgtgacatgtaggagatgggaggctagttgtgcttctgtagcatcaggtctgcagagggatggctcctccacagatggaaatgacaggacg

SEQ ID NO: 18028 - DNA, 441 bp, Homo sapiens
  misc_feature (1)...(441): n = a,t,c or g
atttgatttnaatacccttttgacatgattacgaatttaatacgactcactatagggaatttggccctcgaggccaagaattcggcacgagcattactgtgataatggagttttcctctttgttttccagtttctggaagaaaatcccgatccctctgcctctgaaattcgggaggaattagaacaatacacaactgaaattgtgcagaacaacctcctggggtcccagggcgcacatgtgagttaacactgtctttctcccatgctgttttgggcatcattttatcactttccctctgtgttgtcctttgcatatacttctggcttcccaaagtagacctgagtttgcatctgagctctgtctcttgtgagacctgcaacctcacaaattacacaactgtccctgagtgtccactatctaatctctaatgcctgcctgca

SEQ ID NO: 18029 - DNA, 335 bp, Homo sapiens
caagtttattgcagcctttcttttcctatttcttttttttaagggttagtattaacaaatggcaatgagtagaaaagttaacatgaagattttagaaggagagaacttacaggacacagatttgtgattctttgactgtgacactattggatgtgattctaaaagcttttattgagcattgtcaaatttgtaagcttcatagggatggacatcatatctataatgcccttctatatgtgctaccatagatgtgacatttttgaccttaatatcgtctttgaaaatgttaaattgagaaacctgttaacttacattttatggattggcacattgta

SEQ ID NO: 18030 - DNA, 410 bp, Homo sapiens
agagttcataattacactatttataacagcaaaagataggaactatctaaatgcccactgacaagagtagatggtatattcacattattgaatattgtactacagtgaaaatgaactacagctatatgcaataatatgttgaatattaaaaacataaagttgaggggggaaacaaagcaagtcccaaaagacaataagcagtatgattccaagaaaaactaaatatattctttgggcaccaatacattcataatataaactgttttaaagaggcgaaggaatgaccaatacaaaattccaaagaatagtttctggaggaaagggaagggcaagaggaggcaggaaaatggaatagttgaggaacacataagtaaacaaatgctcgtgccgaattcttggcctcgagggcc

SEQ ID NO: 18031 - DNA, 360 bp, Homo sapiens
gatttttttttctactcattcattcaaaagtcctggcattggtgtcatagggttattagagcctctatctgcagagcatatggtgctgttctaaactggaataccagaaaggctaactctggttctctgctggtttgtcttactccagatcctctggagtagcatttcccaaactgtgttccaagggatctatgaaatgttcctaggtgttctgtggtcaaagctgtttggtaaacacagcataatattgccctctccactgctttgcttaatttgatctaatccaacacttttcaaacaaaatcctttatcctagtggcgtctattaatatattacgaaaagactattccaggaaacat

SEQ ID NO: 18032 - DNA, 451 bp, Homo sapiens
  misc_feature (1)...(451): n = a,t,c or g
gcagcagcctctcaaatgcctgttatttctgggtccttgttaagccaaattttagaatagaattgttgatgtgaaaggaaactttactagaggtgaactgctagcctcttctcccacccaccttaatctacatttcagggtaaacgagggggttagactttggttctcaatctcatggagacagtgtccctagtgtccagatatggggtggagtctggccttcccctccgcttcgtggcctggctggtgctacttggtatagggctgtggggctctcagctctttgctaaagtattgagaccctctccttgcttttctactttcccaagcactggtgaccccggcagccctgaggcctctggtcttgggtggtaatcagttggtgatcattgtgggaattgctgtgcccaatcctgctggtcctgttctganattgatcgngaanaaaacc

SEQ ID NO: 18033 - DNA, 342 bp, Homo sapiens
tgccatccaagctctagatctgtggctttcaagctgggctttgagacgcatcatgagttcaaaggggagagtaaggggaagaagctgaattggggatttctggttttctagcccgttgtcaatctttgggttttattcctttttcagattgtgcttccatttaaaaaaatgagttccagtttaaaaatatatatatatgctggactgggcatggtggcttatgcctgtaatcccagcactttcggtggtcaaggtgggcagatcacttgagcccaggggttcgaggtcagcctgggcaacataaggagacctcatttctacaaaaaaaagtcgacgcggccg

SEQ ID NO: 18034 - DNA, 460 bp, Homo sapiens
  misc_feature (1)...(460): n = a,t,c or g
acatgtttgttttcaactccttcttcgagcccatgtgcttttgcagctactttcttgcctctttccttctgctatggtttagatgtctgttccctccaaatctaatattgaaatttgatcccaatgttgggtccacttgcaggaggtgtttgtgtcataagggtgaatccctagtgacattaaagctcttcctcaggggtgagtgagatcattcctacaagagctgcttgttttaaaaaaacctggcacctcctctccccctcccagcttcctgtctcaccatgtgctttctgtacaggcctacactccttcactttccactatgagccgaagttgcctgaggccctcgccagatgcagatgcccaatcttgaactttcctcgtgccgaattcttggcctcgagggccaaattccctatagtgagtcgtattaaattcgaatcatgtcaanctgtcaact

SEQ ID NO: 18035 - DNA, 359 bp, Homo sapiens
gaaagtgctgggattacatacgtgagccaccacgcctggccaggtttttctctgtattcagacatggtgtggagtgatctttttttggtcttgctgcctgtcttatgattatagaggctttgcctggtgtcagtgttctgggaacatgcttatgttcagcaggagaatgccagggccttgctgtgagtgccaagccaggacactgctgatgctgatggggctgctgttttctttcttggcttattcatttgcaaaacctttactgatgacttttaccacagtcacacatattatctcatttagacctcacagcaactctgtgagggattgttatctccattttatggatgaggaagctg

SEQ ID NO: 18036 - DNA, 502 bp, Homo sapiens
accagctatgacatgattacgaatttaatacgactcactatagggaatttggccctcgaggccaagaattcggcacgaggtcatatgattgattattcctgcccaatcatcggcaaggatgatgggattaccgtaactgctttgtaccaattagactcagtgcctcggaactgagcactttgcatcccaaaatgctggttgtttgggaagagagaaggaggtatggctgtgggatgagcagaagacaacatctttcatgatgcccgtcactgtggtgtccccagtgtgcctgtacatactgtctctggcatcattgaactctgtagtccataaaatgattttgtgtctagagattcttagatacaaagagtgggaaaagactcaaacgtgtgtgagatgtataatcattctgattataaaaggcacacctacttggagagtgtaaaggtgtgtgaagaagaaaacaaaaagctcccattatcccacaagcccagggatgaca

SEQ ID NO: 18037 - DNA, 79 bp, Homo sapiens
gctggatatttaatgataccaaggaatcattaattttgtttggctgtgatgttttattattagaatgatgttatgatta

SEQ ID NO: 18038 - DNA, 429 bp, Homo sapiens
gagaggtctgggcctcaggaataacaggaaaggccataatggcaatgcctatagtaattcagcccaagaatccttctagctatccttgtagaaggcagtttcctcttcagctggaggccaaagagggatttcagcttctgactgaaaaatttcaaaaacatggattattaataccctataacaccccatcttacctgttaaaaagagcaatgaaaaatacaggctagtccaggacctgagaatcataaatgaggcagtagtcccaatacacccaatgatccccaactcatatgtaattcttccccaacctccagatgctcagtggtttccagtcttagaccttaaagactctttcttttgtatctccccctcgacccatcctcccaatttctatttgcatttgagtgggagaatgaaaaggaaggagtc

SEQ ID NO: 18039 - DNA, 330 bp, Homo sapiens
agctcaagccttgccacttcgggcttctcactgcagctgggcttggacttcggagttttgccattgccagtgggacgtctgagactttctccttcaagtacttggcagatcactctcttagcagggtctgcgcttcgcagccgggatgaagctggtttccgtcgccctgatgtacctgggttcgctcgccttcctaggcgctgacaccgctcggttggatgtcgcgtcggagtttcgaaagaagtggaataagtgggctctgagtcgtgggaagagggaactgcggatgtccaagcagctaccccaccgggctcgctgacgtgaaggccg

SEQ ID NO: 18040 - DNA, 875 bp, Homo sapiens
gcagtttattgaaaaaaaattcaaagatgactcaaatcatacaataggagtggaatttggttcaaagataataaatgttggtggtaaatatgtaaagttacaaatatgggatacagcaggacaagaacgattcaggtccgtgacgagaagttattaccgaggcgcggccggggctctcctcgtctatgatatcaccagccgagaaacctacaatgcgcttactaattggttaacagatgcccgaatgctagcgagccagaacattgtgatcatcctttgtggaaacaagaaggacctggatgcagatcgtgaagttaccttcttagaagcctccagatttgctcaagaaaatgagctgatgtttttggaaacaagtgcgctcacaggggagaatgtagaagaggcttttgtacagtgtgcaagaaaaatacttaacaaaatcgaatcaggtgagctggacccagaaagaatgggctcaggtattcagtacggagatgctgccttgagacagctgaggtcaccgcggcgcgcacaggccccgaacgctcaggagttgtggttgttaggagagcacacaggtgttcatacagtggcatttgggacacaatcgttggaacctgaagaatctgaagttttttttaccaccatctttttctactctgtatggaagtagatctttatggggaaaagagaatttggggtgttctgcaagccagtcaaagtggcacagcaaatcatataaatcgaattaaatggacaacaccgttagatgtgtatgtaaaaattttctgtttcatatttttcctttcactttcggtttaaaacatgctatatgtactgtatgtcctgtagcccagtgcggctccacagcatgg

SEQ ID NO: 18041 - DNA, 454 bp, Homo sapiens
  misc_feature (1)...(454): n = a,t,c or g
gtgnnnnncnttganaccnttatgatntgattacgaatttaatacgactcactatagggaatttggccctcgaggccaagaattcggcacgaggttcaagtaacctctctagtgactttgtttctttccatcaccctctctgttgccatcagcgccctttaacttgttggctgaattcagaaagttctgagcttttcagtgtctctgacctgctggatcacaggactcttgctgtcactgtggaccgctcagcacttaaggaaaagtattcctcaccatcttgagaatttggccagtatgttttggaaatgccttattctaaagtctataccattttcattaatcagagctgacacttctgtaaatgtgatactgagccaaaatctatatggtttcttatgatttttttccctaatggattttgaatccctggaggtcaggggttcatattctt

SEQ ID NO: 18042 - DNA, 319 bp, Homo sapiens
atatggtattgatgacacggagctgatgggtgcagaggacaagctgcctcttgaggacagccctgtgatttctgcccttgattgcccttccctcaataatgctactgccttcagtctcctggcagatgatagtcaaacatcaacctctatctttgccagtcccacctctccacctgtcctaggggagtctgtcctgcaagataacagctttgacctgaataatggtagtgacgctgaacaggaagaaatggaaactcaatcttcagacttcccaccatccctgacccagccagctcctgatcagtcatccactattcag

SEQ ID NO: 18043 - DNA, 323 bp, Homo sapiens
tacaggtttgtccagaggggttgcgtttatccggtttgacaaacggtcggaggcagaagaggcaattaccagtttcaatggtcataaacccccaggttcctctgagcccatcacagtgaagtttgcagccaaccccaaccagaacaaaaacgtggcactcctctcgcagctgtaccactcgccagcgcgacggttcggaggccccgttcaccaccaggcgcagagattcaggttctcccccatgggcgtcgatcacatgagcgggctctctggcgtcaacgtgccaggaaacgcctcctccggctggtgcattttcatctaca

SEQ ID NO: 18044 - DNA, 407 bp, Homo sapiens
atttaatacgactcactatagggaatttggccctcgaggccaagaattcggcacgaggcagggaaaggcatggtctcactcaatgggcactgtgggcctgtggccttcctggctgtggctaccagcatcctggcccctgacatcctgcggagtgaccaggaggaggctgaggggccccgggctgaggaggacaagccagacgggcaggcacacgagcccatgcccgacagccacgtgggccgagagctgacccgcaagaagggcatcctcttgcagtaccgcctgcgctccaccgcacacctcccgggcccgctgctctccatgcgggagccggcgcctgctgatggcgcagctttggagcacagcgaggaggacggctccatttacgagatggccgacgaccccga

SEQ ID NO: 18045 - DNA, 322 bp, Homo sapiens
gcagcaggatgcagagtgctgttcaagttttccagtggggtccctcaaagggaccaactttgaaagatagctagcttccaaagaataagaaatagatagagttactgtacctgacttggggctgctcttaatcaagttctgcattgcaaggaagataatattcgagcgttatgaaggcggagaaggatcctgaagacgaagaaaatatcgttagagatccaagctaagtgtagcacagcatgtgagggactgagtcacttgtcaggagtttgtctgagagtttgctttgtgagcttacagagatttgtaacttaatgcaaag

SEQ ID NO: 18046 - DNA, 474 bp, Homo sapiens
  misc_feature (1)...(474): n = a,t,c or g
gaattgaaagtgccatgtaactccaagccaaggaaaaaaagtggttcctagaacacctggctaagtttatactccctgctaggagctgccctgtggttcttgtggtagatatagtcatgaagactcaggtgggaaaagccacacaatctgggtgccactttcctagggctcctcctgctcttggctaacgaggggccttatttgtagtggctcaaattgcgactggaatacattttccatagaatcagcgtaggttatttttttttttaaccaagngncnnnnatacaanattcttttccaaattangttttcttantnacanaaggggatnaacnnctgttttttttccttttagattnttttttttggagaaaatggttcttatttcncccaagntnaaactgggannnctgnttactgtccannggaanaccncttttncgggncaaagngaaaaanttnngcctttcccc

SEQ ID NO: 18047 - DNA, 981 bp, Homo sapiens
aggacaactggaggtggcatttctacgacaccgtgaagggctccgactggctgggggaccaggatgccatccactacatgacggagcaggcccccgccgccgtggtcgagctagaaaattatggcatgccgtttagcagaactgaagatgggaagatttatcagcgtgcatttggtggacagagcctcaagtttggaaagggcaggcaggcccatcggtgctgctgtgtggctgatcggaccggccactcattattgcacacctcttatgggaggtctctgcgatatgataccagctattttgtggagtattttgccttggatctcctgatggagaatggggagtgccgtggtgtcatcgcactgtgcatagaggacgggtccatccatcgcataagagcaaagaacactgttgttgccacaggaggctacgggcgcacctacttcagctgcacgtctgcccacaccagcactggcgacggcacggccatgatcaccagggcaggccttccttgccaggacctagagtttgttcagttccaccccacaggcatatatggtgctggttgtctcattacggaaggatgtcgtggagagggaggcattctcattaacagtcaaggcgaaaggtttatggagcgatacgcccctgtcgcgaaggacctggcgtctagagatgtggtgtctcggtcgatgactctggagatccgagaaggaagaggctgtggccctgagaaagatcacgtctacctgcagctgcaccacctacctccagagcagctggccacgcgcctgcctggcatttcagagacagccatgatcttcgctggcgtggacgtcacgaaggagccgatccctgtcctccccaccgtgcattataacatgggcggcattcccaccaactacaaggggcaggtcctgaggcacgtgaatggccaggatcagattgtgcccggcctgtacgcctgtggggaggccgcct

SEQ ID NO: 18048 - DNA, 393 bp, Homo sapiens
ctgatgggcctgaaacagggttcagtgccattgacactgatgaacgaaactctggtccagccttgacagaatccttggtccagaccctggtgaagaacaggaccttctcaggctctctgagccaccttggggagtccagcagttaccagggcacagggtcagtgcagtttccaggggaccaggacctccgttttgccagggtccccttagcgttacacccggtggtcgggcaaccattcctgaaggctgagggaagcagcaattctgtggtacatgcagagaccaaattgcaaaactatggggagctggggccaggaaccactggggccagcagctcaggagcaggccttcactgggggggcccaactcagtcttctgcttatggaaaactct

SEQ ID NO: 18049 - DNA, 359 bp, Homo sapiens
  misc_feature (1)...(359): n = a,t,c or g
aagaatctgagtactagaaaatactcttctcctgtgtttgttctgctgttaaatacacggtttgaattcttaattttagaaatacttttcagatctagaatttcagtttgacacaaattccaattcacagttgaaattcttaatctttttatgttttccctctttttttctttttttttnttttgnaanggggnnntnnnnnttngccccnangggggangnncgggggggnaanttggntcnnnggaaccnncnccncccngggtnaggggggtntncngncntanncccnngnngggnnggaattgcaaaacggnncccccnnnccngggnaanttttggtttttnaaaaaancggg

SEQ ID NO: 18050 - DNA, 391 bp, Homo sapiens
gaatacattcttcctttagcagaactgcaaggtcacatggcagagtacatggatacagagaggtggggggaaatttgggaacaataattcaatctgccatgccttggctgaaaagtagtggcagtaggaagtcagaagatgagagctagaaaagatactctgatggagagtgagaggtgtagtgggaagatccttatggttaggagatctggttttgagtcctaactgtgacacttttttagtatgaccttgaacaagtcattttccttgatatttgagcattaagggtccatgtgatgtcttcatcttatattttcacttacctagataaggatgtagagtaaatgaatgcaatgattagtctatgttcaaacagctaggttgaatcagt

SEQ ID NO: 18051 - DNA, 402 bp, Homo sapiens
cagcgaatgtgcgtgtgtgtctgcctcctagtgcgccatgttctgacagagtgatatgataggtgctgtgtgactaagatcagactactccatgtctctgtacttcggtttcttctgtaaaaacaggaatagcagtgccaaccttttgagattccattgggaaatgtctctaagtgccagcacagcacactggctctcagcccgttgatctgccatgcctagctgtgggtttctcttgggagttggaggggtcaaggcagcagattggaccctgcagctgtctcttatagcaaaaaatacccaaggcttggggttaaaagatgccgaccctgcctcccagcctgtgaggtatctggtacctgaccctcgccaggagtgcggaggggaaaagtccttctgcag

SEQ ID NO: 18052 - DNA, 386 bp, Homo sapiens
aaataagtggcatccataggatcatgatttttaatttgttgcctctgaagatttcactccatcaagatctgccaatcttcaatattctggctaaatcttggtatgtggtttttaaacagtcactccgtttcaaagtctgtctttccttatagaatgtggaaattatttctccataccttgtgattttgacctgagtgctaagagaatcactctccttacctagttatctacaaatgttcattccagaaatgtttagttactgaattgaatgaagacatctcagtacactcttttaggtcatagtagttgccattttgtaaaatttcttttttcttctttgcttttttccccttatttggtttaatttttctaatgttaggagatat

SEQ ID NO: 18053 - DNA, 397 bp, Homo sapiens
actcactatagggaatttggccctcgaggccaagaattcggcacgagggaacaagagttattacccgctgatgacttctgcagctgcccttaatcagcctctggcgcttggggagcatatttgtagccagaatctccgacttttagctttgtttccaagcaagccagaaacaccagcaaggcctggagcttgttttctgcctatttagaaccctgcaggcattcgtgtctctcacccggtagctttgagcacaaaaccccacagcctttggtgtaaagcataccagttccggtggtgaggagacctttccaaatataagaggaataaagaagtcacctccccagctgtcatcatcttccagcagattgagcaagaatattttgagcactacaggaaa

SEQ ID NO: 18054 - DNA, 375 bp, Homo sapiens
ggactggcttgggacaatagctgcaggagatatatccggggagctcattgctgctatattaccagatatggcactgaatccaataaatgtcaagcgacctgtagagcgaagatttcctatatataaagcagatctgataccgtatcaggacagtcctgaaggtccagaccattcttctgcttcatctggggtccccaaccctcccaaggctcgaacttacactgaaactgtcaaccatcactacttgctctttcaagacacagatttgggttcattccatgatctgctccgtagagaaccaatgctgcgcatgcaggagggagaggggcattctcaactctgcctggacaggctgcagctggaggctattcataa

SEQ ID NO: 18055 - DNA, 422 bp, Homo sapiens
  misc_feature (1)...(422): n = a,t,c or g
tgattacgaatttaatacgactcactatagggaatttggccctcgaggccaagaattcggcacgagtctaactagaaataatttgttccacagtgatagaaaagtgttgctgttactcactggggcagtctccagcattattccactggtgtccccatttaaaattacctttaatacacctcagttttatttacttgccagtttataacatccttaggaaaagagattctaggattaagcaaaacaagggatgtttttaaatactgtaacttttttttttnnnnnacanagnnttanntttgncnccnaggnngaatngcaggggngaanncnngantcnnngaaggntnngcntcnngggtccnngcnattctccggnttaanccncccaggaaccnggaantacnggccccngccaccac

SEQ ID NO: 18056 - DNA, 285 bp, Homo sapiens
ccttttaatgtattgtggcaagccaaaattgattaatttctttaaatagttcactattctgatattagctcttgaaatgcccactaaaacatactgacaaaaagttttacttctggtaactattcactgaccaatgcttattttatttttctctatgctttctcacaatgtaaagaagaaactgtcattctccaaatcactgcttcatagatagtgaacatcaaacaaagcaagaacttccaagccacctctgaatttgggttcctaaataaatgggtaaacatt

SEQ ID NO: 18057 - DNA, 598 bp, Homo sapiens
ggggccatctctgctgccaacctgcacctaaggaccaatcacatctatgtttcatctgacgacatcaaggagactggctacacctacatccttcccaagaatgtgcttaagaagttcatctgcatatctgaccttcgggcccaaattgcaggatacctatatggggtgagcccaccagataacccccaggtgaaggagatccgctgcattgtgatggtgccgcagtggggcactcaccagaccgtgcacctgcctggccagctgccccagcatgagtacctcaaggagatggaacccttaggttggatccacactcagcccaatgagtccccgcagttatcaccccaggatgtcaccacccatgccaagatcatggctgacaacccatcttgggatggcgagaagaccattatcatcacatgcagcttcacgccaggctcctgtacactgacggcctacaagctgacccccagtggctacgaatggggccgccagaacacagacaagggcaacaaccccaagggctacctgccttcacactatgagagggtgcagatgctgctgtcggaccgtttccttggcttcttcatggtccctg

SEQ ID NO: 18058 - DNA, 592 bp, Homo sapiens
  misc_feature (1)...(592): n = a,t,c or g
ccctatgacatgattacgaatttaatacgactcactatagggaatttggccctcgaggccaagaattcggcacgagacattcctctgactttatactgttattactgcatttattatttgctatattaatagctactaactagaaattagatgaagcaagcatgacagacacagctgtggaggtcacagctgctcctttttggtcaatgagcgtttctatcccctccccctggggtgtgctgtgtcccacctggcccaccagaggctcacgacgatggcacctgaccaggtgacgtgggcgtggtcacctcacctgcaaggctttgtggactctgcacaccgtatgacccccggttttacagtttttagctgttgaattttggaaattggcactgggtgaaaaggtcggaggactggctcttgtagtcacagagtggctgcaggcctttgaaaagtggaggaaagaaaagcccttctcttgcccgcacacatttcactccactgtactgggctttcaagctttggcattcaggccctatattttctgaggaaaaatcgttgaaacacttttctntatggggggatttgaaac

SEQ ID NO: 18059 - DNA, 344 bp, Homo sapiens
gctctgtcacatagatgtggttcaccagccacatggtagacctcagtctccaggacagctcctcctgaggttgatatgagactgtgtgacccagagctcccactgtaaatcagattgttgacacagactatctagcttggctcaagtccccaggcaaacaaagataatttcatcaggcaggacatttcagggggttagagattacctgccagggactgaaggcaaaggctagatctctctttgggcaaagttaacttttttactaaacaatctcttatcttccacttacactttagtagcaagaaccctctacctaaccctccaactttgtacatgcggtttct

SEQ ID NO: 18060 - DNA, 365 bp, Homo sapiens
ggttggtcagatgactgtttagatctgtgctgtctctagctcctagcatatgttgctatttcagttaattacaattggccaggtgtggtggtggctcatgcctgtaatcccagcactttgggaggccaaggcaggaggattgcttgagcctaggagtttgagaccagcttggataatataatgagatctcatctctacaaacaatttaaaaatttgccagacttggtggtgcacatgtgtagtcccagctacttgggaggccaaggtgggaagatcacttgagcctgggaggtggagactgcagtgagacaggatctcatcactgcactgcagcccaggggacagagtgagacccttgtttaaaa

SEQ ID NO: 18061 - DNA, 650 bp, Homo sapiens
ggaagctccgaggatggctgaagtccaacgtctctgatgcggtggctcagagcacccgtatcatttatggaggctctgtgactggggcaacctgcaaggagctggccagccagcctgatgtggatggcttccttgtgggtggtgcttccctcaagcccgaattcgtggacatcatcaatgccaaacaatgagccccatccatcttccctacccttcctgccaagccagggactaagcagcccagaagcccagtaactgccctttccctgcatatgcttctgatggtgtcatctgctccttcctgtggcctcatccaaactgtatcttcctttactgtttatatcttcaccctgtaatggttgggaccaggccaatcccttctccacttactataatggttggaactaaacgtcaccaaggtggcttctccttggctgagagatggaaggcgtggtgggatttgctcctgggttccctaggccctagtgagggcagaagagaaaccatcctctcccttcttacaccgtgaggccaagatcccctcagaaggcaggagtgctgccctctcccatggtgcccgtgcctctgtgctgtgtatgtgaaccacccatgtgagggaataaacctggcactaggaaaaaaaaaaaaaa

SEQ ID NO: 18062 - DNA, 335 bp, Homo sapiens
  misc_feature (1)...(335): n = a,t,c or g
gaaatttaacctaaagatgatggtcaggagagatttgaaaaagcaactggaggtaagaatacttaggagatacagtgcagcgaataggatggaaagaagaaatgctcacagagacttgttttcacgttcaaatgatcgcatgtattgattgattgattgactgattgggtgtaaagtttgagaaatagggcccagtaacctcactctgagaacttatactcaggaactaattgagtggatgaagannnnnnnnnnnnnnnngcgnatgcaanantcgcnnatgcngnatgtnngcnnnagnanntnnnncnagngnncnnnntcnngnncnaggt

SEQ ID NO: 18063 - DNA, 412 bp, Homo sapiens
ggctggaaaatccccaaatacttgaagattaaacaacacatgggtcaaagattctcaagaaatctattaaaaaaatttttattttcatctttttttgccacactacactgatgtatcaagagaaatctaaaaatgttttgaactaaatgaaaatgaaaacaacttaacaaaatatgcgggatgcaacaaatgcaatgcctagagggaaatttatagcgtggaatacatagaaaagagtaaagatctaaaaccaaagtttctgccttaggaaactacaaaaagtagagcaaattaaatacaaaggcagaacagaaacaacaaattaaaaaccaatattctttatagagacacaaaaatccttaacaaaatattagcaaatagaattcagcaaaatataaaaataatcttctgt

SEQ ID NO: 18064 - DNA, 525 bp, Homo sapiens
  misc_feature (1)...(525): n = a,t,c or g
tttgaanncccttttgaanncccagctatgacatgattacgaatttaatacgactcactatagggaatttggccctcgaggccaagaattcggcacgaggtgacaggaacaacagaggttttttaaaaaagactttccttggcaaaattaaaggagaacagcactatatcagtctttcatcttttttttaattgttttaaactactgaaagaagtctggtaaccactgctacacaccatgcctccttcccatggcaaggctgagccccgaaatccggatctaaaggtactctccatattgttttagactgcccccccccacccagtctcgtattgcgtaggatagccaggtgtggtggcacacgcctgtagtcccagctattcaggaggctgaggggagaagactacttgagccaggagattaaggatgtagtgagccatgatggcctggtgaagaacagccactgnattccaccctgggcantagagcaagaccctntttccaaaaaacagccccaagaaacaa

SEQ ID NO: 18065 - DNA, 316 bp, Homo sapiens
gcagtatttaatttttaggtgttttttgttttttcgggggctgcatttttggagatagggtcttgctatgttgccccgggtggaatgtagtggctgttcaccagtgccatcatagctcactgcatccttaaactcctggctcaagcagtcttctcccctcagcctcctgaatagctgggactgcaggcatgtgccaccacacctggctatcctacgcaatatgagaccaggaagttgtcatctgtgtggagaggaataagtgtaatcccacataggggggtagtctaaaacaacatggagagtacctttagacctg

SEQ ID NO: 18066 - DNA, 390 bp, Homo sapiens
  misc_feature (1)...(390): n = a,t,c or g
gaacttctggctcttgatcaactccacggatcccgcaggacagctccagtggctggtgggggagcttcaggctgctgaggatcgaggagacaaagtgcatataattggccacattcccccagggcactgtctgaagagctggagctggaattattaccgaattgtagccaggtatgagaacaccctggctgctcagttctttggccacactcatgtggatgaatttgaggtcttctatgatgaagagactctgagccggccgctggctgtagccttcctggcacccagtgcaactacctacatcggccttaatcctggttaccgtgtgtaccanatagatggaanctactccangagctctcacgtggnnctggaccatganacctacat

SEQ ID NO: 18067 - DNA, 340 bp, Homo sapiens
ggcttcaggctgctgaggatcgaggagacaaagtgcatataattggccacattcccccagggcactgtctgaagagctggagctggaattattaccgaattgtagccaggtatgagaacaccctggctgctcagttctttggccacactcatgtggatgaatttgaggtcttctatgatgaagagactctgagccggccgctggctgtagccttcctggcacccagtgcaactatctacatcggccttaatcctgtcagccccacatccttgcaggttaccgtgtgtaccaaatagatggaaactactccgggagctctcacgtggtcctggaccatgag

SEQ ID NO: 18068 - DNA, 336 bp, Homo sapiens
ttccccggcagtcggctccctctcccccctcctagcccctccccgaagccgcccatggtcttgggtagtttcatcacactatgggccactcagtactcagtgagtacctctctagatctcctcagccctctactgtgtggtattgtcccatgaattctagctgcctaagtcctgcactctgagctgagctcgctgtcttcaattttgagttctgcagcctccatagggcttctgcttctgcatggtgcccaggaaactctcttcaggcactaagtttggccatcataggactcatatctttggttctcttcctttggggattactgggctctcatt

SEQ ID NO: 18069 - DNA, 351 bp, Homo sapiens
  misc_feature (1)...(351): n = a,t,c or g
tggaaattgacatcccccacgtgtggctctacctagcggaactggtaacacccattctgcaggaaggtggggtgcccatgggggagctgttcagggagattacaaagcctctgagaccgttgggcaaagctgcttccctgttgctggagatcctgggcctcctgtgcaaaagcatgggtcctaaaaaggtggggacgctgtggcgagaagccgggcttagctggaaggaatttctacctgaaggccaggacattggtggtcgacgcggccgcgaattccagatctatgaatcgtagatactgaaaaacccngcaagttcacttcaactgtgcatcgtgcaccatctcaatt

SEQ ID NO: 18070 - DNA, 613 bp, Homo sapiens
ctttgaaaaccgttatgacatgattacgaatttaatacgactcactatagggaatttggccctcgaggccaagaattcggcacgagcagatgcacaggaggagaagcaggagctgtcgggaagatcagaagccagtcatggatgaccacctggggccccggagagcaagtgcagccgcggagccctgtacacaggcttttccatcctggtgactctgctcctcgctggccaggccaccaccgcctacttcctgtaccagcagcagggcccggctggacaaactgacagtcacctcccagaacctgcagctggagaacctgcgcatgaagcttcccaagcctcccaagcctgtgagcaagatgcgcatggccaccccgctgctgatgcaggcgctgcccatggggagccctgccccaggggcccatggcagaatgccaccaagtatggcaacatgacagaggaccatgtgatgcacctgctccggagcttccccggagaacctgagacaccttaagaacaccatggagaccatagactggaaggtctttgagagctggatgcaccattggctcctgtttgaaatgagcaggcactccttggagcaaaagcccat

SEQ ID NO: 18071 - DNA, 852 bp, Homo sapiens
  misc_feature (1)...(852): n = a,t,c or g
caacagctatgacatgattacgaatttaatacgactcactatagggaatttggccctcgaggccaagaattcggcacgaggcggcgggaagatggcggagctgcgcgtgctcgtagctgtcaagagggtcatcgactacgccgtgaagatccgagtgaagcctgacaggaccggtgtggtcacggatggtgtgaagcactccatgaaccccttctgtgagatcgcggtggaggaggctgtgcggctcaaggagaagaagctggtgaaggaggtcatcgccgtcagctgtgggcctgcacagtgccaggagacgattcgtaccgccctggccatgggtgcagaccgaggtatccacgtggaggtgcccccagcagaagcagaacgcttgggtcccctgcaggtggctcgggtcctggccaagctggcagagaaggagaaggtggacctggtgctgctgggcaaacaggccatcgatgatgactgtnaccagacagggcagatgacagctggatttcttgactggccacagggcacattcgcctcccaggtgatgctggagggggacaagttgaaagtggagcgggagatcgatgggggcctggagaccctgcgcctgaagctgccagctgtggtgacagctgacctgaggctcaacgagccccgctacgccacgctgcccaacatcatgaaagccaagaagaagaagatcgaggtgatcaagcctggggaccctggtgtggacctgacctccaagctctctgtgatcagtgtggaggacccgctccagcgcacggccggcgtcaaggtggagaccactgaggacctggtggccaagctgaaggagattgggcg

SEQ ID NO: 18072 - DNA, 405 bp, Homo sapiens
tccagctgtccccacaagcagagccctgaggggtggggaccagctggccacatggtgctgcttttcaggttaggggagaggtggccctgagggacagcccagctctgagtctcagtcgctgatcactgccagggaggctcaggctgccatggctccaggctccctcccctgcctaggggcaaagtccatcgggtcctgggcctcagcttcccttcccacattcctccggccccaggagcaaccccttgggctaggtctgaccccaggtgtccctctggaaggggctggctggtgccctatttccagccaccccagcagctagggaggcaaagcaggctgcagtcagtccctcaagccagcgttgcatgtttgggatggtggctcctgttgtcttgcgctctggga

SEQ ID NO: 18073 - DNA, 485 bp, Homo sapiens
  misc_feature (1)...(485): n = a,t,c or g
gaaaaaacctttagaattttactttgttgatgctagcattttagtgttatttagtgttttagagtattttaaactaaaaatggaagtgaggaaattgaattgttgattaaaagaaacttacagaatgtgtttgttagccaatatgaaaaaagcataaatgaagccctataactaattaatttatggtatgaggactaaccctttcattcgtggtagtttctatttatctctttgtattgctcaccattttaaggagtatgctgaaggtagtaattaccactaaagtattatcattaaaagtagataacatttaaaagtcatgatttcttctagatttagagagattgtagttagctctctctgtcctcttagttgatatgttttctacagctttttaagtttttgaggctgggcacagtggctcactcctgtaatcctagcactttgggaggctgaggtgggtggattacaangtcaggngattg

SEQ ID NO: 18074 - DNA, 324 bp, Homo sapiens
gattttagaaaactaattctggcagctgtgtggaaaatgaattgaaaatggacataccgctcttctgaaacttccttaaaaagctatcgcatagccgggcgcggtggctcacgcctgtaatcctagcactttcagaggccaaggcgggtggatcatgaggtcaggagatcaagaccatcctggctaacacggtgaaaccccgtctctactaaaaaatacaaaaaaaataaataaataaataaataataaataataaaaaagctattgtataaactgacctgcactgtttgaagtcagaatagtgattgttgggggcagagttac

SEQ ID NO: 18075 - DNA, 340 bp, Homo sapiens
ccgatctatggtgtcagtttcagctctataatcacctcctatatacagttaaacaaagttctagcaataatctcagagaaatgctgttttgctcctacacctcacctggaaatattaggtgttcatagaacatctaatgttcatatattttgtgagggtgtatttttaaagtccacagataccagtgtatctatagctttcttcatttagactatatctttaacatgaaaactcttctgtatcattgtgtcattaggcaaaacaattttaaaacaaattttaaagattttgaaaaaagaaattttggcaccaaactaaatttacagtcgacgcggccgcg

SEQ ID NO: 18076 - DNA, 1321 bp, Homo sapiens
gctgcgagatggaactgttggatggcaaacagacactggctgcctttgttccactcttgcttaaagtctgtaacaacccaggcctctatagcaacccagacctctctgcagctgcttcacttgcccttggcaagttctgcatgatcagtgccactttctgcgactcccagcttcgtcttctgttcaccatgctggaaaagtctccacttcccattgtccggtctaacctcatggttgccactggggatctggccatccgctttcccaatctggtggacccctggactcctcatctgtatgctcgcctccgggaccctgctcagcaagtgcggaaaacagcggggctggtgatgacccacctgatcctcaaggacatggtgaaggtgaaggggcaggtcagcgagatggcggtgctgctcatcgaccccgagcctcagattgctgccctggccaagaacttcttcaatgagctctcccacaagggcaacgcaatctataatctccttccagatatcatcagccgcctgtcagaccccgagctgggggtggagaagagcctttccacaccatcatgaaacagctcctctcctacatcaccaaggacaagcagacagagagcctggtggaaaagctgtgtcagcggttccgcacatcccgaactgagcggcagcagcgagacctggctactgtgtgtcaccagctgcccctcacagagcgaggcctccgtaagatgcttgacaattttgactgttttggagacaaactgtcagatgagtccatcttcagtgcttttttgtcagttgtgggcaagctgcgacgtggggccaagcctgagggcaaggctataatagatgaatttgagcagaagcttcgggcctgtcataccagaggtttggatggaatcaaggagcttgagattggccaagcaggtagccagagagcgccatcagccaagaaaccatccactggttctaggtaccagcctctggcttctacagcctcagacaatgactttgtcacaccagagccccgccgtactacccgtcggcatccaaacacccagcagcgagcttccaaaaagaaacccaaagttgtcttctcaagtgatgagtccagtgaggaagatctttcagcagagatgacagaagacgagacacccaagaaaacaactcccattctcagagcatcggctcgcaggcacagatcctaggaagtctgttcctgtcctccctgtgcagggtatcctgtagggtgacctggaattcgaattctgtttcccttgtaaaatatttgtctgtctcttttttaaaaaaaaaaaaaa

SEQ ID NO: 18077 - DNA, 353 bp, Homo sapiens
gggaaagtttgagtcaaggggccagctgatttggtatctggtgagggcgtccatcttcctgttttacatacagttatcttcttgctgtgtcctcatgtggcaaggaaaaatcatctctcttctctagtcttacaaggtcactagtcccattcagtgccccatctccaaatactatcacattgggtattagatcttcaccacacaaattttgtgaggacacacatgcagtcagtctatagccatgctgtggaacttcaattgtataagctattggtaaagtgatatcagggtcagaactgggagtaccttattgtattttatgtcttattctttacagggtttgaggatttttc

SEQ ID NO: 18078 - DNA, 381 bp, Homo sapiens
ggtccagactaccactaccctacacaagctcaagctcagcagagaatatcagggagttaggctaaaaaggagaagctagaaaccaagaaactgagcagaaacattagctgctgcaggtatgacagatttcacagtttaagtaaattaactgcttactagtgccaaaaaaattaacaattctcagaaaaacaaaacagattccaaagtcactacaacatattaccttcaaccaaaacttgctagacatgtaaagaaacaagacgatgtgaccaatgttcaagataaaaagcagccaatagatactaactccaagtggatccagattacacatttaacaaagacttgaaagtaaccattacaaatatattcaaaaaagtgaag

SEQ ID NO: 18079 - DNA, 329 bp, Homo sapiens
gaggtactgctgcgagctggtgtgagcagagatgccagaaccaaagtggaccgaacaccattacatatggcagcttctgagggccatgccagcatagtagaggttttacttaagcatggtgctgatgtcaatgcaaaggacatgttaaagatgacagctctccattgggccacagaacacaatcatcaagaggtggtggaacttttaatcaaatatggtgctgatgtacacacgcaaagtaaattttgtaaaactgcatttgatatttcaatagacaatggaaatgaagatttagcagagatattacagattgctatgcagaaccaaat

SEQ ID NO: 18080 - DNA, 338 bp, Homo sapiens
gattgaaatgattttatggtttttgtccttcattttgttaatatggggaatcatatttactgattagcatatgtggaaccaaccttgtaacctgtggataaatactacctgattatggtgaatgattctttcagtgtattgttgaatatggtgagtgattcttttaatatattgttgaatatgttttgttattactttgttgagatttttgtatctctgttaatcagtgatattggcctgtaaattttttttgtagtgtctttttctggctttggtattagtgtgatattggcctcaaaagatgagttcggaattctctttctctctagtttttggaa

SEQ ID NO: 18081 - DNA, 382 bp, Homo sapiens
gatctcagcccggcaacaagcagaagaagcttcacaggagtcagaaaacgaactcaaggaaatgatagaaacccttgctcggaagctgaatgagaaatccaaagagcaaatggaacttcaccaccagaatctgaatctccaagaaacactgaagagagtagcaaattgttcagctccttgtccgcaagactggatctggcatggagaaaactgttacctattttcctcgggctcatttaactgggaaaagagccaagagaagtgcttgtctttggatgccaagttgctgaaaattaatagcacagctgatctggacttcatccagcaagcaatttcctaatccagttttccattctggatgggctgctcggaggaaccccac

SEQ ID NO: 18082 - DNA, 317 bp, Homo sapiens
tttcattgtgatgtctcagggatgtgatgggtgttacatgagaagatgtggctgttgaatgggaggaacagaaagtgtaaattttttttttaagaaaaaaatgaattattgactgtagtaattgcgtgatttcattctaataggtcatgctgcaatgatatattgctgtaacaaaccatcccaaaacttagtggtgtaaaacattcattttattatgctctggttctgcagtcaggaattggatggggcacaccagagtcaggttgtctttggcccatgttgtctgggcatcaggtggaaaaacatgacgtctgagg

SEQ ID NO: 18083 - DNA, 483 bp, Homo sapiens
  misc_feature (1)...(483): n = a,t,c or g
gnnnnnnnnntttgnnnnnttttgannancgttatgacatgattacgaatttaatacgactcactatagggaatttggccctcgaggccaagaattcggcacgagcatcaaggcacgggaggacgaggcccggctgctggtcgtggaccccgagacagatgaacacttcaagcggcttcgggtcacacccaccgaggagcacgtggaaggtcctctgccgtcacccgtcaccaatggaaccagccctgcccagctcaatggtggctctgcgtgctcgtcccgaagtgacctgcctggttccgacaaggacactgaggatggcagtgcctggaagcaagatcccttccaggagagcggcctccacctgagccccacggcggccgaggccaaggagaaggctcgagccatgcgagtcaacaagcgcgcgccacagatggactggaacaggaagcgtgaaatcttcagcaacttctgagccccttc

SEQ ID NO: 18084 - DNA, 55 bp, Homo sapiens
tgatgtgtatctagccaactcactggtgccaatcctgaatcttgctgaatccatt

SEQ ID NO: 18085 - DNA, 406 bp, Homo sapiens
  misc_feature (1)...(406): n = a,t,c or g
ggtatacagaaccacagccaacagtgttgttaaactttcccctaccatataataaggattccctttctctcagcttccattaatattttcctgatcttcctttaagcttttaccaacagcctccttgaaagccatcaagcttcttctgttagctgtctcttcaaggcccttccaacatctgcccgtagcctggccttaaagctattgccacatgttttaggttttgttataacagcactctacttccaggtgtaaaaatcttttggctttctattgctgtatagcaacctaaatttagtggctttaatgaacagcagccattctattactctctcttatgattctgaagttgacagggtactttatgagaagccctggcagcttanggtttctcacaaagttacag

SEQ ID NO: 18086 - DNA, 451 bp, Homo sapiens
  misc_feature (1)...(451): n = a,t,c or g
ggccatcttccccactggtctttgcagtgccctgtgactttctcagctcttgaggcaaggcctctgggtgggtgggttcagaagggcactaggcaggggtggcactgacactgtctctgcccacagctgtttgtggtggagcgagcaggccggcggaccctgcacctcataggcctcgctggcatggcgggttgtgccatactcatgaccatcgcgctagcactgctggagcagctaccctggatgtcctatctgagcatcgtggccatctttggctttgtggccttctttgaagtgggtcctggccccatcccatggttcatcgtggctgaactcttcagccagggtccacgtccagctgccattgccgttgcaggcttctncaactggacctcaaatttcattggggcatgngcttncagtatgtggacactgggngggcctacctttt

SEQ ID NO: 18087 - DNA, 293 bp, Homo sapiens
tatgaatataagacatttctctttatctctggtaatacaccttaccttgaaatatattttctctgatgttagtaatatagccactcccgtttatttcaagattggtgtatgtgcatatgtatcttctttatttcttgttttgtctgtttttattttaaaattgtttgttgtagatagcaggtagttaagtcttgttttttcttttattcagttttataatttctgccctttattttttatttttagttttttaaatacagcatttaaattttttattatttttattttatttg

SEQ ID NO: 18088 - DNA, 348 bp, Homo sapiens
gcggcacgagcaaatattcacactaagtgggataaataaggactataaatagcattatatcagttcaggttaggttgccaccaaatgaactgtgaaaaaatttttaagtttttggagctttggaatttcacatgttctgataagggattgtgaacatatattttgaaattcttaaaataatgatatttttaaaaaactaataacaatttagtacattttaaccaagtgaataaaaaaatctgctactttatttgatttaaaactacaatgccctccgggtgcagaggcacatccctgtaatcccagcactttgggaggcgaagacaggcagatcaagaggtcaggagt

SEQ ID NO: 18089 - DNA, 389 bp, Homo sapiens
  misc_feature (1)...(389): n = a,t,c or g
ggcaaggaagaggctgtagaatgtggtgggacctcgaccactcctggaaaggaggctgctttgagggggtgggaccgaggcctgatgagaggaggatggtctcctggggaaggatttgggccagggtccctgatgttggggttgtgggggatagtgttagattcagagtgtggaaggaaaaaacgcttggggtttctgggtgattacagttggtgcttttggggagggtctcccctttgganaagaggctggaggtgggaggccctggtaaaagattcaatttcccccaagtggccctaaaggctctaaaaatgngcttccctaaggcctccgacgctgtcctctccacaaaaatcccancacccttcgctcagcttataatcaggcag

SEQ ID NO: 18090 - DNA, 713 bp, Homo sapiens
ggtggaggtgaacggggtctgcatggaggggaagcagcatggggacgtggtgtccgccatcagggctggcggggacgagaccaagctgctggtggtggacagggaaactgacgagttcttcaagaaatgcagagtgatcccatctcaggagcacctgaatggtcccctgcctgtgcccttcaccaatggggagatacagaaggagaacagtcgtgaagccctggcagaggcagccttggagagccccaggccagccctggtgagatccgcctccagtgacaccagcgaggagctgaattcccaagacagccccccaaaacaggactccacagcgccctcgtctacctcctcctccgaccccatcctagacttcaacatctccctggccatggccaaagagagggcccaccagaaacgcagcagcaaacgggccccgcagatggactggagcaagaaaaacgaactcttcagcaacctctgagcgccctgctgccacccagtgactggcagggccgagccagcattccaccccacctttttccttctccccaattactcccctgaatcaatgtacaaatcagcacccacatcccctttcttgacaaatgatttttctagagaactatgttcttccctgactttagggaaggtgaatgtgttcccgtcctcccgcagtcagaaaggagactctgcctccctcctcctcactgagt

SEQ ID NO: 18091 - DNA, 414 bp, Homo sapiens
  misc_feature (1)...(414): n = a,t,c or g
gaactggaagtataactacgttcttctaccaaatctaatcattctagataagaacaaatttgtcagaagatacttgtttcagcacatgttgctttttagggtagaaggtcaaaataagttttatttcatattggtcagaaaggaaaaagacgtccaggaagaggaattccactacctgtccattatggtttatggcctacatactagccagctggcatcacaggagcaggagagtggtgtttttgttccctagagtccattagcaactggaccaaacccaatgtcagtgttgctaaggtccagattgtggcagctgctttagatctgcactgcataaacaaagtacagaacttctgcaggtaaaagctntanaaatgagacccnacgccaggcctnnacttggaagaggaggcc

SEQ ID NO: 18092 - DNA, 455 bp, Homo sapiens
  misc_feature (1)...(455): n = a,t,c or g
gaactggaaggctataaaatagattctcttggaggcgaaagaggttattaaaaattgagagatctggattttaacagcatttcattcacaaatataatctgctatatttcagtcttttttttcagaatgagaaatctaaacagataaaaaccaacaacgaaaaataaaaagccaataatcaccatttattacttaatatatgccaaccactgtacttggcagttcacaaattctcaccgttacaacaaccccatgaggtatttattcccattctatagatagggaaaccacagctcaagtaagttaggaaactgagccaagtatacacagaaaacgaagnggcaaaactagaaggaaagactgacactgctatctgctggcctccagtgtcctggctcttttcacacgggttcaatgtctccagcgctgctgctgctgctgcattaccatgccct

SEQ ID NO: 18093 - DNA, 597 bp, Homo sapiens
  misc_feature (1)...(597): n = a,t,c or g
gatcatgatccttgccttcatataacaaacatgcttcgtcagaggtgttggggttgaaaaaggagctgcatgcttcactggagttgagggcctctctcctgttctgactttaagccagaacttgtggctgggccatggaagctgtgactcctctgtggacatggtggcagcagggaacccctagagagaggggccactgggaccaggcctcctgttgtggagggactcctgggacagtcctccaccctgtcctgtggtcctgtgtacagggttggcctcttcctcctcccctgccaggcctctgcccatgccccttccttccttctcctgggactggtgaagctaggcatctggaagacttcttcctagcctggaagccctgacctcggcccatctgcagaatctcccagttccttcacagctgccgagtcctctcacgggtgcggtggaggcggcttgcnggtggtgctttctgggcagccangggttcctgggtgggaganngtcgtctggggacntgcatngatgcngtgncncnttgccnttnnntncnncnnntaatgccaaagntnngntgngnagtcnctngacatttcg

SEQ ID NO: 18094 - DNA, 337 bp, Homo sapiens
ggtgaatgaatgaatgacaaccctgttttttagatgaggagattgaagctaagagatgctgagtaacttgaaagtcatggagccagaattcgaacccatgcctgctgtataactcagatactaataccgtgggctccaaaagtatcctgagactcttagctctagaagaaaagttttgaacttgctgggtcccttttcatttatatagtgctttcacacaatgcactatcaggactcttagttgcaaatgaaaaaaacccagtctgactggttttaagccaaaagagggtttattgagtcaagtctagtggcaaatggcttcaggcaaggctggatc

SEQ ID NO: 18095 - DNA, 545 bp, Homo sapiens
  misc_feature (1)...(545): n = a,t,c or g
gggggaatgtgccgtgctctcagcagacagaactgctggtgtgaaaggcagggattgtcagcccacctgaggctgggaggaagcaggaccaggcctaggatctccccagcagatgcaaacaagtgtcctcccctgaattgtgtgaaccaaagcgtcaggggcttggggcacagncccagtcagctcaacccagtcctgcttcagagccaagactaggccagggtggggacccccccangacnctccctacatcaatgtggctgctggcctggaccccaggggtctggtacanccaaaatnttctggncaacatccanctacttcaaaggccagagtgtcctttgggtcctcctagagtcccccnangtctctggctgcccatgaggctcatgaaccacanggtatcccantcatagggagcataaagngcacatgggttaacgaatcctntcnaggactncncttntntnatcntgaacntncattcntntncngctcncnttnnnnnccttncgnnnnttnttgtnnnanncncanttncatcc

SEQ ID NO: 18096 - DNA, 322 bp, Homo sapiens
gttgtgatcctgagtccagaatggtacacaatgtgattttatggtgatgtcactcacctagacaaccagaggctggcattgaggctaacctccaacacagtgcatctcagatgcctcagtaggcatcagtatgtcactctggtccctttaaagagcaatcctggaagaagcaggagggagggtggctttgctgttgttgggacatggcaatctagaccggcagcagcgctcgctgacagcttgggaggaaacctgagatctgtgttttttaaattgatcgttcttcatgggggtaagaaaagctggtctggagttgctgaat

SEQ ID NO: 18097 - DNA, 483 bp, Homo sapiens
  misc_feature (1)...(483): n = a,t,c or g
gtnggngngttnnnttntgtatctganatnatacnctttgaatgatcccnaatttaatacgactcactatagggnatttggccctcgaggccaagaattcggcacgaggagcagagaagagggagaaagcagcatcttgcctggatgagccaggggacacagaagagaagcccactatctcatttaatctttacaactctcttgcaaggttccctggttgtgaaaatacatgagataaatcatgaaggccactatcatcctccttctgcttgcacaagtttcctgggctggaccgtttcaacagagaggcttatttgactttatgctagaagatgaggcttctgggataggcccagaagttcctgatgaccgcgacttcgagccctccctaggcccagtgtgccccttccgctgtcaatgccatcttcgagtggtccagtgttctgatttgggtctggacaaagtgccaaaggatcttccccc

SEQ ID NO: 18098 - DNA, 517 bp, Homo sapiens
ttgattccatacctatgacatgattacgaatttaatacgactcactatagggaatttggccctcgaggccaagaattcggcacgaggaagggctggaggccactggagctcactaccctggatgtggccacccagcccccagctttgctcagggtttaggactccggatagaagatttttctggtcccgggaggctggccctgtgggtaccacacaagtgaccatcatcattcaccacagggctccggcttggtttcttggttctgataagtgggatgagtgaccatagatgtggtcgtgatgtttgccatgatgccgtgggcagagggtggccactgagctgctccccaagtcaggaaggtgccaaccccagctgatagtgtggtgggcacagttcactccccagcatcccagggctctcgtcggcaggctgcggttcggaggggctcccccacaggagacccaggacagttagcagcaaaggcacggcagggcaccccttggcaggctcaccctg

SEQ ID NO: 18099 - DNA, 415 bp, Homo sapiens
ggaaaagtacaggtggttcaacaaaagataaaaattgttcatcaaatgtcaattttctagctccagccatctacaatgaacaaaaaaattagcctcgtctttgacatcaggcccactgagagatatcagcaaatctaatcagtattttaaaaagtaacttttggccaggcatggtggttcacacctgtagttctagcactttgagaagctgaggcaggaagatcacttaagcccaggagttaagagaccagcttgggaaacatggcgaaactttgtctctaaaaaaatacaaaaattagttgggcatggtggtgcattcctgtagtcccagctactcaggaggctgaggtgggaggatcacctcaacccatgagatcgagggttgcagtgagccaaaatcttaccactacactcc

SEQ ID NO: 18100 - DNA, 328 bp, Homo sapiens
ggtgccttatcgggatcacgtgttattgattttatttttctaaatagataaaagcattcaaataaaacaaaattcgtaaggtaccaaggagtacctttttgaaagtactcctttcaaatttgatgttgaaaatgcgcttcttcccctgagccagagccacctggctggccgccagcctctgtctgcgtgtgcacgtacccgccgtttccgcaccttctttgctcttcagggtgtgttctggccgtcatccctgattgggttgtaaagggctcctaattcttttttcctgccgcgttgtactcactgtgggtcttcagtgagctgctgc

SEQ ID NO: 18101 - DNA, 323 bp, Homo sapiens
gttcttagttatgctgacagctttcaggttttgaaatcctgtctcttccctgttggtttaacctgtgttatccacatttttttatctcatttatttcattaatttcattcactcagcccaaagatgattatttggcctctactaaaaatacaaaaagtagccgggtgtgttagtgcatgcctgtaatcccagctcctcaggaggctgaggcacgagaattgcttgaacccaggaggtggagattgcagtgagctgagatcgcaccactacacttcagtagtcagggcaacagactgagactctgtctccaaaaaaaaaaaaaa

SEQ ID NO: 18102 - DNA, 466 bp, Homo sapiens
  misc_feature (1)...(466): n = a,t,c or g
gccgattctgaagaggagggagaggggggcctggctcccacttgggcatgaggctctcctcctaccacaccaggcaatcctttctgtccagggagaggaacgtgaggtcatcctctcccattggacagaaggacctggatgctcttcagggtcatatgaaccccttatccagagctccctcgtggccagggccaagaaggtcctcctactttctatgagaagattgtcaggtcctggggacatggagtcttagctatgcttgcttctcacctctaggtcatataataagttttgaactgcttttgacaagcttttttcttcccagggacaggaaaaggggtttggacatcgccactctgggggaaattctcctcccacattccttttcccttggtcangtaaatcttctgtacttcacangggcccaanccttgtcttgactccttgttcttgncccttcctccca

SEQ ID NO: 18103 - DNA, 336 bp, Homo sapiens
  misc_feature (1)...(336): n = a,t,c or g
gcaggcattaggttaacagaatcattagcaatggcacctgcttcagcagtctcaggcctctacttctccaatttgaagtccaaatattttgctgtggggaagatttccaaggatcaggttgaggattatgcattgaggaagaacatatctgtggctgaggttgagaaatggcttggacccattttgggatatgatacagactaactttttttttttttgncnttttnanttttggannancntaaggnaannncnccnnnggggccntnaaaananncnccaccaaaaaccnnggggnnntngggngnacnttancnngtttngggtttnaaaaaa

SEQ ID NO: 18104 - DNA, 673 bp, Homo sapiens
atgacatgattacgaatttaatacgactcactatagggaatttggccctcgaggccaagaattcggcacgaggaggttttcaacctagtcacagagcagcacctaccccctcctcctttccacacctgcaaactcttttacttgggctgaatatttagtgtaattacatctcagctttgagggctcctgtggcaaattcccggattaaaaggttccctggttgtgaaaatacatgagataaatcatgaaggccactatcatcctccttctgcttgcacaagtttcctgggctggaccgtttcaacagagaggcttatttgactttatgctagaagatgaggcttctgggataggcccagaagttcctgatgaccgcgacttcgagccctccctaggcccagtgtgccccttccgctgtcaatgccatcttcgagtggtccagtgttctgatttgggtctggacaaagtgccaaaggatcttccccctgacacaactctgctagacctgcaaaacaacaaaataaccgaaatcaaagatggagactttaagaacctgaagaaccttcacgcattgattcttgtcaacaataaaattagcaaagttagtcctggagcatttacacctttggtgaagttggaacgactttatctgccaagaatcagctgaaggaat

SEQ ID NO: 18105 - DNA, 357 bp, Homo sapiens
gttgaaccaggtggaccaagtgggctacgtgacctatgacatcctgcagtgccctgaggactagggttcccgtcctgctttggcagtgccatgtaaatccccactgggaccaaccctggggaaggagccagtttgccggatacaaactggtattctgttctggaggaaagggaggagtggaggtgggctgggccctctcttctcacctttgttttttgttggagtgtttctaataaacttggattctcgtcgaccgcgccgcgaattccagatctatgaatcgtagatactgaaaaaccccgcaagttcacttcaactgtgcatcgtgcaccatctcaatttctttcatttatacat

SEQ ID NO: 18106 - DNA, 326 bp, Homo sapiens
aacagttcaggccatagaggattactaggtctttacaggcttattgaaaagggaggctgagaatatgctggatgaaaaatgagcccaaatccaccatctcctgtccctccagttatgtgctctggtgcaatgtggtccgtcacaagtaccatcttcatatgcaggctactcattgtaagactcttgggcaacacagcagtgagaacctctgttgtctttctaccccacaaggcaggaaggcattgggaaaagtccactagcctggtgtcaggaggctgaggttcagtcctgctctgtcatgaattggctacatgactgaggaccaa

SEQ ID NO: 18107 - DNA, 182 bp, Homo sapiens
ggttcctcaaggtttaattttgtgtgctgttgacattaacttttatggaattgctattaatgataaagtgaggcaggagaatcgctcgaatgtgggagttggaggttgcagtgagccgagatggtgccactgcactgcagcctgggtgacagggtgagactccatctcaaaaaaaaaaaaaa

SEQ ID NO: 18108 - DNA, 433 bp, Homo sapiens
  misc_feature (1)...(433): n = a,t,c or g
gcctagctatccagacagagcagctaccctcagctctagctgatactacagacagtacaacagattcactggatgaaagaaagataaaaggggtcattgagctcaggaagagcttactgtctgccttgagaacttatgaaccatatggatccctggttcaacaaatacgaattctgctgctgggtccaattggagctgggaagtccagctttttcaactcagtgaggtctgttttccaagggcatgtaacgcatcaggctttggtgggcactaatacaactgggatatctgagaagtataggacatactctattagagacgggaaagatggcaaatacctgccgtttattctgtgtgactcactggggctgantgagaaagaaggccggcctgtgcagggatgacatattctatatcttgaacggnaacattc

SEQ ID NO: 18109 - DNA, 464 bp, Homo sapiens
  misc_feature (1)...(464): n = a,t,c or g
ttggnntntggaanccatcagctatgacatgattacgaatttaatacgactcactatagggaatttggccctcgaggccaagaattcggcacgagcaattataaatgaatgtagaaagccataatgaatcaaattcattctgattttaactcaatactcatagctctttctttggctaatgctttaacttttggatgtctaatttttatcattttagtaaccacttattatcattttagtaaccacttattaatgactgtaacatttagaatacccctagaaatcattgttcttataggtttgttcaatgtccctcacctcaacatagtaagaatagtgatcaaaatgccctcattggcttaattatgacagagtgctagagttcacatcatgtcagcttctgatatgtatcttctttgcacagcatctagcacttatttctagggacctttcacaatttttaa

SEQ ID NO: 18110 - DNA, 1185 bp, Homo sapiens
gcaaaagtgaatttcccataaggaccctaaagaccctgctacacaccttatgcaagattaaaagggcccaagatcctggaccacctaacgatgatcgacaacaaaaacgagtctgagctggaggcccatctctgccggatgatgaagcacagtatggaccagactgggagcaagtctgataaggaaacagaaaagggagcatctcgaatagatgaaaaatcatcaaaggccaaagtgaatgatttcttagctgagatttttaagaagattggctctaaagaaaacactaaagagggactagcagagttatatgaatataagaagaaatactcagatgctgacattgaaccatttctgaaaaattcctcacagttcttccagagctatgtcgaaagaggccttcgggtgattgagatggagagggagggcaaaggtcgtatttccacttcaacaggcatctcccctcagatggaagtcacatgtgtgcccacgcccacaagcacagtgtcctccataggtaacacaaatggggaagaagtggggccatctgtctacttggaaaggctaaagatcctccgacagcgatgtggtctggacaacacaaagcaagatgaccgacctcctttgacctctttgctctccaaaccagcagttcctactgtcgcctcttccacagacatgctccacagcaaactctctcagctccgggagtcacgggagcagcaccagcattcagacctggattctaaccagactcactcttcaggaactgtgacctcctcctcctccacagctaacatagacgacttgaaaaaaagactggagagaataaagagcagtcgcaaatgaagctgccccactcccccggcaccctgcagctttagtttactaaactagaagtcctcatagtttaaaatggcctcagcaggcctagtgtatacaaactggttgtatgtatcatgccgtggagctagggggaggagtcattgtggcacaagtatttgtacatactctgcttctctctgtcagcgtcctgctgctctagaagactgtccgtggatgagtttagtgtacagacttgtaaacagctgccccctctctgctcagtctagttcccagatccttttctttttaattgctcatttgtaaaattgtcctaatctttcctagctttttaatagttaa

SEQ ID NO: 18111 - DNA, 428 bp, Homo sapiens
gattcagtgcttactatgtgcaggcattgtaatagacactttaggagcattatctaactcttacaacaatcctacttgacagatgaggcaactcattccatatctttatttctttcttgaaactctcttatgggggcccctgggatggcttgtcttcctctgcctccctgccctataggtgttggtattttaaagaatatttcctattctttctctgtcattcttatacactttacaatttcagacttacttagaggacttctttggtctcaacttccaaacattcaaagatgaccctaagatgtgcttccagtaaagtcttctcttctgagctctggatgtatttatatttccatgggatgaactgaggcacctcatattcaacatggtttaggctgagccaataatctctcttccccatgagacct

SEQ ID NO: 18112 - DNA, 319 bp, Homo sapiens
atgatcgatcctgtcctcggtaccgtgggctttgggtctggcctccacgggtgggccttcaccctgaagcagtttgccgagatgtatgtggccaagttcgccgccaagggggagggccagttggggcctgccgagcgggccaagaaagtagaggacatgatgaagaagctgtggggtgacaggtactttgacccagccaacggcaagttcagcaagtcagccaccagccccgaagggaagaagctgccacgcaccttctgccagctgatcctggaccccatcttcaaggtgtttgatgcgatcatgaatttcaagaaag

SEQ ID NO: 18113 - DNA, 460 bp, Homo sapiens
  misc_feature (1)...(460): n = a,t,c or g
ggagnntttnattcgatanccgttatgactgattacgaatttaataccgactcactatagggaatttggccctcgaggccaagaattcggcacgagcaaatttgtggactaatgggatgtctaaaccaacagaccctgtaaagagggttgtctaagatattggccaggacattctgtgtctctaatttttcaaaactctatttgccaaaaagattcttcctacgcagcatgtatagttccaaatggtactgtggataactagactaagtatggatatccttatcctaaagatattgccattagatatagggaaggcaaccttataaggcctggactaaatctagctgaaactctcatgaaccacaacataaaaccatcccttcagggaacagggctttactttctctatggctcctgggtacacttaattctccccaggcactggagaggagcaggcact

SEQ ID NO: 18114 - DNA, 308 bp, Homo sapiens
  misc_feature (1)...(308): n = a,t,c or g
gatggcaaaaccccatttccactaaaaatacaaaggttagccaggcatggtggtgcatcctgtcatcccagctatttggnaggctgaggcatnagaattgcttgagccaggaggcaaagtttgcatctnagctgacatcnccgccactgcactccacnttggagtganacngncagannccgtcacagatatcaaaacanttnancacngcctcaccatcnngatgtanntatacctcatattgtgaccctcaaatatcngtcctgacaangtcncantacaaaacggcgtccntcttgtanatgaaa

SEQ ID NO: 18115 - DNA, 337 bp, Homo sapiens
gtgactctttatcttgctgtaaagagaggtgtgtttgtgtgtgtgtgtccctgcaggagtgaaaatggacccacaaaccacatggttaatgaggtgagcatactggaccaagctatttaacatctgggcctgccccatgactaatagtccaggtcattctgcataatgcagaccaatataagattgttagtggattacaggtgtgagccgccctgcctggccagaagttgttccttaaatggctaagagccttcataatattcttgggagggcgagtggcagcccatttctccataacttgctcagaagcacattttagttgttttaagaatgactc

SEQ ID NO: 18116 - DNA, 463 bp, Homo sapiens
  misc_feature (1)...(463): n = a,t,c or g
ttgaancnttaacagctatgacatgattacgaatttaatacgactcactatagggaatttggccctcgaggccaagaattcggcacgagtggagggcagccgagcaggcacggacacagctgtccagaccagggccaaccaacctgcaaacctgccacgtgaaaggagtgtcaggagaggagaaaggcacagctcccctgcagctgcacccctctgggtgcagttacggggctggctgatgagacagacaatgggtgtggcatgtgggtagtaaactgtctcatggtgtaaaaatgcttgtcacatttcatgtgaacagaatcaactaaaaagttctgccacaaatgtcataggaagaatgacaaaaaagaggttcagtgatccgcgtgcctataatcccgaggcatctacgtcactgagataagaaagggcagccggcatatcttcccttccacccctcatg

SEQ ID NO: 18117 - DNA, 342 bp, Homo sapiens
gcggcacgaggacaaaacagtctggtccccaaacttctccttatccctgagaccgccccagccatcctctgctctgtgcccacccacatgactcagaactttgatccctacctccatgtcctgaacaggcagtttcctccacttcagaagtcccctccgccctggaaagctcctactttaccccgtgttccagctcacgaagctttctctggctctccagccaaagttcattgctgccctctccacgcactcctgctctacacagctccgctgcacgcataagtccaagctagtgtgtgtctccctttatccagacaagactcctcagggcgctgaccaggt

SEQ ID NO: 18118 - DNA, 426 bp, Homo sapiens
gcgagtagctgggactaccggcgcccgccactacacctggtaattttttgtatttttggtagagacagagtttcaccatgttagccaagatggtctcgatctcctgaccttgtgatctgcctgccttggcctcccaaagtgctgggattacaggcatgagccaccatgcccagcctccaccagtcacatttcaattgctcagtaagcacacatggcttgtggcagccatgctggatccaggtccagaacattccacggtggcaggaagtgctactggacagtgctgctgtccccagcactgaggacagtggttgccaagttatcctcccctacagctttgtccattgacatgtctgcagagcacaatgacagtgactgttccccagaccttaccatcggggctattaccaaacttttcagtccttg

SEQ ID NO: 18119 - DNA, 116 bp, Homo sapiens
ggtattttacattttatttaattctcagaatgacccaatatgttaggtacttttactgtccccacttgtgcacaagaagaaacagtgacacattaaataactaggccaaggtcaag

SEQ ID NO: 18120 - DNA, 460 bp, Homo sapiens
  misc_feature (1)...(460): n = a,t,c or g
attaagttatagcaatatctcataccattcacaaaagtaacttctaaacagtttaaagaattaaaaccagccagtcgtggtggttcatacttgtaatcctaagacttcaggaggctgaggtgagaggatcactagagcccaggagttcaagaccagtctggacaacatggcaaaaccccatctcttcaaaaaatacaaaaaacttagccgggcatggtggcctgcgcctgtagtcccagctactcaggaggctgaggtgggaggatcacctgagcccagaaggttgaggctgcggtgagccatgatcgtgccactgcactctagcctggacaacaaagtgagactctgtctcaaaaaaataatctcgtgccgaattcttggcctcgagggccaaattccctatagtgagtcgtattaaattcgtagncagtcaaaagagtatnnnntcaaaananactcc

SEQ ID NO: 18121 - DNA, 324 bp, Homo sapiens
tatattttgagtcatatgtgaaattagtattgagatagtttctatagctgagtttgaagtgtttgagaagaatttgaaaatatagagaaaaaactaggctcacacctgtaatcccagcacttttggaggcaaaggagggcagatcactctaggtgaggagttcaagaacagcttgcccaacagggtgaaatcctgtctctactaaaaatacaaaaaaattacgcaggcatggtggtgggtgcctgtaatcctagctccttggaaggttgaggcaggagaatcccttgaaccctggtgggccaaaagtggcggtgagccaaaatt

SEQ ID NO: 18122 - DNA, 552 bp, Homo sapiens
  misc_feature (1)...(552): n = a,t,c or g
ggtgnnnnnnaaattggaancnttatgactgattacgaatttaatacgactcactatagggaatttggccctcgaggccaagaattcggcacgagcacccaaggtcacacagcagatcagcaggaaacatacaactcaaaaccaggcctgtcctccctcccggtcacttccacggcccctcaacctgtatcccgccaggagtcagaacacccagaccctaagggcatatagggcttttagacttgaggtcccaaactggtggcccccaaatgcctgtgcagcgtgttttaaatattttcattctttgcatgcatttaacaaccagattttgcattacatgtcccgattcttggcttgttttgaaaaaccagacacactgccaggcacagtggctcacgcctgtaatctcagcactttgggaggccaaggtgggcagatcatgaggtcaggagttcgagcccagcctggccaacataagtgaaatcccgctctactaaaaatacnaaaaattagccaggcgtggtggcgtgtgcctgtattccanatactcgg

SEQ ID NO: 18123 - DNA, 335 bp, Homo sapiens
gaaacaagctatttttacaatcagcatcatgcacactaattaaagaatgaaaatattaatatgctgattaatgttaggttagaatcaatccttgacaataagactaggcatggaatataaaatgcaatgaacatccaaagtacatgatgatttggtctgcatgaaatcccgtcaacagattatatatttattcttgattattgtatttcctggagtgtatgtgcatcagtctattaaaaaatttgtcaggaaaatatattatttgagggattttatgatgtcattgaaaaccttagaataataagaccagtaccagtgacttctgtatattttct

SEQ ID NO: 18124 - DNA, 205 bp, Homo sapiens
gaagaaaaccacaccaaagcacattttgtgtagagtaacaaagataagaatgacaggctggccgggcgccatggctcgtgcctgtaatcccagcactttgggaggccaaggtgggcgggatcacctgaggtcgggagttcgagaccaacctggccagcatggtgaaatcctgtctctactaaaaatacaaaattagccgggtggg

SEQ ID NO: 18125 - DNA, 417 bp, Homo sapiens
ggtctgtttcagcttgtaccctgggacacaatatgctattgttaaagaattgtgaagaaaatccacatataaattattggtgaatttggactttcctatagacttttattgttcattttactgatacaggaatttttaccccaatttacttttggaaaaatgttggatctgtgggaaagttgaagaaataatacaatggatttctgtatacctatcatttagattcatgaagcattgccaggcgtgatggctcatgcctgtaatctcagcactttggaaggccgaggtgggcggatcacttgaggtcaggagttcgaaaccagcctggccaacatggggaaaccctgtctccactaaaaatacaaacattagcccgggagtggtggtgcatggctatagtcccagctacttgggagg

SEQ ID NO: 18126 - DNA, 380 bp, Homo sapiens
gtgaagaagcccataaactcccagtaaaacattttactaatccatattgtaacatctacctgaatagtgtccaagtagcaaaaactcatgcaagggaagggcaaaacccagtatggtcagaagagtttgtctttgatgatcttcctcctgacatcaatagatttgaaataactcttagtaataaaacatagaaaagcaaagatcctgatatcttatttatgcgctgccagttgagccgattacagaaagggcatgccacagatgaatggtttctgctcagctcccatataccattaaaaggtattgaaccagggtccctgcgtgttcgagcacgatactctatggaaaaaatcatgccagaagaagagtacagtgaattt

SEQ ID NO: 18127 - DNA, 397 bp, Homo sapiens
ggcgcagtggaaccgatcctcagcaacgccagcaggcgtcagaggcggacgccgcagcagcaaccttccgggcaaacgaccatcagcatatccgctacaacccgctgcaggatgagtgggtgctggtgtcagctcaccgcatgaagcggccctggcagggtcaagtggagccccagcttctgaagacagtgccccgccatgaccctctcaaccctctgtgtcctggggccatccgagccaacggagaggtgaatccccagtacgatagcaccttcctgtttgacaacgacttcccagctctgcagcctgatgcccccagtccaggacccagtgatcatccccttttccaagcaaagtctgctcgaggagtctgtaaggcatgtgctttcacccctgg

SEQ ID NO: 18128 - DNA, 514 bp, Homo sapiens
  misc_feature (1)...(514): n = a,t,c or g
ttgaantcctttaaaaaaatttgaatnccntatcagctatgacatgattacgaatttaatacgactcactatagggaatttggccctcgaggccaagaattcggcacgagcccagaagctagagaagcttatgaacaccctctccttcccacacatgtcctctgcctctccccctctttcattgctacctcttggccatgggcattggatttgggcctaaggagttaaacacccacccttgcccaatccctgtgtgagttgcgtggtgaacgagcctgagcctgtgacctgacagtgaggtcagccaatcagcgcccccaccacaccaagttgccacggagaccggccctggggtgggagaaaggaggcgggtttagcagcgggaatgggtggggtgggcagggaaggagggagagggatggggtgagccacgtgcctgcagttnccngntttcaggntnannacnnnagnacnnnnnttnccntannntnttntnnntnncantaagatatgg

SEQ ID NO: 18129 - DNA, 333 bp, Homo sapiens
ggaactgacaagttttcctttgaagatttataccaagctgtaactgcttttgagcaattatactcaagttcatggctttacatatattctctcattcaatctttacaatatctctgagttagatcttatcatctactgtttttacagataaggacatgaagcataggatggttaaatggcttgctcagagtcatacagatagtggcaaagcaaggattcaaagataggaggcaggactctggggcccatactaccgtctgtcgccttagaatatggggatattgaagctggaaggaacctacaaccatgtatcagtttctcctgctgttgtaa

SEQ ID NO: 18130 - DNA, 734 bp, Homo sapiens
cagctatgacatgattacgaatttaatacgactcactatagggaatttggccctcgaggccaagaattcggcacgagggcaccaccactgacctgggacagtgaatctgttactgatgtcggcaagtacttggcacaggctggtttaataatccctaggcacttccacgtggtgtcaatccctgatcactgggagtcatcatgtgccttgactcggggcctggcccccccatctctgtcttgcaggacaatgccgtcttctgtctcgtggggcatcctcctgctggcaggcctgtgctgcctggtccctgtctccctggctgaggatccccagggagatgctgcccagaagacagatacatcccaccatgatcaggatcacccaaccttcaacaagatcacccccaacctggctgagttcgccttcagcctataccgccagctggcacaccagtccaacagcaccaatatcttcttctccccagtgagcatcgctacagcctttgcaatgctctccctggggaccaaggctgacactcacgatgaaatcctggagggcctgaatttcaacctcacggagattccggaggctcagatccatgaaggcttccaggaactcctccgtaccctcaaccagccagacagccagctccagctgaccaccggcaatggcctgttcctcagcgagggcctgaagctagtggataagtttttggaggttgtaaaaagttgtcc

SEQ ID NO: 18131 - DNA, 355 bp, Homo sapiens
gagcaatcctaccacctcagcctcccgagtaggtcggactacaggtgcacgccacaaagcccaactaatttttttattttttgtggagacagggtctcactacattgaccagattggtctagtactgctggctggcctcaagagattctcctacctcagcctcccaaagtgctgggattataggcatgaatcaccacactcagctgaaatttctttatgtaataattgtcttatatatcttcatatgttaaaaagcccatcagacaatgtttgattgtctttcaagcgtgttttactttcaagcgtgttttaaataacttaaaaggagaatagtctattatatttatctggcctt

SEQ ID NO: 18132 - DNA, 384 bp, Homo sapiens
tgtgtacttaacagctttaatagctgaagccaatgggaaagaaaatcttggcccaggatggcagcttgggaaagaataagcaaatggagaatgaaaagacaaatgggagaacttaatttacaaggaccaggctccccatctgctggtcttacggggtattacccttaacaacctaatacaatgagaacacggcctcaggctcacaggaagcgttatgaagttcagcagaggtcctttaggtggggcttcacatctctgaagttatactcaaaagtgatgcctcacagaccatagacagctaatgcttagccggataatatattttctatttctccccacagccagataggaatgacattttaacattttggaactgcttgaatt

SEQ ID NO: 18133 - DNA, 330 bp, Homo sapiens
tcaagctactttaaaaatatatatatattctttaaagccattttatggccatgggaatctaattaatttcataatgatgttggttgaacatgataccaaaaaatgcaggtattttcaagaacaataagatagataacagcattaaagcataatcctttaagaattcatgagaaaaaaaaggatgataaaacttaagcttctttttcagatgtttaaaaatttctataaaattctttgtcccaagattaatcatataaccatggtacataaaatatgctaactacattgcctggtgtcaaggtgggaaaatcctcttttataacataaaat

SEQ ID NO: 18134 - DNA, 388 bp, Homo sapiens
  misc_feature (1)...(388): n = a,t,c or g
tttatctttaaacaaacagactacagaaatcttagggtcacttctcttaaacaccaacacccagtggtggcatctccttcaacaggctcaatcgattattccctttgcctgtgttttagtaagagtttgtctagaaagagtgagtattttttacatcccgcacatctattttccaagtcctatttgctcctgcctcgtataagtgtaaatgataaatgtaaaatctaccttaccactgcccaagttatctctacccttgattggactgtctcatacatggtacacccacaactactctacctcatacagcaataaaaatgaaaattttgatcatttaacttccctgctttaattttttttttccttttttttgaaacggtctcnctgg

SEQ ID NO: 18135 - DNA, 401 bp, Homo sapiens
caaagtctaaggacatggatctaatagctatttcagtagtcatcaaacagtcacttatataattgccatgcaaattctgattttaccctgtagctatcatttagaagcaaatgcttttgaaatggattatgaatgatttgtttgcatttctcccctaaaaggtaaagtttaggtagtcaatataaattacactgagtttatatattcaacaaacatgttaactttcattcactgaaaatattaatgtgggtatatgggatgctaaggcttgtcatttccaatattataagtatctattacagatactggtcttgatgcttagtttaaaaagaaaagaaactcttttgagagttcagtgcactggaaatttctaccaatgtttctcttctaaggtaaaatgt

SEQ ID NO: 18136 - DNA, 339 bp, Homo sapiens
ctggaatgcagtggcacaatctcaactcactgcaacctccacctcccgggttcaggcgatgctcccaccttagcttcccaagtagttgggactacaggcacgcaccaccatgcccagctgatttttgtatttttagtagagaccatgctgcccccaggctggtctcgatctcctgacctcgtgatccgcctgccttggcctcccaaagtgctgggattacaggcttgagccactgggcctagctggaatctgttttcttaaggactccaggtaatcctgatgcagtaggaacattttgagaaacaccaataaagttcatttctcacatattagagaagg

SEQ ID NO: 18137 - DNA, 390 bp, Homo sapiens
gatttcctttctcattttctttgtgcttctcagaggaaattaaaggtacatgtataataagttaccctgcatagtctagtcattttatttagtgcacatatatgtaggattaaattgaatataacaatcaacttacaaatgtactctgttgtacatccaaacttccatcttgacgttacaataccaaaaattgtggttgcactttgttttagaaagaaatatgcatttttttgctttatgcagcagaaatatagaatgtaatctgaaataatacattatatttttattctgtcagtagtcttaaatgtgaatgaaataaacagtattattcaaatgtattgacagacgtattttgatgtaggatctaggggaaccttctcaattaattta

SEQ ID NO: 18138 - DNA, 434 bp, Homo sapiens
tatgacatgattacgaatttaatacgactcactatagggaatttggccctcgaggccaagaattcggcacgagaaaaaaagtgagttttttattgtttgcaaaagcaaattgcttgttcttttgctcaactaagaaagttgtaagcatcaggagatatacctaatgctaaatgacgagttaatgggtgcagcacaccaacatggcacatgtatacatatataacaaacctgcacgttgtgcacatgtaccctaaaacttaaagtataataataataaaataaaaaaaaagaaagttgttttagtattctttcaaagtgtattgcaggttttgttttgttttgtttttttacttttttagagacagggtctcgctgtgttgcccagactggtcttgaactcctggcctcaagtgatcctccctccttagcctccc

SEQ ID NO: 18139 - DNA, 487 bp, Homo sapiens
  misc_feature (1)...(487): n = a,t,c or g
tttgnancctttgaaacccgctatgacatgattacgaatttaatacgactcactatagggaatttggccctcgaggccaagaattcggcacgagcctgccaggaaaaggccctcagcctccaactgctctgctcactcgaagctggaagatgcggctctagagacccatcaggaccaagccacgactccccacttggagaaatcaacggggaaagagacggaggcaaaggagaaccatctcactgggagaggcgatgctgtttgacacatcgtccctgtacctcccaaagccactgcgcccggccccagaaaaaaaaaacttttaagagatagagtttactctgtcacacaggctggaatgcagaggtgcaggaggctacagcttgcagcctcctggctgggactacaggtgggaccacccacctggntaaaattttattttatttatttttgagacataagtctcactcttgctgaggctggagtt

SEQ ID NO: 18140 - DNA, 356 bp, Homo sapiens
  misc_feature (1)...(356): n = a,t,c or g
acttgcatgagcagggagttccagtgcgaggacggggaggcctgcattgtgctctcggagcgctgcgacggcttcctggactgctcggacgagagcgatgaaaaggcctgcagtgatgagttgactgtgtacaaagtacagaatcttcagtggacagctgacttctctggggatgtgactttgacctggatgaggcccaaaaaaatgccctctgcatcttgtgtatataatgtctactacagggtggttggagagagcatatggaagactctggagacccacagcaataagacaaacactgtattaaaagtcttgaaaccagatccacgtattaaggttaaagtncaggttcaagg

SEQ ID NO: 18141 - DNA, 886 bp, Homo sapiens
tgaacttatatatgagaattgctccagaactctatcataagatgcttgtggttggtggcatcgaccgggtttatgaaattggacgccagttccggaatgaggggattgatttgacgcacaatcctgagttcaccacctgtgagttctacatggcctatgcagactatcacgatctcatggaaatcacggagaagatggtttcagggatggtgaagcatattacaggcagttacaaggtcacctaccacccagatggcccagagggccaagcctacgatgttgacttcaccccacccttccggcgaatcaacatggtagaagagcttgagaaagccctggggatgaagctgccagaaacgaacctctttgaaactgaagaaactcgcaaaattcttgatgatatctgtgtggcaaaagctgttgaatgccctccacctcggaccacagccaggctccttgacaagcttgttggggagttcctggaagtgacttgcatcaatcctacattcatctgtgatcacccacagataatgagccctttggctaaatggcaccgctctaaagagggtctgactgagcgctttgagctgtttgtcatgaagaaagagatatgcaatgcgtatactgagctgaatgatcccatgcggcagcggcagctttttgaagaacaggccaaggccaaggctgcaggtgatgatgaggccatgttcatagatgaaaacttctgtactgccctggaatatgggctgccccccacagctggctggggcatgggcattgatcgagtcgccatgtttctcacggactccaacaacatcagaggaagtacttctgtttcctgccatgaaacccgaagacaagaaggagaatgtagcaaccactgata

SEQ ID NO: 18142 - DNA, 511 bp, Homo sapiens
  misc_feature (1)...(511): n = a,t,c or g
ggagaagacagcgagtacaagaccttatggcacaaatgcagggtccctataatttcatacaggattcaatgctggattttgaaaatcagacacttgatcctgccattgtatctgcacagcctatgaatccaacacaaaacatggacatgccccagctggtttgccctccagttcattctgaatctagacttgctcagcctaatcaagttcctgtacaaccagaagcgacacaggttcctttggtatcatccacaagtgaggggtacacagcatctcaacccttgtaccagccttctcatgctacagagcaacgaccacagaaggaaccaattgatcagattcaggcaacaatctctttaaatacagaccagactacagcatcatcatcccttcctgctgcgtctcaacctcaagtatttcangctgggacaaacaaactttncatagcantgggatcaatgtaatgnagctccnntccaancccgggaaaggggtnaaaataaaagccccc

SEQ ID NO: 18143 - DNA, 487 bp, Homo sapiens
  misc_feature (1)...(487): n = a,t,c or g
ggagcttcaataccctgaaatataaaaaccaaagtttgggcaaaaatatcttctagaaagagaggtgtctatgagagaagcaactgcaagggccctgactttcctacttccttctctaaagtccctgtcgctatcattatatttcatcccacttccaatgcagaccttgttctataaagaatatctagcactttcacatgtttctgaaggaagtgtattatttgtagcccctttttggagaaaaattattctgcttcaaggtatttattctacggatatactaacatgtgtcaaagaatacaatctcgagtctttagtgttgtttctggagtaaaatattgaaaataatcaaaatgctcatcaatagaaggctggctaaataaagtcggcttatataatggaatatcacgtggccagtaaaaaagaaacagntcncnaaananccaaaatttgcagtggtaaaaattaacttttaaaagcatacaaa

SEQ ID NO: 18144 - DNA, 350 bp, Homo sapiens
gcaagaaagacctggatgacatcagcaccaaaacaggcatcaccctcaagagctgccggagacagtttgacaactttaaacgggtcttcaaggtggtagaggaaatgcggggctccctggtggacaatattcagcaacacttcctcctctctgaccggttggccagggactatgcagccatcgtcttctttgctaacaaccgctttgagacagggaagaaaaaactgcagtatctgagcttcggtgactttgccttctgcgctgagctcatgatccaaaactggacccttggagccgtcgactcacagatggatgacatggacatggacttagacaaggaatttctccag

SEQ ID NO: 18145 - DNA, 361 bp, Homo sapiens
gggcatttatggggaactgttgcagtacagagagagaggtgcataactcaggctgaaatggggcagagggacagagaaatttcgttagagtagaaattaggtgaataaggagcagaatagaaaaggattccaaacagtgaaatactggtgaagggactattaaagtaatccacagaatttgtttaaaggatatagagggagagtcagcttagattgactcgcaggttccagatgagtgactacatttgagaggagttaatcaggctaggggatacaaagaaaggagaaatgataaataattcagttctgcatgtcctgagcctaggggtgtcatcagcaagtattaggggaggagaattaa

SEQ ID NO: 18146 - DNA, 352 bp, Homo sapiens
ggttatagcagaagttatatggcctgcaaagcctcacatatttactgactttacagaacaaggtttgctggtccctgatgtggaccagcagtcttcatggaaaaagatgcaaaaatgctttagaaagattagcaaatcaaacccaataaataaaagagataaaatatcaagatcaagtgaaatgcgtcccagaaatacaatgttgctttaacaacaaaaacaaaaataagtcaatgtaatgcaatatattaacagaagaaaggtttaaaatggcaggatcatctcaatacttgcagaaaagaagcatttgacaacattcaacatccattcattattattattattattattt

SEQ ID NO: 18147 - DNA, 628 bp, Homo sapiens
gttaggtgacgctgcggggcgggcggacagactgcgggacggacggtggacgctgggacgcgtttgtagctccggccccgccgttccgacccccgccgccgtcgccgccatgacggggctagcactgctctactccggggtcttcgtggccttctgggcctgcgcgctggccgtgggagtctgctacaccatttttgatttgggcttccgctttgatgtggcatggttcctgacggagacttcgcccttcatgtggtccaacctgggcattggcctagctatctccctgtctgtggttggggcagcctggggcatctatattaccggctcctccatcattggtggaggagtgaaggcccccaggatcaagaccaagaacctggtcagcatcatcttctgtgaggctgtggccatctacggcatcatcatggcaattgtcattagcaacatggctgagcctttcagtgcaacagaccccaaggccatcggccatcggaactaccatgcaggctactccatgtttggggctggcctcaccgtaggcctgtctaacctcttctgtggagtctgcgtggggcatcgtgggcaagtggggcttgccttggcccgatgctcagaaccccagcct

SEQ ID NO: 18148 - DNA, 432 bp, Homo sapiens
  misc_feature (1)...(432): n = a,t,c or g
gnnnnnntnnnnttnnnnnntctgaaannnnttatgacntgattacgaatttaatacgactcactatagggaatttggccctcgaggccaagaattcggcacgagccgcaggcacccagctgaaggagcacaccatccaggaagggccaagtggggaggggcgccctctttagggactggagggactgcagggctagggttgccggaattgtgatgggctgagagacacaggcagatggaggatgcccccagggtgcagggtgcagtgtcagaagtgggtcccaaacatcccctccccagatcactacgttgtcatcggggcccagagggatgcatggggcccaggagcagctaaatccgctgtggggacggctatactcctggagctggtgcggaccttttcctccatggtgagcaacggtaaggtcaggg

SEQ ID NO: 18149 - DNA, 413 bp, Homo sapiens
gtgcaatcccagggacacaagagtgaggaaagaacagagaagggagagcaaacagaagggagtacattattgcaagtcatttctagagaggctttcttcaacgaccacgtctcagtacaggtgctggacaaaaggagcagaaagagcaagcaatttatcacctgatctcctctcctgccttttgttgattggagtccctctcatggtatttgcaggttgagttttttggcttctcagggcagccactagagaagctcgcccctgggtgggggtcgtcctgcaggtgcaaaggtgaagtggactctccttttcaatcagtactgtgagtaggagcttccaggtctgtgcttcagagacagtgaaaacgctgtccttagtttgatgaccacaacaatggtgagtaatgcccacta

SEQ ID NO: 18150 - DNA, 311 bp, Homo sapiens
cacaatatgactgtaaagtaataagactggttttgtgtaaccctgcttacacatttttttcagacacactgtaacctattatctattatatgttattaggttttaaatttatattatattaagagactgagtgttatcaactttcgtttgtttcattttatgtaaggcaatatacaagaatatttggacagctttttggaaatgttcataaattttgatctgttctattcatgtaactatgtatgtacatgcacatctgtatatgcactatgttatatctatattatagatcttaggtaacaacaaacata

SEQ ID NO: 18151 - DNA, 347 bp, Homo sapiens
gcttgatggatgatttgtggagtcaccgacctgctgctgtaaaaaccataaacctcaataaagtgatgtggaaatgtagtgtacagctgcagacttttaaaagtaagaagaggaaggaacacatgttcgtcttcctcccccagaagaaaaacaacattggattctaaaagatggcctcctcctttttgctcccactgaatgccacagctgttaatggacagtcttagaggagatgatggggtcatcagtctgtttctggagcattccgaggctttagatagggagcagcatgattctagcagtgctgcgtgttcttgggcagcgtgtccttctagtaggagtccaaa

SEQ ID NO: 18152 - DNA, 625 bp, Homo sapiens
  misc_feature (1)...(625): n = a,t,c or g
actcccggacgtaggtagtttgttgggccgggttctgaggccttgcttctctttacttttccactctaggccacgatgccgcagtaccagacctgggaggagttcagccgcgctgccgagaagctttacctcgctgaccctatgaaggcacgtgtggttctcaaatataggcattctgatgggaacttgtgtgttaaagtaacagatgatttagtttgtttggtgtataaaacagaccaagctcaagatgtaaagaagattgagaaattccacagtcaactaatgcgacttatggtagccaaggaagcccgcaatgttaccatggaaactgagtgaatggtttgaaatgaagactttgtcgtgtacttaggaagtaaatatcttttgaattagagaaagtgttgggacagaaagtactttatgtaactaagtgggctgttcagaagcttagaggtcattttttgtaattttctttttaattactttagagagctagggatgcaaatgttttcagttagaaagcctttatttacttttggaaattgaacaagaaatgcatctgtcttagaaactggagattatttgatgttaggtaaaacatgtaattgnttctctggcaaatttg

SEQ ID NO: 18153 - DNA, 353 bp, Homo sapiens
ggcatgaactaccagtacagataagcccccgcggggcggagatttctaccttctgcacttactccccatcagaagatcgagttttatgcatcacagttaacatgtcagctggccctccaggcccccgcccccatcccgtccacgttgctgtgtcgtgaggtgcagcgggtcaccctgtggcccgtcctgtgacccatatttagccgtgtttgggactccgtgtcttcaatggtttgttagttgccattacaactttgtctgggtagagtttttgagtttttgcagttcagtatccctctgtctattcacacttcgtgttagtggtaactcagtttgctttaaatagttacaga

SEQ ID NO: 18154 - DNA, 347 bp, Homo sapiens
gctgttagttcattcaaaataaaaataaggaaacagcactcatactgagctgtagtgtgttttggttagcaaagtgaactgttttcatttgaggcagatttttttttaaatttttcatcagagggatttattaactgttttcaatatgctgtaaatttgatattccctccttccactataactcagaaatgataaggtcatttttgccatgggaaacaaatttagagcttaagtatgggtgtatgtaaatgtgacccccaaaccaaagatagacttgctagatctgaaagtcaccattagttttgccggcctgttgcctcttgaaaccagatataaaatatgacaaa

SEQ ID NO: 18155 - DNA, 407 bp, Homo sapiens
ctgcctcaagtacgtcggtgtggccttctacaatgtgggccgctcactcaccaccgtcttcaacgtgctgctctcctacctgctgctcaagcagaccacctccttctatgccctgctcacctgcggtatcatcatcgggggcttctggcttggtgtggaccaggagggggcagaaggcaccctgtcgtggctgggcaccgtcttcggcgtgctggctagcctctgtgtctcgctcaacgccatctacaccacgaaggtgctcccggcggtggacggcagcatctggcgcctgactttctacaacaacgtcaacgcctgcatcctcttcctgcccctgctcctgctgctcggggagcttcaggccctgcgtgactttgcccagctgggcagtgcccacttctggggga

SEQ ID NO: 18156 - DNA, 380 bp, Homo sapiens
gaagaattgggcctgtgctgatccaggaaggttttattgtttgcttgttttttgtatttactcgtgactaaattttattcatttaagtcagaattttgatatttgaaataagactactttcccttttcttactatctataaaaaagacgaggcagggatgctgtgttctttctgtcaaattctaaatgtgatctttgccattgcttatttgaattcaagaaagctatactttttcatcacatataactcacagtttcatttttgcattgttggattagacttaataaaacctaaatggaaaataaattcctaaatctgagcctaggagcatgtataaattttatttttattattattatacattaagttctagagaacat

SEQ ID NO: 18157 - DNA, 328 bp, Homo sapiens
tccatctacaccatagctatcatcatccataatcttggacagaccaaaatcagtgattttgatttcaccacatgctgttccatctaccagtaggatgtttcctggcttaagatcataatgtataatagggggtttgatctcattgagatatcttagtgcatttacaatctgcattacaatagaccgagcttctttctctgacattaacttgtgttgcttcagatagaaatccaagtcattgccttcacagtattctaacactgtacaaaacgtatctgtatccaaggagaaataatcatagagtttaactattctggggtgatccagt

SEQ ID NO: 18158 - DNA, 355 bp, Homo sapiens
ggtagaagaggaaatcattcagggagagaaaagaactgattcagagaatgagggatttgtaaccaggcatgtgcactgtaagagtgtccccaggaaatgtcttgagaagtggaaaaagtcaggagactcatgtgatggttagagaagccatgggagaggcaagtttcaagaaggagtggagagattacgagtgtcagattctgcacacacattcagttaaggactaaaaagtgataactggatttagccacaaggagagattagagacttgagaacaaagtagacgagctgggtgtctatggtcacatttgttcagcattactttatcgagggtaatttcctaaaagtagatcac

SEQ ID NO: 18159 - DNA, 354 bp, Homo sapiens
ctgacatttaatgtctttctatggacaacattaaatctccctcccttctgtaattgtttttggattgtgaaattagtcttatttttatatacttaattttttttttctttgaaatagggtctttgttgccaggctggaagtgcagtgtgtgattatggctcactgcaactttgaactcctgggctcaagtgatcttcctgaggcaggagaatcacttgaacccaggaaacgggggttacggtgagccgagatcgtgctattgcactccagcctgggcaacaacagcaaacttcatctcaaataaataataaaataaaataaaagcagatacctggaactgacctgtcctttgct

SEQ ID NO: 18160 - DNA, 506 bp, Homo sapiens
  misc_feature (1)...(506): n = a,t,c or g
ggagagccctttggaaaatccaatacgactcactatagggaatttggccctcgaggccaagaattcggcacgagcagcctcctggctggccttgtttgtgattctgataggtttttccaagtcagctgcctgagcttaaaatgatggatgggctgtgaaggtccctcacacctggtgcgtccctccacattctctcctcctcctgtcaactcttgagtcaaccgaagaacaatattgaagtaccagggcagctggtgtccctgctgctagctatagagggggtcccacaatgaaggaagcctttggcatatgaccttcgggggaactcacctcctcctagccagcagcagcgaaaagagaacttctaacattgggntcttttggctaanattgctctaagtcagcgtntttnaaacttgaacatgcattatngcttatntgantgagggctnggtgcaanaanngggctcgctgggccntttgctataannnnaaatgcnaagttg

SEQ ID NO: 18161 - DNA, 331 bp, Homo sapiens
gcggcacgaggcctttatttgaaacaaaaatctttctccacactgaagcctcatttctggaaagctgcagagattggaactgaggttaccccaggtcagtgccaggtagacagatcctagccatagatctaattgctgatgaagaaagaggctgctggccttagtgcctttctgatactctagcaagaagcggggggcaaaaagagctaaaattgccacctgatttgcagatctcagaagcaaatgaaaaggagcttcaccatctcgagggatgagaaagaatgctgcttccttttctttctttctgctctcttttctcttgggaaggaga

SEQ ID NO: 18162 - DNA, 325 bp, Homo sapiens
tgatttttgttttttcccctcagtctattgtgaaatgttgtgatagaactgagcagaagagaagggagagaaggagtgtgcaaaaatctgaaagagtgactttaaaggttttctacatttctctgaagcgaatagttgtcaggtatttatgagaaattgcatagattgcagctgatatattatcagtgaacaagacacagtatctgtcttcaaggcacctacagtctaatagagaaagactatcaagtaaacaggtactgtttcagaactgctttgatgggaaatgtaggctgctatgagaacatctaagggagttcatcagggg

SEQ ID NO: 18163 - DNA, 356 bp, Homo sapiens
ccccaacacaccctatgcctacaccttttggacttatatgatgaatgctcgatccaagaatgttggttggcgccttgattactttttgttgtcccactctctgttacctgcattgtgtgacagcaagatccgttccaaggccctcggcagtgatcactgtcctatcaccctatacctagcactgtgacaccacccctaaatcactttgagcctgggaaataagccccctcaactaccattccttctttaaacactcttcagagaaatctgcattctatttctcatgtataaaactaggaatcctccaaccaggctcctgtgatagagttcttttaagcccaagtttttttatttga

SEQ ID NO: 18164 - DNA, 446 bp, Homo sapiens
gcagctaataagtgatagtgcacagatttaaaaataggcctaccttcagatcctgagctgtaaagtactatacaatatctctcatacataaattacatttttataaaaatgagatgacactgtatacattctttgtaatgtcctttcacttaataactttcttatatgcctagatgtattcaataacataattttaaggatgtataaaatacccttatcataaaagtataggccaagcgtggtggctgatgcctgtaatcccagcactttgggaggtcaaggtgggcaaatcacttgagcccaggagttcgagaccaccctgggcaacatggcaaaaccccatctctacaaaaaaacacaaaaattagccagccatggtggtgcatacctataatcctataagctactcagaaggctgaggtaggaggatgcacacctataagcct

SEQ ID NO: 18165 - DNA, 456 bp, Homo sapiens
gctaatatatttgctttcaatgtggtggtactactttagaaaaagtaaattttctttctttttttaaattttagacagggtctcacactgttgcccaggctgaactgcagtgccgtgatcttggcttactgcagcctctgccgcccagtctcaagcgatactcccgcctcagcctcttgagtggctgggactgcaggcgcttgccaccacacttgactaattaatatttttacatttttggtggagatggggatttcaacatgttgcccagggtggtctcgaactgagctcaagcgatccacctgcctcggcctcctgaagtgctgggattacaggtgtgaggcaccatactaagccaaagtaaattttcttactgaaatgttttatacattgtttcttgttttattagctaagttatttcatatcactttttatttatcataggattagcaataa

SEQ ID NO: 18166 - DNA, 505 bp, Homo sapiens
  misc_feature (1)...(505): n = a,t,c or g
aacagctatgacatgattacgaatttaatacgactcactatagggaatttggccctcgaggccaagaattcggcacgagcatgattgtctgtccctagttcctctttcacgggaatacatgctggagctatgtactaaaaggggagtgtgtttcctcactgtatctctctctgtcggggcataagacaagagaacagacctgtggaatgattagggaagctcaggggtatctacccagtctcaaaatctcattcccagctgccagaaattcaccaccagtgtttcctttttactgtttttgttttgtttttgtttttgagatggagtcttgctctgttgccaaggctggagtgcagtggtgcaatcttgtcttgctgcaacctccgcctcctaggttcaggcgattctcctgcctcagcctcctgagtagctgggattacagacacctgccaccatgcttggctaatttttgnatttttggtagaggcaaggtttccccacattg

SEQ ID NO: 18167 - DNA, 448 bp, Homo sapiens
gttaaagacaaacagaacaagcctactggttttgccctgggaagtatcgaggggagagttgctattcactatatcaaccccccgaaccccgccaaagataacttcacctttaaatgtcatcgatctaatggaaccaacacttcagctcctcaggacatttatgcggtaaatggaatcgcgttccatcctgttcatggcacccttgcaactgtgggatctgatggtagattcagcttctgggacaaagatgccagaacaaaactaaaaacttcggaacagttagatcagcccatctcagcttgctgtttcaatcacaatggaaacatatttgcatacgcttccagctacgactggtcaaagggacatgaattttataatccccagaaaaaaaattacattttcctgcgtaatgcagcccgaagagctaaagcccaggaataagaagtag

SEQ ID NO: 18168 - DNA, 342 bp, Homo sapiens
gctgatgaaatctgaataaactctgaagtataggtaatagtgatgtatcaatgttggtttcttagttttgacaaagtattgtgtaatgtaagttgttaacattaggggaaactgacggtactttctgtattatctttgtagctttttaaactataatttctcaagtttatttaaaaaaaacaaacaaactctagcatagaacacagcagctatcaatttctttagtttcctcaaaccctaccttatcatcttctctgtcatttgcctacttttctgagaagattgaagccatcagtttgatgaattcccctcagtttcctttatttttgtttttttgttggt

SEQ ID NO: 18169 - DNA, 287 bp, Homo sapiens
agggatcattggttccagtcacaggtgtagtaattgtgggtactttaaggtttggagcacttacaaggctgtggtagaatcataccccatggataccacatattaaaccatgtatatctgtggaatactcaatgtgtacacctttgactacagctgcagaagtgttcctttagacaaagttgtgacccattttactctggataagggcagaaacggttcacattccattatttgtaaagttacctgctgttagctttcattatttttgctacactcattttatttgg

SEQ ID NO: 18170 - DNA, 530 bp, Homo sapiens
  misc_feature (1)...(530): n = a,t,c or g
gaaaaataggataggtctcagcactgtggacattttggttctaataatcctttgctgtgggaacccgtcctgtgcatggcaaggtgctgagtagcatccctggcccctgcccactggatgccagcaccagtgccttcccctctgtgacaatgaaagtctccagacattgccagtttctcctgttgaagtcactggaatagggatagagactgaagggagtaagattgttggagttgtgaacctgagtgccttcttacctggaaggatctgtggtatttggcacgcctcgctgctctctcctgcctcttcctcaccaagagttttgtcaggtgttttttacagttaaagaatttatgtactttggtaggaaaattgtgtttaccagcccttcaacaggcggcctattctgtaagatggaaaatacctataattagaattcctggctctgtaaatgcttctctctttgngatttggagtgttggtgtggttgaacttacatttgactggattttctcttgagtggaaaaaaa

SEQ ID NO: 18171 - DNA, 471 bp, Homo sapiens
  misc_feature (1)...(471): n = a,t,c or g
tttgannncctaacagctatgacatgattacgaatttaatacgactcactatagggaatttggccctcgaggccaagaattcggcacgaggtgaacttaaagataaatcaaagttatacaaagtgaagagcgtaaaaaaggattaaaaggaaaaaagtctcacaaacatgttcgattatatcacatggtaaaacatacatgtaattggaatactagatggagaagaagagagagagaatgggtcagaaaaaatatttgaaaaaacactggccaaaattttgcagacacaagatgctaaatgaacagcaagaagaggaagcataaagaaatgtacagcagagtacctatgatgaaactttttcttgaaaaccatagtagatgtattatataaaagggaccaataatctgattaacagctgacttcccattaaaaagctatggggatgagaagagagttaacaccttgaaggt

SEQ ID NO: 18172 - DNA, 310 bp, Homo sapiens
gaaaaaccatagaaaaaaatttaagaagttttttcagtttctttgaattgctgttttttagtgtagacagtaatgtgagaagatcctaagttgtaaaagtaacatttgatgtgtaacagtttcatgcatattaagccttagcctttgttaataaaacatgccatttcaaaataaaatatgctttcattatacttgtccaaatatgacctctttttgttgttgcgtgcatttcagatttctttttataaatgttaacacgtagaaaaagatacggtcaaacataacaagggtgtcagcctaatcatcagtc

SEQ ID NO: 18173 - DNA, 257 bp, Homo sapiens
  misc_feature (1)...(257): n = a,t,c or g
ggaagattcaaaatcctatcctctagctattgaaagcatacaataaattattgttaacaatagtcactctatattgctatagaacactagagcttatttctcctatctagctataatttttattcattacctaaccttttcctagcccccactggcgcctcccagcctctagtagaaccactattctactctacttctgtgacattaacttttttagattccacatgagggagtacatgcagtaatttanctntctg

SEQ ID NO: 18174 - DNA, 354 bp, Homo sapiens
  misc_feature (1)...(354): n = a,t,c or g
gctagaaataaagttaccccattttgtagtggtaatggttaaagaagtgggctctgagttacttacttgatgaacacttacttgctgcatgaccctggtcaagttgtctaacacttaatgccccagttccctcatctgtaaaatggagatactaatagaactgtccatggagcatggttgtgaggaataaattaaatatttataaagttcctaggaaagaacttacatgtactaggcattcattaaatgttagctataatgatgtaattgaatattagctatctttattagtattattatgactactaatactatagcagnantaatactactattaccatgtgccatttatta

SEQ ID NO: 18175 - DNA, 342 bp, Homo sapiens
gccaactgtcttgcttaataataatatctgctgctttaaattacaaagtcagttgggggcgggagaagccggcccagctgcttttctctctagaggacagagagcgctgctcctggaatcttctctgtggcctgtgtgtctggagtaatgcactcgccactctcctctctcctgtcctgttgatgatctctggcgtaaagatgtatgaggctgttacaagcagtggctttctgtgtccttctctttgggacttgccctgtatagggaccctgtggcatttggttcctgtctcctccaacaaagcaatacagggacatctcatgggggatccagaggacgtct

SEQ ID NO: 18176 - DNA, 463 bp, Homo sapiens
  misc_feature (1)...(463): n = a,t,c or g
gcgcaagagaaacatgatctctctcctgtctcctcagtttgggaccattgccgtggcagcaagagaagcgggggacgttctcggcccctcgccctgagagtcgcgaggagaatcagtattgagcttttaagtgtcgtcttgcacaggtcgcaacctgtcttccatctgctttacgtgttgtttcttaaggctgagtgaattaacgatttctgtttatatattgtgtaaaatgcaagtcatttcaagtaacaagttgttttggtatactcccatgcttttgctcttggttctgctttagagagttagggtcttgcagtcatttttaaactcatttttagttctaccatcctcatcccaactatatatcgattttattgatatataagnttccttccttagacaaaaacattttatatttggaaggaatcttggaagtcattgcaggaatgaagaaattgaagcc

SEQ ID NO: 18177 - DNA, 376 bp, Homo sapiens
  misc_feature (1)...(376): n = a,t,c or g
gaacagggaaggcctgaggtcgcttcggaggagttagcaatcaaaggagaacagacttttggtgactcagttaccaacacacaacactcataaaactaaaattaggtgttttattttttgtctacacgggtggcgtgccactttcctttcctgattagggaagcttctcccagccctttctgacgttcatctgtgtgcctttatgttcaaacagtttaggaagcagcagccctcctaacagtcgacgcggaagcacaaatctctggaggtatttttggacacacttaaatcctatcccaagagactgaacgactgtggtgacaaatgcccacggntaaaactgagccagctnattcanactggctgntcaaagccc

SEQ ID NO: 18178 - DNA, 431 bp, Homo sapiens
  misc_feature (1)...(431): n = a,t,c or g
gagttgtaattgagctttaccacctgggactgtatgtatttttccatgcccaaatcttgcctgcctgttgtgagggacccatggttcagcccagtgattttcttaccccagctgctgatgctcggcctcctggccacatccttgggcctcatgatcagtgggggagtgtcaggaatgtgcactgaaatctttggccccagtcacatctgccttcattcttcttaataaaccagcatctaaagaggtttctcttttcaactttctatggttatcttccttctgagaggcttatctcttcaatgtgaacatgtaggatggcatctggggaaatacatgttgggggaaagggaaggaacaagctgctgctttatcctgngggtcagctccttgtgcaagcttaaatctcatattacttcnaagagttgggagta

SEQ ID NO: 18179 - DNA, 363 bp, Homo sapiens
ggatttactgatttttaaaacttggtcaccaattaagatttttttaaaaaaccagtacctggaacaagcagaacaagtctctgctggccttggctcatgttgctgttctcagttcccctgggatgtttgcttccagggaggcctgggcactcctgactttggtgacagccctgcttgctctctctctgttacctgtaggtttccccttccacattcactgcctccgggcaggcactgttgtgttttaggcatttcagtatcccagtggggtactggataagtgcttagttagcacctgccggtgaagtaaataatcaggtcctgtggtctctgagggtttgacacatcaggtctttgatcttg

SEQ ID NO: 18180 - DNA, 447 bp, Homo sapiens
gcccttcccagccatactacttatgggatgactttctctttgtaaaatgaccgttagtcttatcaaattaatcccaaagtaataccatcaatttccccctaaaataccaacaagacccctgcttgaaactgcttgtacattagagacagagaagagtccatgagaatcaacattttctgaggactccaactgtgtgccaagagagttcccctgctggtgcctcctctgtagtaaaggaaaggctcctgggaccacattatcattctcttcactcgagagatgaggacactgaaattcagagaggggaagtgatttgcctcagcttgtactcctctcctcccagtgctgcacttctaatctctctgcagaaagaaacatttcaacagagaacccagtggaaattatgacatgttatcttctcagagtcctgaactcccatccctacct

SEQ ID NO: 18181 - DNA, 586 bp, Homo sapiens
gaaacctaagagggagaagaaggagcctggtaccagagtgagaaaaacacctacatcatctggtaaacctagtgcaaagaaagtgaagaaacggaatccttggtcagatgatgaatccaagtcagaaagtgatttggaagaaacagaacctgtggttattccaagagattctttgcttaggagagcagcagccgaaagacctaaatacacatttgatttctcagaagaagaggatgatgatgctgatgatgatgatgatgacaataatgatttagaggaattgaaagttaaagcatctcccataacaaatgatggggaagatgaatttgttccttcagatgggttagataaagatgaatatacattttcaccaggcaaatcaaaagccactccagaaaaatctttgcatgacaaaaaaagtcaggattttggaaatctcttctcatttccttcatattctcagaagtcagaagatgattcagctaaatttgacagtaatgaagaagattctgcttctgttttttcaccatcatttggtctgaaacagacagattaagttccaagtaaaacggtagctgctaaaaag

SEQ ID NO: 18182 - DNA, 210 bp, Homo sapiens
aaaacatcttacttggcaaatcttttcttttggagctaattattctttgatttttaagtccacataagagaatgaactttgatatcagcttttctgattttttaacaaaggctacccttggttattatgaaaaatattacttttatgattctatttggaattttaaaattttgaaataattccaaacttacaggaaaatcatgatcttat

SEQ ID NO: 18183 - DNA, 402 bp, Homo sapiens
gcggcacgagggcgacttcgatattaacaaggatggcggcggccgcagcaagtcgaggagtcggggcaaagctgggcctgcgtgagattcgcatccacttatgtcagcgctcgcccggcagccagggcgtcagggacttcattgagaaacgctacgtggagctgaagaaggcgaatcccgacctacccatcctaatccgcgaatgctccgatgtgcagcccaagctctgggcccgctacgcatttggccaagagacgaatgtccctttgaacaacttcagtgctgatcaggtaaccagagccctggagaacgttctaagtggtaaagcctgaagcctccactgaggattaagagcaacagccccagagcctgggctctgctggacttagtataatgtgaaaa

SEQ ID NO: 18184 - DNA, 327 bp, Homo sapiens
ctcccatctacatccagtactttgtcaagttcttcatcatcggcatcactgtactggtggtggctgtgccagaggggctgcctctggctgtcaccatctcactggcctactctgtgaagaaaatgatgaaagacaataacctagtacggcacttggatgcttgtgagaccatgggcaacgccaccgccatctgctctgataagacaggcacgttgaccatgaaccgcatgactgtggtacaagcttatattgggggcatccattaccgtcaaatcccaagccctgatgtcttcctgcccaaagtcctggacctcattgtcaatggca

SEQ ID NO: 18185 - DNA, 248 bp, Homo sapiens
  misc_feature (1)...(248): n = a,t,c or g
ccaagccccacacaaaacgctgcccgtggtcttcgactctccaaggaacagaggcctgaaggagtttcccatcaaacgcgtgatgggtccagattttggctatgtaactcgagggccccaaacagggggtatcagtggactggactcctttgggaacctggaagtgagccccccagtcacagtcaggggcatggaatacccgctgggcaggattctcttgggggacagctggcatccnaggaatgaca

SEQ ID NO: 18186 - DNA, 352 bp, Homo sapiens
ggaaagcgcgaaaggcttatgagcacgcactgcaggactgtttgggtgacagctgtgtctccaatccagctcccaccgattcctgtagccgcctaattagcctggctaaatgcttcatgctcttccagtatttgaccatagggattgatgctgctgtgcagatatacgaacaggtgtttgcaaaactgaacagttctgttttcccagaaggctctgggcaagggggacagtgccagctcccagagttggaccagtgttctcgaagccatcacactgatgcacacgagcctgctgagattccacatgaaagtgagtgtttacccgctggcccctctgcgagaggcactctcac

SEQ ID NO: 18187 - DNA, 397 bp, Homo sapiens
gcggcacgaggttcaataccctgtctctaaacatttttttaaatgagctgggaatgctggtgttgcacctgtgggaggatgaggtgggaggattacctgagcctgaggaggtcaaggctgtagggagctgtgactgcgccactgtactccagactgggggacagagcgagaccctgtctcaacagaaaagaaaagagaagagaagagaagacgagaagagaagagaagagaaaagaaaaacctctctggctgactagctcttttgctcattcctgtaatcccagcactttgggaggcctacgcaggaagatcactggagctcaggagtggagaccagtctgggcaacatggtgagatcccatctctacaaaaaattagccagacctagggtggatgt

SEQ ID NO: 18188 - DNA, 965 bp, Homo sapiens
tggaagccgagcggcttcgctcgcatttcaccgccgccgcctctcgcaatattgcaatataggggaaaagcagaccatggtgaatccgggcagcagctcgcagccgcccccggtgacggccggctccctctcctggaagcggtgcgcaggctgcgggggcaagattgcggaccgctttctgctctatgccatggacagctattggcacagccggtgcctcaagtgctcctgctgccaggcgcagctgggcgacatcggcacgtcctgttacaccaaaagtggcatgatcctttgcagaaatgactacattaggttatttggaaatagcggtgcttgcagcgcttgcggacagtcgattcctgcgagtgaactcgtcatgagggcgcaaggcaatgtgtatcatcttaagtgttttacatgctctacctgccggaatcgcctggtcccgggagatcggtttcactacatcaatggcagtttattttgtgaacatgatagacctacagctctcatcaatggccatttgaattcacttcagagcaatccactactgccagaccagaaggtctgctaaaaggtcagagtaatgcagaatgcgtgccttcatctcagatttgttcatcacaggtggatcccatgtgtcttcagtagacaagtcacctttgtagctagcaccagtgccagctccatgccattgcaccttctttagtcttgattgcccttcccgcatttattggtgtattaaaatgactgaatatgaacattaaggactccatgaacctgggctaatgggagactgtagagaaaatgaaaaaagatccaccagaggacatcttggggagggggagggagctgggggatcttttttcattttctctacagtctcccattagcccaggttcatggagtccttaatgttcatattcagtcattttaatacaccaataaatgcgggaagggcaatc

SEQ ID NO: 18189 - DNA, 338 bp, Homo sapiens
ctcaaaaacactgtcctaaagacagcatctaataaataatgtttttagagtttctcatctctagaacttgtatctcaccctgcagatgtgcctgttagaggaaccacaggagatttgtgacctagagatactggaaatgagaaagaaaaaaaatattccttgaggtttcctaagtcttgcagagtgtggtaaatactgtgtgtgaaaactgcctttcaaggcttctgttgttactgccccccctccaccccgcccttgtctgtgtttgaaaaccctgtcccatgattcaatgcagggtgttgactttggatacacatctccagaggctggccacaccg

SEQ ID NO: 18190 - DNA, 374 bp, Homo sapiens
gcattcttcctcatcaaagaggcagtaagggataatttagagtgactacagttacaaataatgtgctgtataagcacccaagagcagagataaggatggaattaagggtgttaaagaaaatatggcctctcttctttaccatttgattgtttttgctgtccctggagactcatatctctctctattcctaggaccaaagtttacacaactgccaaatatataaacaagaacaccccttaaaattcctgtgaaacattgtacatcttaagagagcagatgtgtctatgggctgtcacaaatatcagtcttgctatgttaagcataaacttaacaaatattagtggagacacactatttaggattcgcctaaaacc

SEQ ID NO: 18191 - DNA, 453 bp, Homo sapiens
  misc_feature (1)...(453): n = a,t,c or g
gtttaaaaagataaaaagggagagggagaaggatagaaggaggcttgcgtcaaccaagcaagataattctgttactttggatattttaatttttgagcacattcctcattaacacctattttgtgttggatgcactttataaggtcgaaccctgtgccccaaaatgctttcagttgacaggtgttatttatcacacactgaaaatactttataaaaattatccccttatgctggaaaaggaaagtgactaaaaggaaggcataagtagcttgaatggagcaactaattagaattggaaccagcattatcagaatgtcacatccgcatcatcatcactgctgtgtatctaaaaagaacaggcttgtttagggttgcacgtcatgaacttgngaaagctgagntnnnagggcngtattcntncatccctgtggnatttctaaaagggntnngccc

SEQ ID NO: 18192 - DNA, 483 bp, Homo sapiens
accccctttaatacgactcactatagggaatttggccctcgaggccaagaattcggcacgagtgggagactgcacgatttgagcaggtggtgtgaaatctggaactccattacttgtaccccaaggcatcttttttatgcggatttaagctggaaagcgccacaccaagctgttaacaggaactgcttcctggcactgagattccaggggctgctcgttcctttctctggctcatctgtgtaaggaagactttcctccgtgagcctttccaccaagctcaggcctgaggcttaggagaaatgtgcgagatcccgacagcctcggagggagtgagggggcttcgagacgctcagggccaccttaggggcctctaccagggaaggagaaatgatcttgtttcaccggccagggaggtgagtgcagccccttcaggacctcaaaaatccctactgggggcccaccctcagaggcctggtgaggcaa

SEQ ID NO: 18193 - DNA, 339 bp, Homo sapiens
gcggcacgaggtgaattacttggacagttacctcgtgggagatgagctgtgggttgttatggaatacttggctggaggctccttgacagatgtggtgacagaaacttgcatggatgaaggccaaattgcagctgtgtgccgtgagtgtctgcaggctctggagttcttgcattcgaaccaggtcattcacagagacatcaagagtgacaatattctgttgggaatggatggctctgtcaagctaactgactttggattctgtgcacagataaccccagagcagagcaaacggagcaccatggtaggaaccccatactggatggcaccagaggttgtgac

SEQ ID NO: 18194 - DNA, 467 bp, Homo sapiens
ctatgacatgattacgaatttaatacgactcactatagggaatttggccctcgaggccaagaattcggcacgaggaaacttaatatttttgtctttgctgtgggctgtgtttctcaactcctgtgtatgtgtgcgtgtgtgtgcgggtacgcgcgtgtgcacactttcaagttgagagtctggtttgaccctgaacctatgtgaatgtcaagcgtttgcttttcgtatttgatttggttatatataaccttgctcctgtggaatcaagtagcagccttctttttgacaagtcctgagatctgactcaagtctcagtgtttacagtgtaaagatatgacttttattgattttccactctgtgtgccagtccttgtgaagaatgaagcctggcatccaatataggaggaggggcacgaaacccccaggaaactgtttgtgatgagccctgcacaggtgtgggacgatca

SEQ ID NO: 18195 - DNA, 418 bp, Homo sapiens
ggggtagtactggtcttataaaattagttgggaaatattccttcctcttctagtttttggaagaaatggtatagaactggggttaattcttattaaaatgtttgatggaattctccaatgaaacactccagacctggaggcttctctttggggatttgcttaagtataaatttgagttcttttttttgtttgtttgtttgaggccttgctctgtcacccaggctgcagtgaaatggcacaatcacggctcactgcagcctcaacctcctaagcccaagcaatcttcccacctcagcctcccaagagctgggaccacaggcctgtgccgccatatgcggctaattttttaagaattttttgtagagatgaagtcttcctatgttggccagctggtctgaactcctgggctcaagtgacc

SEQ ID NO: 18196 - DNA, 501 bp, Homo sapiens
gcccactgaggtcaccgccattggtgctgtggaggctgccttcaagtgctgtgctgctgccatcattgtgctgaccacaactggccgctcagcccagcttctgtctcggtaccgacctcgggcagcagtcattgctgtcacccgctctgcccaggctgcccgccaggtccacttatgccgaggagtcttccccttgctttaccgtgaacctccagaagccatctgggcagatgatgtagatcgccgggtgcaatttggcattgaaagtggaaagctccgtggcttcctccgtgttggagacctggtgattgtggtgacaggctggcgacctggctccggctacaccaacatcatgcgggtgctaagcatatcctgagacgcccctccctcctctggccagcctaaccttgtacccatcccttctccccagtctagttctccagcccacaccctccaaagcccacctttagtctctcttctcaatcctgacctccctactga

SEQ ID NO: 18197 - DNA, 348 bp, Homo sapiens
ggaggtttgagtaagtgccatttttatgagcctctgcatcaacctttggaggcatggtatgacacagcacctgacaagaataagtacacccattacggctgcgagggaagtaagaattgaggctattattcctttccatttactgaactactttttttttagccatcctgtaaaggggtcatttacccctgagttgctgtctgactcattggatagagcagtgagaccttgcagtgcttttgttatacttttattaggggcggtgctgtttgggatgaaggtataacattgagttttaatcatgatgcaaaatcctctttctgctaatatcgtgtctaaggctatcct

SEQ ID NO: 18198 - DNA, 326 bp, Homo sapiens
gcgggcatgacccccaagaccggcttctagcccaggactcagagcacaaccacagtgaccggaactggcagcgcaaccggccttggcccaaggatagctactgacagcctcctgctgccctaccctggcaggcacaggcgcagctggctggggggcccactccaggcagggtggcgttagactggcatcaggctggcactaggctcagcccccaaaaccccctgcccagccccagcttcagggctgcctgtggtcccaaggttctgggagaaacaggggaccccctcacctcctgggcagtgacccctactaggctcccattccag

SEQ ID NO: 18199 - DNA, 332 bp, Homo sapiens
ccggccaaagatgccatattttatcagctatccagagtatatgttggtttagtttaacggtagatttgacagtatcttgaaaataagtgtcaaaaattcctggatgggccaggcatggtggctcatgcctgtaatcccagcactttgggaggccgaggcgggtagatcacctgaggcatgagaatgacttgagtctggcagacagaggttgcggtgagccgaggtcgtgctaccgcactccagcctgggtgacacagactctcttaaaaaaaataagaaatacatgaaattcctagatggacgagtgttttgctattttgtctcttaatatt

SEQ ID NO: 18200 - DNA, 110 bp, Homo sapiens
gttcaatttcagctattgtacttttcagttctgtaatttctttctggtttctttcaaggtttttatattgatatttccatgttgttcatacatcactttcttgactttca

SEQ ID NO: 18201 - DNA, 557 bp, Homo sapiens
  misc_feature (1)...(557): n = a,t,c or g
gtgnnnnnnntttgaaccccttgattgattaccaatttaatacgactcactatagggaatttggccctcgaggccaagaattcggcacgagtaaaaagtctcccactaaagaaaaccaaggacccgatggcttcactgttgaattctaccaaacatttaaagaagaactaataccaatcccactcaagctattgaaaaatagaggaggagagaatatttccaaagtcattctaggagaccagtatcaccctgataccaaaaccagacaaagacacatcaaaaaaagaaaactgctggccaatttctctgatgaatattgatgccagaatcctcagcaaaatattagcaaactaaattcaacaatacattaaaaagatcattcatcagggtcgggtgcagtggcttaagcctctaatcccagcactttgggaggccgaggtgggcagatcacctgaggtcaggagttcaagaccagcctgaccaacatggtgaaacctcgtctctactgaaaatacaaagttagccgagtgtggtggtgcatgcctgtaatccagctt

SEQ ID NO: 18202 - DNA, 436 bp, Homo sapiens
ggacagctgggtgtacagcgtcctcgaaaccacgagcaagtgagcagatcctccgaggcaccagggactccagcccatgccatggcggattctgagcgcctctcggctcctggctgctgggccgcctgcaccaacttctcgcgcactcgaaagggaatcctcctgtttgctgagattatattatgcctggtgatcctgatctgcttcagtgcctccacaccaggctactcctccctgtcggtgattgagatgatccttgctgctattttctttgttgtctacatgtgtgacctgcacaccaagataccattcatcaactggccctggagtgatttcttccgaaccctcatagcggcaatcctctacctgatcacctccattgttgtccttgttgagagaggaaaccactccaaaatcgtcgcaggggtactgggcc

SEQ ID NO: 18203 - DNA, 1279 bp, Homo sapiens
accgagctgggaagcctgtcatctgtgctactcagatgctggagagcatgatcaagaagccccgccccactcgggctgaaggcagtgatgtggccaatgcagtcctggatggagccgactgcatcatgctgtctggagaaacagccaaaggggactatcctctggaggctgtgcgcatgcagcacctgattgcccgtgaggcagaggctgccatctaccacttgcaattatttgaggaactccgccgcctggcgcccattaccagcgaccccacagaagccaccgccgtgggtgccgtggaggcctccttcaagtgctgcagtggggccataatcgtcctcaccaagtctggcaggtctgctcaccaggtggccagataccgcccacgtgcccccatcattgctgtgacccggaatccccagacagctcgtcaggcccacctgtaccgtggcatcttccctgtgctgtgcaaggacccagtccaggaggcctgggctgaggacgtggacctccgggtgaactttgccatgaatgttggcaaggcccgaggcttcttcaagaagggagatgtggtcattgtgctgaccggatggcgccctggctccggcttcaccaacaccatgcgtgttgttcctgtgccgtgatggaccccagagcccctcctccagcccctgtcccacccccttcccccagcccatccattaggccagcaacgcttgtagaactcactctgggctgtaacgtggcactggtaggttgggacaccagggaagaagatcaacgcctcactgaaacatggctgtgtttgcagcctgctctagtgggacagcccagagcctggctgcccatcatgtggccccacccaatcaagggaagaaggaggaatgctggactggaggcccctggagccagatggcaagagggtgacagcttcctttcctgtgtgtactctgtccagttcctttagaaaaaatggatgcccagaggactcccaaccctggcttggggtcaagaaacagccagcaagagttaggggccttagggcactgggctgttgttccattgaagccgactctggccctggcccttacttgcttctctagctctctaggcctctccagtttgcacctgtccccaccctccactcagctgtcctgcagcaaacactccaccctccaccttccattttcccccactactgcagcacctccaggcctgttgctatagagcctacctgtatgtcaataaacaacagctgaagcaccaaaaaaaaaaaaaa

SEQ ID NO: 18204 - DNA, 543 bp, Homo sapiens
  misc_feature (1)...(543): n = a,t,c or g
gcccctcnttgaccccccctacngaataccgttatgacatgattacgaatttaatacgactcactatagggaatttggccctcgaggccaagaattcggcacgagatgattcttctagcctaactttttaaagctgaagtttagaacttattttgggtttttctttgatgcatgaaaggatctggttgtagtttcccaccacacccagctaattttgtatttttagtagagatggggttttaccatattggccagactggtatcgaactcctgaccttgtgatccaccctccttgttctcccaaagtctgggattacaggcatgagccaccacaccccgcctgtagtttcttaaaatgactcatctctattcaaccagtcattgntgaaactcaggaaagagccacattttacaaaatataaaagacaatacgaagctgactttttttagtaatatatgttcttctataagagaaatgacaaaaacaaaatagtctgtcatgggttaataattttagagccttttctctcagtagcatgttta

SEQ ID NO: 18205 - DNA, 382 bp, Homo sapiens
gtatcgtttgtgctggttgtgaccagagagccgtttagtgtaaacatttgtttccaagcttatgtgatggggatactttctcctccttcatgtgggtcacaggtgggattggtgagtccttagcggagtcaggagatatctgaggcagtgctggtgttcatagtcacagactcctggagctgggtctggggtttatggctgacatctagatatctcttacttaactggctttgcttctgtgttttatttttttgtcattaggtgttatgctcccatggcacacaatataacatgtctagtaacattgcttgtgagtctttttcttgtataaaagcaaatagatgttgctctggtgtggaatatatattgactcaattttctt

SEQ ID NO: 18206 - DNA, 323 bp, Homo sapiens
ggggttacttccctgcttgggccaggaccaaattatttatcacattccacttgtcgggaaaattgcatctggttccattttacatatataattgcatagtaatctgtgactcatctatgagagagaaaatattgctatttgttcttttcagaaagaaaaaataaagcataaagaaacttgcatgcaatgctcagaagcaaggggagtttcgagttttgtagggcctgaagtctataatattttatcctttaacaataaaataactgtccgggcgcagtggctcatgcctgtaatcccagcactttgggaaccaaggcgggcgg

SEQ ID NO: 18207 - DNA, 322 bp, Homo sapiens
ggagactgcgtggggtacagttctgtatcagggtcatcatcatcgtcttggtccaaaaactgaacattagtatcgttcactagttcagtgatgatggggatgttgaccccagttgtgatggatggttgacgtaacatcccgtgcactgggctgttatctggagaggatctatccattcctggaggtgtgaacccttgggaattagcctgcaagactccgatgctgtcatcaaactgcatagatttgatgttgagtgacgccaagatgcattccttgtcctgcagcgaagtatcatcaatattattctgattggctgacagga

SEQ ID NO: 18208 - DNA, 459 bp, Homo sapiens
ggcgagaggagccggagacgagaccagaggccgaactcgggttctgacaagatggccgggctgccccgcaggatcatcaaagccgaaccagatgagagcaacgcccgttattttcatgtggtcattgctggccctcaggattccccctttgagggagggacttttaaacttgaactattccttccagaagaatacccaatggcagcccctaaagtacgtttcatgaccaaaatttatcatcctaatgtagacaagttgggaagaatatgtttagatattttgaaagataagtggtccccagcactgcagatccgcacagttctgctatcgatccaggccttgttaagtgctcccaatccagatgatccattagcaaatgatgtagcggagcagtggaagaccaacgaagcccaagccatagaaacagctagagcatggactaggctatatgccatgaat

SEQ ID NO: 18209 - DNA, 343 bp, Homo sapiens
  misc_feature (1)...(343): n = a,t,c or g
gttaacagcacttcctccttctaccctacttctcacctctgtaaaaggatattctttttctctaaatctttaagtatttcactattaagaatttctactttgatcatgtcaactcacattttataatctgtctaaatggcaaaaaattgatggccaaaccccaataaaagaagcaattagattttttaaactctcaccaattttttccaaacagcctacatacaaatggtacagcaacagaaaaaaaggttgaaaatcaaagacgattgtagatattctaacaatgaagaagtcntagaaaaagctaatttaggagaaaatatggagaagtcttgggcaagca

SEQ ID NO: 18210 - DNA, 463 bp, Homo sapiens
gattcagaaactcctggacaatattacaaccatccgtattactggtctttggcgctctagacttattttagaaagaaaaatgtggcaaatcatccaaaaattttcctgtgcacagcatagggatctgtttctcttaccatcagaaagggattcatagtcataatcatattcgtcctcctcatcttcctcttcctcattattggcaggtggggggttggcattcccaccattataagcctgcacttgcatagatgctaactgatgagcctgtaaaatagcaataattgtaaactgcagatgccaagttaatgaattcatttataacctttaaaactacccctgatgtttaacacaatcgttaaaagtggcttaacctattttgatacatttgggagaggagaaaaaaatctagattccctcgaaatgcaatgtcaacacttgggtgaacgttagcattcctacg

SEQ ID NO: 18211 - DNA, 349 bp, Homo sapiens
gggtgactttgttgtcctgtgtggacgaatgtgtaatataaagtgaccctcaaggaatctggagagggctgctttacagtatttgaagaacacagggctgtggaccctatcggttcccaaatgaaagctccccggggagcgtgtttttgccagtatggggaagtagggcggaggcataggaatgaccgcgagggtggctgctttcatagctccgcttgcgaaactcctgcccggcctttgacaccgccacggctttcagtaatctggaaaatccctagtttccaaaaatagtcttagggcaaggacttgacagaggtaatttgattatgcctgggagtctctattcata

SEQ ID NO: 18212 - DNA, 313 bp, Homo sapiens
  misc_feature (1)...(313): n = a,t,c or g
gccatataagaatccttagcattgtgattatacattagtctacactttctacatagttacaatgatgtataatttagcttttcataatacagtgtttcaatacatcattagttctgttaaacataagtcacttactttcaaatccaatacttgaacaggttcctctgtacatagtttagcagggctaattagcataagatgctatttattaagaggtatatgatctgagtattaacagntgctgaagtttggtatttttatgcagcattttctttttgctttgataacactacagaacccttaaggacactga

SEQ ID NO: 18213 - DNA, 401 bp, Homo sapiens
aaatcctaccctggcactcatgtatcctgttggtgatgagagaagaaggaaatgtgaaatgggtaatgcaaagggacttgagcaagagaagggtagtaactggcagtaacagaccttgggatgggacaagaccaggttaagggataagagggtacctgctatacctcagcaggtatcatggaaaacctttaaggaaataggctgagttgactgagaagctcagagacaagcgtgtggctagcgataacaatgactgtcaggtttgttcagacctagcttatctatagaaagctcgcttaggtcttttgtatctcactcagtaggaaatttccatcccagagacacagcttcagtataagagactggatagagttctactttaaagatggtagcatgaagaa

SEQ ID NO: 18214 - DNA, 329 bp, Homo sapiens
gaaaatggatgccagaaccattcattaaatcaagaaggtaacaggttggtgggggatgggagaaggtatggatctaagagttagctcacagcttcattcaatcattgagcaattactgatggggcacctcccctggccaggcatgttataggcatagggcaggcagcagtgaatggggcaggcagcagtgaataaggcagactgagtccctgcattcatggatctgctttcttatggagagagacagactaagcaaatgagaagaggtatctgtagtgtcttgagtggtgatggatgccatgggaaaaaaattaaaagggcagggagat

SEQ ID NO: 18215 - DNA, 367 bp, Homo sapiens
gtttaacaaagaacgtctattaaacacaaaaatatatgacaatatattgtacaaattacaagataaaggatttgtgagaaatattaaattcattgtgtataattattactactgtggtctgttaatgagacacaagtttaaagttgttttgaaggatgtcttctttcaatcctctctgtatagctctgtaactacttctgtaccctcagagatggtgtttcaacttaaaacttgtgaatgtgaaatatgagccaaaagactctctcggccctgaaatgacctttgtagcagatgctgccagaggccccctgttatcctccctggactctccagctaacctgatgtcaactgccagtgtgtgcatctc

SEQ ID NO: 18216 - DNA, 357 bp, Homo sapiens
ggggggtgagttttctactgaagaaagcatgtaaataagctttgaattttttatgtatacatcattaagtttctgggtaaacatctcaagcaaatttaccaagtagatacaaaacagcataaaaaggggttactcctgtagaaaaaaatgtatttgcacagcatagtaataagcctaggcttaatattatttactagcaatatttctgaccttcctcaagagaagaggatgttaaaatatttggggtttttgtcttaattataaagttagtacatagcacaaaacctatacatcctttcttccttgaaacataatgacacttcagtcacatattgggattgagcttcccctagaagc

SEQ ID NO: 18217 - DNA, 728 bp, Homo sapiens
  misc_feature (1)...(728): n = a,t,c or g
gagctagcaccatgaggccgaactcgggttctgacaagatggccgggctgccccgcaggatcatcaaggaaacccagcgtttgctggcagaaccagttcctggcatcaaagccgaaccagatgagagcaacgcccgttattttcatgtggtcattgctggccctcaggattccccctttgagggagggacttttaaacttgaactattccttccagaagaatacccaatggcagcccctaaagtacgtttcatgaccaaaatttatcatcctaatgtagacaagttgggaagaatatgtttagatattttgaaagataagtggtccccagcactgcagatccgcacagttctgctatcgatccaggccttgttaagtgctcccaatccagatgatccattagcaaatgatgtagcggagcagtggaagaccaacgaagcccaagccatagaaacagctagagcatggactaggctatatgccatgaataatatttaaattgatacgatcatcaagtgtgcatcacttctcctgttctgccaagacttcctcctctttgtttgcatttaatggacacagtcttagaaacattacagaataaaaaagcccagacatcctcagtcctttggtgataaatnnacattngcaaatcctaaaaaaaanaaaaaaaaaggcctttatttaagnggcgnagntttncctttnnggggggtaatttanctnggaagg

SEQ ID NO: 18218 - DNA, 443 bp, Homo sapiens
acgactttctatagggaatttggccctcgaggccaagaattcggcacgaggtcaagtgcagagtgagaaggggggaaagagtagaacaaggagtttgatcagccttggtttctttgaatcttgatttttgtcatccagtttattgtgctgattcaacaaagggccttgaagctaatgttggaatgttttcagacatataggaaatgataattcatcaaaagtcatggagactatattccaaaagttttatgcagatataactcagctgttgaggtatatgagttaataccactataaattgacatggccaggaaagactgaagtccattgccagcttgctttgtgttgaacattactccaaaagagattaaattttaaggcatattgtgtcaacataaaggcaaaagagctggctaattcttctcaagaaatcaattaatggg

SEQ ID NO: 18219 - DNA, 362 bp, Homo sapiens
  misc_feature (1)...(362): n = a,t,c or g
gcaaagtatggtatgattgcttatataattagtcagtaagaatattcttcggctgggattacaggcttgagccaccgcgctcggccaataaactttactgaggcttaattaacatacagttaaatgcacacatatgaagcatagagtttgagttttggcaaaagtatacatccatttaaccaccaccccagtcaagatacagacagttccatcactttttctttttttcctgacacagagtctcactttgtcacctaggctggagtgcggcggtgagatcttggctcactacagccttgactcccgggtacaagcaatcctcctacctcagtccccaagtagccaggactgnaggcctgctc

SEQ ID NO: 18220 - DNA, 354 bp, Homo sapiens
gtcactctttcttctttctttccctcgccttttttcccctcctccctccatctttttccttttcttttcttctcttccttttccttctctccaatcttggaaaaataatgccaatcattattcactaaattgattttgtgaccacagcttgaaaaacactatcctaaactttaatggatatttgccattcatatttcctcttgagtcagctcctttgattctctggacaaactttttggccttggtctgtatgctctggaggatttctggccacctattacttgcagacagttgttttgttattggtcttcaggctattttgaggactttgtcttctgatgaattcttctgctg

SEQ ID NO: 18221 - DNA, 438 bp, Homo sapiens
gtagcacttggagttctgctgagcccaaagggcagggccaacattagggagcccagcaggaggtgctgtgctgagaagacttcctggaggtgtttgttgaacatatctgcagagccttcccagactcctgcaaatccaacccatatcaggctgtaagtcagagcaggcaatgcagaagaggagaccagactctggcactgcaatctgcactcctgctgcaagacctctgcgagcctcctgctccttggcttctgtctgctcatcagtggaatggagggctggaggagaatggtttctgaggtctctgttctctattgtaatgtcactcaaacattataaaaggaaatgcagggaaaaaaagagaacagcaaggtttttattcctctgaccttgagtgacagcacaaaagaagccaccagctccagtcccttttctaca

SEQ ID NO: 18222 - DNA, 92 bp, Homo sapiens
ggaaagtacattagtggttctgaggggaagtagggggagaaggaaatgaacaatgtctcctaataggtgtagggcttcttttggggggtgat

SEQ ID NO: 18223 - DNA, 391 bp, Homo sapiens
ttattagagtgttaatggattattgtgttttaggtgacatagttaactgtaaagtaacctgactcagtatagttactggtaccacagtgaggtgaataaaacgggattttcagaagttagcctgaatttaactgtatttttaaatttaacctccattaactaagcatcttttctttgtggtagggtctaccttctgcttccctggaaaggatgaatttacatcatttgacaagcctattttcaagttatttgttgtttgtttgcttgtttttgtttttgcagctaaaataaaaatttcaaatacaattttagttcttacaagataatgtcttaattttgtaccaattcaggtagaagtagaggcctaccttgaattaagggttatactcag

SEQ ID NO: 18224 - DNA, 516 bp, Homo sapiens
  misc_feature (1)...(516): n = a,t,c or g
accagntatnacatgattacgaatttaatacgactcactatagggaatttggccctcgaggccaagaattcggcacgagcggacagcaaacaacactttgaatggcttgtcaaatactctccattgcataatgtgaagttaccagaagcagatgacatccagtacccgtccatgctgctcctcactgctgaccatgatgaccgcgtggtcccgcttcactccctgaagttcattgccacccttcagtacatcgtgggccgcagcaggaagcaaagcaaccccctgcttatccacgtggacaccaaggcgggccacggggcggggaagcccacagccaaagtgatagaggaagtctcagacatgtttgcgttcatcgcgcggtgcctgaacatcgactggattccataaacagttttcgtgcttcctcctgacagcgacagaaaacctcaagggctttccacgttgacaccaagaaaccactgggcataatgcttcccacgggaacattattctggc

SEQ ID NO: 18225 - DNA, 530 bp, Homo sapiens
  misc_feature (1)...(530): n = a,t,c or g
cttttganttccgctancacatgattacgaatttaatacgactcactatagggaatttggccctcgaggccaagaattcggcacgagctggaatattctgtccctctcagggctgcatttgatatgcactttaaatgtattttgcctataatttaaaagataggatggggctgggcactgtggctcacacctgtaatcccaacactttgggtggccacagaaggcagatcgcttgaggtcaggagtacgaaaacaacctggccaagatggtgaaatcccatctccaataaaaatacaaaaattagtcaagtatggtggcaggcacttgtaatcacagctacttgggaggctgtggcacaagaatcgcttgaacccgggaggaggaggtttcagagagccgagattgcgccactgccctgcagcctgggtaacaaaggaagactctgtctcaaaataaataaataaataagatagcaggatgggtgcagtggctcacacctataattccagcactttgggaggccaagggg

SEQ ID NO: 18226 - DNA, 437 bp, Homo sapiens
tttgaataccgttatgacatgattacgaatttaatacgactcactatagggaatttggccctcgaggccaagaattcggcacgagtggcctgcagagcctgctgggaaacatgagccacagccagctcatgcagctcatcggaccagccggcctcggaggactgggtgggctgggggccctgactggacctggcctggccagcttactggggagcagtgggcctccagggagcagctcctcctccagctcccggagccagtcggcagcggtcaccccgtcatccaccacctcttccacccgtgccaccccagccccttctgctccagcagctgcctcagcaactagcccgagccccgcgcccagttccgggaatggagccagcacagcagccagcccgacccagcccatccagctgagcgacctccagagcatcctg

SEQ ID NO: 18227 - DNA, 371 bp, Homo sapiens
tcaaggtctacatgttcaagtgcgtgtggcggtgctacagattgatcaagtgcatgaactcggtggaggagaagaaaaactccaagatgctccagaaggtggtcctgccgtcctacgaggaagccctgtctttgccatcgaagaccccagaggggggcccagcaccacccccatactcagaggtgtgaccctcgccaggccccagccccagtgctgggaggggtggagctgcctcataatctgcttttttgctttggtggcccctgtggcctgggtgggccctcccgcccctccctggcaggacaatctgcttgtgtctccctcgctggcctgctcctcctgcagggcctgtgagctgctcacaactgggt

SEQ ID NO: 18228 - DNA, 551 bp, Homo sapiens
  misc_feature (1)...(551): n = a,t,c or g
gaacccactgatctacacagggaacccggtttctgaggttaagaacctggtatgagggatagataatcccgggggggcggtcgtatcaggccgaaagtcgttcgaggacataacggcggagcgagataggaatagttttcgtggaaggtttcaggcgaggtcgagactagaggttcttcaggatcaaacagagttcctattttatagtgggagggtatttcgacgggtatagttaccggtattcgtcctggtcatcggtcgggagctctacttcctacccatccttccgttcattcgcgtaatgtttagactattacgtcgtagacgccggtatcgtcggcaaggagttaggcgcggcgggtaagagcgacgccaaaaagagcagttaggttccggctggtactcgcttcggggttttaaagttcggaacgggaggagcaggttaacggattacgcgccctttagggcttttacgaggggttagaaagtagtttaattcgaacgacccctctcntattacctcttcccctagggncacggtctccccggta

SEQ ID NO: 18229 - DNA, 414 bp, Homo sapiens
  misc_feature (1)...(414): n = a,t,c or g
gaaccccaagctgtatcataaagctggacaacaaagacagctccctggggtccactgtaatggaccaaggtctgtgcgtccttcctttccacatccccctaaagttgacaacagtagtacatggcacgatggatgttgtcttggcagggagcttataactcagcttatgccaaatccaggagggcaggtcagtccttgaggatgggcaacagggaccgaggagggcccttggcgtcccccaacctttgtttttctcaccccggggataaggctcaaaggctgtgccagggaaaggcccactttgggcctactcacagcatcgatattgccactttccanaggnggtgaactgattccctagcaaccaggggccctgcctgagtaggtcacagcatgtcatcggtcctcaggaaa

SEQ ID NO: 18230 - DNA, 360 bp, Homo sapiens
gctagatatgcccagttctacaaatcagacagcagcaatggacactcttaatgtttctatgtcagctgccatggcaggccttaacacacacacctctgctgttccgcagactgcagtgaaacaattccagggcatgcccccttgcacatacacaatgccaagtcagtttcttccacaacaggccacttactttcccccgtcaccaccaagctcatagcctggaagtccagatagacaagcagagatgctccagaatttaaccccacctccatcctatgctgctacaattgcttctaaactggcaattcacaatccaaatttacccaccaccctgccagttaactcacaaaacatccaacc

SEQ ID NO: 18231 - DNA, 506 bp, Homo sapiens
  misc_feature (1)...(506): n = a,t,c or g
naacngctatgttgngattncgaatttaatacgactcactatagggaatttggccctcgaggccaagaattcggcacgagcggcacgagaaactttgaaagccaaggtggggcagctgcagctctcccacaatctgagtttggtgatcctggtaccccagaacctgaaacatcgtcttgaagacatggaacaggctctcagcccttctgttttcaaggccatcatggagaaactggagatgtccaagttccagcccactctcctaacactaccccgcatcaaagtgacgaccagccaggatatgctctcaatcatggagaaattggaattcttcgatttttcttatgaccttaacctgtgtgggctgacagaggacccagatcttcaggtttctgcgatgcagcaccagacagtgctggaactgacagaaactggggtggaagcggctgaacctccgcatctctgtggccgnaccctgntgggctttgaagtgcaanaagccttct

SEQ ID NO: 18232 - DNA, 336 bp, Homo sapiens
  misc_feature (1)...(336): n = a,t,c or g
ggagaggtcctgcatgcccctgggcacaacaaggactgattcaatctgcatgccagcctggaggaggaaagggagcctgctctccctccccacaccccacccaaagcatacaccgctgagctcaactgccagggaaggctaaggaaatggggatttgagcacaacaggaaagcctgggagggttgttgggatgcaaggaggtgatgaaaaggagacagggggaaaaataatccatagtcagcagaaaacaacagcagtgagccagaggagcacaggcgggcaggtcactgcagagactgatggaagttanagaggtggaggaggccagctcgctcc

SEQ ID NO: 18233 - DNA, 464 bp, Homo sapiens
  misc_feature (1)...(464): n = a,t,c or g
ggtcaagtaaagcttatctttgctgcccatgcattgctggaagctccagatgtccatcatcgtgtgctttctctcttgcccagccgtgagcctgaggttctatttgtttgcttgtttttgttgttattgttggttttggtggcgacagtggtgtattattttgttttttctaacaacaccagtaagaaggtacattttcctcatttaaaaagtcaactaagatagaaaaagctagagtatcccttaatactactcccaatttaagaattttgtttttagaactcattctatcagaataggagaattttcaaagcctttcctgagtgtgatgctgggaaccagctggattgtgatggaatttctaaattcaagtgtctactatgggaganaaccgtgttcactagtaagggaaaggggaaagaagtctttgaatgggattcnttaaaaattttncatcgaaaaaa

SEQ ID NO: 18234 - DNA, 410 bp, Homo sapiens
  misc_feature (1)...(410): n = a,t,c or g
cacagccaaggttcttaggttgctataccaatggcttattaaatgaaaatggcactaaaagttccttgagattctttatactctctgccttcagcaatcaattccattcatacatcagcactctgctggttctgtttgaaatatgttctgtatttaaaactcaaatcttgttggatctctgcagggcttgtgaccaatgaagtcatatttgctgatggttgacaaagcttgcttcactccatcagagaatgactatcaatttttttttaactggcctatcacgtcctctcctgtcacccattttgaagagtggcagaacttgaaggtcaacttcctctgtaaatatccaagtataaagcccaggaacttccanaataacccanatgcgctttaattttttttaatatgct

SEQ ID NO: 18235 - DNA, 293 bp, Homo sapiens
ctttccacccctacacactgcctttccaatgttctcgatccagtacattcgaaatcctatgctgagctttcatagagtgaaagcgaggcttgaaacaagctggacaccatgaattaggtggataaggaattgagcagtgcccacatatggctagtgctgtgatccacggacgttattttgattttctcatgtttgcttttctcttctttaaagtgggaagaatgctagctccccaccagggtgcttgtgaggagggactggatcaccaggagggcagtcagctagtgcctagt

SEQ ID NO: 18236 - DNA, 351 bp, Homo sapiens
  misc_feature (1)...(351): n = a,t,c or g
aggagatatacctaatgttaaatgacgagttaatgggtgcagcacaccaacatggcacatgtatatatatgtaacagacctgcgtattgtgcacatgtaccataaaacttaaagtataataaaaaaaggaaaaaaaaaagaaatttaacatgcattcttgaatctaaaattaattaattttttatagctaatacagggaacttagcatatcagctttgatcaccatactttgacctatatatgctatggttgacatgtattttagttatattttttannatcctantnntntagtataantgtacntnctcngcttcnantnnnaatnnnntncnnatttnncttantttt

SEQ ID NO: 18237 - DNA, 371 bp, Homo sapiens
ggaacaagaaaggggccagctagttcccttaagctctctcctaaagcactaatctatccctggggcctctgccctcaaggcctgatcacctcctaaaggccctatctcttaacactgttgctttggggattaatttcagtatgatttttttggaggagacaaaaacattcaaaccatggcagggggcactcacagacctgttttgggtttcgttgtgagttgggtatgtgggcaggcagaagggccatgtgaacaggatgtaccaggaggtagtaacagctagataggggactgaggtgcagttactggatacttctgaccgtgtccctcacctgcatcatgccgaggttgagcatgaatgtcttccactt

SEQ ID NO: 18238 - DNA, 335 bp, Homo sapiens
ccacaattcctcacttctttagtcttctatgccttcaaacacatattttcttatattgtccagcttttttagctgtttttgacgggaaggctgttccaacccatctggtttcctactgctggttatctcaaaggcccttgcttctaaatcgtatgcacatgaaagctgtggcagcagaatctgtcttgctcaagcttatttaatatttcattttgaccctgtaccaatatgataaaatttatataaagttattttaaaacctttctgcaaatcatattcttgtaaactgttgacaataaatacctttcactaaattacattaaaatacaggggaa

SEQ ID NO: 18239 - DNA, 526 bp, Homo sapiens
  misc_feature (1)...(526): n = a,t,c or g
ccnttgganganccagctatgacatgattacgaatttaatacgactcactatagggaatttggccctcgaggccaagaattcggcacgagcggcacgagaactggagaaattggaattcttcgatttttcttatgaccttaacctgtgtgggctgacagaggacccagatcttcaggtttctgcgatgcagcaccagacagtgctggaactgacagagactggggtggaggcggctgcagcctccgccatctctgtggcccgcaccctgctggtctttgaagtgcagcagcccttcctcttcatgctctgggaccagcagcacaagttccctgtcttcatggggcgagtatatgaccccagggcctgagaacctgcaggatcaggttagggcgagcgctacctctccagcctcagctctcagttgcagccctgctgctgctgnctgacttgcccctgcactctgcttaggggtccgtatccaccaaaanggctccttaaggtctggcaaggacctgctctattacc

SEQ ID NO: 18240 - DNA, 300 bp, Homo sapiens
ctggagatagggcctgggaaactgtcttactctgttttccaagcaatacttacgtgcattagtatttgattaccatattttagagtacttatggtaatccacatggagttaccaggtagggctcaggtaactaagccacatctgtggtgaggccatagtgccccatcaagaaaacattgcactgttcctttcatcgcttttcaatctaacggaactagggtctttgggcagtttctcctcagccagaaaattgtgcctaaggaattagatggcaaaaacaaagtttcaagacattggagg

SEQ ID NO: 18241 - DNA, 327 bp, Homo sapiens
tgagtggatagattatcatctttctccttagtccatattactcaactgtttctcttcttctgaatgaagacttttatatattaaagatatttctctaatgtaggagcattcatacatgcctaagcttacagagccgctcactgaagacaagatgttgcatgccctagtttggcagagtccaagtagaagtaaggacaggggactggagtgagcctatgcaatctttcctgccccacttctattcctaccccaaatggtctgaaatgctgtaacaggaggtcaattgggtgaagaaggaaagcacataaggaacataggcttgtgttt

SEQ ID NO: 18242 - DNA, 183 bp, Homo sapiens
gaaagtttttacataaaatcccagggactgagaggattcagtcaagccacttaagaggtagagctaggttatcctcaggagttctgaatggaactcaaaactagcttctgtcctaagcatcaagttttcaatctattaaatgtatcagtgattgacacaggatgatgtaacatagcaaagtgg

SEQ ID NO: 18243 - DNA, 329 bp, Homo sapiens
gacggaaccgcctggatgcagaactgcagctgagtgcccgcctcatccagcaggaggtgggccgggctcgggagcaaggggaggcagagcggcagcagctgagcaaggtggcccagcagctggagcaggagctgcagcagacccaggagtccctggctagcttggggctgcagctggaggtagcacgccagggccagcaggagagcacagaggaggctgccagtctgcggcaggagctgacccagcagcaggaactctacgggcaagccctgcaagaaaaggtggctgaagtggaaactcggctgcgggagcaactctcagacacagag

SEQ ID NO: 18244 - DNA, 429 bp, Homo sapiens
  misc_feature (1)...(429): n = a,t,c or g
tttgaanaccgttntgactgattacgaatttaatacgactcactatagggaatttggccctcgaggccaagaattcggcacgagcggcacgagggagctgcagcagacccaggagtccctggctagcttggggctgcagctggaggtagcacgccagggccagcaggagagcacagaggaggctgccagtctgcggcaggagctgacccagcagcaggaactctacgggcaaggtgtcgagagggaaatgggtgcttcccttggagggtggggtgggaactgcgaatcaaagctcctgctgatatgccccgtctgcactttcaccccagccctgcaagaaaaggtggctgaagtggaaactcggctgcgggagcaactctcagacacagagaggaggctgaacgaggctcggagggagcatgccaaggc

SEQ ID NO: 18245 - DNA, 472 bp, Homo sapiens
  misc_feature (1)...(472): n = a,t,c or g
ttgtncctncnntntgancctacagctatgacatgattacgaatttaatacgactcactatagggaatttggccctcgaggccaagaattcggcacgagcaggttagaagcacaagagcaagaaattaattttattgattgattgagacagggtctctctctgtcactcaggctggagtacagtggcacgatcatagctcactgcagccttgacctcctgggctcaagcgatcctcctacctcagcctcttgagtagcttggagtacaaacaggagccatatcttcaagctcaggagatcacgcttagtgaattggtgtttagttagtgctgctgtgtttttttttgtgtgagtgtctcgcctggtggaaatccatgcattccatgactctatgattgtccactgtgctggaaatacggtagtgggcatactcacagagccctgcttctgcagccctcacgtcccagtggag

SEQ ID NO: 18246 - DNA, 913 bp, Homo sapiens
ggcctctcggaccctgtacagcagcagccccagagtcctaagcaacaacagtgacgccaacttggagctcatcaacacctgggtggccaagaacaccaacaacaagatcagccggctgctagacagtctgccctccgatacccgccttgtcctcctcaatgctatctacctgagtgccaagtggaagacaacatttgatcccaagaaaaccagaatgggaaccctttcacttcaaaaactcagttataaaagtgcccatgatgaatagcaagaagtaccctgtggcccatttcattgaccaaactttgaaagccaaggtggggcagctgcagctctcccacaatctgagtttggtgatcctggtaccccagaacctgaaacatcgtcttgaagacatggaacaggctctcagcccttctgttttcaaggccatcatggagaaactggagatgtccaagttccagcccactctcctaacactaccccgcatcaaagtgacgaccagccaggatatgctctcaatcatggagaaattggaattcttcgatttttcttatgaccttaacctgtgtgggctgacagaggacccagatcttcaggtttctgcgatgcagcaccagacagtgctggaactgacagagactggggtggaggcggctgcagcctccgccatctctgtggcccgcaccctgctggtctttgaagtgcagcagcccttcctcttcatgctctgggaccagcagcacaagttccctgtcttcatggggcgagtatatgaccccagggcctgagacctgcaggatcaggttagggcgagcgctacctctccagcctcagctctcagttgcagccctgctgctgcctgcctggacttggcccctgccacctcctgcctcaggtgtccgctatccac

SEQ ID NO: 18247 - DNA, 526 bp, Homo sapiens
tttgacccctttgaaacccttgctatgacatgattacgaatttaatacgactcactatagggaatttggccctcgaggccaagaattcggcacgagggggcagacccaaaaaactggagaaggaggaagaggagggcatctcgcaggagtcctcggaggaggagcagtgacccatgcgtgccgcctgctcctcactggaggagcagcttccttctgggactggacagctttgctccgctcccaccgcccccgccccttccccaggcccaccatcaccaccgcctctggccgccacccccatcttccacctgtgccctcaccaccacactacacagcacaccagccgctgcagggctcccatgggctgagtggggagcagttttcccctggcctcagttcccagctccccccgcccacccacgcatacacacatgccctcctggacaaggctaacatcccacttagccgtaccctgcacctgctgcgtccccactcccttggtggtggggacattgctctctgggct

SEQ ID NO: 18248 - DNA, 214 bp, Homo sapiens
gtgatgctatgttgtcgttacaacatcaaagtgattttacggtttttgatgggattattcaagtgtcagaattaactgttcaaaatgttctgaatcatgtagatacatggcaggtaactgtttatgggagaaaagtacagtgctgttacgtggcactgtacagtcatgtgccacgtaacagcgtctgggcagtgacggacacttacctgacagc

SEQ ID NO: 18249 - DNA, 482 bp, Homo sapiens
  misc_feature (1)...(482): n = a,t,c or g
ttgaanactttgagaccngttatgacatgantacgaatttaatacgactcactatagggaatttggccctcgaggccaagaattcggcacgagccctgcttctttctctttaattccagaactctaatgctaccaagctactagacaaggagatatctgactggcatctcaaacttataacatgtctaaagccaaacaacacaaccctgaattctcaccaccattacccttgccatgaccttccccatgtcagtcaagggcaaccccacgctatgatggctcctcctcgcacatcccacatctcgtccatcagcaaaccctcttaggtgtaccttcatcatggatgcagaaccaaggcctttcacttgctctcctctacccctcgaaatgctctgctcctcaggtatctccacatctttctctcttcctcttcaggtctntgctcangtgtcaacagaggctntccctgtccaccacatacg

SEQ ID NO: 18250 - DNA, 397 bp, Homo sapiens
  misc_feature (1)...(397): n = a,t,c or g
gtttgtgtctccctttgtcactcaaccaggctgcagtagaggtgcagtggtgtgaacatggctcactgtagccccaacctcctagactcaaacaatcgtctggcctcagcctcctaagtagctggaactaccagcgcatgccaccatgcctggctaatttttgtactttctgcagagacaaggttttccgatgttgcccaagctagtctccaactcctgagctcaggtgatgctcctgccttggcctctcaaagtgctgggattacaggctgagccaccatgcccagccaacagtttcaaacatacacaaagtagaaagattatgtagctctatgtagccatcacctagtttcaacagttatcantataatctttcatctttaccaaccaccccacg

SEQ ID NO: 18251 - DNA, 307 bp, Homo sapiens
gttggttggtgctgaaaatatagatttaggaatcatcgccatgcagatactattgaaacaggattggattcccaaagacagactatagataaacaggaggtcggcagggcacggtggctcatgcctgtaatcctagcactttgggagaccaaggcgggtggatcacaaggtcaggagatcgagaacatcctggccaacacggcgaaaccccatctctactaaaaatacaaaaatgggccggacttggtggcatgtgcctgagcagtcccagccactcgggatgccgaggcacaagaatcgcccgaac

SEQ ID NO: 18252 - DNA, 368 bp, Homo sapiens
ctgctgtctgccctctctggtcaccctgcctagctagaggatctgtgaccccagccatgaggaccctcgccatccttgctgccattctcctggtggccctgcaggcccaggctgagccactccaggcaagagctgatgaggttgctgcagccccggagcagattgcagcggacatcccagaagtggttgtttcccttgcatgggacgaaagcttggctccaaagcatccaggctcaaggaaaaacatggactgctagtcgacgcggccgcgaattccagatctatgaatcgtagatactgaaaaaccccgcaagttcacttcaactgtgcatcgtgcaccatctcaatttctttcatttatacatcgg

SEQ ID NO: 18253 - DNA, 414 bp, Homo sapiens
gggcaggtgtggattccgccggtgaaggctgaaggcagctaccttaaagatgccgggatccgcagcgaagggctcggagttgtcagagaggatcgagagcttcgtggagaccctgaagcggggtggtgggccgcgcagctccgaggaaatggctcgggagaccctagggttgctgcgccagatcatcacggaccaccgctggagcaacgcgggggagctgatggagctgatccgcagagagggcaggaggatgacggccgctcagccctccgagaccaccgtggcaacattggtgccggagagtgctcaagattattccgggaggagtatggcagactccatggacgcagcgacgagagtgatcagcaggagtccctgccaaactgttgacatccggaggcctaaaccaggatt

SEQ ID NO: 18254 - DNA, 388 bp, Homo sapiens
aatttggccctcgaggccaagaattcggcacgagattacaggcgtgaaccaccattcccagcctccttttgattagtatttgcataatatatatccttctccatcctttttcttctctgtttatatttgaagtgggattcttgtagatggcatatacttaggtcttccttttttactgagctacatgccttttaaatggtttagatcagggattggcaaactatggcacaagtagaaatttttaattttacatttatatatttaattttcaattgtcttcatttccttatataaatccatgttttaatctattatatttctgcctcaaaaactcttttttacatttcttagaaaatagatcttctggcaatgaattccctctagtttt

SEQ ID NO: 18255 - DNA, 417 bp, Homo sapiens
  misc_feature (1)...(417): n = a,t,c or g
ggacaacagccaggttttctacaccaactgcagctgcggggtggagggcaaccccgtgctggcaggatcctgcgactcaacgtgcagccatctggtggtgcccttcctgctcctggtcagcctgggctcggccctggcctgtctcacccacacaccctccttcatgctcatcctaagaggagtgaagaaagaagacaagactttggctgtgggcatccagttcatgttcctgaggattttggcctggatgcccagccccgtgatccacggcagtagccatcgacaccacctgtgtgcactgggccctgagctgtgggcgtcaagctgtctgtcgctactacaataatgacctgctccgaaaccggttcatcggcctccagttcttcttcaaaacaggtctgngactgcttcgcctta

SEQ ID NO: 18256 - DNA, 452 bp, Homo sapiens
  misc_feature (1)...(452): n = a,t,c or g
cttntatgaccngattacgaatttaatacgactcactatagggaatttggccctcgaggccaagaattcggcacgagtcgaaactgactttcagccctttcattgcacttgtgactccgggggacacgtgctgatttcctggttctatcctaacggtgcctgcccttttctgtttactccatgtcagtgcaggcattgataagaattctagtcggtggggtggtgaagacatcaagagaccttaacctggggtttccttgctgtatcttaaacttttgaccaccattcttacatttgctgtgatcagtttgtagtctttatgtgtaatactttttctccccaccttcctggggggaaaattccacatgtaaaggatttggcaaattggtgataagaccaaacagccttaggggacntgagaagtcttntgagcnttgtanancngctgggga

SEQ ID NO: 18257 - DNA, 304 bp, Homo sapiens
  misc_feature (1)...(304): n = a,t,c or g
ggtgagttgtctttggataacccctcctttcccagacaggagaaaggacaggaactgaagcagaggttgggctgtggcttgacccctggatgagtgctctattcatggagcaaatgtaattctaatcatggaagaattcttaagttagatatgagtgaagcctgacagtaaaaagcctacttgcttgctgttcctccagggtggagccctcattctgaagtcactgtgcatcctagctgtttcctagggttctgtgtactcaaggctccatggcatttanagggttgggattcccanaaacttt

SEQ ID NO: 18258 - DNA, 384 bp, Homo sapiens
  misc_feature (1)...(384): n = a,t,c or g
ggtattcagagagtgtttgtagttcatggtttttccctacctgcccggttcctttcctgaggacccggcagaaatgcagaaccatccatggactgtgattctgaggctgctgagactgaacatgttcacattgacagaaaaacaagctgctctttataatatgcaccttttaaaaaattagaatattttactgggaagacgtgtaactctttgggttattactgtctttacttctaaagaagttagcttgaactgaggagtaaaagtgtgtacatatataatatacccttacattatgtatgagggatttttttaaattatattgaaatgctgccctagaagtacaataggaaggctaaataataataacctgntttctgggtg

SEQ ID NO: 18259 - DNA, 401 bp, Homo sapiens
ggaatacttagatacgtactataatttgaccattaaaacactaatgggcatgaactgggttgcaacatactgtccacatattccatatgttatgaaaactgacagtgacatgtttgtcaacactgaatatttaatcaataagttactgaagccagatctgcctcccagacataactatttcactggttacctaatgcgaggatatgcacccaatcgaaacaaagatagcaagtggtacatgccaccagacctctacccaagtgagcgttatcctgtcttctgttctggaactggttatgttttttctggagatctggcagaaaagatttttaaagtttctttaggtatccgccgtttgcacttggaagatgtatatgtagggatctgtcttgccaagctgg

SEQ ID NO: 18260 - DNA, 348 bp, Homo sapiens
gtttgaaccaagcatgatgttatcaagcacaaagcacgtggcaaaggaaagatgctcccatctcattctgaaaacaaatactgataaccaagcccaccctccaaccctttggggccaacccattttatgctgctgggaccaacttcaaacaatagaggtatatttaggtttccctctctcttacttctgtgaaagatcattttagaataaatgtattccattcctatgggagaggcaaaacagtatttatccccatcagaatatatggggaaagaaaaaacataggcctagaggtggtaaggtgtgtaacagtccatagcccattacgtcgacgcggccgcgaattcc

SEQ ID NO: 18261 - DNA, 429 bp, Homo sapiens
attggaacaccttgactgattacgaatttaatacgactcctatagggaatttggccctcgaggccaagaattcggcacgaggatcaatgagagtctatattaagcttttactagaaattgtatcccaagatccaggtagccaatggcatgccattgggacagatgtatatatctgtgtgttttataagtgtgttttgtaatctccatcatgaattattttctgaagtgatctttaagaaatttgttacatagtgggaacatttagtgccaaaatgttttaaatgtatttataacttctatatacatccaaaactagtgtcattaagtaatatcaggctaatgtgtcttctgcaaacagtattttgttcaaaaataggcagccagtcataacataaagagctttataatgatttaaatataaagtagtac

SEQ ID NO: 18262 - DNA, 307 bp, Homo sapiens
caggcatgagccactgtgcctggccttaattttgcttttcaaaatctcatccaggtgttattttttttttctcagaagatttctttgactttgccagataatgttagtttttccctccatccttctaccttgtttgttactaatacttttgtatctgtcacccattgctggtcatagggcttggcatatgatgggtgctcagtaaataaatctttgttaaacaaatgaatttcctagatagcctgaagtgctctcttgagtagcccaagtacttattcctcccccgcttttttttaatgctttcatc

SEQ ID NO: 18263 - DNA, 354 bp, Homo sapiens
gactctgtgttggaatcaggttcaagttccccattctctgcaggtctttctcccttagagctatctccctactcctaccttaccttcctattatgatttggcagtgaatcctgtatcacctggctgacagatcttaatgatgaccctgccatttagcaactaagcctcctaccatgtgccaggcatcatacaaggtcattgccctaacttcattttatccttacagcagcctgaaaaggtaaggggagccaggcccagtgagattaagtgacttcattaaagtcccactcataacaatcggggtcaggaatggtgtgagctctgtttgaccccaaacctctgaacacggatgct

SEQ ID NO: 18264 - DNA, 468 bp, Homo sapiens
  misc_feature (1)...(468): n = a,t,c or g
gactttgtctatccatactccaaaaagcttctggttcatctctaatttgatattgtagtgtaatatcaaattacactacaaacccagaagagaggtgttttccggtagatgctggaggttaaggaagctgattcaatctatgcgtgtaactgcactgttacaataagatacactggccgggcatggtggtccacacctgtaatcccagcactttgggaggccaagatgggtggatcacgaggttagtagttcgagaccagcctgattaaatggtgaagtcctgtctctactaaaaatacaaaaattagccaggtgtggtggcacatgcctgtaatcctaacttctcaggaggctgaggcaggaaaattgcttgaactcaggaggtggaagttgcagtgagttgagatcatgccactgcattccagcccgggtgaaaaanccaaaancctnccccaaaaaaaaaaaaaa

SEQ ID NO: 18265 - DNA, 378 bp, Homo sapiens
ggcgtggatatataaaacagtacaacttggcaactactttcaggcagaggacagcaggaagcaaaagactgatccctaagtgtaaggaaacttgtgagatgagccccaaagtcacctagttcctctacctggggatcgtttcccaactgcagtgcacagagctggagtctgagcacagtagggagatcccgctgggctgaagaggcagagatgaggaggcagagatcaggctgagacagctgaaatggcagagaaatggggcagaaaaaagaaaggagggcactatgcaaagagggagttctagaaatctatgcatgacgcaaacccacggctgaaggctggagtgatgggtaatttcatgtgtcaacttgaagggac

SEQ ID NO: 18266 - DNA, 382 bp, Homo sapiens
  misc_feature (1)...(382): n = a,t,c or g
gccaaaaagaatgatattcgacccagtgatctttggcaaaggtcctttccagctaaaaatttctgtggttctatgagatctgagatggatgcttaggttaggagtcagtgattatcttagtctgttaaggctactataaggatataattgcctgggtggtttataaaccagtcatttatttctggaagttctggaggatggaggtccccatgattaagggaccagcagattccacatctggtgaaggctgacctcctggatgtcttctccctgtgtcctcatttggcagaagaagggagagggagctgtctggggtctcttttataagggctgctgaccccaggaagaaccctcattgacctaatcacctcccanaggcccc

SEQ ID NO: 18267 - DNA, 320 bp, Homo sapiens
gcttcagtgaacatatatctggtattgagttgttaaaaaaggagtttgacatctgaagttaagaaccaggagtgttataatgaatatgttactaagtgtctcatgagaatgccttgaaaataaataagtgcaattttaaaataagattctcattttcttaatggaaaatctttttgcatttcttttgtacatgttctattaagatattcacataccataaaatttacttttttgaagggtacagttcattggattttagtacacatttgcaggttatgcagtataaccactacctgattccagaacattttcatcaccac

SEQ ID NO: 18268 - DNA, 309 bp, Homo sapiens
cagacactatcagaaacttctttggtgtttaccaaagagctacttaataagctgaaaagatttcataagctatgttgtcacaatcgcaatgtagagcttatgtcaaagttgtgctgaaatcaacgtcatttgctgaattactgttgttaataagtcttccttcaaaaagctccctcctaattctggcctgagtctcaggctttaataaaagttcctttatctgtttcactttggacttcagacccatcgtttctcgatgcaaagcttcattaattaagtctcgaattccaataggtttcttgccaatca

SEQ ID NO: 18269 - DNA, 466 bp, Homo sapiens
  misc_feature (1)...(466): n = a,t,c or g
ctttgaatatntggatgcccnattacgaatttaatacgactcactatagggaatttggccctcgaggccaagaattcggcacgagcagcttccatcctggcttcaattcctactctattcatgactcaataacttatgtaatagtaacggcatctaacatttactgagcagttagtatagtacttgtgccaggcactttgctaacttttgtacctgccttgtctcacccaattcataccaaatactcttctgagaattaccatcttcattctaaaatgaagaagtgtgtgctcagtaagaccccaaattttgtctaatcccgtggcagaactttgattgaacccattgtctatttgactttgaagctgttgttataacgactatatttcattatcttctaaacctctaactcagatctccttggttttagactgacatccaactacccactggatgtagctcaggg

SEQ ID NO: 18270 - DNA, 353 bp, Homo sapiens
gtcctctcctgcagcacacggaccctgactactcggctgcctatgtcgtcatagaaactgatgcagaagatggaatcaaggggtgtggaattaccttcactctgggaaaaggcactgaagttgttgtctgtgctgtgaatgccctcgcccaccatgtgctcaacaaggacctcaaggacattgttggtgacttcagaggcttctataggcagctcacaagtgatgggcagctcagatggattggtccagaaaagggcgtggtgcacctggcgacagcggccgtcctaaacgcggtgtgggacttgtgggccaagcaggagggaaagcctgtctggaagttacttgtggacatg

SEQ ID NO: 18271 - DNA, 372 bp, Homo sapiens
gaaattcctaaaagtgaaaactgaattaaaaggcacgtgcgtttttagtctggacagatgtggctgaattgtcctctcctacccaccagcaacacatgggccctgatgctaattcttaggaaaactgtagccaaatgaggcggagaggaggtggagggtacatggggttggagccagtgcttttcctgactgtgtgtctctatagagagcacggagatgcggagttcaacaccaagcctcagctccagatgctcttacctggcacgtgaggacaggcagggccagctgcaccacctgatacaaattttccttccacgaataaaatgtggcctaaattgttaaagacgcagaataaaaatagcaagtaaagtg

SEQ ID NO: 18272 - DNA, 390 bp, Homo sapiens
gttcagaatggagaaaggatggttacaataaatgttaggagccctctttaaagagctcaaatggtatgtaagtatttgggatttgtggtttaattagacctagttttcagcagtctttccatgaaatgtatttttgtatttagagagatcttggtaactcttgtaaagcagagtgtcctgctacattacataacttacctaagtaggtgtgcttttttttgtttttctagagacagggtctctgctctttcacccaggctgaagtgtagtggcaccatcatagctcggtgcaaccttgatttccagggctcaagtgatcctcccatctcggtctcctgagtagttaggactataggtgcaagccaccatgtgcagctttttttttttttt

SEQ ID NO: 18273 - DNA, 341 bp, Homo sapiens
ctcatccctactccagaaacgagaacaacggaggcagaggagctgaagactccagtatgcaactgactacaaggagacagaaggctgaggccggggtgctagagaaccttgccgtgctggaattcacgttgacgcccccacggagctctgctgcagagccctcgagtcccgcacttccggccgccaggtggcgctggttctgttgccaactcggagagactgagctgggccacgcaagatggcgccgtccgccttgctgcgtcccctttcccggctgctggcccccgccaggcttccgagcggccttcagtgcgatcaaagttttacgtgcgaaaccgcga

SEQ ID NO: 18274 - DNA, 461 bp, Homo sapiens
  misc_feature (1)...(461): n = a,t,c or g
gatataattgatgtacagtaaactgaaaatgttctttgtacagtttagctttttgaattgtataaagtatacaatttggtaggtttcgacatgtgtatcctgtgaaactattaacacagtcaagctatgaatgtgaacatattcatcaccctcaaaagtcttttcttgcccctttttaacctctggctatccccaggcaaccactaatttgttagtttattttcataacaaattagtttgcattttctaggattttatataaatgaaatcatacaatttgtactcttttagtcaacaaaattattttgaaattgatccatgttgtttcatatagcaaagttcatttttattttattgctgagtagtattctattgtattgatacaccataatttgtttaggtatccacttcttgataggcatgtgagttatttcccanttttgggtgntacnaataagaac

SEQ ID NO: 18275 - DNA, 403 bp, Homo sapiens
atttattcacgactaaattttcttggttttttaagcttcattttcaggaaatgcttttagctttctatttggcctaaactttgttgtatgtttccattaaaattttttaatttatggaaaagatataataaataatatttacttgattttaacttcttggtgcaatttaaataaataatctgatgatgaagccaaatgtataactccatctctgccctctaaacttttgttacagaactaatgggaagttgttggaatcaagaaatgattagcttaatctttaatctttggttaaagattaccatttggtttgatttaaatacttacgtatgtaacaacattttgtttgatttaaatacttatgaagttggaatttgttttttcaaaaatgtctcggtgtttg

SEQ ID NO: 18276 - DNA, 730 bp, Homo sapiens
gcgagtccatgatccgcatggcggaggcccacgcgcgcatccatctgcgggactatgtgatcgaagacgacgtcaacatggccatccgcgtgatgctggagagcttcatagacacacagaagttcagcgtcatgcgcagcatgcgcaagacttttgcccgctacctttcattccggcgtgacaacaatgagctgttgctcttcatactgaagcagttagtggcagagcaggtgacatatcagcgcaaccgctttggggcccagcaggacactattgaggtccctgagaaggacttggtggataaggctcgtcagatcaacatccacaacctctctgcattttatgacagtgagctcttcaggatgaacaagttcagccacgacctgaaaaggaaaatgatcctgcagcagttctgaggccctatgccatccataaggattccttgggattctggtttggggtggtcagtgccctctgtgctttatggacacaaaaccagagcacttgatgaactcggggtactagggtcagggcttatagcaggatgtctggctgcacctggcatgactgtttgtttctccaagcctgctttgtgcttctcacctttgggtgggatgccttgccagtgtgtcttacttggttgctgaacatcttgccacctccgagtgctttgtctccactcagtaccttggatcagagctgctgagttcaggatgcctgcgtggtggtt

SEQ ID NO: 18277 - DNA, 358 bp, Homo sapiens
  misc_feature (1)...(358): n = a,t,c or g
gagatcaagtgggaatttccaatggtggggtgagagcatgaggaatggcgatagcagcaaagatacccacccatgtgaacagaggatcagagcagatgtttatgacacattagcaaaacctatgcctccagataggctttatctacagatagttaatgtcactcttatttaataaaaaatatttctggcttcttaacattagtgatatggcctgtttagagcaggcttacccttttgtgttagctaaccatgcatttaacagagaccatagaaagccacctgaaaaggcaatgtttttcatggtgtaagcaaaagtaataaagagaaaagggagcatttcctgctggagagaanagag

SEQ ID NO: 18278 - DNA, 543 bp, Homo sapiens
  misc_feature (1)...(543): n = a,t,c or g
gtggttgnntcnggaactctgganaccnttatgactgattacgaatttaatacgactcactatagggaatttggccctcgaggccaagaattcggcacgagcggcacgagggagtattatgattagcctgaatacagacccatggattgccctggggatcctcacaggcctctaaggtttgaatattggccctcacagagtcacaatggcacatgctgatgaatatgttggaacagtatccagaggatctcctaacttggccccacccacctcagctcctgctggtacggatattattacagtctcgactacctcgtctatccagtccctggcttatacttaaggcaacactagctgcttaacaaataaaccccagattttcggtagcttcacacaattaaaatttctcattaatattacaatccattgtgggtattcctatttggtacacaaatttctttcacatggtaaatttagggactgtagaacattccaatcttatggntttactatcccttaagagcctaaacctctgcatctggc

SEQ ID NO: 18279 - DNA, 334 bp, Homo sapiens
  misc_feature (1)...(334): n = a,t,c or g
gtgccatctcggccaacattgctgacatcgaggagaagagaggcttcaccagccactttgttttcgtcatcgaggtgaagacaaaaggaggatccaagtacctcatctaccgccgctaccgccagttccatgctttgcagagcaagctggaggagcgcttcgggccagacagcaagagcagtgccctggcctgtaccctgcccacactcccagccaaagtctacgtgggtgtgaaacaggagatcgccgagatgcggatacctgccctcaacgcctacatgaagagcctgctcacctgccggctgggtgctgatgganngagaacgtccgatct

SEQ ID NO: 18280 - DNA, 177 bp, Homo sapiens
agtattcgctgccccgagtcgggcgagcactatgaagtcacgttgctgcactttctacaggaatacctctgagcctgcccaccgggagccgccacatcacagcacaagtggctgcagcctccgcggggaaccaggcgggagggactgagtggcccgcgggccccagtgaggcacttt

SEQ ID NO: 18281 - DNA, 357 bp, Homo sapiens
cttcctatctgtgaattgtagattgatttaagaaagagtagttgctctttccaaattgttagccttatccttttagttcctgataacaacacaggattcctccttaaataactctgttgataaatcctcataaaaacagttcgtagtaagttcagttgctgtgacgctgtttgctatttgacttttgttttgttgctaacagctggatatataagaattccatgtctgttgtctgcctggtgcaacttgagcctttctactgtagctacaaactatttctcagctgaaaagttctccagcagaatcataattgtttccataaatcaacaggcagaaggattttctctctgtgtgtga

SEQ ID NO: 18282 - DNA, 390 bp, Homo sapiens
gggaacggcaaaatgggcctggcttaggcgaggactatactatttgaaagctggtcagcattctcaagcagtggctgatttacaggcagcattaagagcagacccaaaggacttcaattgttgggaatcgttaggagaagcatacttaagcagaggaggctacacaacagccttgaagtccttcacaaaagccagtgagctgaacccagaatccatatacagtgtgtttaaggttgcagcaatacagcaaatcctaggcaaatataaggaggctgtagctcaataccagatgatcattaaaaagaaagaagattatgtgcctgctttaaaaggtttgggtgaatgccatcttatgatggcaaaagcagctctagttgattatcttgatgg

SEQ ID NO: 18283 - DNA, 445 bp, Homo sapiens
cagcttgacatgattacgaatttaatacgactcactatagggaatttggccctcgaggccaagaattcggcacgagcggaccgctaggcgaggaggatcagatctccgctcgagaatctgaaggtgccctggtcctggaggagttccgtcccagcccgcggtctcccggtactgtcgggccccggccctctggagcttcaggaggcggccgtcagggtcggggagtatttgggtccggggtctcagggaagggcggcgcctgggtctgcggtatcggaaagagcctgctggagccaagtagccctccctctcttgggacagacccctcggtcccatgtccatgggggcaccgcggtccctcctcctggccctggctgctggcctggccgttgcccgtccgccaacatcgtgctgatctttgccgacgacctcggctatggggacc

SEQ ID NO: 18284 - DNA, 355 bp, Homo sapiens
cttaaagtcatttttacttcatttacacatctgcaaatgcagttggactagaaaggtccttttcagatcctaattccagtgattaagtttcatattacattttaaaagatctcatactgaaaggatccactgtccctctgtcagaaattttcttcacctccagtttggcattgtttctgtacggtaattgttgacgccccctgcaagacatagtgaggctcaaatgttcatctcttgaaaaatgggtactcaaatcttgacatttagaaattgtcttcccatgggaaatttcttgaatgtaatcttaaaacattatttgagtttattttatgcctattttctaagtccacagtta

SEQ ID NO: 18285 - DNA, 452 bp, Homo sapiens
  misc_feature (1)...(452): n = a,t,c or g
gagtgnatntttgaatccganacctttggactgncacgaatttaatacgactcactatagggaatttggccctcgaggccaagaattcggcacgaggtttgtacatcagagaaaggcagatgctagaagtacttattccaccttctgtccttggatggaaggtagggacacgggaaagtttaatgcttacctagttcccccagagagaagttcataattccatatggaggtgttgctgccaggattgggtcttttcctggatttggcttaccagttgctctgtaccatgactcgccaggtacctctgtaatcttgcttgggtttcaagtcctttatacttggaagcagagagaagcccacatgcttccctcctttcttgtagcagaaaaatcctgctacttctccctccgatcctctcgaagagggttgcagatggtagaagctcccttatt

SEQ ID NO: 18286 - DNA, 450 bp, Homo sapiens
ggcaggggtgagctcgatggtcgtaagaacacagcagaaggatgcatgagaggctcgcaattctgaccataatgtagtaacaggggtcagacttaatctgtcccttccccagccttaagcaacaaacagacaaaatataggaagcagtggctttgaaatgtgggacagcagccctgaggcagctcagggctgattcctgagaaaagtgaagcaaacaagttgaaggcatgaaaattgtccaatcttccttcctagaggtagttttcaggctgcagcacagggagaggaactcaggcagccaagcagtctcactgtattgaagacaaaaagattagagttcaaggagcccaaaaagttaaagtgtgtgaatcagaatacccaagagggggatgttgcattcatgcatgcgtgcgtatgcacgcacacacacacatacatatacacagagag

SEQ ID NO: 18287 - DNA, 436 bp, Homo sapiens
  misc_feature (1)...(436): n = a,t,c or g
ggtagtagggaggctgtttgtgtgctgcttttgttttgtcttctttataaagagatgtttaaccttatcccataatagtaatgtaatattttaaggcagtgaatgtcatattgtagattcaattatataaataagaaaagtatgtactctttcagaataatttagtgcagagttgagcttcacagctattcctcttcatctaggatagatattttaataagtaatcgtgacagaatgttctttgtaaattataaggaacatgatagtaagatggttattctacatctctgagcaaagtagaccactcttgtccantgcctcctattcnaccatncncttncngtttangccnttnagttgcgtcccttctgcttttcggncggtctnagttcgngtttacngangagacccntggggccantagggggnaanatct

SEQ ID NO: 18288 - DNA, 234 bp, Homo sapiens
ctatgacatgattacgaatttaatacgactcactatagggaatttggccctcgaggccaagaattcggcacgagcttctaggtgatatactaaatgtacgtgaaattaccaatgtacaaggttatttattaggccatagtatgtaatagcaaaggcttggaaataattttaaaatgtccatcaaatgagggactgataaatgcatttctttctttctttctttttttttttttt

SEQ ID NO: 18289 - DNA, 372 bp, Homo sapiens
ggattagaaaacacggttattcctagatctataaaaacatctgaatgcgcttgggttcacttgccagaattaaccagatgggatatgtaaccatacctgacagccttcatcgtcatttgtatataccagaaagtggacttcttgtaaagggctagttatcggccttgtgctgctactgtattcgaacacttctgaaaggattagtttagcaaaaacagctttgggaaactgcaaacttcctgttccaatcatgggaaatgtgattgatgagaaagatagcacttctacagttgtcaaacatttcttgattatatttgccatgatctgaaatgtgcaaagtacatttacataagttagggcttaagctacggg

SEQ ID NO: 18290 - DNA, 416 bp, Homo sapiens
  misc_feature (1)...(416): n = a,t,c or g
ctctggctcaattgttgccttttaaaactctttacttaaaccagccactgggcttttccttggggacaatgtataagaggaaaacaatgatagaaggggggctccaaggatgtcaagagtanaaatagngatgtctacctttgaaactacaaaactccctacacaaccaagtgattggagctttgaaagcaatgcggagtaggaaaactaatanaatatcaacctagttaaggcaagatttgctgtggggaagggaaggtcctgagcctctatttggccctgaggcttatcaacctgatacttcagttgggctcaaaaagacttctgcccctcccattcctccttccattggagggacaanctctttantctgggggatttaacaatnttccccattaacggggtnnctgggttgg

SEQ ID NO: 18291 - DNA, 415 bp, Homo sapiens
gtttttttttttaaaacaataaacatttatttttgccatatgctgttggttaaaagcaagtcactaatccagcccaggcttcaagggaaagggatcacaccagggcctgaataccaggaagcagggatcactggggatcatattccaggcagcctactgcaggggataatctccactctaaggggcaggcctcaacagggcagccacatcagaatacaagaaaacctccagagtcatgtggtaaggacgacatgcattcagcaacaggatgcttgaataagcctttcaactgtggcttgcaaaatggccacattagtatcagttgggaaacatttaaaaaataccaatgcccaggcgctacgcaagaccagttagatcacaatcttcagggcatgggtttttctaatttttaaat

SEQ ID NO: 18292 - DNA, 385 bp, Homo sapiens
gctgaacactctcatgttttatctcttaaatgtcctaagaattatgagatcccaagtataacgcatatgcattaataagcagcctaacctgatgagcaaattcaagagaattcactgtgataagaaatattcaagctttcattggcaaaacatggcaatgtgtacaaatacctttatatagatatcaaacagaacaccctaaagaactatacccaaatatttgcttactaattaaacatatggcttaccttttctctgaagtagtactgtgaacatggattttggagttagagctccaaaataatgtaaataataatattatattatttactatttattttactatttaagttagtagcattactataatgatattaaaataatg

SEQ ID NO: 18293 - DNA, 342 bp, Homo sapiens
  misc_feature (1)...(342): n = a,t,c or g
ggatctttttttactttaccaaaaaataagtttaaacatggcttaccttgtttcattaaatacaaatttatattactatgagaaaaatcaaattaattcccagaaaaaaagaatgttgtctgcagaattgactaacaatatcattgtaaaacaacttatgaacatgtgacatcctcctatctataactatgaaatttttaaaccagcttagaacaggcctctttaaactgctagactataattataataatgaatagataagtgtttaccatgtgcctatgctaaatatgttatgtaatctcacttaatcctcacagttttatgaagnngtcctaatatact

SEQ ID NO: 18294 - DNA, 321 bp, Homo sapiens
ggggttcctcccttctcttcacagtcacattccaagcctcatgtccactagctcttcttggtctcagtgtcagtgcagcccccactgtggtcgcaggaagcagaggaggccacgttcttactagtttcccttgcatgatttagaaagcctgccctggtacctcaccccttgccataattactacatcacttgctggagctctgtccctcctgcccttgagctcatggcactctatgttctaagaagtgaaaatctacactccagtgagacagctctgcatactcattaggatggttaatgtcagaagaaagaaaatcataa

SEQ ID NO: 18295 - DNA, 392 bp, Homo sapiens
ggaagaaggaaggaattctggaggaaatggggggaaccttgagcattcctgagggcaaggaatggcatctttgtggctctaagagggatgtcagaaaagtagagcgtctgtgtggtgaatacagcagactcttcagccagactgctcaggttcacatcccagctccaacattcactgttgtgacctcgggaagtgcttaatcttcctgcgtctcagtttctccatctgtaaaacggggagaagaacagtctctccctaaggattagataacagacacacctcccttagagcagcccccagtaagcagtaattgctacataattatttgctatcacgattaagctattaagagtataaagattggaaagcagccaggcacggtggctcacacc

SEQ ID NO: 18296 - DNA, 324 bp, Homo sapiens
cttgagtaatcaatgtactctatacttataatttctcacgtaagaaacaagtaaaccaagagaatctgttcccaaaacaaggcctacaagagagtccattttcatggtttggtttttaaatttctaagaactgagcattactttaatactttcatgtgcatttacaagtgattttcaagaaaaatacaaaatctaagtaaaactgacacatcatgaacacttttcctccttatctactgagtgcctttatatacttcctatcctgagactactttactggggtaattcaatctctaaacactccctgaattaagaatcaaggga

SEQ ID NO: 18297 - DNA, 314 bp, Homo sapiens
gctttctgaagcagagcaaacgcttcgctttcggtcctgatgacacagaggccctgcagtctctcattgacacccataaggtaatccagccttggggtttggtgacctcatgctacctaccaccttgagggctgcctaccactaaatgaaagcaactttttcttggaaatatcagagctcacatgaaaaggaacaaaaccagagtggccctagctcattggtttagcaggaatgaaagggaagcgactgatgggttttttgacaccttaaacagtaacattcattcttataaaagtaatatatgttggttgtaa

SEQ ID NO: 18298 - DNA, 340 bp, Homo sapiens
ttttaaaaaaaacacaaaaaaccttaactggtcacctctgggcattgcatgaattcattacttgaatgaatcaagttttgctgccttttctataaaaacaatcttacaaagtaactaaataattaatgaaagaaaattctttagagaagaattccagctaataaatccatcaagaatgacatcaggaagtcaccattttccaattcctaatgacagaatggatctaggcaacaatcgtgcatgaatgctaagaccctcaggtgaaaggctgatttgcttttatctgaatgtctctctgcatctgactaccagggcataggaagaagttaaaggatcctga

SEQ ID NO: 18299 - DNA, 490 bp, Homo sapiens
  misc_feature (1)...(490): n = a,t,c or g
ggctccacttccttccaatcctactgccgacactctccaccaagccactgtcatctccagagctcaatgcggctgcctcctatgtacccttcccgcccataatccacatcgacacagcagcgagcatggttggtttccttcttttgagacagggtctggctggctggagtgcaatggtgtagtcatagctcactgcagccttgactgcctgggctcaagcaatccttctgcctcagtctcccgagtagctgggaccacagacgcatgccacaacatcttgctagttttaaaactttttgtagaggctgggtcttattatgttacccaagctggtctcaaactcctgctcaantgatcttcctgccttggnctcccanaagtgctggggattgcaggtgtgagccaccatgcctggcccagagggaaagggcttgccctgaaggccaggccctgccatcctgctggaattctctanctgcatcctctgggg

SEQ ID NO: 18300 - DNA, 331 bp, Homo sapiens
gtcaggatcatctcgatctccttacctcgtgatccgcccacctcggcctcccagagtgctgggattacaggcgtgagccaccgcgcctggccgatatttgttgtatttgtaatgaacataatatagtgttctcaggaattagtctcccaggaaatttttggctagatttttcagtgattgcagcctgagataatggggtttggagggttttttcccagagtctgtatatgtgctgctgtgcccttaggacaatgcctttaggacagtggcattttttctttattatttctaccacttagccccaatatcgttgcgttcccacaacccggta

SEQ ID NO: 18301 - DNA, 339 bp, Homo sapiens
gacttttatgcatatatatgtatatacaaatcttggggttgtacatggggcctcccaaaaagaaagttaaatgggaaaaacagacatgaagaaccagagcagaatatttagaagcatattgaaggacaccaaatggccaccagaccaagtattaatgctgaccttgaaggactcaacttaggcaaaaaaagactgaattgaccataaggaatgttgatcagaaatgaagcctagaaaacggaggctgaaaagcaaacattggcggtgcatccagcaccttccaccgagtaagtgtttgagataccataagcgtctctgcttgatgtccctggccaccgc

SEQ ID NO: 18302 - DNA, 389 bp, Homo sapiens
gatccaggttgggcgcttccagcgctttctgtggcgggggaatgaaggcctaggtcagggaataggaaggtgtatcgccgccagagtgcggaacaccctcgccttgagggttcccacagtgacttgcaaaagtctagtgagacccgagaatgctgaggcgggacacgaagcatgtggttcttgtggttgcgacgctcgtgccgccatcttgggtgctggcggcggaaaccggtaccccaacttcccctcggtgcgaacctggagaagccaccccagctgtgagggacggttgcgcctcatggcccaggcaagggtaccttcgctggagcagtaccgcggacggatatcatgagggtggtgggacgttggcggaacgttggcggaacgtt

SEQ ID NO: 18303 - DNA, 413 bp, Homo sapiens
ggatgttacattgacttgtttttctggtgttggtaaaatcactggtgcgttgaccagctctttttctaaagaacacagagtattcatttttatttttaggttagaattaggtatgcattttaaaacctagttacaatagaatgaagcatagcagcctacagaaaggatgttacccttggcccttactagcgctatccattagtattttatttttaatctgtctagattcagggatgattttctttcatatcctcctgagtgtaatgccataagcaagcccctattttaggcatgcagtatgctggcattgtctagtatttcttgtaaggcaatctttaataaaaattggaatctcaggaaaaacacgtgataatgggcaataagataaatctgtacttacatatttgtcatgg

SEQ ID NO: 18304 - DNA, 422 bp, Homo sapiens
gcaagaatgacataactgtataataaacatacacttaaaataactttctaaaatgtcattcctaaataatatattaaaagataaattactcatctgacctgaaattctttctgactttgcctgcataaaattaattttattctatgcttaatcctaaaagatggaaattagattattgcttatgaattttataaaaaagaatctgtttcaaaagttggctttgcttagaaattaagtgtggagcgtacattttgctttttcgtgatgtcattttcataagggaatgtgtctttctggaacattttagaaactgaatcacttactcagtgaagcaattaaaaatgctgtcctaaattttgcatgttgaggcggggcgtggtggcttatacctgtaatcccagaactttggaaggccaaggcag

SEQ ID NO: 18305 - DNA, 884 bp, Homo sapiens
  misc_feature (1)...(884): n = a,t,c or g
ggacctgcacctggggacatcgttttctgcagaaaccaaccgaagggatgaggatgcagacatgatgaagtacattgagacagagctaaagaagaggaaagggatcgtggaacatgaggaacagaaagttaagccaaagaatgcagaggactgtctttatgaacttccagaaaacatccgtgtttcctcagcaaagaagaccgaggagatgctttccaaccagatgctgagtggcattcctgaggtggacctgggcatcgatgctaaaataaaaaatatcatttccacggaggatgccaaggcccgtctgctggcagagcagcagaacaagaagaaagacagcgagacctccttcgtgcctaccaacatggctgtgaattatgtgcagcacaacagattttatcatgaggagctcaacgcgcccatacggagaaacaaagaagagcccaaggccccggcccttgagagtaggcgacacggagaagccagagcctgagcggtcccctcctaaccgcaagcgtcctgctaacgagaaggcaactgatgactatcattatgagaagttcaagaaaatgaataggcggtactgagttgtgcacagtgggatgtaaatatcgccttcctctccctatatccctcccatgaaaaatggcttcctggccgggcgtggtggctcacgcctgtaatcccagcactttgggaggccgaggtgggcggatcacctgaggtcgggagtttgagaccagcctgaccaacatgganaaacccagtctctactgaaaatacagaaaattatccaggctggtggacatgcctgtatcccagctgccaaggaggctaaggaaggaaaattgcttgaanccaaggggcggangttgtggtga

SEQ ID NO: 18306 - DNA, 383 bp, Homo sapiens
gagctgggcatggtagtgtgcatctgtggtcccagctacttgggggggtggggtggggggatcacttgagcctaggaggtcaaggccgcagtgagccatgatcatgttactgcattccagcctgggtgacagagtgagatcatatctaaataataataataataaaagaaagcaacaacccagcaaacagctataaagatatcttcgggacaattgagaacatttgaatatagactgcatattagataacaatgccaaataactgttttctcaggtgtgataatagtatatgtagaaaatgtctttttgttttgttttattttgtttttgtttgtttgtttgttttgaaaaaaaatctcactgtgtcgcccaggctggagtgc

SEQ ID NO: 18307 - DNA, 479 bp, Homo sapiens
  misc_feature (1)...(479): n = a,t,c or g
tctanagtnntgccccttgcccaaccgctatgacatgattacgaatttaatacgactcactatagggaatttggccctcgaggccaagaattcggcacgagtttttgattgacaaattaataaacctctctatgcctcaggctcctcatctgtaaaacagggatgcctaccttatggggttggtgtgaggattaactgagatcacacttgaaagtgccttgcatgggcttggcatgtgggtgctcattacatagtcttcttgttttcttgcctctgggttgaggattcacagcactgcactacaagggtagcccctctccattctggataccttgctaggagagagtctgggcttccacctgcggccagggtgaagggaaaattcttgccatgtcagagatggatcaatgactatgaaaaaactagcctgtgattttttttcactctaagcattaagagctcctaaagccttttgcttg

SEQ ID NO: 18308 - DNA, 343 bp, Homo sapiens
ggaaaaaaattcacctgttgtcataataaaggaatttaattttggattattttccactcttacactggcattgatttgggttagtatccacacgaatgtactgatgcttttcacattggttctgaaagactttccccccattttcctttgtggtgttaaagcagccccccagccctccttacaggaatgttgaagattgggagggggatgcttggttgaggatgcttgtgacacgtaactctagacttttttttaacacggaacacttcacgactctgcgtgtcatcttgcataggccagttttagtgcaagtgctgctggagtgagtgcataaccctggatt

SEQ ID NO: 18309 - DNA, 347 bp, Homo sapiens
  misc_feature (1)...(347): n = a,t,c or g
gattttggtttgcttttgagcttttcctctttatgtggctcttaataataagtagttagaatgaaccaagccatcccagttattccaagcaggctctcaaatgacctttgagcacccttcacctggctggtccccaggccaggggtccacagccctgctcccttctcagcaaggagggtggcctgtctgacagtgcagttgaacctttgctccctactctgcaacttttgaagacttcaggctaatcaaaattacttataattagaatcaagtgcctttattcttgttttttatttttattttatttatttatttttttagatggagttttgcccttgntgcattgg

SEQ ID NO: 18310 - DNA, 451 bp, Homo sapiens
gtctgacactgtgaggataaaatggagaactggaatattctatccatttcagagaagtcttattctcatggcttaatttgtgtgaagtactttataatcccagaagaaagcccatctagcagattaagtgtaccagcatacatagaccctgtgcacactcacacacacatgtctggaaaccctggagcatcaggtgtcctgacttcggattatagcatggggcatttgccacattagacatacgcatttggcagtggaagttactgaaaagtctaagatcttagtatttattgagaaattttgtttccccaaaattaacttttaaatgactatagcataacacatctaactatcatctaaagctatataggccccaccagaacaatacacccatcattgagagcaagacttaaatataaagcttttagggactcttaaaacttttaaacta

SEQ ID NO: 18311 - DNA, 334 bp, Homo sapiens
  misc_feature (1)...(334): n = a,t,c or g
atttttagtagagacggggtttcaccgtgttagccaagatggtctcgatctcctgatctcgtgatccgcccgcctcggcctcccaaagtgctgggattataggcgtgagccaccgcgcccagccatacagctgtttttcaaagcagcagtaccattttctatttcccaccaatgaatgagagttcctgttgcgcgtcgacgcggacgcggtcgacgcggacgcgaattccagatctatgaatcgtagatactgaaaaaccccgcaagttcacttcaactgtgcattgtgcaccatctcaatttctttcatttatacatcgntttgccttctttt

SEQ ID NO: 18312 - DNA, 392 bp, Homo sapiens
cccacgcgtccggagatgaggtggctcggggcattgctggagaaaagtttgacatcgtcaagaaatggggcatcaacacctataagtgcacaaagcaactgttatcagaacgatttggtcgaggctcacggactgtggacctggagctagagctgcagattgagttgctgcgtgagacgaagcgcaagtatgagagtgtcctgcagctgggccgggcactgacagcccacctctacagcctgctgcagacccagcatgcactgggtgatgcctttgctgacctcagccagaagtccccagagcttcaggaggaatttggctacaatgcagagacacagaaactactatgcaagaatggggaaacgctgctaggagccgtgaacttctttgtc

SEQ ID NO: 18313 - DNA, 305 bp, Homo sapiens
gtcactttttgtttatccattgattcttccatagacattaggattgcttccaccttttggctcatgtgaataatgatgctgtgaacaggggtgtacaaatatctcttaaagacccctcttaaaactttttgcgatatatacccataagtaacagttgctatagaatcatatggtaattctgtttttaattttttgaggaatactatactgacaaatttgaatccttatttaaacccaggattatggaatactgctgcttgatttcagctgtcattttgttgtctacattgtattttattgaattg

SEQ ID NO: 18314 - DNA, 312 bp, Homo sapiens
cgcggccgcgtcgaccttccctggtagatgcaggttccatagcgacgttctcctgcaatgcacgctggtattctgcaatagcaggccatgtttttccttgagcctggatgctttggagccaagctttcgtcccatgcaagggaaacaaccacttctgggatgtccgctgcaatctgctccggggctgcagcaacctcatcagctcttgcctggagtggctcagcctgggcctgcagggccaccaggaggtcgacgcggccgcgaattccagatctatgaatcgtagatactgaaaaaccccgcaagttcact

SEQ ID NO: 18315 - DNA, 1277 bp, Homo sapiens
gggccattggaaatctggacgttctggcagctgccctcgcctcctgcaatgagagctatggggtctgtgtggttgttggggtgttgcctgccagtgttcaactcaaaatcagtggccagttgttcttctcaggacgttctttgaagggttctgtttttggaggctggaagagcagacagcacatccctaaactggttgctgattatatggcagagaagttgaatctagatccactaattactcatactctgaatcttgataaaatcaatgaagcagttgaattaatgaaaactggaaaatgtatccgctgtatcctgttactttaagtacaatgtaatacatgcaagacccaaaggatatttcaccaactcaatggcatttgatgtaattttcatgatttagaagaattattcacccaatcccatttctatattctgacttctgattcactccgcagtggacctatatctggcttctgacctaaccatttcatcaaaattgttcttacgtaacccagtgtcaccaaggatcagcctccttttcagagctagattaaggttggcttgaatcactcaactccacatccttcagacataaaaggtcaatgcaagatgctcccattttcatagttcctctacctgtggacctttatattcttgtacactatatgtctctctcacaggcctagacatgaaactctgccattttactctaaagaaacaaaactccgcattaatgagtttattgaagattcaggttaacctgaatcaagttaacccagtctcaaatgctcacttatcctatctccttggcacaaatctctcctctcctggattgccaaagaaaattcaaattattcttcaattagtcaggatgatttgactatcagcagttcatagtacccatcttcataactaagccacctagggatccagcaagaaaaaaaagggatgaggggagtcatcatacaggaggtggatcatttaccaggatccacacttcctacaaagcggttgtaatattaaataacaaaactgttttttattccaatcttcacataaaacaggaataattgtatactttcttactaatgtgttccatggagtttttcctccaagaagtggcttaggggaaaatgagccccagtaatgctttgtggcatccaatccttctaccccgaccctttgactttctgccccagcccctcttagttctcctagaattaggactaaggttaagtgccctcttgggatatgacttccttcccttcctcttga

SEQ ID NO: 18316 - DNA, 437 bp, Homo sapiens
gcaggctcaaatatccagtgtctcaacaaaacaagaatgcaccttccactgcaggcctgggatacggatcatgggaaattgatccaaaggacctgaccttcttgaaggagctggggactggacaatttggggtagtgaagtatgggaaatggagaggccagtacgacgtggccatcaagatgatcaaagaaggctccatgtctgaagatgaattcattgaagaagccaaagtcatgatgaatctttcccatgagaagctggtgcagttgtatggcgtctgcaccaagcagcgccccatcttcatcatcactgagtacatggccaatggctgcctcctgaactacctgagggagatgcgccaccgcttccagactcagcagctgctagagatgtgcaaggatgtctgtgaagccttggaatacctggagtcaaaagca

SEQ ID NO: 18317 - DNA, 371 bp, Homo sapiens
gtcaactgctgtgaatgctgtatggtgtgtgttctcttctgttactgatatgtaagtgtggcaatgtgaactgaagctgatgggctgagaacatggactgagcttgtggtgtgctttgcaggaggacttgaagcagagttcaccaagtgagctcaggtgtctcaaagaagggtggaagttctaatgtctgttagctacccataagaatgctgtttgctgcagttctgtgtcctgtgcttggatgctttttataagagttgtcattgttggaaattcttaaataaaactgatttaaataatatgtgtctttgttttgcagccctgaatgcaaagaattcatagcagttaattccccttttttgacccttttg

SEQ ID NO: 18318 - DNA, 538 bp, Homo sapiens
  misc_feature (1)...(538): n = a,t,c or g
tttcctatngacttctcgntatcccntgactacgaatttaatacgactcactatagggaatttggccctcgaggccaagaattcggcacgagggtaccaggggatgcaaaatggttctcagtcctacacctaaaagatgctttcttcttcattcctctggttccagagtcccaatacccttttgcctttgaatgggaaaatcctaataccagagaaaaacacttgggcagtgctcccctaaggcttttgggatagcccccacttctttgcccaacccttagagagggatctgaggggtctgcaattggaggatgggagtatactccagtatgtggatcaccttcttgtgtatagcccaacccaagaggcttctgaccaaaatactataaaaaccttacatttccggctgacaggtcatacaaagtgtccaaaaagaaggtcagattactctccaacaggtccactgtttagggtacatcttaacacctggaacctgcaagtatccccagaacgagtgcaagccatatgtgggttgggc

SEQ ID NO: 18319 - DNA, 348 bp, Homo sapiens
gggctacgtttacgtctaaggggaaaacacaaaatactaagatagaaacctccaaagccccctcaccttttcagacaacaagaacccccagggcagagggtcttcctcactctcagagttactttgacttctcatctggtttcgtgtgggtaatgcattttcactcttgagtttcttttctttttaaggtattttcattatgacgtttgttcttttgcaaagagctaattctgcagaattctacccagggagggccgagggaagttagtgaaggtaacgataccagttagaaagttgagtttgggtcatctcaggggcctcctttggcctcctttggcttatgttcta

SEQ ID NO: 18320 - DNA, 483 bp, Homo sapiens
  misc_feature (1)...(483): n = a,t,c or g
gcacaagtgtgtggtgaggtacagagggaaaacatacagggggtactggtccctgtgcgccgccgtcaacagagccctcgacgaagggataccaataactagtgcctcgtactacgcgacagtgaccctggatcaggttcggaatatacttcgttctgacacagacgtttccatgcctttagtagaagagaggcatcggattctcaatgaaaccgggaaaattctgctggagaagtttggaggctcttttctcaactgcgtccgagaaagtgagaatagtgcgcagaagttaatgcacctggtggttgaaagttttccttcttacagagatgtgactctgtttgaggggaaaagagtttctttttcaaacgagcccaaatccttgtagcagatcgtggagtgtattggaaggaaaaggagatggctgctttaaggccatttcngnatcccatgttgctgatatatannacctcagggnttttt

SEQ ID NO: 18321 - DNA, 516 bp, Homo sapiens
ggtttcaagcagatgggacctacaccctaattatccggctgcggcacaacgtgattaagacaggtgtggatcaggatctgaggggctgttggaggagcagaagccaggccagggcaaacctagtgggtatccttgggcaagtgaagggtctgtgtccactctgcccaccccatcgctccttcctctcccaggtgtacgcatgatcagcctctcctattcccgaatctccttggctgacatcgcccagaagctgcagttggatagccccgaagatgcagatttcattgttgccaaggccatccgggatggtgtcattgaggccagcatcaaccacgagaagggctatgtccaatccaaggagatgattgacatctattccacccgagagccccagctagccttccaccagcgcatctccttctgcctagatatccacaacatgtctgtcaaggccatgaggtttcctcccaaatcgtacaacaaggacttggagtctgcagaggaacggcgtgagcg

SEQ ID NO: 18322 - DNA, 409 bp, Homo sapiens
  misc_feature (1)...(409): n = a,t,c or g
ggataaacaattcagtgaaaagttttggggcaactggagcgaaacaaatatatattcctctacataagaataatttccaagtttattagtgttcagcataaaaataaaactgtagaattattagaagaaattataagggaatatttctataatcctagtgttggaggaggctttcctaagcataacatttagcccaaaatctataatgaagaaaactgacagatttaactagtgaaaattaaatgcttttgtacaagaaagatgtaagaaaggttaagtgtcacagactaaggcatattacatatacagcaatacctggattacatacagaatgnctgtaaatgttaatccngtaaaaaaatatatatatatgaacnggnaattcnccgaagaaggnataaaaaattgc

SEQ ID NO: 18323 - DNA, 359 bp, Homo sapiens
ggtgacctacatatgtaatataaaattttcttatagccacatcaaacaaactggtgaaataaattttcataatatatcaaaatattacttcaatatatcaatattaaaattactaatatttacaatattaaaattattaatattactgagatattttacattctttttttcacagtaagtctcagaaacctggtgtttattttacatttacagcatctggcagttcataacattaatacccccaaatggctgtggttaccatttggatagtgtgggtctaaaaggcctggtttgtatacctaagatactttgaatgtgtgactgataaggttagctcattaatccagtgctcagctctt

SEQ ID NO: 18324 - DNA, 352 bp, Homo sapiens
  misc_feature (1)...(352): n = a,t,c or g
gactgcatagggctcggcgtggcatcttcttcgtattaataacagtaaggcgtaggcagtatctcattttaatctgaccagattacaacagtggggctctttcctaagccatacaatggtcctaattcacttcttaaggtttcatagctaacacttaacaaaatgtttgccataggccctgtactagtcaacattctttatacacattacacgcaatccacacaaccctgtgaggtctatgtattgttacagatgagaaaacaggtgctgagcaatgacataattcgtctgtgggtaggcaggtagtgtatgacagagttaggatctgaacccangcagatccgactcaaga

SEQ ID NO: 18325 - DNA, 301 bp, Homo sapiens
  misc_feature (1)...(301): n = a,t,c or g
gtaaaccaaaggcatttaaagatttctcccaggaagccatttagcaaaagacactccccagccccccttctcccacttccttcaagctcaccactgaaaacacctccaattcttgcctaaaggtgggctccgacctcccacgatatttagaaggaggaaaaaagaaaaaggaaaaaaatccacctcttaaggcaaatccactcttcagaggcccacagtttcaacagggctgaatttctctcctgggggttggggggaggcaaaagaggaggaaaaaaaaaaaancccntttggcaggccc

SEQ ID NO: 18326 - DNA, 377 bp, Homo sapiens
  misc_feature (1)...(377): n = a,t,c or g
gcacagacagattgacctattggggtgtttcgcgagtgtgagagggaagcgccgcggcctgtatttctagacctgcccttcgcctggttcgtggcgccttgtgaccccgggcccctgccgcctgcaagtcggaaattgcgctgtgctcctgtgctacggcctgtggctggactgcctgctgctgcccaactggctggcaagatgaagctctccctggtggccgcgatgctgctgctgctcagcgcggcgcgggccgaggaggaggacaagaaggaggacgtgggcacggtggtcggcatcgacctggggaccacctactcctgcgtcggcgtgttcaagaacggccgcgtggagatcatcgcaacgatcanggcaac

SEQ ID NO: 18327 - DNA, 324 bp, Homo sapiens
  misc_feature (1)...(324): n = a,t,c or g
tgggtctccaagaggcgcttcccttgatctaagcattctgccgctacaagacttcttatttttgagacagggtctccctctgttgcccaggctggagcgcagtggcgccatcatgactcactgcagccacgaactcctagactcaagaaatcctctcccacctcagcctctgaggagctgagaatacaggcgcacaccacgcccggctaattttgattatttttgtagagaacaaggtctcactatgttgcccaggatggtctcagacttttggcctcaaaccacccttccaccnttggcttcccaaagcactagggatcgcag

SEQ ID NO: 18328 - DNA, 412 bp, Homo sapiens
gattcccacctatgagtgagagcatgcggtgtttggttttttgtacttgcgatagtttgctgagaatgatggtttccagcttcatccatgtccctacaaaggacatgcacttatccttttttatggctgcataatattccatggtgtatatatgccacattttcttaatccagtctatcattgatggacatttgggttggttccaagtctttgctattgtgaatagtgctgcagtgagcatacttgaggagcagcaggtcttaattttatagaagccagtgtggactgttactgatttctttggtctgatgatatcaggaagttaggcctaaaagtgaagaacctggctcagcatgattgcttatgcctgtaatccaagcactttgggaagccaagatgggaaaattgcctc

SEQ ID NO: 18329 - DNA, 1243 bp, Homo sapiens
  misc_feature (1)...(1243): n = a,t,c or g
gagcctttcttaatgcaattatgcgatatggtatgccacctcaggatgcttttactacccagtggcttgtaagagacctgcgaggcaaatcagagaaagagttcaaggcatatgtctctcttttcatgcggcatttatgtgagccgggggcagatggggctgagacctttgctgatggtgtcccccgagaaggcctgtctcgccagcatgtccttactagaattggtgttatgtctttgattcgcaagaaggttcaggagtttgaacatgttaatgggcgctggagcatgcctgaactggctgaggtggaggaaaacaagangatgtcccagccagggtcaccctccccaaaaactcctacaccctccactccaggggacacgcagcccaacactcctgcacctgtcccacctgctgaagatgggataaaaatagaggaaaatagcctcaaagaagaagagagcatagaaggagaaaaggaggttaaatctacagcccctgagactgccattgagtgtacacaggcccctgcccctgcctcagaggatgaaaaggtcgttgttgaaccccctgagggagaggagaaagtggaaaaggcagaggtgaaggagagaacagaggaacctatggagacagagcccaaaggtgctgctgatgtagagaaggtggaggaaaagtcagcaatagatctgacccctattgtggtagaagacaaagaagagaagaaagaagaagaagagaaaaaagaggtgatgcttcagaatggagagacccccaaggacctgaatgatgagaaacagaagaaaaatattaaacaacgtttcatgtttaacattgcagatggtggttttactgagttgcactccctttggcagaatgaagagcgggcagccacagttaccaagaagacttatgagatctggcatcgacggcatgactactggctgctagccggcattataaaccatggctatgcccggtggcaagacatccagaatgacccacgctatgccatcctcaatgagcctttcaagggtgaaatgaaccgtggcaatttcttagagatcaagaataaatttctagctcgaaggtttaagctcttagaacacgctctggtgattgaggaacagctgcgccgggctgcttacttgaacatgtcagaagacccttctcacccttcccatggccctcaacacccgctttgcctgaagttggagtgtttggcggcaaactcttcagcacc

SEQ ID NO: 18330 - DNA, 164 bp, Homo sapiens
gagcgtgacactcttctgttccaccaagtcactgctcatgaccttgaggctggcaggtgaggtcaagttgtttgactttaattcatttactcatttgtttctctgatgggaaccgaggggatctgcctatgtgtttgcccctgcttagcaagaaacaaatacgg

SEQ ID NO: 18331 - DNA, 386 bp, Homo sapiens
agacaaggtggcctctcattagaagaagaggaagaggaggatgccaattcagaatctgagggaagcagtagtgaggaggaagatgacgctgcagagcaggaaaaacgcattggatcagaggatgccaggaaaaagaaggaggacgaactctgggccagcttcctcaatgatgtgggaccaaaatcaaaagtgcccccaagtacacaagttaagaaaggagaggagactgaagagacaagttcaagtaaattgttggtaaaagcagaagagctagagaaacctaaagaaacagaaaaagttaaaatcaccaaggtgtttgattttgctggtgaagaagtaagggtaactaaggaagtggatgctacatctaaagaggccaaatcctt

SEQ ID NO: 18332 - DNA, 377 bp, Homo sapiens
gtgtgaaaatctagagtagagagttgatgtgccccagatgttacagctagccattagtagaccaaggttcaaacccaggtcttctgatgtgaaagcccttgcttgtcctactaccccttgctactgtggccatctagtagatcctaggactgtgcattaggtcatctgggactctgaaaataattaagtcagactctctgcagatggggcccagactgccttgggaagagctgcaaagcaggtcagcttcccctccagtagtgttgggacagcctccctcactgtcagtcatcccggggcccactgtgggtctaagcagaatcaccagctcccttgctgttccttccccatccctgccatcaagacagagccatttg

SEQ ID NO: 18333 - DNA, 334 bp, Homo sapiens
ggaagaagattgcacttttagtgacaggcactgcaggaatccatgttataggtaaggttatttatcagatgcagtctttgtattcaggtgaacattctgggcagaagacacagctttgtgtacctcagtagtcttgtgagataacatggacaatcccactgcatagcccctgtgtcactggctttgaggtgaagtggctcaagccgacgtagccatatagcctgggagcatatatagtgctggggatgatgaaagtcagatacgtgcttcaccctggtgaatgaagcacatccgtaacataactccataagcactgggaaaaccctactgccta

SEQ ID NO: 18334 - DNA, 100 bp, Homo sapiens
ccttcagcagtgctcagagtcttcaggttctagataacattcattgcccacacacaacctacttggagcagagttccctggagtctaggaggctcccctc

SEQ ID NO: 18335 - DNA, 331 bp, Homo sapiens
gttcactttgtgtctgggatatatttcacatgaaaacggacaaatccatttcattctgtttttgtagtatgtattttctgaatctagtatgatttatttaaccagttcacacttgtaatcccagcactttgtgaggtcaaggcgggcggatcacttgaccttagcagttctagaccagcctgggctacttggtgaaactgcgtctctataaaaaattcaaaaacaattggcgaggcgcggtggcaggcacctgtgatcctagctactcgggaggctgaggagagagaatcgcttgaacctgggaggcggaggttgctgtgagtcgagattg

SEQ ID NO: 18336 - DNA, 237 bp, Homo sapiens
ggagagtggaggaggggctgctttgagacagcatggcctctgatgcaagcagatagtttgatgttattataaacattcaaaatcctgtgcagagaatgctctagcctttcttttgccttctgttggcttcttttgggctctcttaggaagcacccaggcctgtgtagtcacctctggcactctcattctgctgcccagggcacagctgaggtccaagagtgtcaccagggctgcagc

SEQ ID NO: 18337 - DNA, 394 bp, Homo sapiens
gcttggtgcgcccgctgtcaccgccatggctgccccgtgtttgctgcggcaaggacgagccggggcgctgaagactatgctccaggaagcccaggtgtttcgaggacttgcttctacggtttctttgtctgcggaatcagggaagagtgaaaagggtcagccacagaattccaagaagcaaagtccaccaaaaaatgtagtggaaccaaaggagaggggcaagctcctagccacccagacagcagctgaattgtctaaaaacttatcttcacccagttcttacccgccagctgtgaataagggcaggaaggtagctagtcccagtcccagtggcagcgtgctattcacagatgaaggggttccgaaatttttgccaagaaagactttggtagag

SEQ ID NO: 18338 - DNA, 530 bp, Homo sapiens
  misc_feature (1)...(530): n = a,t,c or g
atttgaaaacctttntgacatgattacgaatttaatacgactcactatagggaatttggccctcgaggccaagaattcggcacgagcaaatcatcttgatttttcaaatatgaaaagtaggaattctgtggagaacttcccagttgaaaaatgcaagaaaaattagctctgtttagaagcaagttgcagcctgcagatcacagttgtgaacccccagatgagaggctcgtaacataatcctctcgccacgccctttgatgtgcaagcaccactggcaagaagtctggatacttttctcgtaagattctaaccagtcccagaggaaaaaaactatttcttacttttctctggaagaatgtatatgttgattaaaggagtgttactacgttaagaccacttttctgtgacttttactgcctcagtctgcagctcaccaacctgttcaaggctaggagctggaagtcatttgctatccccttttcctcgcctncagccaatccatgaccaagtcttaaagaatggatcacttc

SEQ ID NO: 18339 - DNA, 356 bp, Homo sapiens
gggacttgcttttatgtttcactggtgagtttggggattcctgtggcagtagcatacctctagattattttagtttttaacatatttggatatatcctaaggtaattatcttcaccttactattattcttcttcagaagtgttttagctagacttatacctttatttatccctataaatttaatagtaggcttgctaaatccctaaaaaaattctcataacagttattgaaatattttatattctttatacattaatatggagattctagcatcttttcgatattgaatctttcaatgcgtgaatgaacatagtttatctccccacatatttggacattctttaacatctttcaag

SEQ ID NO: 18340 - DNA, 465 bp, Homo sapiens
gaacttgacatgattacgaatttaatacgactcactatagggaatttggccctcgaggccaagaattcggcacgagccctgacttcccgcaacatctctccctttctttttataataaatgtgccatggcaatgaaggcttgttcgttctcttgattttgacgcaggattctttgactagtctggcaaactaaaaacaagccgattaaacagagaaacataattccaaaatttactacagtggagcccccaatagacttaatccaagtcctggggtttaatccagaaagattttctgccacctgatctaacgcctcagctccaggcacaatggataagtgagcttgagaggcttcaaaaatttgtctctttaatttagttatgtccaatgataaattatcttccctacccagaagatgtcttttgaccatttcccatgaatgatcagtctcgttataggaatacg

SEQ ID NO: 18341 - DNA, 325 bp, Homo sapiens
gcggtcaccattcctggaaagggactgtcccaagccacttaccttcccgaggagtctgctggttctccttgaggatagtgcttagataacagactcattaaacatttactgagtgtctgtcagggatcattcacatccacatcatcctcccggcccctccccgtgttgttcatggagggagtactggcggtccccattttcatgtatggagacttcaggtgaaagaagttaagtgaattctttgttgagtcacaaattttgagccagtcagaatttgaacctaagatttttgactgctggttgtcacacttcccgcccacactca

SEQ ID NO: 18342 - DNA, 494 bp, Homo sapiens
gggcagacaatttttcgctccatgatgcgttatctgggtctggaaacccaaaccctcaaggatggcctggcgcatgggggaaccagcctgctggggcagggggctacccaggggcttcctatcctggggcctaccccgggcaggcacccccaggggcttatcctggacaggcacctccaggcgcctaccatggagcacctggagcttatcccggagcacctgcacctggagtctacccagggccacccagcggccctggggcctacccatcttctggacagccaagtgcccccggagcctaccctgccactggcccctatggcgcccctgctgggccactgattgtgccttataacctgcctttgcctgggggagtggtgcctcgcatgctgataacaattctgggcacggtgaagcccaatgcaaacagaattgctttagatttccaaagagggaatgatgttgctttcactttaacccacgcttcatgagaa

SEQ ID NO: 18343 - DNA, 359 bp, Homo sapiens
gctaaaacaagaacaaactaaatccgccagttctttgattaccacagaaatgttacaggatatacagaggcacagctcagtaagtaggcttgctgatagtagtgatttacctgtgccccggacacctggctcaggggcaggggaaaaacataaagaagaacctatagatattatcaaggccccctctagtaggcgtttcagtgaagacagtagtacatcaaaagtaatggtccctcctgtcaccccagacttgcctgcctgcagccctgccagtgaaacaggaagtgaaaacagtgtaaatatggctgcccacacattaatgattctctccagggcagccatttctaggactacttcag

SEQ ID NO: 18344 - DNA, 492 bp, Homo sapiens
  misc_feature (1)...(492): n = a,t,c or g
atttggaaaannncggaatcncttntatgacatgattacgaatttaatacgactcactatagggaatttggccctcgaggccaagaattcggcacgagaatcttgcagtgtggtaataaagacttctacactttagtagcactaaaatacgagtttcaggcaagattcaacagattctgttatttggtggctgagattttgcctagagcaggagggcagtgattttgggttttcgctattattgttggaactagggccaccatatgggcttctgcacacgcatcttgcttagtggtcctcgactgaggagaggtgaatgaagctgagatcttctctccaagccatggagggcttgaggtatcaactgccccaagggaaggattgtctttttctaccnataaggctcacctnctgnccaagccctgcnccagtggngatgccttnntganttnntnnnntnntgtntggcanntngtncntnnntnanntaga

SEQ ID NO: 18345 - DNA, 117 bp, Homo sapiens
gaactggatatagaatgacaaggttctgatcagctgtgtaaatgtccaggtgtctctgtgagtattgcatattattcaatgaactacagagcaaatgcagatggcttcttagttttg

SEQ ID NO: 18346 - DNA, 378 bp, Homo sapiens
gatacgaagggactttaaaaaatttgtggaaatactgaagtaaaagatgataaaaaaataaaaactttatttcttggctgggcacagtggcttatgtttgtaatcccagtactttgggaggctgaggtgggaggactgcttgaggccaggagttcaagaaattagccaggtttggtagtgcatgcctgtagtcccagctacttgggaggcagagggaggaggattacttgagcccaggagtttgaggttgcagtgagctgtgatcacaccactgcactctagcctggacaacagagcaagatcctctctcttaaaaccaccaacaatgacaacaacaaaacaacatttttatttctcaatgtaagctccatcaaggtc

SEQ ID NO: 18347 - DNA, 495 bp, Homo sapiens
  misc_feature (1)...(495): n = a,t,c or g
gaatacatggtatgggtatatttgtatacaattctttcatatatgtaggttggtgtaaccaccctccacctttctcctagtcccccaaccccaccatctctaacccttggcagccactaatctggtctccatttttataatcttgtcatttaaagaatgttataaatatgangtcatacagtatgtaaccttttgggattggcattttggcttttttcactcagcgtaattttcttgagattcanttaagtttgttnngngngncacanagctaacncntttttaggggccgagtagctttcnaacncantctctttgtncagctgcaagnaggttttaaggtcgttaccancattttatnttacanagnccctntnagngggtatnnacgnccncgtttcnngnnaananttanngnttncncaggtaccccangnnntngggnannntcccngggaacccccggnttncaaacaancngggggaaaanccctg

SEQ ID NO: 18348 - DNA, 322 bp, Homo sapiens
gcaaggtctcacactcctcctgccagctctgtcaccctggccaccacccaacctgtccttactcagagctgcgggctgagggcatctctgagtgtctctgcctggagcaggggtggtttctacggtgacagtgacgtgactcagagcttttcgaactgtgctcccacggggaccactgggcccctcaggggaagctgctaggggaaggactggccgtggctccagaatgtgctgcctttttaagttttgtttgttcacactcctatatatgattgtttgcacagagggcgctcctgtttttaaaacattttgaaaacccctg

SEQ ID NO: 18349 - DNA, 465 bp, Homo sapiens
  misc_feature (1)...(465): n = a,t,c or g
gatggntttgaancctttgaaaaccntatgacatgatnacgaatttaatacgactcactatagggaatttggccctcgaggccaagaattcggcacgaggaactccagtggtcagacctgctcatatctcagcatttcttcaggaccgacctatcccagaatggtgtggagtgcagcacatacacttgtcaccgagccaccattctggctccaaggctgcatctctccactggactagcgagagggttgtcagtgttttgctcctgggtctgcttccggctgcttatttgaatccttgctctgcgatggactattccctggctgcagccctcactcttcatggtcactggggccttggacaagttgatactgactatgttcatggggatgccttgcacaaagctgccanggcgnggnttctggcactttcagctttaccnttncanganttggttntntnaacta

SEQ ID NO: 18350 - DNA, 249 bp, Homo sapiens
aattcggcacgaggaatgaaatgcaagggcacaaacaatgtaccagggagagaatagaagatgggaatgaacagtttgaactatttgctcagcagaagggcaccacaatgctggggtagtggttttcccatgcgtccactgtcccttctttgggatcttttgttgtcccctgtctcctttggccagataaaagcacagctgcagcattgcagataacaagtaggccgtacttatccccctaaatctcgg

SEQ ID NO: 18351 - DNA, 488 bp, Homo sapiens
  misc_feature (1)...(488): n = a,t,c or g
ccatagctatgacatgattacgaatttaatacgactcactatagggaatttggccctcgaggccaagaattcggcacgagatctggggaactgtcattgccagcagaggctgttccttcctgctgtttggagatgtgactcattcattcactcactccaccctgcctctgcatcccttaatggagaaacgggcctaaaaccaaacgggtaaaaagccctgggccatccctgtcttcctgtcccttgtctgcccagttgacacctactggtgacttctagggcactgaggagtgaaagcgcctagggctggagaatagcgctgagttgggtttgngactcttccctctccctgcctcacaggattgtgactccccagcccctgccctcaaagcttcagacccctcaggtagcagcaggaccttgtgatcttggccccttggatctgagatggtttttgcatctttccaggagagcctcacattcttctt

SEQ ID NO: 18352 - DNA, 417 bp, Homo sapiens
gcggcacgagcgtccctgctagtactccgtgctgtgggggtcggtgcggatattcagtcatgaaatcagggtagggacttctcccgcagcgacgcggctggcaagactgtttgtgttgcgggggccggacttcaaggtgattttacaacgagatgctgctctccatagggatgctcatgctgtcagccacacaagtctacaccatcttgactgtccagctctttgcattcttaaacctactgcctgtagaatcagacattttagcatataactttgaaaatgcatctcagacatttgatgacctccctgcaagatttggttatagacttccagctgaaggtttaaagggttttttgattaactcaaaaccagagaatgcctgtgaacccatagggcctccccagtaaaagaccattc

SEQ ID NO: 18353 - DNA, 460 bp, Homo sapiens
  misc_feature (1)...(460): n = a,t,c or g
gtgtgnnnnnnnttgnanaccgctatgntangataacgaatttaatacgactcactatagggaatttggccctcgaggccaagaattcggcacgaggggggtctctctgtgttgcccaggatggtctcgatctcgtgacctcgtgatccacccgcctgggcctcccaaagtgctggtattacaggcatgagccaccgcgcccggccaatctttctggcactatttcttaattcagattagcagcctccaactatattactcctatataaaaacgcatcttgataacttctagtcataattttttcatccctttaagatgagcaggaacagcatctttactaaaattaaaattctacactgcaactggaattcatttcagaatgaaagctttggaattcttaccgatatctttggaggtaatctttcgcctttgtttcaagactggttgtgatgcttctac

SEQ ID NO: 18354 - DNA, 343 bp, Homo sapiens
gagagttacgggactcaactgcaccaccaatcaccccattaacccaaagggcctggagttggatcccgagggttccctgcaccaccagcaaaaacgggaagctccaagccgcagctctgcttcctcgggacctcagatcctgaaatgcccggaggctgagtgtttcaggctgcgctgtgagctcgggcccctgcaccaacaagagagccaaagtctgcagttgcatttccgagtctgggccaagactttcttgcagcgggagcaccagccatttagcctgcagtgtgaggctgtgtacaaagccctgaagatgccctaccgaatcctgcctcggcagctgccc

SEQ ID NO: 18355 - DNA, 383 bp, Homo sapiens
gaatcgaggagaggaaaaaacagctgagcttcattagcccccctacacctcagccaaagactccttcttcctcccaaccagaacgacttcctattggcaacactattcagccctcccaggctgccactttcatgaatgatgccattgagaaggcaaggaaagcagctgaactgcaagctcgaatccaagcccagctggcactgaagccaggactcatcggcaatgccaacatggtgggcctggctaatctccatgccatgggcattgctcccccgaaggtggagttaaaagaccaaacgaaacctacaccactgatcctggatgagcaagggcgcactgtagatgcaacaggcaaggagattgagctgacacaccgcatgcct

SEQ ID NO: 18356 - DNA, 518 bp, Homo sapiens
gcggcacgagtgacctcgagccctcaggaacgagatggcggttctctggaggctgagtgccgtttgcggtgccctaggaggccgagctctgttgcttcgaactccagtggtcagacctgctcatatctcagcatttcttcaggaccgacctatcccagaatggtgtggagtgcagcacatacacttgtcaccgagccaccattctggctccaaggctgcatctctccactggactagcgagagggttgtcagtgttttgctcctgggtctgcttccggctgcttatttgaatccttgctctgcgatggactattccctggctgcagccctcactcttcatggtcactggggccttggacaagttgttactgactatgttcatggggatgccttgcagaaagctgccaaggcagggcttttggcactttcagctttaacctttgctggggctttgctatttcaactatcacgatgtgggcatctgcaaagctgttgccatgctgtggaagctctgacct

SEQ ID NO: 18357 - DNA, 495 bp, Homo sapiens
  misc_feature (1)...(495): n = a,t,c or g
tttgaaancctttgngnncccancagctatgacatgattacgaatttaatacgactcactatagggaatttggccctcgaggccaagaattcggcacgagagaattcaagctaaaagtagagaataagaccttaatattacaggattgtattatttttccttgaagcttggctcctactttctaactgagggtatatattcacaaatgcttttctttatacacatagattagtgcttcctgtctgtttcatggactgagagttcacacatctccagccttccacaaccaccttcctaaactctatagtctgtcaattatggctgtggcagaaaccatactttacagacatgattgtatttcaccatttcaggagcatttggaggataatacatccccatgtcacagataagcaaacaaagccaagaaactttgcctttggtcacttccctactaaggcatggcaggctttcccttctacactgcacacccaacag

SEQ ID NO: 18358 - DNA, 383 bp, Homo sapiens
ggcatccagttaacagtaggctcttaccaataacataaacagtcaattaacacatattttgtttgttgtatgtataatacactgtataaaatatgttaaaatactgtatttttacaataaagtaagctaggggaaaaatgttattaagaaaatcataagaaaaaataaatttaccgttggttaaatggaagtgggtcatcataaaaacctccgtcctcatcttcatgttgagtaggctgagcaggaggaagaagaggaggttagatttgctgtcttggggtggcagtggtggaagagaatccacatatgagtggaccagtgcagttcaagctcgtggtgttcagaggtcaagtatacttcatacatggcagtggattgttgtg

SEQ ID NO: 18359 - DNA, 523 bp, Homo sapiens
gattacgaatttaatacgactcactatagggaatttggccctcgaggccaagaattcggcacgagatctttttaaaagtgattctattgaatacttagtggttttcacaaagtgaatgatcttaaaattaagcagtttaaaaatatttatgtttcacactgtattttcaattgtaaagagaatactgcctttgaaatactgaatttgagaatgtgtgtcactaaatagtgctgtgtctgtttcaatccatcaccccctcttacccccccattacttggaagggatttgctgaaattaccactacgatggcagtcttgcattttagtgacttggagcttcagtaccaagcttctctttcactttctctccatctttgtttctctcagatttctgaggattttcaactgccttcttacataaattgaacatgtttggaaccaggcaataaagtacaattttggagtctagtctgtagcattctcaccgctttgccacgttagttaattcaagtctcctctgcctc

SEQ ID NO: 18360 - DNA, 380 bp, Homo sapiens
  misc_feature (1)...(380): n = a,t,c or g
gggcttctagacacagcctggccaacaggtgcatgacccgggtgagaataccagcacctgggaggcatccgttggtagggctgctggtggttacattcccaggccagtgcagcccatcccagacatcaggtagagccaaatcccaagagaactgaagcctccctccttcctcccaacctgggatgccaggtctgaaatgcccagtaggacctgactgtctcaggagggggtattttctcaggcctgatgaagctgcctcttttcttcttcctgctagagccaggcctgaggctccctgggagcccagtgcaatcatcaagcccttctccctgcactcaataaaccctcaataaatattctcattgtcaatcngaaaaaaa

SEQ ID NO: 18361 - DNA, 469 bp, Homo sapiens
gcacggtttcaccatgttggtcaggctggtctcaaactcccgacctcaggtgatccgcctgcctcggcctcccaaagtgctgggattacaggtgtgagccaccatgcctggccagaatttcttatattaagtcctaggtatttgaattctcctcttgccttaaatttcccagcatgttgaaggcaggtcataggaccataggcaaggaaggaaaattaatacttaattgagcacccactaggtatgcctgctctgtgaacataccctgtggagatccccatttttacagataatcaggttgaggtttagaggggtaacttatcctaataagtctcatagctagtaaaaggcagaaccaggcacaaaaatcaagcagggaaggaaccaaccaggattcacatgttgtataacactctaaagtctattctctccatgatataccctaaactgccttctatggaacaaaaaa

SEQ ID NO: 18362 - DNA, 541 bp, Homo sapiens
  misc_feature (1)...(541): n = a,t,c or g
gatttttctttaaagaagttatcggaaaatactagcactctgtagaactgaccaaaagttatattactagcatttaaaaccagtttttctctgatattcttcatgtttaggcctatagatattattgagcataacaatattgagcataacaatatgatattgagcataacaataacattaatgtgagatagaggaatggaaggtaaacaggaagagtaaagtgtgattgactattcaaacctgttatggcacttcccttctgtgttaccttctgtgtatgtgtgtgtgtgttttaaagaaaatgactaacaaggaacaatatgctaactggataaaaagaagagtgaattaatggagggccaagcatcttcatattcacttacagttatgagttataatcaggcttaaaacagatgactaaacaaaatcaataaatgctgataactttatatacgtaatgcaaaagaaatgcataataantttttggatattggataatttgggngtatttgcccatctttattaagagttatatatctga

SEQ ID NO: 18363 - DNA, 437 bp, Homo sapiens
  misc_feature (1)...(437): n = a,t,c or g
tttgattaccnttnatgacatgattacgaatttaatacgactcactatagggaatttggccctcgaggccaagaattcggcacgagtgaaggtctacgtgtaggtttttatgagtcagatgtaatgggaagaggccatgcacgcctggtgcatgttgaagagcctcacacggagaccgtacgaaagtacttccctgagacatggatctgggatttggtggtggtaaactcagcaggtgtggctgaggtaggagtaacagtccctgacaccatcaccgagtggaaggcaggggccttctgcctgtctgaagatgctggacttggtatctcttccactgcctctctccgagccttccagcccttctttgtggagctcacaatgccttactctgtgattcgtggagaggccttcacactcaaggccacggtcctaaacta

SEQ ID NO: 18364 - DNA, 377 bp, Homo sapiens
cctggccctgctcctcttatatctaaataaagtgctgttaaagaagatgaaatgacccatacatcttgctctccaaaaagaaatgtgcactctgctctggctgctcatcccactgaagctgaccatcaagcacaccattgtacctccttggatcttggtttttcatcattaatccaggggcttggatgacatgatcataaataacccaattcaggcagtgcatggggtctcattcctgtaatcccagcactttgggaggcaggagggatcacttgaggccagcagttcgagaccagcctgggcaatatagggaaatactctgtctctacaaaaaatattaaaaagaaaggacccagcgcagtgtcacagtctatgtt

SEQ ID NO: 18365 - DNA, 335 bp, Homo sapiens
  misc_feature (1)...(335): n = a,t,c or g
aattgnanncattngctatcgacatgattacgaatttaatacgactcactatagggaatttggccctcgaggccaagaattcggcacgagcaagtacaaagataagaatctcttaaatgtttcaggaaagccaacactataaaaaagaatcaacaaaaaagaacttaggatcaaataaaaagttactagaacagagttctaaaatgtgtacctaatacttttagacagatagggaatttattatatccttaacaaaaacaagtggctataaaacaagagtaggcatttatttaaaagagtcaattagagatctggggaatgaaaaaaaaaaaaaa

SEQ ID NO: 18366 - DNA, 331 bp, Homo sapiens
tgcccagtaatttcttaatgttagaaatgtaggttgagcctcatagaagatgatgctgcagagccctttaaagagaagaaaactttgtgtctgtgtgttcatttcaaagctgtgtttgtgacaccacacttttcgagggtattctcaaagtcaacactaaattgtcagaaagcagacggaaccattttctagaaactaggtttctattttcttgaactagagaaaatatgcccagctagagatcagggcaaagttaacttagactacaaaattcctcagttttcattggtgtatgggagaggtaatttgatgtttctgtaggtgattactg

SEQ ID NO: 18367 - DNA, 466 bp, Homo sapiens
  misc_feature (1)...(466): n = a,t,c or g
ggaagctgagtacagagtctgaatgttattactgagctaaatcggttagactagctgataggttggagcagagccagagttctcagtctcggcactcgtgacattttgggccagattattctttgttgtgtatattataggatgtttaatagcatcactggcctctacacactagatgccagtagcaatccttgcaaccctcagttgtgacaattaaaactgtctcctgacagatttcccctggcggggacagttgcccactggggtagagtgataagggatgggtgtgacttagagtttcaaatttcaagatctaataataaagcctctcactgaaacaccagagcactgaatgcanattacatggtaaaaattanggagtgactggtgcttctactttaccactggattaatagatgagtcgcaaacctttctgaagatattaacttaatttttctntntttcc

SEQ ID NO: 18368 - DNA, 518 bp, Homo sapiens
  misc_feature (1)...(518): n = a,t,c or g
ggatttacatgatttgaaaatagctattgctaatattattgatgaaatcattgaaaaattaaaaagtcttgatgagcactatcatatccgtgtaaatttagtaanaacaatccatgatctacatttgtttattgaaaatattgattttaacaaaagtggaagtagtactgcatcctggattcaaaatgtggatactaantaccaaatcagaatccagatacaagaaaaactgcancagcttaagagacacatacagaatatagacatccagcacctagctggaaagttaaaacaacacattgaggctattgatgttanagtgcttttagatcaattgggaactacaatttcatttganagaataaatgacgttcttgngcatgtcnaacactttggnatanatcntantgggggatttgactagctgcnaaaacnatgcctnnagaaccnaantccncgngttaccanaggnntcaagttnacccacagancnaggtttaacggnnanctngttcgct

SEQ ID NO: 18369 - DNA, 1305 bp, Homo sapiens
  misc_feature (1)...(1305): n = a,t,c or g
attacgaatttaatacgactcactatagggaatttggccctcgaggccaagaattcggcacgagcaaagataaaaatggcatttcatgactagtaatttataagaataattagaaataattctactggctcaagtgattcttgagaatgaaagagaagtgtagggaacaaaaagcttcaggattgacacaatgccaaccctccacgaagtcaagcagagtggttatacattgtacatgaggaacactctgcaaatgcgagtgaatgcatgggtaaacctggaaatttgcttttctgaccttttgttccaatttcacaggtggatttgagcttcagcccatcacaaagtctcccagcctcacacgcccacctgcgagtcacagcggctcctcagtccgtctgcgccctccgtgctgtggaccaaagcgtgctgctcatgaagcctgatgctgagctctcggcgtcctcggtttacaacctgctaccagaaaaggacctcactggcttccctgggcctttgaatgaccaggacgatgaagactgcatcaatcgtcataatgtctatattaatggaatcacatatactccagtatcaagtacaaatgaaaaggatatgtacagcttcctagaggacatgggcttaaaggcattcaccaactcaaagattcgtaaacccaaaatgtgtccacagcttcaacagtatgaaatgcatggacctgaaggtctacgtgtaggtttttatgagtcagatgtaatgggaagaggccatgcacgcctggtgcatgttgaagagcctcacacggagaccgtacgaaagtacttccctgagacatggatctgggatttggtggtggtaaactcagcaggtgtggctgaggtaggagtaacagtccctgacaccatcaccgagtggaaggcaggggccttctgcctgtctgaagatgctggacttggtatctcttccactgcctctctccgagccttccagcccttctttgtggagctcacaatgccttactctgtgattcgtggagaggccttcacactcaaggccacggtcctaaactaccttcccaaatgcatccgggtcagtgtgcagctggaagcctctcccgccttcctagctgtcccagtggagaaggaacaagcgcctcactgcatctgtgcaaacgggcggcaaactgtgtcctgggcattaacccaaanncnttaggaaantgtaatttcnacggtgncncnaaggactanantcccaanaacntttttggganganggggccttannttcccggaanacgganggaaa

SEQ ID NO: 18370 - DNA, 532 bp, Homo sapiens
  misc_feature (1)...(532): n = a,t,c or g
tttganntntggannaccagntatgacatgattacgaatttaatacgactcactatagggaatttggccctcgaggccaagaattcggcacgagaacttgaccagatccatacccatctttgaacctcagttttctgctttgtaaatcaggtataaaaataacgaccttgcagaatgggtaagagggttctccaggaaatgtaagctagaaaagcatctggggtgctgcttggaaaatggaggcatcaaaaaacacgggttctgcattcattcgttcgttcgttcattcattctttgttatttactgaacatctaatatagcccaggcatttggctaagcccaaagggtatgggtgctttgacaggccctgaactatttgcttttttcctgggaaataggtgagcagggagtctgtgtatcagcaggagaatgggaaacagggatccggagcccaggcccaagaggtaggatgtgcttgagagatggtagtaatcctgagacattttcttctcccacctctttgactgcatg

SEQ ID NO: 18371 - DNA, 422 bp, Homo sapiens
gtggtcttgctcttactccttttggttgaacaagcagcggccctgggagagcctcagctctgctatatcctggatgccatcctgtttctgtatggaattgtcctcaccctcctctactgtcgactgaagatccaagtgcgaaaggcagctataaccagctatgagaaatcagatggtgtttacacgggcctgagcaccaggaaccaggagacttacgagactctgaagcatgagaaaccaccacagtagctttagaatagatgcggtcatattcttctttggcttctggttcttccagccctcatggttggcatcacatatgcctgcatgccattaacaccagctggccctacccctataatgatcctgtgtcctaaattaatatacaccagtggttcctcctccctgttaaagactaatgc

SEQ ID NO: 18372 - DNA, 453 bp, Homo sapiens
  misc_feature (1)...(453): n = a,t,c or g
aaccgntntgacatgattacgaatttaatacgactcactatagggaatttggccctcgaggccaagaattcggcacgagccaggagcggttcctgagtgacctgcgtcgtgatgtccagaaggttgttggctttgatgctgtgatgcgggtccggacaagcactggtatccgtgctgtagatttctttggagctttctacatgagcaacacgacagatgtggagctggctgggctagatggggacaaaacagtgactgtggagttcaagcatgacgatcggctcaatgaagagagcggagctctcctgcagtgtgccctgctttacaccagctgtgcagggcagcgtcggctccgcatccataatctggccctgaactgctgcacccagctggctgatctatatcgaaactgtgagactgacacgctcatcaactacatggccaagtttgcat

SEQ ID NO: 18373 - DNA, 337 bp, Homo sapiens
gtagatttcttataattcaccttagtgagatagatgattgagaacatggaggagtctgctcgtactttttcacttattgaagacaagtatagttttaggtttttaaatgtcgtgtttactttggaattttgggtcaagagaattcttgtgttctagaccgtttttcagactagaaaccagtgatctctaatagatgaagactataattagaaagtaaagggaaataaggcagatttgataagaagcgcaaatggcagttaaaatgaaaaggtgttttatgtcaccagtatttagagaaatctttttgtttggagacagagtttcactcttgttgccc

SEQ ID NO: 18374 - DNA, 477 bp, Homo sapiens
tgaaccctttgaatgccttcgaatttaatacgactcactatagggaatttggccctcgaggccaagaattcggcacgagcggcacgagaaaaaagggccccttcaatattttggggacatttcagaagatccagaagccagcttggaggggtttccactggccaagtctgggataaatttgagtgtcaaaataaataagaacaataaggccgggcacggtggctcaggcctataatcccagcactttgggaggccgaggcgggcagatcacctaaggtcgggagtttgagaccagcctggccaaaatggcacaatcgcgtctctaccaaaaataccaaattagtcaggtgtggaggtgcgtgcccgtaatcccagctacttgggaggcggagtcaggagaatggcttgaacccaggaggcggagattgcggcgatctgagatcatcccattgcactccaccttgggcaacaagagcg

SEQ ID NO: 18375 - DNA, 421 bp, Homo sapiens
ggtgctcgtgtgcacaggtgagtcatgtgcgtgccagtgtgcgcaggtgacgtgtgtatgctggctggggcatttcctgttttcacacccatgcatgacagcacccagaggaagacatgcgtgtttctcaggcttcttctcagctcagggctcactgcaggattgtgtaggcctcctgcctcgggctccatgctgaagggtttgcctggacccactggcaagaacagccctgccatgactggcttccctaactccaggcctgaggctgggctgggtgtgtgggggccagccttccctgatgcccactcggggctccacacacggagcctgctgtatgaaagggcctgggagaagggaggagggaacgaggagtcttggcacagccagcagcacttgctgcagacacgactcactgacaagg

SEQ ID NO: 18376 - DNA, 454 bp, Homo sapiens
  misc_feature (1)...(454): n = a,t,c or g
ttgnattngataccgnttgactgattacgaatttaatacgactcactatagggaatttggccctcgaggccaagaattcggcacgagctcaactggtctccaacctcaagaaggagggttccacccacaattggcaacacatcaccgaccaaattggcatgttctgtttcacagggctaaagcctgaacaggtggagcggctgatcaaggagttctccatctacatgacaaaagatggccgcatctctgtggcaggggtcacctccagcaacgtgggctaccttgcccatgccattcaccaggtcaccaagtaatgtccctggtgcgaggaaacagagacaacctttctgtcttcagcctctgctattgagagcttcacacagacaatgagagagggtggatggtggngagtggatcatttctttcagccacagtgtgtaacactcagcatttg

SEQ ID NO: 18377 - DNA, 320 bp, Homo sapiens
gctatgattgattacgaatttaatacgactcactatagggaatttggccctcgaggccaagaattcggcacgagcataaaggatctataagagaagcaagaaaaacgcgctcccactaattctcatatggaaaaatcagggttttgaagacttcaggagctacagagatgctagcaccccagctctgcttgaattttaaattacattaatatgtattccctttttatatagctactcccgagcccggagaggacccacgcgtgacccgggccaagtacttcattcgagatgagtttctgaggatcagcactgccagtgga

SEQ ID NO: 18378 - DNA, 370 bp, Homo sapiens
gaaatgatatggatgcaccacctttgtaattcatggttttctggtagcagagtgtcctggttcacaagtgtaccgtcatgtactaaatgttcccctgttcttggcctcttaagttgcttccaatttttatttttataaagaatgttccaaccaacattttaatacatgcagctcctttctgtcttctgttgagttattcttttagaaaacaatctcgggaggtggggttccggagttaagaggcgagataatcatttttaaaaggtatgggcatcagattggctttgagcagtgctagcactgtgcctgggaccgaggaaatgctgacaaaggccatttgtttcacatgtagtcagcgttcctggttgac

SEQ ID NO: 18379 - DNA, 261 bp, Homo sapiens
gccctgccctgctgggggtgctctttggacactggattatgaggaatggataaatggatgagctagggctctgggggtctgcctgcacactctggggagccaggggccccagcaccctccaggacaggagatctgggatgcctggctgctggagtacatgtgttcacaagggttactcctcaaaacccccagttctcactcatgtccccaactcaaggctagaaaacagcaagatggagaaataatgttctgctgcgtccc

SEQ ID NO: 18380 - DNA, 342 bp, Homo sapiens
gcagtttcctaataatctccttagtagcaaggacatttttctcctcatacagaatccagtacagggttatacagtgcatttgagcattacctttcttgagttacctttgctttgaacatttcctcagcatttctcagtctttcatgccattgacaccttggaagaagccagaccaactatttttaaagtgtccaagggttttgaggttttagcaggtgtgtgaatgtgatctatctgggtttgggaaaaatgaacagttgtgagtgaggtggatacaggtggtggggagaagttggaggcagtggactttgtgctctgattcccacaggcttaggttggtgg

SEQ ID NO: 18381 - DNA, 451 bp, Homo sapiens
  misc_feature (1)...(451): n = a,t,c or g
gcctgggcctgccctgttccacatggtgaggcagaaagcaccatgggccagagggagtggtatggacaaatgaagcttattggcagagagaggctaccagctgcggcagggtggaagccagggcattccaggccggggcactgggatttacaaagttatttggggggcactgggaaggttgaaggggagtagagcagtcacttgggggagtaatagacaatgaactcccaaaaaacaagccggcatcagatataaagatccttaaatgccaggccaaggagcaagggtttgtcctttggtggattatgggcacgtgaaagctgtgtataaagctttcgaaagcagccaattgaatgaaaagagcacagtcttgagtgccaagaaaactgggtctaaactcagcttaatcgtgngcagtccccagctggaggggcacccaggatatttatgc

SEQ ID NO: 18382 - DNA, 360 bp, Homo sapiens
  misc_feature (1)...(360): n = a,t,c or g
atcacncgttntgacatgattacgaatttaatacgactcactatagggaatttggccctcgaggccaagaattcggcacgagaagaaagttgaagccaaattccttttacagggccagcgtgggggtgagtggagagtggagggatgggaactggtagaaagtgttnnnnnntacnaaggaatctgactatctgtntanacagcataatgctntgattcacctaaaatntnatgattgtttatagaaattataaaaatccttgataanatcacattgacagatgaanataactacttttgaagattannnttgactcagctcanctgnntatnctcagtgttagganncttcctacccta

SEQ ID NO: 18383 - DNA, 674 bp, Homo sapiens
tcagaggttacatggccaagattgaaacttagaggagtatagttacataaaagaaggcaaaacgatgtataaatgaaagaaattgagatggtgcacgatgcacagttgaagtgaacttgcggggtttttcagtatctacgattcatagatctggaattcgcggccgcgtcgacgaggactgctgtctgccctctctggtcaccctgcctagctagaggatctgtgaccccagccatgaggaccctcgccatccttgctgccattctcctggtggccctgcaggcccaggctgagccactccaggcaagagctgatgaggttgctgcagccccggagcagattgcagcggacatcccagaagtggttgtttcccttgcatgggacgaaagcttggctaccagcgtgcattgcaggagaacgtcgctatggaacctgcatctaccagggaagactctgggcattctgctgctgagcttgcagaaaaagaaaaatgagctcaaaatttgctttgagagctacagggaattgctattactcctgtaccttctgctcaatttccattcctcatcccaaatgtcattcgcgtccgcgaattcggatcctcgagagatctctttttttgggtttggtggggtatcttcatcatcgaatagatagttatatacatcatcccc

SEQ ID NO: 18384 - DNA, 1180 bp, Homo sapiens
gaaggaatctctttgcgttctttgacatggcctaccaaggctttgccagtggtgatggtgataaggatgcctgggctgtgcgccacttcatcgaacagggcattaatgtttgtctctgccaatcatatgccaagaacatgggcttatatggtgagcgtgtaggagccttcactatggtctgcaaagatgcggatgaagccaaaagggtagagtcacagttgaagatcttgatccgtcccatgtattccaaccctcccctcaatggggcccggattgctgctgccattctgaacaccccagatttgcgaaaacaatggctgcaagaagtgaaaggcatggctgaccgcatcattggcatgcggactcaactggtctccaacctcaagaaggagggttccacccacaattggcaacacatcaccgaccaaattggcatgttctgtttcacagggctaaagcctgaacaggtggagcggctgatcaaggagttctccatctacatgacaaaagatggccgcatctctgtggcaggggtcacctccagcaacgtgggctaccttgcccatgccattcaccaggtcaccaagtaatgtccctggtgcgaggaaacagagacaacctttctgtcttcagcctctgctattgagagcttcacacagacaatgagagagggtggatggtggtgagtggatcatttctttcagccacagtgtgtaacactcagcatttgaatgtttctcagaaaagaacatgtactgacacagggcagaggcatccatggctggcgtctggaatattaaaccaaactctccccggtccttttttctccaacttttctcaaagagtttacatgtgcaagaaagtcatcgcaccaaaaaacctgtcaattatgccattgcaatatttcagaagctttaacctgaagtgtcaggttcctcgtgagaaacagcacacgttagaggctttgagagaaggcctagttctgtcatgagtagtcggcctcgtgtctgtcctcccatcttggaacaaccttatcaacaggccgcactgcagaaatgatgttttatgaaaaccaatgaggctgctgccactccagcaagggaaataaatgcagtttcctggcttatttaagaaaaagagaaggctctcttttctcccttgcattgccggtctttcctta

SEQ ID NO: 18385 - DNA, 362 bp, Homo sapiens
gcgagtgcatgacccggaacgtgaagaatatgtaccctcctccttccttccccactaacaaagctgccactgtgaaatctgcgggggccaccccagctgagcctgaagagctactaactcccttagccccagcactcccatcaccagcctcaactgcaaccccaccaccaacccccactcacccgcaggctttagcccttccaccgctggctacagagggagccgaatgtctgaatgttgatgatcaggatgaagggagcccagtcacccaagaacctgagctagcatcaggtggtggtggtagtggtggagttggcaaaaaggagcagctgtctgtgaagaagcttcgagtagtactgttt

SEQ ID NO: 18386 - DNA, 332 bp, Homo sapiens
attctgctaaatcagattgactagcattacccattaccatacagaatcacacatgcactgaatgctgagtatgagctttattttgttgactgaggaaaaactatttaaacactctgagcctcagttctcatcatctgtgaattggagaagttaatgcctaactcagagggggattgtgtttatctaatgaaataattacggataaatagcatggcatggagtttggcagatggaaagctctcggtaacggtcatggcaatgtggagcaagctttacattttggaaagaagaatgagatgatgagacatggtactttagatgattagaggggg

SEQ ID NO: 18387 - DNA, 337 bp, Homo sapiens
gctgggcggctgaaggctccggaactgcgcctgcgcttttcggagtattgtgaggattgagatgactggagtgtgtgtggcctggagagttgctcaataaatatatgttgccttccactgtgaagagctgtaaagatgtctgacaagaaccagatagctgccagagcttctcttattgagcaactgatgtccaaaaggaattttgaggatcttggcaaccaccttactgagctagaaacaatttatgtgactaaggagcatctccaggagacagatgtggtcagagctgtgtacagagtcctcaaaaactgcccctctgtggctttgaaaaagaaag

SEQ ID NO: 18388 - DNA, 324 bp, Homo sapiens
tgaaacatttcctggcttcaatgtgcttatagttactgtcgttctctctgattttctgccatggaagtacactgattttaactattgatgtaagatactaacaagtctgaaaactaagctttagccactagaaaactgcaaaatcaacgaatcatccgaattttcacccagtagtaattactagtaaataggaatctgttaaatttaatacactgctgttatttaaaagataatttaaatagttggtgcttttggttacggttaataatttaattcagggcaggaaaacatatcactgaatattcataggttagtacctactta

SEQ ID NO: 18389 - DNA, 432 bp, Homo sapiens
atccgctatgactgattacgaatttaataccgactcctatagggaatttggccctcgaggccaagaattcggcacgaggtgacagtgatattgtgatttcttaattcttgcgatagtgacagtggtattggtctcaaatggctaactggacaaaatattgttgcctcaaattaatcttttggtttagatttatatcctacctttgaattttgataattgacagttaagtagtgtttagatctgaggtggccatgataaaatatgttggttctgacagttactaatttcttcccctattagctcttttgagtgaaggggaaaatacaccgcttttaacacttcagaataattatagaaaaaagaaccagcattgaattattataggaaacaaatttttgttttctacccttgccatttgaacctagctcccta

SEQ ID NO: 18390 - DNA, 422 bp, Homo sapiens
cttgacatgattacgaatttaatacgactcctatagggaatttggccctcgaggccaagaattcggcacgaggcaagaagaaccctttcttactaggctatcaaatagagattggctttgtgaaagttttcttttccagtccaggcagatgaatgagagtgaaaaatatgagggtgatgagaagtggtttgtctccccaaccctgataccctctagaaatctgcaaggtggacacttgtgttcaaatgtggttcattaacaaataaacttgtagtctaagaacattgctgtaactcacttctacttttctttacaagttaaggtgtggaaataccctggggctatcctgtttcattacttctctgaatccacagggaacttctccacttaggaaatcaaatttttgaggccgggtgccgtgg

SEQ ID NO: 18391 - DNA, 343 bp, Homo sapiens
gccagccaaaggtaaactcactgaaaactctgttaaatgctagatgatcatacaagccaccatagtgaaggtgggcggaagacaagacaccatagtgaaggtgggaggaagacaagacaccatagtgaaggtgggaggaagacacacttgatgttttccaaggccacacatttactaaggtggcagaagtggaaataatcccagggtcatctgctttggggccagtgttcctcccaggtgagtccatgaggtttagacagaggagggtcagccatagaagtggagaggatttctctggggccagacagtgtgttgtttattccacagagactccaagcacccc

SEQ ID NO: 18392 - DNA, 428 bp, Homo sapiens
  misc_feature (1)...(428): n = a,t,c or g
gaggccactcagaattcagcaataaaattaggaggttatccttctgagacagtttgaatttggttggtaagttgacctccagtttttttttctttctttgagaagagtcaacttgagtttttttgtttgtttgtttttaatttgaaggctcagaagagagatccaaggcttccagcatgtgggcttgtagagagtacttagagacgcgagatatgggggccagctgaaagtggtgaagatggttaagctcttgttttgctccaagaattggagtgggtaaggtatcttctcaccatgctcaatgcagttggtttgtgagatagtggggtgggagacacagggagagtttatgatgctccactgnaattagtccagtaactgngagaccattgagtaggaaccgggggtatcctcaagctttgtccctg

SEQ ID NO: 18393 - DNA, 323 bp, Homo sapiens
gtgactaaccaagaatgtgttataactgttgaggccccttttaacgtagtttaccccttctgctattacttagaattgatagtaattacatctctagggcaaaagatgactggaaaattgctttgtgttcttctcatgtaacatcatataagacctgttcacctaaaatctagtgagttgatttagtttgttctctgacattcttggcttctttaaacttgcttataaattaaggcttgcagtttgagtcatttggaaatgggcaatgcccagaactttcgcaacttgtgaacttgagttgaataatgtgtcgctttcctcat

SEQ ID NO: 18394 - DNA, 461 bp, Homo sapiens
acttggatgacctgattacgaatttaatacgactcactatagggaatttggccctcgaggccaagaattcggcacgaggcgtgggacaggaaaggtgctcgaggcacaacagaaaagaacttcccagaaatgagaactgaatctctgactgaaaggtatacaatatagtccatgaaaaatgggcaattaagttaataaaagttaagggtaaagcaagacttcctcagatgtgttgggtcagaaagagcatccacctcccagggcaggtagggaagacagggctggcctcgccctttccacagcaacgttcaattccacttctgaatcctaggcaagcgactcggtgcatcgttccctgcaaattgctatttatgttaaaaggcagctgagaaagattttcaagcgtgaaaaaactcagagagcagcataggagcaatgaaagcaaaccaaccaatgaacca

SEQ ID NO: 18395 - DNA, 403 bp, Homo sapiens
gtgacctgcagagtgcttgctctgggcagggatataagaattgagccttttctcccaaaataactgcctcctcagaagacctcctacaaggcatctggatcttgctccagtggctttgccccaagaaatgggatggaggaggggaatcttggactctctagctcttatttccagctctgcaacttgttctaggccaactgagtctctggctttccaagaatccttgatgaaggtttagcttctccagtatctgctcagagtgtctccttctgtcttaggtggatctagctccatagagtatttagtttattgtactttgctctagcacgaaagtacaaagaggaaaaactagaaggggaagaacatagaggggagagaaggctcaggaagcagtccagtaatg

SEQ ID NO: 18396 - DNA, 410 bp, Homo sapiens
ggaaggaacttggcctcatggatgtagtttctctcctttatgaacttgggagctgagtcctaagaaggagacggggaaacacatcagctattctgctgaggattagggggcctctcagagcaggaaaatcatcatcaagctccccaggtgttgcttggtatgatggcacatttggcagtgaagcctgtctatagcagggcacctgatctgaggaggagcaatgactaaatgtgctgtccaggtagacgggcctcagggcagctcctaagaggcctgcacacctctgaataacgtgggaacataactgccaacgggttctccttgcccactgctagacagagccaacttatcaggaatactgtctagcccgctgctaacagagccgacttatcaaggaactagagttttat

SEQ ID NO: 18397 - DNA, 198 bp, Homo sapiens
ccgctatgacatgattacgaatttaatacgactcactatagggaatttggccctcgaggccaagaattcggcacgaggagagctagcaccatgagcttcaacaccctgtctaaaaaacataaatttctttaatcattttgcctcttttctctgtgcttcaattaataaaaaatggaaagaatctaaaaaaaaaaaaaa

SEQ ID NO: 18398 - DNA, 335 bp, Homo sapiens
ggaagaagtcggagttgaaggtgagcagagtggggcgagtaggcccaggctggtttgaacaagcttctgttcacacttccacaacccctgcctgtgtccagtctcttccaggcccctgcctgtgtggctgtaccccaagcagctcctcttcctctggcctccccagggcacacagcattggctagggaccctctccctgtagtcagcagaccttgagagggtgttggggtgcaggaggattattggcatgacacctgtgaaagacaaagtagggagagccttctcataatgcagagctgtcacatgtgaggtgggaaggttgcagaaataaccat

SEQ ID NO: 18399 - DNA, 415 bp, Homo sapiens
ggatgaccctgagcaaggaaaatctgaggaagaacctaacaagacatgtgagagcagtaacactagtgctaccactacctccatccagcctaatctggaaaacagtaacagcagcagtgaactaaattcttcccagagtgaatctgctaaggcagctgatgatcctgaaaatggagaaagagaatctcatacacctgtctctattcaggaagagatagtaggtgatttcaaatcggagaagtccaacggggagctaagtgaatctcctggagctggaaaaggagcatctggctcaactcgaatcatcaccagattgcggaatccagatagcaaacttagtcagctgaagagccagcaggtggcagccgctgcacatgaagcaaataaattatttaaggagggcaaagaggtactt

SEQ ID NO: 18400 - DNA, 363 bp, Homo sapiens
gggagagtggagggaagcagagaggaaggtagctgggagcagatgtctcgtgaacccagagccacatctgccagacctggtgacaaagacaggctgtgtgccttcccagtcatatcttgtatcatttgttttctgtgccagctgggctttggaaacaaatgcagagaaactttatgttcttccttcattccctcttggaagttgcagatggatgccaagggtgaatatttattgttgacccattgaaagcaaactggacaggagaagggatgaggtgggggaaggggctaggttaaatggatccaagttcacacctattttcagtgtcaaagccccaaatcacacttgagccgtctcctcaag

SEQ ID NO: 18401 - DNA, 331 bp, Homo sapiens
gcaaatttgcactctgctccccctctgcaaaacacaccacggcagccaggagagagaaggcctgtgggtgtggggtcctttgcacctcacctcaacagatctgctctcccctgcggaaggcattttcagaaatactgacagtgtgttttatgcacatctgcatgggtgcacctcctgtactggatgatacacctgtgtgctgtggtcccctgatgctgggacttaggaactgctgctcctcacgctggtccagatcaccagccatgctggatggtcagggtgagctcttagaccttccacctggactacagtgacagcaggagagaatcgg

SEQ ID NO: 18402 - DNA, 503 bp, Homo sapiens
  misc_feature (1)...(503): n = a,t,c or g
tttggnaacagctatgacatgattacgaatttaatacgactcactatagggaatttggccctcgaggccaagaattcggcacgaggaagttttaaaaacatttctgcataattttaagtttctcaaatgcttctttcatcatctattgagatgattgaatggcttttctaatttaacctgttaatgtgctacatcacgttggaaaattaatgttaggccaaccttacaatcttgggattaactcttctttatcattatttggtttatagacccagtttactaataattttatttgggactttttgcatctgcattcttaaatgactggcttgtcatttttcctttctcatatattctttgnnnnntggnggcaaggttttagnagcctcaaaattagatagtgggggccagncgcggnggctcatcccttggccagcactttgggaggccagggcaggtggatcactctgaggncagggntcgagaccanctggccaacatgg

SEQ ID NO: 18403 - DNA, 309 bp, Homo sapiens
tggtccttccctttgcctgtggtgtaaaagtgcatcacacaggtattgctttttaacaagaactgatgctccttgggtgctgctgctactcagactagctctaagtaatgtgattcttctaaagcaaagtcattggatgggaggaggaagaaaaagtcccataaaggaacttttgtagtcttatcaacatataatctaatcccttagcatcagctcctccctcagtggtacatgcgtcaagatttgtagcagtaataactgcaggtcacttgtatgtaatggatgtgaggtagccgaagtttggttcag

SEQ ID NO: 18404 - DNA, 473 bp, Homo sapiens
  misc_feature (1)...(473): n = a,t,c or g
ttgnnacagttatgacatgattacgaatttaataccgactcactatagggaatttggccctcgaggccaagaattcggcacgagcacttcttaactaacatagtaataaggataatgtaacagctaacggcgtacaagtgccagcccctgagctaaggctttatgtagagtctctcatttagtgtttatgaagtcctgctgtcattgtccttattttacagataaggaacctgagccccagacagttttgactccaccatagtcatgcatcccatggtgtcagagacctcttttgagcccagctctgtcccaaaactcatggggtttttttggtttgttttttgagataggttgtctgtctgtcgccccggctgggatgcagtggagcgatcctagctcgctgcggccttgaactcctaggctcaagccatcctcctaccttagacccccgggtaagttggcctacaggtgag

SEQ ID NO: 18405 - DNA, 382 bp, Homo sapiens
ggtaattgtatttttgtaggacagaaatatcagcaatttcacataactaatagattcagtaaggtaagttgagagagaaaatgctagctaactggttcttgagaggctcagaggaaggggaggccatgcccattatgagaatggtgggtaggggtgggaatacacaacaggaaggctgcctggaggaggttgcatttcaaatgttcctagaagggaccctgagctggatggcagggaaataggagagttctgatttgtgctgggaactgtaatccctctatcatggagcttctatagaaatgtgggttagggcacaaaggaaggctgggggctgtgtgtgccttggtgacgtgtccccctcgctcccgagccttactctgtt

SEQ ID NO: 18406 - DNA, 216 bp, Homo sapiens
gttatgacatgattacgaatttaatacgactcactatagggaatttggccctcgaggccaagaattcggcacgagaaactacttacaaggtggctttctttctgctttgttactctatgtattactcaataatatatgtatggtcacaggttcctggagttgttttatttctttatgacagacacatgagtatgcacctctctctaatcctctgat

SEQ ID NO: 18407 - DNA, 224 bp, Homo sapiens
ccgaggccgaggacatatgggtgattttggaagcattcatagacccggaattgttgttgactatcaaaacaaatccaccaatgtgacagttgctgctgcaagaggaataaagagaaaaatgatgcagccatttaataagcccagtggaacctttatcaagaaacccaaactagcaaaacctatggagaagataagcctcagcaaatcacccacaaaaactgatc

SEQ ID NO: 18408 - DNA, 331 bp, Homo sapiens
ggagcctccagcaagggagacgggtagaaattccccagaagatgatatgcaactataaaaagggaggagcaagaagatcccagtgcttgccctgcctgccaggaactctgtgataacatatattgatcaacgtgatgttgattacatcagcgtctccttgggacacgccttctgagcctcacatctccttctgttcaaaggcctcattggtatatgatcaatgggttctcctagacactgacctctgtccagggcactttgcagctccatcctcaagttccacacgaagatgcttggatgagtcagctgggaatattgttcttgtgtacct

SEQ ID NO: 18409 - DNA, 432 bp, Homo sapiens
tatgacatgattacgaatttaatacgactcactatagggaatttggccctcgaggccaagaattcggcacgaggatctcttctttgattctttaccttttgggattccccaactctattccatattcgtggttccctgacctcacttttctgatcgccgccgtgccaggaaggttaggggcctttccatgcctccctatgtgtgcagttcagagtacgcttacctcagggacaggccagaaggaaggacagtgtggctgcctgtctctcctcccccaaatgaggctgaagtcctcaccagttcatgcttctgctcagtcctcagcaactctttggtatcttcaggtagttactttctgtatgatgtccaggttttataattttttactgtaagggtgggggtgaatgagtcattttatagtcttaacttccc

SEQ ID NO: 18410 - DNA, 355 bp, Homo sapiens
gggtgtttgttttgttttgtttttggcaccttacttgaccatttgtttctgtttccccgactggggcagggtgtttagaattttctaaatgtagttctgctccagacagggaattaggcccccatcatcctctggcttggccacagccaggggagcagaggggcagaggcccacattggaagagcagcacctcctcagcctgaaccccagggctgtaactgccaggctctctttgcccagttggagactgtctggcccccctggtcccctccttcccaagtgagtctctctgggccttaggaagagccttccacccaggggcagccccaggccaaaggggacctggaagggaggg

SEQ ID NO: 18411 - DNA, 520 bp, Homo sapiens
ttggtttgcatacagtttgacatgattacgaatttaatacgactcactatagggaatttggccctcgaggccaagaattcggcacgagggagccacattcatctaattcaaaagtgcttcatttgccttatctgtacagcaagaagacttcactggacaatcactaagatcctttcaactctaaaattctttaatttacatgctaccagttgcagtaaatgttgcagttcaatggaaaacattattgtcctaccaaactaaacaataataacaaaaatacgtcagtctggcattcttttaaggtataaacaatgctacgtttggattaaaaaaaattttaacacataaaaatcaacttctaaatttaaggtgccaaaataggcaaccatattattagtaaaacccaatgtttatttcgcccagacctaaactgtcaaatacttaagacttagaaagagcgatgaaacctcttgacatacgctttcagtatttggttggaacctggaatttggtttaaaac

SEQ ID NO: 18412 - DNA, 440 bp, Homo sapiens
ggtgtttttctcaggtgggacctagatccccacagtccctcacgtgcccaatctgtggggtgggcatggggtcaccaaggtcacctggttcattcttcccccatccagattccgtctctagagcctttgaggtcactcctgacgctgacatggctgtgaagagctgggtgccaggcattactgcctccaaggttgctttgcgaggaataggtggggcatcaggaagaagccagttgcaggcaaggcctctgctgatgctgcttttttctcctgtacccatccatgggagggagctgtgagatggcctggcagaacccgctcttggaccccacagaatgagaggctcaccctgcacaggaacaatcctggggcagcaggctcagcacattttaaattttgagtatgaacaaagtaaacttcagggttaaaaaaaaaaaaaa

SEQ ID NO: 18413 - DNA, 311 bp, Homo sapiens
gaataccttgtctctgtgtgttccatcaatgccatgcacccaactcggtatattttggctggaggtaattccagcgggaagatacatgtttttatgaatgaaaaaagctgctgagtttttggtttaggaacatcaatttgttcaaattgaccactgtctaaggagcctagtaatcggcgtgccttagtgtgtttatgtggtaatgtgttacatttagcaattataacattgttttattaataagactataagaagagtgtacttttagtaagggagaagtcttggagggttgcttctgcaggacggggagg

SEQ ID NO: 18414 - DNA, 471 bp, Homo sapiens
  misc_feature (1)...(471): n = a,t,c or g
tancnctatgacatgattacgaatttaatacgactcactatagggaatttggccctcgaggccaanaattcggcacgaggtaaaagacgtgaaccagcaggagttcgtcagagctctggcagccttcctcaaaaagtccgggaagctgaaagtccccgaatgggtggataccgtcaagctggccaagcacaaagagcttgctccctacgatgagaactggttctacacgcgagctgcttccacagcgcggcacctgtacctccggggtggcgctggggttggctccatgaccaagatctatgggggacgtcagagaaacggcgtcatgcccagccacttcagccgaggctccaagagtgtggcccgccgggtcctccaagccctggaggggctgaaaatggtggaaaaggaccaagatggcggccgcaaactgacacctcagggacaaagagatctggacagaatcgcccg

SEQ ID NO: 18415 - DNA, 490 bp, Homo sapiens
  misc_feature (1)...(490): n = a,t,c or g
ccaacagctatgacatgattacgaatttaatacgactcactatagggaatttggccctcgaggccaagaattcggcacgaggcattttaagaagtctcacagatctattttattttttaggatttagaattttcacggattcttttcatttttaaggatttttaaaataaaacaaacattgtagtttgtaaattcttaagatttgagatagaaatattgctcacagtattgaatattccacattagtcaatagcaagcagataaatatatatttctaaatgaagggtagctctggaaattagacagccattttattacataaggtattcttggacaaaccaaaaaagtgtgtcctcactttttccagcacagtttcgtaaatggagaataaaatgtatttggagttttaataaattcattaggtgccaaacatttctttgcacaatgccngtctagtttgtgcctgagggcaaaacaatgtgtgaatgct

SEQ ID NO: 18416 - DNA, 491 bp, Homo sapiens
  misc_feature (1)...(491): n = a,t,c or g
ggcaacaggtcaataactaactgctggcttctcaactcacagtagaaaaataagaagtattttatttttagaacctcttgctttttacactgtttgcacacatactgaaatgcctcaccataggcctggggaaaaaggcaaaaanaanggaagttggaattttnnacnaannatnagntccttnacccnanaggactgtggaacggccnaggttnaaaaaaatctnccccttctnccccgggnnggnacnatttacggngtaaanacaacccttnantcaaaatcctcagactatcaaangggtnccccgggcngttnctgtgttggaatttcttttctgagtataaattttttgaaaccagggatcagntanaagggngttgtaattccttttcctttcaactcnagtgtcacacagantccaagcccatcctaagngggcnccgggcnctttnngngaagaaaaaaacngnttttgcaatagggnaaaa

SEQ ID NO: 18417 - DNA, 335 bp, Homo sapiens
ttttactccgtctcaaaaaaaaacaaaagaaaactggactgtgattatgaatctaaattagttgtgatcctgaacctaaattactcaattgagtatatagacgagtagccaaggttgtctagttcagtttctgtagaagaaatgaagagcagcatgggtgagggctaattagggatgacatagacagaatatagaggaaaagggtttaggacaagtctgacattcatctgtttcttattcattgaattttagaatctatttaccagagcggtcacttactgtcttttttaataactggtcctttgcatacatttgtaaaagtctattaaaaaata

SEQ ID NO: 18418 - DNA, 309 bp, Homo sapiens
tgaaggacacataccaaactcacatacaatgtatttctgaggaggaggtgggatccattgaccaaagaaaactgtagctttatttgcaatgtttgatttttttccacaataagattatacatagagacttcttttgtaattgaaaataaaatcctttccagtgtaaaaaggggaatggagaacaagtagtcacaatcagtcactcctgggggatggagaacaagcagtcacagtcactcctgggggatgcagaacaagcggtcactgtcagtcactcctgggggatggagaacaagcagtcactgtcag

SEQ ID NO: 18419 - DNA, 342 bp, Homo sapiens
ggtagaattaaaataatacacaaaaaataagaaggaggaaaagggagttgacacattccaatgtccttaacatagtccaggaattgaaaaaagtactaatttatattgaactttaataagtcaaggatgcatattgtcatctttaagtctagaagcatatatttaattccacagaaagagaagtcttgtgctcatgttagaaggtagtcttgatttgtctaccttcctctttgagaaatttatttcttccaacagcctaattgtcaatcaatgttaaaaaaagattaatgaaagattttgtagcggaaaggattaacccatagatctcattatcccaagtaa

SEQ ID NO: 18420 - DNA, 586 bp, Homo sapiens
tatgacatgattacgaatttaatacgactcactatagggaatttggccctcgaggccaagaattcggcacgagggctggcagcgcggaggccgcacgatgcctggagttactgtaaaagacgtgaaccagcaggagttcgtcagagctctggcagccttcctcaaaaagtccgggaagctgaaagtccccgaatgggtggataccgtcaagctggccaagcacaaagagcttgctccctacgatgagaactggttctacacgcgagctgcttccacagcgcggcacctgtacctccggggtggcgctggggttggctccatgaccaagatctatgggggacgtcagagaaacggcgtcatgcccagccacttcagccgaggctccaagagtgtggcccgccgggtcctccaagccctggaggggctgaaaatggtggaaaaggaccaagatggcggccgcaaactgacacctcagggacaaagagatctggacagaatcgccggacaggtggcagctgccaacaagaagcattagaacaaaccatgctgggttaataaattgcctcattcgtaaaaaaaaaaaaaa

SEQ ID NO: 18421 - DNA, 396 bp, Homo sapiens
gggcctggtgacagcccccacgtcggcatctctggtattaaaggtctgttttcaacaactttcagtgaaagggcaggactgatagaaatgttagcggtgctctgggtgtacatggtgcttccgcgttttttgtgtgtctgagtggagtgatgtttttctccctcgtgggctggtgtgtggttttaccagcatgcatatacttcagacttcataattgtggccgggtacagtggctcaggcctgtaatcccagcactttggaaggccaaggcgggcggatcacccgaggtcaggagttcgagcctagcctggccaacatggtgaaacctgtctgtactaaaaaaaataccaaaaaattagccaggcatggtggcgcatgcctgtaattccagctact

SEQ ID NO: 18422 - DNA, 351 bp, Homo sapiens
ggaacgagaatgagcgctatgacgcagtccagcactgccgctacgtggatgaggtggtgaggaatgcgccctggacgctgacacccgagttcctggccgaacaccggattgattttgtagcccatgatgatattccttattcatctgctggcagtgatgatgtttataagcacatcaaggaggcaggcatgtttgctccaacacagaggacagaaggtatctccacatcagacatcatcacccgaattgtgcgggattatgatgtgtatgcgaggcggaacctgcacaggggctacacaccaaaggagctcaatgtcagctttatcaacgtgagttccagccttaccccag

SEQ ID NO: 18423 - DNA, 365 bp, Homo sapiens
gttccagaccagcctggccagcacggtgaaaccccatctctactaaaaatacaaaaattagccaggcatggtggcgtatgcctgtaatcccagctacttgggatgctgagacaggagaatagcttgaacctaaggggcagaggttgcagtgagctgagatcactgcactgggcaacagaatgagactctgtctcaaacaaagaggcctaaacaagtatttgagaaggcagataatgttgaatttggtgcattattttgttactttgtagaagagataattattcttactgtaaaattgcatgacataatgttggtcacttactgcagtgataatctgagagaaaaggccgaaccagaaacgtatt

SEQ ID NO: 18424 - DNA, 333 bp, Homo sapiens
gcctaaaaatacacattctaagagtcaaggtaagagtgttcctaattgggtgcatggatgaaagttcatgttagttttcattgaggctggaagttaaacctgagccattttcctgtccagctgcactttgccacaggctgggcacactggctcatacctgtaatcctagcactttgggagactgaggaggattacttaagaccacgtgttcaagaccagcctaggagtatagtgaggtgccatctcttttaatttttaaaaaatagtcctagtgactcttaccaggccagtcaccatctccaggagcccccctgtgggagtatgttcagtgtc

SEQ ID NO: 18425 - DNA, 491 bp, Homo sapiens
gagtcgcgcggaggcggaggcttgggtgcgttcaagattcaacttcacccgtaacccaccgccatggccgaggaaggcattgctgctggaggtgtaatggacgttaatactgctttacaagaggttctgaagactgccctcatccacgatggcctagcacgtggaattcgcgaagctgccaaagccttagacaagcgccaagcccatctttgtgtgcttgcatccaactgtgatgagcctatgtatgtcaagttggtggaggccctttgtgctgaacaccaaatcaacctaattaaggttgatgacaacaagaaactaggagaatgggtaggcctttgtaaaattgacagagaggggaaaccccgtaaagtggttggttgcagttgtgtagtagttaaggactatggcaaggagtctcaggccaaggatgtcattgaagagtatttcaaatgcaagaaatgaagaaataaatccttggtcacaaaaaaaaa

SEQ ID NO: 18426 - DNA, 354 bp, Homo sapiens
ctttaaaagttaaaaaaaaatgtaaaagcctcattagtaattaaaaggaaagaactaagcatttagcctgtctttctagtagaactgtatgtcagtgtagagcaacaggcacagatgatgagaagaaagttctattttatagatgctaataaatacgttataatgctaattttgctatctagcaaaatgttaacatgtttttttaaaatgcctatttaactatttagagataggaggtcaagatttctgaattgtattttgtcgacgcggccgcgaattccagatctatgaatcgtagatactgaaaaaccccgcaagttcacttcaactgtgcatcgtgcaccatctcaattt

SEQ ID NO: 18427 - DNA, 336 bp, Homo sapiens
gttcaggatcaggctctggttcagcaacaggctcctctaaatgttcttccatgtcattactgacaactgcctgatcatagaaagttccagaatcatcaggtaccacctcaggtgtttgctgtctttcttcaggttcctctacttcttcttcagactcctcctgaggctcagtgacaaacccaccaaagacctcatcttggtatctgaagatatcattgtgaacatagaatttatttgcaacagacccctcaggagcaaggacaaacgtttgcatgaatctcctcaaagcctggttgttgttagagagaagccccatcacctggactaccacaccat

SEQ ID NO: 18428 - DNA, 401 bp, Homo sapiens
ggccgtttgaaggactggcccagtcttcatccctattttatagatgaggaaatggaggcccagagctggtcagtgactgtctgagtcaccattcctcaccactgcactctgctgtgtctcctgacagaactgccttagtctgggggccactgtggtaggctgaagtctctcctggcaaggctggtggacttctgaaatttccttttgggatgggcttctgggtaagcattgagatctgaagcacgttgattcctggaggactggaagagacccagccctgatggccgaagtcttagaaatggccacggaagtggccgacatgctgatgataggtgtgtggacacggtgctgctcatgctgtcaagaacatccctctggctcatgtctcacattcaagttct

SEQ ID NO: 18429 - DNA, 412 bp, Homo sapiens
gcatagggctcggcgtggtggcacatgcctgtaatcccagctactctgggggctgaggcaggagaatctcttgaacccaggaggcggaggttacggtgagctgagatcacgccactgcactccagcctgggcaacaagagcgaaactccatctcaaaaacaaacaaacaacaacaacaaaaaaaacaaaaaacagcgaacaagggaagggggaggaggcagacaatgacaccagagaggaaggcccaagtcagacccattttctagagcagggggaagccacggtggtgacagttacatgggaaaagacgtggtctgtggatcttttagaaaggtgaacttggccgggtgtggtggctcacgcctgtaacctcaacaatttgggaggcaaggcaggaagggactgctttggg

SEQ ID NO: 18430 - DNA, 304 bp, Homo sapiens
ctgaagtgcagtggtgcaatctcagctcactgcaacctctgcctcccaggttcaagtgattctcctgcctcagcctcccaagtagctgggatcaccggcacatgccaccacgcccagctaatttttgtatttttagtagagatggggtttcaccatgttggccaggctggtctcaaactcctgacctcaagtgatccacccacctgagcctcccaaagtgctgggattacaggcgtgagccaccacgcccagcctacaaaatattctcaggttagtatattcatactgttctattgtgaatata

SEQ ID NO: 18431 - DNA, 377 bp, Homo sapiens
gctgaaacaaagatgtgggtaacttgccctgggccagttagcaataagcccagatttgaacccaagcagtcttgttccagaccttctgtttttaacaattctacattgcagtttctctaagtaaatagtcacctgaaatatggctacaacaatacagtcacaccaagaatgtagttagagataagaatgcatcattgtgtttgtgcatgtggagactggagctgcttctataggagataagcaccaagctatcatctgttggagagaaatgtgttgtgggtgaaaggaggaggagggctgttctgtaaatatgagacaagctgaaacaaatatagaaatatgaaaagaaaatctgattttcaaaagtgaagttttta

SEQ ID NO: 18432 - DNA, 365 bp, Homo sapiens
catgaatccaagatggacaacaaatggtcgattttgctccttctacagtaaatagatctatcttcttagcagaagtaaaatagtaaagaaagaagacatgtttgaggcctgttgaggcctgtttgctgtatgcattgtatctaatcaaggaattgagaatgtagccctaaatattaggaaggagttgaaagtttctgagcaggaacagaacatgctgaaaggaaattgtgtcagcagcatggtgtacaggagagcttggcagagagaaaggaggcaagaagacctgtgggaggcagccagtaaggaggtgaagagggcctggaccaaaggaagccaaggatgaccgaaaggtcgacgcggcgcta

SEQ ID NO: 18433 - DNA, 376 bp, Homo sapiens
caatactgggcccgacgctgttggggcttggagatacctttcgcagtttgaaatttggcagggagcagggagcggggcttaagacacaatctgtttcctgaacttttggagtctgaatgattttatttgagtctaactaggtcccatattaggagtcaagttaagtgatctgagacaaggagcaataaatcaaaacatgctggtagctccctctgcaccttccaaagaccaggagagaggagagactgattcagcaaacccttagtttccttttgtagattcactgcccctactccatatcccagtgtttccacccttaggtgacaattgccgactaagagtttttttgtttttggatttttgagacagagttcct

SEQ ID NO: 18434 - DNA, 433 bp, Homo sapiens
ggttttagaatccaaaagcaatatatacttacagcaggggggaccttcaaccaatttaaaagtgaatcaattaaatataaaagttacttctttctatcccatccatcctcttaaagaaataatcacaatgaacaatttgatgtgtattcctctcactttttaaatacatgcacaaatatatacagtttaaattctgctttttcacataacacttcctcataacattaaatattctccaaaatatgtatttttaatgtatttaactattttcctattgttggacatataggtcgcatatatttattcattgagacagggtctcactgtgtcactcaggctggagtgcaatggtgcgattatgggcactgcagccttgaactcctgggctcaagtaatcctcccaccttaggctccccagcagcttgggaccacg

SEQ ID NO: 18435 - DNA, 337 bp, Homo sapiens
gacttttcgaagaacttcagagcttggatattttcttggctgaactctacaagcatcttgacagcagtagcaatgagcgtccagacatcagttccatccagagacgtattaagaaagtaactcatgacatggacatgtgctatgggatgatgggaagcctgtttcgcagtggctcccggcagaccctttttgccagtcaagtgatgcgttatgctgacctctatgcagcatctttcatcaacctgctgtattaccctttcagctacctcttcagggctgcccatgtcttgatgcctcatgaatcaacggtggagcacacacacgtagatatcaatgg

SEQ ID NO: 18436 - DNA, 380 bp, Homo sapiens
gccagttttgttctcagaatccaagtcagtcctgggtcttttctcactttaaaccctggcctcagatgtgtttattcttgctatttaaaaatacctttaaatttcacatgctggcctgcagaacttgcatcctttgttctatactgttgactgcttgatggtattgaaaggtgactataatgagggaagaaaggaggaggtaaagagagaagaatttgtcccagatctgtttaaagtttcaaaatttaaaaagggacccattaaattatgggaaaatggctatagagtgtgagcctccgttgaccatatgctcaaagaccgtactctgccacctgccttccaggtagctattctagaaactcagtcctttgtggaaaccc

SEQ ID NO: 18437 - DNA, 352 bp, Homo sapiens
gcggcacgaggtactttgaaaaaaaaattcaaccttctcatgcctatcttcccacctccctcactgtgctccatttctttagtttatcaaatttgtctcaagagctttcttacctcagggccactgcccagactgtttccccattcaggaagacctctcccagtcattgcttgctgacccttcatcttctgatctgagcaagagtgaaactggacgcagtagttcatgcttgtaatcccagcactttgggaggattgcttgaggccaggagtttgagacctgcctgggcaacctagcaagaacccatctttacaaaaaacttaaaaattatccaggcaaggtggcacacatc

SEQ ID NO: 18438 - DNA, 351 bp, Homo sapiens
gctggaagaactattgcccattatttagtcctatgatgtagaaaaacctcaaaacacctactagatgagaggtgcagtggctcacacttgtaaacccagaagtttgggaggccatggcaggaggattgcttgaacccaggagttcgaggccagcctggacaacagtgtgagaccatatctctatgtttacaaaaattcttttaaagtttgggatggggggtgggcacagtggctgacgcctataatcccagcactttgggagaccaaggcaggcagatcatctgaggtcaggagttcgagacgagcctgggcaacatggcgaaaccccgtctctactaaaaatacaaaaat

SEQ ID NO: 18439 - DNA, 350 bp, Homo sapiens
gatggattatagagtatactaaaaaatgtctatagagaaaaactttcatttttggtaggcttatcaaaatctttcagcactcagaaatgaaaaccattttagttcctttatttaatggccaaatggtttttgcaagatttaacactaaaaaggtttcacctgatcatatagcgtgggttatcagttaacattaacatctattataaaaccatgtcgattcccttctggtacaatcctttgagttatagcttgctttgctttttaattgaggacagcctggttttcacatacactcaaacaatcatgagtcagacatttggtatattacctcaaattcctaataagtttga

SEQ ID NO: 18440 - DNA, 340 bp, Homo sapiens
gctgggaatgcaaaaaaatcaaagaacagttaagctattctagatgaagaagaacaacgtaggacaactttctgtttcaactaccaagatctttaatgaggctacaatagatggtgtaatactgcagcaaggacatacaactccagaccagtggaaaaggacagaaacccagaaatagatccatacacatatggacactggattcaatgacaaggttggatatgcagaacatgaggaacatgtgttctctcctgtaatggagttggaataactggataggcattgtgtcacaatgtaattcttgacccctacctcatgtcatacacaaaaaataagttct

SEQ ID NO: 18441 - DNA, 381 bp, Homo sapiens
cgacaacgtcccgataacttgcagactgtggcgcaactggtcttggtagcggaggcacccgaatgctgcccgggtgagaaacctggcaaagaaaacggtctcgacaatgagtaggccacccatcactactaactacagatgacttgccatttcatttacaaagatgtcttctgctgctgaaaatggagaggcagcacctggaaaacaaaatgaagaaaaaacctataaaaagactgcatcatctgctattaaaggtgctattcagctgggaataggatacacagtgggtaatctcacttccaagccagaacgagatgttcttatgcaagacttttatgtggtggaaagtgtgttcctacccagcgaagggagcaatctgac

SEQ ID NO: 18442 - DNA, 417 bp, Homo sapiens
ggtcttggtagcggaggcacccgaatgctgcccgggtgagtgtgatgagaagccattagagggttgagtgaagggaaaggatatccaacgagaacctcctgccctgtgtctcatgaagaggcagtatttcaagaagaggcttaaagctgagagtgttttgctaatcagtgaagatgtgactaatgagctgctggggaagtcaagccttctatgaggaagccaaggcccagcagagctgagatgtgactgcagagccgtccaaccccagtcctgtgacctttctctggtgcctgatacctctcagcatttgagggccttttctcttcctgcttcatctctaaaggtccttctaggagagaggtgaaagaaacctggcaaagaaaacggtctcgacaatgagtaggcccccatcactac

SEQ ID NO: 18443 - DNA, 567 bp, Homo sapiens
  misc_feature (1)...(567): n = a,t,c or g
ttggaanctttgtnaccgctatgactgattacgaatttaatacgactcactatagggaatttggccctcgaggccaagaattcggcacgagtttggtaagaaagtgacttttaagctgggtgtggtggcctgagcctgtaatctcagctactcaggaagctgaggcaggaggagaatttgaggccaggagttcaagaaagtgagtcttataaaaggctctattcacagaataaattaagtaaggttaaggggctaactacataaactttggtgaaaatttctctccaaataaaaatgaattgtttccaaggaaagacagtctttactaatttagaaagaatatggttatgagcataataataatttatagcagtaataaacttaagatagaaaaaataactgtcagggaagatgaaaagcaatgtccttcatttttgctaattttctaaacaggttgcggcagagatttttatcatatttaaatanatgattttgggaaactgagtacataatacatttatataagtaatgaaatacannaatgatcaattctttatcttacacccg

SEQ ID NO: 18444 - DNA, 444 bp, Homo sapiens
ggcgtctggggtttccgttgcagtcctcggaaccaggacctcggcgtggcctagcgagttatggcgacgaaggccgtgtgcgtgctgaagggcgacggcccagtgcagggcatcatcaatttcgagcagaaggaaagtaatggaccagtgaaggtgtggggaagcattaaaggactgactgaaggcctgcatggattccatgttcatgagtttggagataatacagcaggctgtaccagtgcaggtcctcactttaatcctctatccagaaaacacggtgggccaaaggatgaagagaggcatgttggagacttgggcaatgtgactgctgacaaagatggtgtggccgatgtgtctattgaagattctgtgatctcactctcaggagaccattgcatcattggccgcacactggtggtccatgaaaaagcagatgacttgggc

SEQ ID NO: 18445 - DNA, 404 bp, Homo sapiens
cggacgcgtgggcccgctctccagcagcttcctagctgggttttcacctcagccagcgctcatgctcaacctaggcagggcggggcaggagggcctagcgggaggcggagcgagggtcggagggtgacgctccggacttctgctaggtctgagacgcgccggcctcccgctgctgctccggagaagcggcgcctcctccccgccaggaccccgaggcggggggttcccgccttctcttctgagcgcctcttcccgctgcgcccgcatcagtctgggcctggcccagggtccccggtggagacgtgtttttttctccaaccaccgtgcccctctgtttaaaagcagccagtcaacctttgtgtcctttctccagaaggaaaagcatctcagctgttgtggaaaag

SEQ ID NO: 18446 - DNA, 368 bp, Homo sapiens
tgaaatttaatcctgatgacattaacacaatttatgttttcttaaaaggtctctcttgctatgaatgctaataggttgtctcctagattttttttttagtttgcaaatcagaacacagcttgtcctgaatataatccattgttttcatttctgtttgcactatattctcgattttttccccatgaagtctctgagtgaccttcggctaatatcaaattctggtcgacgcggccgcgaattccagatctatgaatcgtagatactgaaaaaccccgcaagttcacttcaactgtgcatcgtgcaccatctcaatttctttcatttatacatcgttttgccttcttttatgtaactatactcctctaagg

SEQ ID NO: 18447 - DNA, 356 bp, Homo sapiens
caccagggctcggaagtgggggccgaatccggtgcgagacccaaggagaggggagcagagccggagttggggagactggttgctgaaaagccaggagtcaaaatgactgagcgctttgactgccaccattgcaacgaatctctctttggcaagaagtacatcctgcgggaggagagcccctactgcgtggtgtgctttgagaccctgttcgccaacacctgcgaggagtgtgggaagcccatcggctgtgactgcaaggacttgtcttacaaggaccggcactggcatgaagcctgtttccactgctcgcagtgcagaaactcactggtggacaagccctttgctgccaaggagga

SEQ ID NO: 18448 - DNA, 431 bp, Homo sapiens
gcctggctccgagatccccccctccagccccagccacgcaggctccctgcatgatgacctgaatcaggtgtcccgagatgatgcagaagggctcctcctcatggaggaggagggccactcggacctcatcagcttccagcctacggacagcgacatccccagcttcctggaggactccaaccgggccaagctgccccggggtatccaccaagtgcggccccacctgcagaacattgacaacgtgcccctgctagtgccccttttcaccgactgcaccccagagaccatgtgtgagatgataaagatcatgcaagagtacggggaggtgacctgctgcctgggcagctctgccaacctgcggaacagctgcctcttcctccagagcgacatcagcattgccctggatcccctgtacccatcccgtgctcctg

SEQ ID NO: 18449 - DNA, 1186 bp, Homo sapiens
  misc_feature (1)...(1186): n = a,t,c or g
gttttttgttgttggggtctgtgactgcggatataactgacggcaacagtgaacatctcaagcgggagcattcgctcattaagccctaccaaggggtcggttccagctctatgcccctctgggacttccagggcagcactatgctcacgagccagtacgtacgtctgacccctgacgagcgcagcaaagagggctctatctggaaccaccagccgtgcttcctcaaagactgggaaatgcacgtccacttcaaagtccacggcacagggaagaagaacctccatggagacggcatcgccttgtggtacacccgggaccgcctcgtgccagggcctgtgtttggaagcaaagataacttccacggcttagccatcttcctggacacctaccccaatgaggagaagcagcaagagcgggtattcccctacatctcagccatggtgaacaacggctccctcagctatgatcatgagcgggatgggcggcctacagagctgggaggctgcacagccattgtccgcaatcttcattacgacaccttcctgggcaagcatgagtggagggactgcattgaagtgcccggagtccgcctgccccgcggctactacttcggcacctcctccatcactggggatctctcagataatcatgatgtcatttccttgaagttgttccagctgatgggtggagcacacgcccgacgaggagagcatcgactggaccaagatcgagcccagcgtcaacttcctcaagtcgcccaaagacaacgtggacgaccccacggggaacttccgcagcgggcccctgacggggtggcgggtgttcctgctgctgctgtgcgctctcctgggcatcgttgtctgcgccgtggtgggggccgtggtgttccagaagcggcaggagcggaacaagcgcttctactgagtggcgcctccggcggggcctgtccctgggcccaggagccaatgtgaactttttttttaccgggattataaaagaacaacaagatgaccttatttcttaactgtttcaaataaatgattaaagtattttcatacattttgcttcttgccagcagggacaggtggcanaaccnaggcttaaggtctggcaccccccacagctggagacggaggtnttctggggctggggctcaagancaaggggttgggctacaaatggcttg

SEQ ID NO: 18450 - DNA, 488 bp, Homo sapiens
  misc_feature (1)...(488): n = a,t,c or g
tttgaancccnatttgntatccacatgattacgaatttaatacgactcactatagggaatttggccctcgaggccaagaattcggcacgaggtgtttttggtagagacacggtttcaccatgtttgccaggctggtctcgatctcctgacctcaggtgatccacccacctcggcctcccaaagtgctgggattataggtgtgagccaccatgcctggccgaggttgcctcttaggtaagtaaataacaatctccttgtctcaggggaggacactgctgatgaagagttttttttagatctgtcaaaattatggataccacccccctttgtctgggtgatcctaggattcttttattttcaagaagacaactgggaggaagccatgcaggagactggctgtggtagttttcatgtgaatttttatcttcagtgcttttcatgtcttcaattatccaagtaccccaagcctgtggtttgctcagtttggg

SEQ ID NO: 18451 - DNA, 427 bp, Homo sapiens
  misc_feature (1)...(427): n = a,t,c or g
gacctgatgctgaaggacggactaatgatgtttcctcttgccttctctggtgcctccattgccctcatggaacagagcatatcatagagggagaaaagtcaaacttgtaattgtgtcttacagttactggcttcatcttccttgggatatatggtcatcctctaatgagtgtaaaagtgcgcaaaacacatccttattgttcctgatctcttagtcccataaatgggaacaaatacagctttctgcttctttctttttggggaaaggacagggtgctagtgagtactgacagcatgccagctaccgaagtcacccagccattcccatgagcagcagttcatttaattgtcacagcgtcgccaggaagaagatctgataaacctaggtttacagataaagaaagcaaaatgtanagatgttggtgagg

SEQ ID NO: 18452 - DNA, 406 bp, Homo sapiens
gcttctgtagcctttcgctttgctgctggccccacccaacctgctgcagtgacttctgctacctacttggttcctgtaggcctgcgtgtgcaaaccatgtcttagaaataggaaaaccaacccaagggaacctcatggagccttcagctatccaggcttttgtatcctttgggtaacactgtgtgggagttccatttctgcacctgctacaggatgtgagacctggcagaaacttttttagcttgcacatgggatggaaactgtaccatcaggtctcctttctggttgtggttgatttgtgagaaagtgtacagagatgcttagggtgtcgggaacacgtgccgcagtgcagagggtgtgagtgagcagcaaggagcctgcccctttgacgaagctttctcggtcc

SEQ ID NO: 18453 - DNA, 327 bp, Homo sapiens
gcgacaacacaaacagcagagtggtcctttggtccttctttgaagctcttgttctagttgccatgacattgggacagatctactacctgaagagattttttgaagtccggagagttgtttaaaaagcctcttcctgatgatcccaactcagaattcactgtttaccaaacaccttggtcataataatgtcattagtttctccatttttattttctgaactgtacattcacaacttatgtttctttgagattaatagatattgggggaaaaacgcctttttaggaaaattatagtgaaaatttgacagttgattggcataatttcttg

SEQ ID NO: 18454 - DNA, 382 bp, Homo sapiens
ggcattttgattcccaagtaattatttatggaaaacaagttataatcaatctgattaaccagaagggctcggagaagccacttgagcagacatttgcaacaatggtgtcttccttgggaagtggaatgatgagatacattgcctttgacttccataaggaatgtagaaatatgagatgggatcgactaagtattttattggatcaggtagcagaaatgcaagatgaattaagttattttctagtggactctgctggccaggtggtggcaaaccaggaaggcgtgttccgaagcaattgcatggattgtctagatagaaccaatgtgatccagagtttgttagctcgtcgttcacttcaggcccaacttcagagactaggagg

SEQ ID NO: 18455 - DNA, 498 bp, Homo sapiens
ggcttggtttatctggtgcaaaggccaactaccgtggaggtgaaatccgagaacagaatggagacagtcttgtccatgctgcttttgtagcagaaagtgctgtcgcgggaagtgcagaggcaaatgcatttagtgttcttcagcatgtcctcggtgctgggccacatgtcaagaggggcagcaacaccaccagccatctgcaccaggctgttgccaaggcaactcagcagccatttgatgtttctgcatttaatgccagttactcagattctggactctttgggatttatactatctcccaggccacagctgctggagatgttatcaaggctgcctataatcaagtaaaaacaatagctcaaggaaacctttccaacacagatgtccaagctgccaagaacaagctgaaagctggatacctaatgtcagtggagtcttctgagtgtttcctggaagaagtcgggtcccaggctctagttgctggttcttacatgccac

SEQ ID NO: 18456 - DNA, 490 bp, Homo sapiens
  misc_feature (1)...(490): n = a,t,c or g
taacnnnngnanannntnnnnnanangaggnnnagncnnngcnnnnnntngnnnnnttgaaantgangcctgatacgaattaatacgatcactatagggaatttggccctcgaggccaagaattcggcacgaggctagcaccatgagcttcaataccctggattcggggctcttgtcccgcttctctgatggcaacgttcctgccccaccttccccatcgcccccatgacaccctccgagtacactgtgtcctcacctctcctcccatcccctgcggggccctttctctgtcccatggggctccctccagaactcagccagtgtctcagcctctaccagctccctgccaccaggacatggggactgacacaattctttctgatcttgaagattcatgagaggcacgaagctaccaagtgctttcatttcaggctctggctgccccgacggcaggtgaaagccccgaaccactgaccttccttctttaccc

SEQ ID NO: 18457 - DNA, 396 bp, Homo sapiens
cattcacagagtggattgaaccacctaaacgagaaagaaaagccaactatgccgttgatgcatatttcagggaagctcttcgtgttagtgaacctaaagcacccaaggctcctcgacctccaaaacaacccaatgttcaggatttccagttctttcctccacgtttatttgaattactggaaaaagaaattctgttttacagaaaaactattgggtacaaggtacctcgaaatcctgagctgcctaacgcagcacaggcacaaaaagaagaacagcttaaaattgatgaagctgaatcccttaatgatgaagagttagaggaaaaagagaagcttctaacacagggatttaccaattggaataagagagattttaaccagtttatcaaagctaatg

SEQ ID NO: 18458 - DNA, 373 bp, Homo sapiens
gggaaatgatggcgactggaacgccagagtctcaagcgcggttcggtcagtccgtgaaggggcttctcacggagaaggtgaccacctgtggtactgacgtaatcgcgctcaccaagcaggtgctgaaaggctcccggagctccgagctgctaggtcaggcagctcgaaacatggtactccaggaagatgccatcttgcactcagaagatagtttaaggaagatggcaataataacaacacatcttcaataccagcaagaagctattcagaagaatgttgaacagtcatcggatctacaggaccagttgaatcatctgttgaaatagaatgacatgtaagagtgctgtaggactcctttgctaatgctgaggag

SEQ ID NO: 18459 - DNA, 334 bp, Homo sapiens
gcccgaaggagctcggaagggtgtggagtggcgcctacgggaataagttgattggggtcatagaatcggagcctagttccttggctaagtcagcgcttaatcaagcgccggctggaggcccagcctggtttatagtgatgattctagctaactttaagagtttgctttgctggacactacagtaagtattttggatgcactgtctcatttaatcatcacaaggattcctccaaattcagatatggttgttttcatttcgaatgtgatgaaagtgagccttggaggacttaagatcacatagctagtagtgagaatctttaccgtcttgctgcac

SEQ ID NO: 18460 - DNA, 381 bp, Homo sapiens
cccacgcgtccgcagggagtagagaaaaacagctggttgtcttccaccagcttgaggaggattcatgagtggaaccaggcactggtggaactaatcagggtgtcacccaagcaggacaccctaagtttatctgcttatctactgaactgataggcagcaaagaagatatcaccattcacggcctggtgacatgggcagtttctgacatatttgcccatcgtccaggatacaattcaaataaaatcatacgttctttccacaggttgtcaacatcccttgactgatttaggtttgatcatatccattggcaagggcacatgctcactgagtttaacagaagcataataccctgtactgcttttatttccatttcttttttaa

SEQ ID NO: 18461 - DNA, 369 bp, Homo sapiens
gataatatactgtggaattctaacccgggtaaggaggggaggacatgaagtggctaagagatagtgaaaagatgggagaagcaatggatggaaggtcctggtgggatcagaagctgctggagtttgggtatgtgagagactgaaccatgaagatagtgggttattgttggacagtgggagctaattgatattgtgaaagcatgatcatgggatgagtgggtaaaggacaagatcagtggaagtgagaaatttaaagaactgagacaaggaattcagagagatacggtatggaaagatcatctttgtgaaatcactgagagttaagatagtagtgtagaaggtcacagtaagccaggtattgggtaataa

SEQ ID NO: 18462 - DNA, 345 bp, Homo sapiens
agatgatttccaaaaactcactgagagttgctgttcatctgatgcttttgaaagaatagactcatttagtgtacagtcattagatagccggagtgtaagtgaaatcaattcagatgatgaattgtcaggcaagggatatgctttagtgcctattatagttaattcttcaactccaaagtctaaaacagttgaatctgctgaaggaaaatctgaagaagtaaatgaaacattagttatacccactgaggaagcagaaatggaagaaagtggacgaagtgcaactcctgttaactgtgaacagcctgatatcttggtttcttctacaccaataaatgaaggacagac

SEQ ID NO: 18463 - DNA, 520 bp, Homo sapiens
  misc_feature (1)...(520): n = a,t,c or g
ttgaanccctatcaattnngacccgatcagctatgacatgattacgaatttaatacgactcactatagggaatttggccctcgaggccaagaattcggcacgagccagcactttgagaggctgaggtgggcagattgcttgagcccaggagttcaggaccagcctgggcaacatggcgaaaccctgtctctactaaaaatacaaaaattagctgggcacagtgccatgtgcctgtagtcccagctactcagcaggctgatgtgggagaatagtttgagccagggaggtggaggttgcagtgagccaagatcatgccactgcactccagcctggacaacagaggaagaccctgtctcaaaaaaataaaggggtagacttactttggtacaacacattgcatatataatactgttttttaacagttatacacaaatcaaaataagagacttcttcagacaaatgttcaaaattattttctttgcctgtgtaatcaacccattttttcttaaaacatcccatg

SEQ ID NO: 18464 - DNA, 384 bp, Homo sapiens
tgccgactggtctcacctcgccatggttcgtctgcctctgcagtgcgtcctctggggctgcttgctgaccgctgtccatccagaaccacccactgcatgcagagaaaaacagtacctaataaacagtcagtgctgttctttgtgccagccaggacagaaactggtgagtgactgcacagagttcactgaaacggaatgccttccttgcggtgaaagcgaattcctagacacctggaacagagagacacactgccaccagcacaaatactgcgaccccaacctagggcttcgggtccagcagaagggcacctcagaaacagacaccatctgcacctgtgaagaaggctggcactgtacgagtgaggcctgtgagagctgtgtcct

SEQ ID NO: 18465 - DNA, 377 bp, Homo sapiens
  misc_feature (1)...(377): n = a,t,c or g
ggagacctgtcagtgtgtctgcagagcggggcttcggcctgccagctgtggaccccacaaagaactagacagaaactcatgccagtgtgtctgtaaaaacaaactcttccccagccaatgtggggccaaccgagaatttgatgaaaacacatgccagtgtgtatgtaaaagaacctgccccagaaatcaacccctaaatcctggaaaatgtgcctgtgaatgtacagaaagtccacagaaatgcttgttaaaaggaaagaagttccaccaccaaacatgcagctgttacaaacggccatgtacgaaccgccagaaggcttgtgagccaggattttcatatagtgaagaagtgtgtcgntgtgtcccttcatattgga

SEQ ID NO: 18466 - DNA, 369 bp, Homo sapiens
ggatgtggcttcagccccagtggtgatggcggggtagagccagcagggttctgaactgagtggatgtgaaatgagggaaagagggatgctgcggtcggcagaatcgtgcctcccgcaaagatgccccatcctaacccgtcacccttgacagtgagacctccaccacaaaggggactttgcaggcatgaaggttaaggaccctgagaggaggagatggccctggactgtctggcgggcccagcatcatcacaagggtgcttataagtggaggaggaggcagggggagccgagcagatgtgaggatagaagcagaggtcggagggacgtgctgttggcttgagatggaggaggacctatgagccaaggagc

SEQ ID NO: 18467 - DNA, 404 bp, Homo sapiens
gcagcatttccatttatcaaaaatgtgtgctatactggccggaaaagagagggatatatggaaaagttgaggttctggttatcagtgtaaatgaatgtgataactacaccattcgaaaccttgtcttaaagcaaggaagccacacccaacatgtgaagcattactggtacacctcatggcctgatcacaagactccagacagtgcccagcccctcctacagctcatgctggatgtagaagaagacagacttgcttcccagggccgagggcctgtggttgtccactgcagtgcaggaataggtagaacagggtgttttattgctacatccattggctgtcaacagctgaaagaagaaggagttgtggatgcactaagcattgtctgccagcttcgtatggataga

SEQ ID NO: 18468 - DNA, 373 bp, Homo sapiens
gacttagaggccaattttgagaagattgaaaatgaactgaaggaaatcaacacaaaccaggaagctctgaagagaaacttcctggaactgaccgaattaaaatttatacttcgcaaaactcagcaattttttgatgagatggcggatccagacttgttggaagagtcctcatccctcttggagccaagtgagatgggaagaggcactcctttaagacttggcttcgtggctggtgtcattaaccgggagcgcatccctacttttgagcgcatgctttggcgggtatgccggggaaatgtgttcctgcgacaggctgaaatcgagaaccccctggaggatcctgtgactggcgactacgtgcacaagtctgtgt

SEQ ID NO: 18469 - DNA, 299 bp, Homo sapiens
aacaacccatagaattggagaaaatatttgcaaatcatatatttgatgagagacttgtgtctagaatataaaaagaacctgtgactcaattataaagacacccagttcaaatatgtggaaaggatttgaatagacatttctccaaagaagataaacaaatggccagtaagcacatgaaaagatgttcaacatcattagtcattagggaaatacaaatcaaaaccacactgagataccacttcacacccactaagtgacagtaatcaaaaaggctggctaatagcaaacattggaggagg

SEQ ID NO: 18470 - DNA, 520 bp, Homo sapiens
  misc_feature (1)...(520): n = a,t,c or g
ttnnnnnntttggannccatcagctatgacatgattacgaatttaatacgactcactatagggaatttggccctcgaggccaagaattcggcacgagggaaagttggtatgaagcattaccacttaaagaggaaccagagcttctgcccaactgtcaaccttgacaaattgtggactttggtcagtgaacagacacgggtgaatgctgctaaaaacaagacgggggctgctcccatcattgatgtggtgcgatcgggctactacaaagttctgggaaagggaaagctcccaaagcagcctgtcatcgtgaaggccaaattcttcagcagaagagctgaggagaagattaagagtgttgggggggcctgtgtcctggtggcttgaagcccatggagggagtttcattaaatgctaactactttttcaaaaaaaaaaaaannnnnnannnnnnnnnnnnnnnnnnnnnnnnnnnnnnnnnnnnaaaaaaaanantttttttatngnngncngnntttttttt

SEQ ID NO: 18471 - DNA, 430 bp, Homo sapiens
gaactggccggcattcttcaaaaactgtcagagtcatcaaagacaaggaagatgaacaagtggttctcaacagacatggtcccagggtccttccagtaatccttaatgatgtcctacaaaagccattaccgggacaactgggaagtcacagtgagttggagcagacggctgtgctgctgccatgtcagctcccccgtttcaatctttgtacggcgtcatgtcctcgttggcagcaaagtcacgttcaagcatttgggagtaaaggggcaccaagtctacaactcattctcaaattgtcagggcaagaataacacgtgtccacaggacagaagaggggaggggacagcaagtgaggtggcgttaacatgccagcagtcgagtgaagggagcgtgggaattctgtttaaagggacacatccaaacacctgtt

SEQ ID NO: 18472 - DNA, 434 bp, Homo sapiens
  misc_feature (1)...(434): n = a,t,c or g
ggccaacatgccatccagactgaggaagacccggaaacttaggggccacgtgagccacggccacggccgcataggcaagcaccggaagcaccccggcggccgcggtaatgctggtggtctgcatcaccaccggatcaacttcgacaaataccacccaggctactttgggaaagttggtatgaagcattaccacttaaagaggaaccagagcttctgcccaactgtcaaccttgacaaattgtggactttggtcagtgaacagacacgggtgaatgctgctaaaaacaagacgggggctgctcccatcattgatgtggtgcgatcgggctactacaaagttctgggaaagggaaagctcccaaagcagcctgtcatcgtgaaggccaaattcttcagcagaagagctgaggagaagattaanagtgttggggggg

SEQ ID NO: 18473 - DNA, 449 bp, Homo sapiens
tgattacgagtttaatacgactcactatagggaatttggccctcgaggccaagaattcggcacgagctttattgttacttaaagcttctcaggtactttcttaattaccttacacgctttatcacttaactctccatggttccatgagattatttcttaatgatcactttgcaggtgaagaaattaatttaatttgcctaaagttgcctaggggcacttgaatctgagtttgtgctcttgaaagcagagatcagagattaatctgttttctttccttttgggaatctacatctaagtaagtgcttctaaaattacaattgtctttggtctaatctaggtagcattaatttctttttcctcattcaccctcagtttttgctacaaccgttatcatttttgctttagggaaatgatgtttgacatcatactgtggacctgtgttcctgtct

SEQ ID NO: 18474 - DNA, 478 bp, Homo sapiens
  misc_feature (1)...(478): n = a,t,c or g
atttnaatancnntatgacatgattacgaatttaatacgactcactatagggaatttggccctcgaggccaagaattcggcacgagattaaatacatattttctggtgtatcattttaattcccttgtttctttctcaatatacatttttattttcttcatggttgtcctggggattacaattaatatcttacatttacagagaagtaacctttactcaggttctttaaatattaacattttatcacatttgctttatttctctctctatgtatgtatttagatatacagacatatataatgtgcatgtgtgtataaaatgtgtatgtattttgttgttcctgaactgtttgagaatgaattacagacaccatgcccctttacccttatatacttcctaaaaatgaggatattctcttaaccttagtatatttatcaaaaccnggaaattaacattgntccngnnctaaancctttgg

SEQ ID NO: 18475 - DNA, 359 bp, Homo sapiens
ggaggggagagagaggccggtcctggtctggccgctgcggctgctagcccgaggtctccaagccgggctgcggctccatcctcggctcctgggcaccgtctgcgaggctccgccgaccagagtgagaaagccgcgggcggcgaccgccgcatcatgtcagccaaggacgagcgggccagggagatcctgaggggcttcaaactaaattggatgaaccttcgggatgctgagacagggaagatactctggcaaggaacagaagacctgtctgtccctggtgtggagcatgaagcccgtgttcccaagaaaatcctcaagtgcaaggcagttgtctcgagaacttaatttttcttcgacag

SEQ ID NO: 18476 - DNA, 401 bp, Homo sapiens
ggaacacagagggcattctgaagccagctgaccgctcttttagccaaagtaaacttgaagttatcgaggaggagggaaaggtgggaccagatgaggacaagccaccttctaaaagttcttcatctgaaaagactcctgataagactgatcagaagtcaggggcccagttcttcacactggaaggcagacatcctgacagatcagtgtttcctgatacttacttcagttacaaagtagatgaagaatttgccactccttttaaaacagtagctaccaaaggtctagattttgacccttggtctaataaccgaggggatgatgaagtttttgacagtaaatcacgggaagatgaaactaagccatttgggctggcggtagaagaccgctctccagcaacaacc

SEQ ID NO: 18477 - DNA, 318 bp, Homo sapiens
agaagcaaagttttgtgggcatgctgaccatcactgatttcatcaatatcctgcaccgctactataaatcagccttggtacacatctatgagctagaagaacacaagatagaaacttggagagaggtgtatctccaggactcctttaaaccgcttgtctgcatttctcctaatgccagcttgtttgatgctgtctcttcattaattcggaacaagatccacaggctgccagttattgacccagaatcaggcaatactttgtacatcctcacccacaagcgcattctgaagttcctcaaattgtttatcactgagttcc

SEQ ID NO: 18478 - DNA, 320 bp, Homo sapiens
accatgtgctggatgagacgagccccctgagagacctcacaccccaaaacctaaaggagaaggagtttgagcttgtggtcctcctcaatgccactgtggaatccaccagcgctgtctgccagagccgaacatcttatatcccagaggaaatctactggggttttgagtttgtgcctgtggtatctctctccaaaaatggaaaatatgtggctgatttcagtcagtttgaacagattcggaaaagcccagattgcacattttactgtgcagattctgagaaacagcaactcgaggagaagtacaggcaggaggatcagagg

SEQ ID NO: 18479 - DNA, 338 bp, Homo sapiens
ggaatgcaagtgtctctttgagatcctgctttcagttcttttggatatatatgcagaaggggaatggctggaccatatggtagttatatttttaattttttgcagaacctccatactatttccacagcagctgcaccatttacattcctaccaacagcgtacaagggttccaatttctccatatcctttactgaagcttttagaatgttattcaaaatacgatataatggaaaaaaggcaccaacgtggtctcaaattgtgtttttcttggtagatggtaattaaaagggtaatggtgattaaggtatcggtgataaaaatagtaatgaaaagaggtg

SEQ ID NO: 18480 - DNA, 410 bp, Homo sapiens
gggagacagagccttactctgtcgcccaggctggagtgcaatggtgtgatctcggctcactgcaacctctgcctcctgggtttaatcgattctcctgcctcagcctctcaagtagctgggattacaggcacccaccaccatgcccagccaatttatttgtatttttttagtagagacagggtttcaccatgttggccaggctggtctcgaactcctgacctcaggtgatccacccgcctcggtctcccaaagtgctgggattataagggtgagccaccgtgcccagctaagatatttcaatctgtgaataacccatatggcctggtaacagcaagcacctgggaatatatacatataacccacatacggactgtcccgttcactcctcacaaccactctgctaacatact

SEQ ID NO: 18481 - DNA, 345 bp, Homo sapiens
  misc_feature (1)...(345): n = a,t,c or g
tgaacagtcatttgcccagctttctatgtatcaaatatctgattgtttgttgnantgccttaactttggttattaaantgtttatnggtnttaatttngggaggaaaggtnnaaaanattggattatttatngcnanntntntaaatagtgtattaattttgggtagaaaggggcataatatgagattatctacnnnaangncttcnaactgtgacactagtaatgacattataaagaagattaatttgngttgtggaagactgtctgatacattttagaatatttagcagcatttctgntctctatccattnnacnccagtaataacttccacttctcagttct

SEQ ID NO: 18482 - DNA, 656 bp, Homo sapiens
  misc_feature (1)...(656): n = a,t,c or g
gtgaggctgatgatgtaggaggatcccttgagcccaggagttcgaggatgcagtgagccgtgatctcaccactacactccaacctgggcaatagagcaaggccctgtttttaaaaataaagataaattttaaaaaattgaaaaaggagatggtctagttgggggtcaagggggagcaggtggtagaggggagatgggacttatatggtgaccacttaaccaaagtacactaccggctgcccaaagatgagcacaaatgtgcaagtagagctgggcacagtgactcacacctctaccagcactttgggaggccgaggagggtggatcacttaaggtcaggagttcaagaccagcttggccaacatggcaaaacccagtatctattaaaaatgcaaaaattagccaggtgtggtggtgcatgcctgtaatcccagctactcaggaggctgaggcaggagaaatgcttgggcccaagaggaaaggtgcattancccanattcacactggatccagccaagnncagagcaagacccaccnanaaaaaaganaaaanttttattagggcggagnttntcccttngggngggnaatttacttggaanggcnnttttaaaccngcngaaaaaangngccgcnggngntnccgctngtgggggg

SEQ ID NO: 18483 - DNA, 315 bp, Homo sapiens
ggagtgcctgaatagcttggaaaagtaacatctcctggccatcccttcatttaaccaagctattcaagtattcctatgccagagcagtgccaactcttggaggtcccagagtgcagccaatgcctttgtgtggtagttctaaattttaattgcacctgaaaaacctgggcacctaagcaatgagccacagcaaaaagtaaagaacaacaacaaaataaagctgttgttaaattttaaacaatattactaattgcccaaaatgtcaatttgatgtagttcttttcatgcaagtataaattcaattgttagttataa

SEQ ID NO: 18484 - DNA, 424 bp, Homo sapiens
gctctttgctgaagagcaagcagagggtcccaaccgcctgctgtacaaagacggcttcagcaccatcctgcacctgctgctgggttcaccccaccctgctgccacagctttgcatgctgagctgtgccaggcaggatccagccaaggcctctccctctgtcagttccagaacttctccctccatgacccactctatgggaaactcttcagcacctacctgcgccccccacacacctctcgaggcacctcccagacaccaaatgcctcatccccaggcaaccccactgctctggccaatgggactgtgcaagcacccaagcagaagggagactgagtgcctcagcctctcaccccctcctcctcagggcagcgctaggggcctcccctatgcctcagccccatctctgctcctgtttgaattttg

SEQ ID NO: 18485 - DNA, 415 bp, Homo sapiens
gattttaagtgtatacatttgatgagttttgacacatgtatacctcgccacaatgatgatattccattaacctttctatacacagttgccagattaattttcctaaaattgtgctttgcatccgtcatctacctcggcataaaaccttcactggctatgtactgttcataggataaagtacaaaatgctgtggtctggctctctaccgtcttgctttttgtctacttatctgcttttatctaccacaacccggctacatgaacctcttattgcaataaaactgatcaactggttctaggcacagttgctgcatctgtgcctttgctgtcagctgtaccctgcctatgatattccttggacatcatattccttcttgactgcttggcctttccttaaagtctggctcaagccccat

SEQ ID NO: 18486 - DNA, 335 bp, Homo sapiens
ggacacggctgacatcataactaatatttactgagcacttatgtgtcaggccctgtgcttaacacccttcgtatattctcccgctgatccctacacggtatgtgcaatattatcttcccattttacagatgaggaactgaggcacagggagatttcagttagttgctgaactaagatttgaagcaaaacagtccagcttctgagcctgagctctcaaccctttgccatacgtgggaggaagatggcaccataagtcccagaaagtgtctctctcatagtttgagaatgagcttccagccccttcctgggagatatcctgaccaccgtttggtcat

SEQ ID NO: 18487 - DNA, 357 bp, Homo sapiens
gcggcacgagcgagaggcttgggctagtaaggatgccacctatacttctgcccggaccctgctggctatcctgcgcctttccactgctctggcacgtctgagaatggtggatgtggtggagaaagaagatgtgaatgaagccatcaggctaatggagatgtcaaaggactctcttctaggagacaaggggcagacagctaggactcagagaccagcagatgtgatatttgccaccgtccgtgaactggtctcagggggccgaagtgtccggttctctgaggcagagcagcgctgtgtatctcgtggcttcacacccgcccagttccaggcggctctggatgaatatgaggagctcaa

SEQ ID NO: 18488 - DNA, 419 bp, Homo sapiens
ctatgacatgattacgaatttaatacgactcactatagggaatttggccctcgaggccaagaattcggcacgaggaaaagtctaaatatatcaactaaagtagctttgctctctgatgtaaaggatggagtaaatcaagcagcacctgcatttggatttggcagcagtcaagcagcaacatttatgtcgccaggctttccagtcaataacagcagcagtgataatgctcagaactttagttttaaaacaaactctggatttgctgctgcctcttctggaagccctgctggttttgggagttccccagcatttggagctgcagcctctaccagttcaggtatctctacttctgctccagcttttggatttgggaagcctgaagtcacatcggctgcatcattttcattcaaaagccctgc

SEQ ID NO: 18489 - DNA, 416 bp, Homo sapiens
agactcttgtgaagatggcttgcgctgccgcgcggtccccggccgaccaggacaggtttatttgtatctatcctgcttatttaaataataagaagaccatcgcagagggaaggcgaatccccataagtaaggctgttgaaaatcctacagctacagagattcaagatgtatgttcagcagttggacttaacgtatttcttgagaaaaataaaatgtactctagagaatggaatcgtgatgtccaatacagaggcagagtccgggtccagctcaaacaggaagatgggagcctctgccttgtacagttcccatcacgtaagtcagtaatgttgtatgcagcagaaatgatacctaaactaaaaacaaggacacaaaaaacaggaggtgctgaccaaagtcttcaacaaggagaggga

SEQ ID NO: 18490 - DNA, 433 bp, Homo sapiens
  misc_feature (1)...(433): n = a,t,c or g
gatagttcaataccctgctgcatgtaatttcttaagggttggatccactgtcaccatgaacacaaaaatttgtcagaggtctggtcagcacccatgtatgtagacagacaccccaactcaatgtgtcttttagcgatgcttcctcgagctaaacttcctacaaatcatggctgatgactgaagcctcctactgaaataatgttcttcttttcgctttttttttttctnttntttttttcnttgntttntaaaaccncctggggnatntacaaagntnacccccnannggtncttgcaggctacnaaaggggattngcagcnngcttcaaanacanccntgctnaannattcntaaangncaaaagngttaaanctgacntggattttaaaacccaccnggnttttccacccattttntccngnttccaaggcc

SEQ ID NO: 18491 - DNA, 476 bp, Homo sapiens
  misc_feature (1)...(476): n = a,t,c or g
gtgnnnnnntttgaaacctttgacatgattacgaatttaatacgactcactatagggaatttggccctcgaggccaagaattcggcacgaggagttgggctcttccagaacaccagagactgtgagaatggttctttctaatatggaaaagcttttttgcattcctgttcatgggatccggagtgttggaacagcagctgttaatatgtgccttgtggcaactggcggagcagatgcatattatgaaatgggaattcactgctgggatgttgcaggagctggcattattgttactgaagctggtggcgtgctaatggatgttacaggtggaccatttgatttgatgtcacgaagagtaattgctgcaaataatagaatattagcagaaaggatagctaaagaaattcaggttatacctttgcaacgagacgacgaagattaattaagcggccgcaagcttattccctttagtgagg

SEQ ID NO: 18492 - DNA, 491 bp, Homo sapiens
  misc_feature (1)...(491): n = a,t,c or g
ttcganacngttatgacatgattacgaatttaatacgactcactatagggaatttggccctcgaggccaagaattcggcacgagaaataaaaagatagaatttggagttgtgtacagttgtgtggaaggcaagatgtacactgccagaaaaggaaaaggtgccttttgtaatggtcaaaaactacaagtttcacaacaagaagatattaccaaatctctcttggtgactgagttgggctcttccagaacaccagagactgtgagaatggttctttctaatatggaaaagcttttttgcattcctgttcatgggatccggagtgttggaacagcagctgttaatatgtgccttgtggcaactggcggagcagatgcatattatgaaatgggaattcactgctgggatgttgcaggagctggcattattgttactgaagctggtggcgtgctaatggatgttacaggtggaccatttgatttgatgtcacgaa

SEQ ID NO: 18493 - DNA, 453 bp, Homo sapiens
  misc_feature (1)...(453): n = a,t,c or g
gggaagtgcgaagccatgtgaaggtgctgggggagatgctgggcatgtaccgcaggccagggcaggccccgcccgaccaggaggccctgcaggtcgtgtatgaaaggtgtgaaaagctgcggcccacgctgttccggttggcgagtgacaccactgatgacgatgatgcactcgcggaaattctccaggcaaatgacctcctcacccaaggagttctgctgtacaaacaggtgatggagggccgggtcacctttggaaacagagtgaccagctcattgggagacatccctgtctccagagtctttcagaatccagcaggctgcatgaagacctgccccctgattgacttggaggtggacaatggacctgcgcaaatggggactgtggtgccatctttgcttcatcaggacctggcagccttgggaatcantgatgctcctgttacaggcatgg

SEQ ID NO: 18494 - DNA, 393 bp, Homo sapiens
gcagctgccaggtcgagggatgtactcgaacctataattcttcacagagtattgggaaacacatgaagacagcacaccctgaccaatatgctgcatttaaaatgcagcgcaaaagtaaaaaaggtcagaaagctaacaacttaaatacaccaaataatggaaagtttgtttattttttgccatcaccggtgaacagctcaaatccattttttacatcacagaccaaagccaatgggaatcctgcttgttcggcccagttgcagcatgtctcgccacccatttttccagctcatttagcaagtgtgtcaactccattgttgtcctcaatggaaagtgtcataaatccaaatataacttctcaggataaaaatgaacaaggtggtatgttatgtt

SEQ ID NO: 18495 - DNA, 383 bp, Homo sapiens
ggtcgcggaggcttgtcattctgacccggggattcctcacagcgtctggcagaaatgtcaaatgcaaaagaaagaaaacacgccaagaaaatgagaaaccagcctaccaatgtgactctgtcctctggctttgtggctgacagaggtgtaaagcaccacagtggaggtgaaaaacctttccaagctcaaaaacaagagcctcatcctggaacttcacgacagcggcaaaccagagtcaacccccattctctgcctgaccctgaagtgaatgagcagtcttcctccaaagggatgtttagaaaaaagggaggatggaaagcaggtcccgagggcacgtctcaggagatccccaagtatataactgcttctacttttgctcaagc

SEQ ID NO: 18496 - DNA, 879 bp, Homo sapiens
ggacaatcttcatcatgacctgctcccctctcctcctcaccctcctcactcagggcacagggtcctgggcccagtctgccctgactcagcctgcctccgtgtctgggtctcctggacagtcgatcaccatctcctgcactggaaccagcagtgacgttggtgtttataactatgtctcctggtaccagcagaagccaggcaaagcccccaaactcatgatttatgaggtcagtaatcggccctcaggggtccctgatcgcttctctggctccaagtctggcaacacggcctccctgaccatctctgggctccaggctgaggacgaggctgactattactgtcaatcagcagacaccagtggcacttccttgggtgttcggcggagggaccaagttgaccgtcctaggtcagcccaaggctgccccctcggtcactctgttcccaccctcctctgaggagcttcaagccaacaaggccacactggtgtgtctgatcagtgacttctacccgggagctgtgacagtggcctggaaggcagatggcagccccgtcaaggcgggagtggagaccaccaaaccctccaaacagagcaacaacaagtacgcggccagcagctacctgagcctgacgcccgagcagtggaagtcccacagaagctacagctgccaggtcacgcatgaagggagcaccgtggagaagacagtggcccctacagaatgttcataggttctcaaccctcaccccccaccacgggagactagagctgcaggatcccaggggaggggtctctcctcccaccccaaggcatcaagcccttctccctgcactcaataaaccctcaataaatattctcattgtcaatcagaaaaaaaaaaaaaa

SEQ ID NO: 18497 - DNA, 1224 bp, Homo sapiens
tgaataccagttatgacatgattacgaatttaatacgactcactatagggaatttggccctcgaggccaagaattcggcacgaggatagcagtagggtcctgcaatggagatgtaacttccactatccttcagaccatcatggagaagtcagagactgagctcaaggatacttatgctcgttggcttcctcttggactgggtctcaaccacctggggaagggtgaggccatcgaggcaatcctggctgcactggaggttgtgtcagagccattccgcagttttgccaacacactggtggatgtgtgtgcatatgcaggctctgggaatgtgctgaaggtgcagcagctgctccacatttgtagcgaacactttgactccaaagagaaggaggaagacaaagacaagaaggaaaagaaagacaaggacaagaaggaacccctgctgacatgggagcacatcagggagtggctgttctggggattgcccttattgctatgggggaggagattggtgcagagatggcattacgaacctttggccacttgctgagatatggggagcctacactccggagggctgtacctttagcactggccctcatctctgtttcaaatccacgactcaacatcctggataccctaagcaaattctctcatgatgctgatccagaagtttcctataactccatttttgccatgggcatggtgggcagtggtaccaataatgcccgtctggctgcaatgctgcgccagttagctcaatatcatgccaaggacccaaacaacctcttcatggtgcgcttggcacagggcctgacacatttagggaagggcacccttaccctctgcccctaccacagcgaccggcagcttatgagccaggtggccgtggctggactgctcactgtgcttgtctctttcctggatgttcgaaacattattctaggcaaatcacactatgtattgtatgggctggtggctgccatgcagccccgaatgctggttacgtttgatgaggagctgcggccattgccagtgtctgtccgtgtgggccaggcagtggatgtggtgggccaggctggcaagccgaagactatcacagggttccagacgcatacaaccccagtgttgttggcccacggggaacgggcagaattggccactgaggagtttcttcctgttacccccattctggaaggttttgttatccttcggaagaacccg

SEQ ID NO: 18498 - DNA, 394 bp, Homo sapiens
  misc_feature (1)...(394): n = a,t,c or g
gccatgccctgtggtctggattccccgaccccacttctaatttctaaggaaggattttcgttctgaagagtcaggaggcaggaactaggaagtgaaattgaccaagacaggaagtccagccaggaggtctgagtcacagacgccgagtggagagcnnnnnnnaggggcccggcggccacgggaagtgngtggctttgggggcccccgcttggctaatccttcctctgggcacccatggggaagcgnccncattgcantcngcgggcccatgacnaactgttttntgggaaccnaggacttaancttcttcggttaantgcttttggccttnngggaaggcctgcgcttgccggtnaaantccttccaanttgttttnttccanggttttgnaaa

SEQ ID NO: 18499 - DNA, 534 bp, Homo sapiens
  misc_feature (1)...(534): n = a,t,c or g
tccnccccttccctttgaccaccanctatgacatgattacgaatttaatacgactcactatagggaatttggccctcgaggccaagaattcggcacgaggatgacaccagtatctaaagttaggccttcccacagaccatccaagcatacatgctgggtgcacgcctgtcggggagggtagactccacagcgtggtcctttgggtaagagcgcccctttctacctgggctaccctctgccttttctggggcagacccttatttccatatccttgaaaatgtccaccagtagaataatttatgcttaattgggtgtcttacaagacatcttgattattttttaacatgtggcaatgccagcacttttcctttggaaggggaaaacaattttttctctgttattgtccaatatttcagaccattttaaaaaaccaagtttgcagtaagaacaacccccacccttccaccacccaccttaaggcatgtctaaaaaaagacttaaattcatagtaatctggtggaggagatgactcac

SEQ ID NO: 18500 - DNA, 348 bp, Homo sapiens
gctaatgatacagttttgattctatagtaatttgtggcttattttatagtttataatgaatacttatttctagactcatacactggaaggggacccggaaaggtaatgtaactcagtgattttaaaacttgatttttttaactgagaactttttttgccccctgcctgtaggttaagtcttacgtgaaatgccaagataattgctgagcagctttggttacccagggcggggtctgggtctgtctgtactttgcctttactctagatggctcctgagacacaggcaggactcccaagcaccgggttgggatctgccctggtcccggcattccagtataagattgcctc

SEQ ID NO: 18501 - DNA, 437 bp, Homo sapiens
  misc_feature (1)...(437): n = a,t,c or g
gactgtggtgtccagcagcatccggcttcatggggggacttgaaccctgcagcaggctcctgctcctgcctctcctgctggctgtaagtggtctccgtcctgtccaggcccaggcccagagcgattgcagttgctctacggtgagcccgggcgtgctggcagggatcgtgatgggagacctggtgctgacagtgctcattgccctggccgtgtacttcctgggccggctggtccctcgggggcgaggggctgcggaggcagcgacccggaaacagcgtatcactgagaccgagtcgccttatcaggagctccagggtcaaaggtcggatgtctacagcgacctcaacacacagaggccgtattacaaatgagcccgaatcatgacagtcagcaacatgatacctggatccagncattctgaagcccaccctgnacct

SEQ ID NO: 18502 - DNA, 487 bp, Homo sapiens
  misc_feature (1)...(487): n = a,t,c or g
gggtgnntnntgnttganncnctaagactcttatgactgntacgaatttaatacgactcactatagggaatttggccctcgaggccaagaattcggcacgagcttattagtaacagccgttagagctgcatgtgtatgaactcatttattttcccaagaaccttatgacataaatgctattatgagtcccaatttacagatgaggaaaacagggcagaaggaaggttggataatttgctcaaggtcacctaanttggggaatggnaaaaaancnggnttgacctgggaccccanctntttaacattnnacccnntnggggncactncntnagngaggaaatttggggaangngagcncaggggntttgacancttnagtaaagtatcattttggggagtggaaaaangggggatgtccccntnatgggggntaaaaatggccnggntttaagggancaatngggccttttcccaganttttaatttt

SEQ ID NO: 18503 - DNA, 448 bp, Homo sapiens
  misc_feature (1)...(448): n = a,t,c or g
naaccgctatgacatgattacgaatttaatacgactcactatagggaatttggccctcgaggccaagaattcggcacgaggctgagaaaaaatgacaggatgtctggagaatgtgccccgaacgtgagtgtgtctgtgagcacaagccacaccaccatcagtggaggtggcagccgaggaggtggcggcggtggctacggctctggaggtagcagctatggctccggaggtggtagctatggttctggaggtggcggcggcggcggccgtggcagctatggctccggaggtggcagctatggctctggaggtggcggcggcggccatggcagctacggctccggaagcagcagtgggggctacagaggtggctctggaggcggcggcggcggcagctctggcggccggggctctggcggcgggagctctggaggctccataggaggcc

SEQ ID NO: 18504 - DNA, 369 bp, Homo sapiens
gactggaagagaccaaagcaggaaggagatggggggattggaaaagaggggtgctaccacacagatcaggccaaacagcctggtagggaccaccatctcctagaaggcagtcacccatgaggggtccatctgagtcaggcagtcttggtgaaacccaagctagggataactaggggctggctcttgagcaaattaaaggccagcaaatggcctcccctgtcttcagggttgggagtggccatagagccatggtttctcagctcatctggggcctggccctttgacacaatgtgactgtcagaagatgggagacttttctgggaacttgaaccatgcctgtttatacttttagaagagggagaagctgaa

SEQ ID NO: 18505 - DNA, 185 bp, Homo sapiens
tgcagcctcagtctcctgggttcaagtgatccgcccacctagtagttgggacaacaggcatatgccaccacacccgggtaatttttgtagctttttgtagagatggaggtctccttttgttgcccaggcttattctgagtcaacatgagtgaccatggcccaagaaacagtctcaagaggtcctg

SEQ ID NO: 18506 - DNA, 364 bp, Homo sapiens
gcatttattttataaggtttttgtgaggatttgatgagaacctgtataaagtgcttaacacctgtataaagtgcttagcatggagtgtggcacagtgtaagtgcttactacgtaggatccctgacaggacagagatgaggattaagttctcaggaggacctggtggggaggagttcgaatgcacctgctgtcctaaggggctggtgcctggccaccaagccctttgattcagaggcaaggaggcccgcccatcctctcttgcagctctcagcagtccctctattgtcagggctctttcccactgctggttttgcagggagacagggcagttggctggaagcagctgctttgggtggtaacccct

SEQ ID NO: 18507 - DNA, 320 bp, Homo sapiens
  misc_feature (1)...(320): n = a,t,c or g
gaaaaggttgaggtgtttctctcatgggctgtctaagaggagagacacgtttctttctttcctttattttttggttaggcccaccatgacttgggacctataacccccaggattaacagaggccttacatttactctgcaagctgactccaaaggagtctacagtctttacttgtcatgccacactcacacatccagtaggggtctctatttacccgcattcctagctagctggctctggcctcaantccaaaaactgcctttaggaccatcaaatggcctatgcaagcaagcggggtggttattaggacagattgttat

SEQ ID NO: 18508 - DNA, 674 bp, Homo sapiens
  misc_feature (1)...(674): n = a,t,c or g
gaacatcaagaaccagcgtgccaagttggaggccgccattgccgaggctgaggagcgtggggagctggcgctcaaggatgctcgtgccaagcaggaggagctggaagccgccctgcagcgggccaagcaggatatggcacggcagctgcgtgagtaccaggaactcatgagcgtgaagctggccctggacatcgagatcgccacctaccgcaagctgctggagggcgaggagagcaggatgtctggagaatgtgccccgaacgtgagtgtgtctgtgagcacaagccacaccaccatcagtggaggtggcagccgaggaggtggcggcggtggctacggctctggaggtagcagctatggctccggaggtggtagctatggttctggaggtggcggcggcggcngccgtggcagctatggctccggaggtggcagctatggctctggaggtggcngcggcggccatggcagctacggctccggaagcagcagtgggggctacagaggtggctctggaggcggcggcggcggcagctctggnggccggggctctggcggcggganctctggaggctccatangaggncgggganccaactctgggggtgtcaantcctccgggggcattccaacctgaattttgttctacanntantccgngttaccaaataaag

SEQ ID NO: 18509 - DNA, 515 bp, Homo sapiens
  misc_feature (1)...(515): n = a,t,c or g
gctccaataatagtgacttataaaagagcccccaaaatggatttaaattctcaaaaatcttctacctttcgccatggctttgaggtgtaaaagggcagaagcgtatggatacctcatattgtaaataatcttgtctgaaaactcactagtattttgcatttaaagactatagattttatatgaaattctaaagcaggcaaaactaatgtatggtgataaaaattacagtaacggttacttctagtgttggagagtttgaatgggaacactagggtactagagttctgtatcttttttttttttnnnnnnnnnnnnnnnnnttnnggcccnntntggncccnnngaaannttngccnccgggntnnanggnattcncnngcntaacccncnngctnagggggaattgnaggcgncccccnccntnccnggtnaatttggnnttttnagnaaaancngggttncccatgtnggccaggntagtctaaacnccngacctcngggatcngccccttgcc

SEQ ID NO: 18510 - DNA, 365 bp, Homo sapiens
aaatgatctcagactgcctgtaacatgaaacagttgggaggtaacaaagatgaagtactgtacttaacaagctcaccattatagctgggacccagaatgcccagtgaccaatgaggccatctgccaccaagccaattatcttctgcccaatatatattcccatgtgtggcatgtcgacgcggccgcgaattccagatctatgaatcgtagatactgaaaaaccccgcaagttcacttcaactgtgcatcgtgcaccatctcaatttctttcatttatacatcgttttgccttcttttatgtaactatactcctctaagtttcaatcttggccatgtaacctctgatctatagaattttttaaatg

SEQ ID NO: 18511 - DNA, 368 bp, Homo sapiens
gctataagagtaccacacgtagaacaaaatatggatgccagtgtagctattctgggtttttaaatactccctacaactagagaaagctcctgtttccagcgatctcaagaactgaccatgattacatgcagcagcaggttgagagtgatattcatcagatttagggcccattccatgaagtattgatggcagtggaagaattccaataagaattttcacaattgaaaatactaatagatgaattctcaaatgaaggtttatgcacagtgtcagttctttcaataataaatgaaggtagaaattgggttccacaccattattattttcttcctactcaacaacacatattttaggttgattaagaattt

SEQ ID NO: 18512 - DNA, 426 bp, Homo sapiens
ccgctatgacatgattacgaatttaatacgactcactatagggaatttggccctcgaggccaagaattcggcacgaggagctccaggccaggactgaggaggagaagaaagactgggtccaggccatcaactccaccctcctgaagcatgaacagacgctggagaccttcaaactgttgaactcaacaaacagggaagatgaagacaccccacccaactctccaaacgtggatcttgggaagcgggcacctacgcccatccgggaaaaggaagtcaccatgtgcatgcgctgccaggagcccttcaattctatcaccaaacgcaggcaccactgcaaggcctgcgggcatgtggtttgtgggaagtgctccgagttccgggcccgcctcgtctatgacaacaaccgctccaaccgtgtgtgcactg

SEQ ID NO: 18513 - DNA, 441 bp, Homo sapiens
tgctctggaacctgatgcaacaggaactagtaagggtattgaatttaccacagcatctactctcagtttagttaataaatatgatgttgatttatctttaactactcaagatactgaacatgacatggtaatttccaccagtcctagtggtggtagtgaagctgacattgaagggcctttgcctgctaaagatattcatcttgatttaccatctaataataaccttgttagtaaggatacagaagaaccattacctgtaaaagagagtgaccagacattagcagctctgctcagccctaaagaaagtagtggaggagaaaaagaagtacctccccctcctaaagagacactgcctgattcaggattttctgccaatattgaggatattaatgaagcagatttagtgagaccgttacttcctaaggacatggaacgtcttac

SEQ ID NO: 18514 - DNA, 115 bp, Homo sapiens
gtatgttagaaagttggttagggtcatcttctccaaatctatggcttcagccatctttgttaatgcctctgccatccattcagttgctcaggccagaaacgaagagtcattttaa

SEQ ID NO: 18515 - DNA, 358 bp, Homo sapiens
gaactggttaacatggtgaaacccagtctctactaaaaatacaaaaaagtagccgggcatggtggcaggcacctgtagtcccagctacttggaaggctgaggcaggagaatggtgtgaacccaagaggcagagctggcagtgagccgagatcgtgccactgcactccagcctgggcaacagagtgagactctgtctcaaaaaaaacaatgccacaaactcagtggcatattacttacttgcaacatattaaggttcatacttaacattctttttaaacacaaaatatttggtcatctttttatcagaaagctatctatgtaaaaatgctgtaaaatgctatagtagaacaggattttg

SEQ ID NO: 18516 - DNA, 333 bp, Homo sapiens
ggtaaggaagggccggagagggctgggctggggaagcttgggacctgcatggtggctgaggcctgctctccaacctggcctgggttactttaggttcactggtttgacccattcagcctaatccagctgctgctatcctacctggcgggggcagtcggggcgtgcagtctggccctgctctggcctggtctcgtctggttggctttggcctggcttagtctagtccagctcactatgacctggttccacctggtcaggtcaggcttggtcgggcctagtcagctctagtttcatctaagtctgcttaacccaccaggttagctttagttcctt

SEQ ID NO: 18517 - DNA, 386 bp, Homo sapiens
  misc_feature (1)...(386): n = a,t,c or g
tttganttccnnctacnacatgattacgaatttaatacgactcactatagggaatttggccctcgaggccaagaattcggcacgagggaatggccaacaggggacctgcatataccctgagccgggaggtgcagcagaagattgagaaacaatatgatgcatgtctggagcagatcctgatccagtggatcaccacccaatgccgaaaggatgtgggccggccccagcctggacgcgagaacttccagaactggctcaaggatggcacggtgctatgtgagctcattaatgcactgtaccccgaggggcaggccccagtaaagaagatccaggcctccaccatggccttcaagcagatggagcaaatctctcaattcctgcaagca

SEQ ID NO: 18518 - DNA, 321 bp, Homo sapiens
caggaataatttattttccaacacccttgagaaacattaaaccttttttctttttttgatgtggaaaactggaaaactagtacttccgccacactcaagatggctacatcagaaatagacttttccatccacctgggtggccccgcccccttatgaagctgcttccgccactctcagcgggttgggacgaattttacacttcttcgcagcattcaagatggtccggcttcctcctactttttattggctgcatcgcttcgtcttcaggggaaggcgggacttatatttgatcgacagctacattgatcaatggacaaaggg

SEQ ID NO: 18519 - DNA, 303 bp, Homo sapiens
  misc_feature (1)...(303): n = a,t,c or g
gcagctgcagcaggctcaggctgctggggccgagcaggaggtggaaaaattcactaagcggctggtgaaggtcactaagcagcacaatgatgagtgcaaacatctgctgagcctcatgggcatcccttatcttgatgcacccagtgaggcagaggccagctgtgctgccctggtgaaggctggcaaagtctatgctgcggctaccgaggacatggactgcctcacctcggnanccctgtgctaatgcgacacctgactgncagtgaagccaaaaagctggcaatccanganttccacctgatc

SEQ ID NO: 18520 - DNA, 394 bp, Homo sapiens
  misc_feature (1)...(394): n = a,t,c or g
gttctgtgtctcttctcagttaggaagaacatttgttacttccactacctaaagtttgcccggcatggtcagttttaccagtagtcaccacaagcacactgctaattagttttccagacctagggaaacgtttgagatcaggattgggatgtggggggtgtagggggagtaatgaccccaaaataaaaggaaaattgcnatagtaaaangaatgtttatttaaatgtctacagaatatatcatgtcaattantcaaagaccnttnaacttttatattgtaatgnataaattctacttaatgtataacgcnnnnatanaacntgancatatctantatgatatggnacagttcctcccnntnaggggctgggntctcntgggttnnanctgctcc

SEQ ID NO: 18521 - DNA, 368 bp, Homo sapiens
gggaaaacacagtgatttaaatgctgcacataaactcttcttaagatgatgtgggcattgtgctcccagtggtccacagcatttacatataaaaatctaagaagtttctcatagtccaaagcactgtggtcagggtagcaatcaatacctatatataataatgatctgtttagtcaggtaaatggaaagcattacagtcaatcatccaaaatatcttcatccagattgatatctgttgtgtcaatatcttctaattccaaattatccaaatctacttctagttcgagtaaactctgcagacaaaaggaagagggtaattaagttttacagtactgttaaaggaaagttatccgtgggttcatgattca

SEQ ID NO: 18522 - DNA, 495 bp, Homo sapiens
gagtctgacaggacaataaaatttagaaatggagttggaggatgtcataatacaattcaccagtgtcctatcttacatgcaatttcaaaggcagacaagaggaagtcatcagtcacattttaaaggcaccaaacaggtgccacatccatacaggctgactccctgctcccagcccattttttcctgaatctttggcttgccaatcaagaatgtcctcaaaatttgctcagaggtgtgggcctttgggtaaaggtgtcttcagaagctccacattaaagatccatcagtggttaagggcaaattgaagagaaataaagactaagatatttttttaaaagactgaaagaatagaacaatgaaaaagccccatctgtaatacagtttttctttttctttttttttgagacaaggtctctctctgtcacccaggctggagtagagtggcattatcctggctcattgcaatctgggcctcctggtttcaagtgattctgg

SEQ ID NO: 18523 - DNA, 635 bp, Homo sapiens
gattttgagaagtaaaacactttgggaggtaaatgacctctaacaaactcaagaagcagtcacatgcattctaacttttgcaggcagttcacaggctccaagttatgatctcgtctaggggttgggaaactacagcctgaggaccaaatctggccccccatctgtttttgtaaatgaagttttaccggaacacagccatgcccattcatttacagtatggtctatggctgctttcggacgacaagggcagaactgaatagttgtgacagagaccgtttggcctgcagaacctaaaatatttactgtctaacccagtatggaaaaaaatttttttttactggatctaattattccctgatctggatcaagctcctcatttcacagatgaagaaactcaggcccagatgggttaagaacttgtagcgtagcaggaccaagaactgaacccaaactcctgactcctagcccagtgctcttcaacactgtctggatttgaatgaaggtgaggggaaaatgaattcaattttatggcagttccttttgttccatatctctttgcatgaaaacaaatattttatgtaatactgaagacggcctttcccacacagaaaccatttcatcaggtttagtaaccc

SEQ ID NO: 18524 - DNA, 451 bp, Homo sapiens
  misc_feature (1)...(451): n = a,t,c or g
ggtgnntnnnnccttgaaatncgttatgncatgattacgaatttaatacgactcactatagggaatttggccctcgaggccaagaattcggcacgaggcttgaacgctccccgcagccaccgccacccattggaatggccaacaggggacctgcatatggcctgagccgggaggtgcagcagaagattgagaaacaatatgatgcagatctggagcagatcctgatccagtggatcaccacccagtgccgaaaggatgtgggccggccccagcctggacgcgagaacttccagaactggctcaaggatggcacggtgctatgtgagctcattaatgcactgtaccccgaggggcaggccccagtaaagaagatccaggcctccaccatggccttcaagcagatggagcagatctctcagttcctgcaagcagctgagccgctatggcatta

SEQ ID NO: 18525 - DNA, 506 bp, Homo sapiens
  misc_feature (1)...(506): n = a,t,c or g
gaatccccttngccttngacatccntncgaaatttantacgactcactatagggaatttggccctcgaggccaagaattcggcacgagttttaactttgtatctagtacttcaaatcttgaattaaatgaagaaatttattttactgattctcttgaaataaagagaaatgaaaattttccaaaggattatgtgaaattttcagatgaagaagaatttatgaatgaagatgagaaggaaatgaaggaaattctaatggcaggaagtagtttatcagctggagttagtggggaagataaaaccgagatattgaatcccactccagcgatggccaaatctctgaccatagactgtctggaattggcattaccccctgaactggcttttcaacttaatgaattatttggtcctgttggtattgattcagggtctctaacagttgaagattgtgtggttcatatagatctgaatctggcgaaagtgattcatgagaaatggaaagaatct

SEQ ID NO: 18526 - DNA, 305 bp, Homo sapiens
gcaaaggacagaccacataaataagtggccatcgtgggacgctgtcctccctgaaaagtgccctgattttgtagaggagccaagggagtttggggccatcctcaggtccaagtgttcttgggcgagatcatattttatgtttctaatacatttctttgaatagagcgaagcaattgttaaggcttacattggaacgtttgctgcagagatgaagtggggctaaaaatagtgtggtaggggagttggtttggagaagggggctgagaaagagccgtgctggcccactaagtgggttgcctggcagc

SEQ ID NO: 18527 - DNA, 353 bp, Homo sapiens
gataagaggtgggatacaggaaaccagggatatagaaactcagggaaaatataaagtctagcagtcaactaagcaagactggagcaggaagacccatggctgtgggacacaatggaacaggtggatttcttgatgtatggatgtagaaaatactactgtgatgtttcaccgatctggaactttgggccgagttagcaatatgtaagtagaaaactaagtaattgaggaatatagttaacttcagaggaaaaaacctcagaaaattagacaagaaaacataatatactctgtaagtcttcagtgcacaaaatttatatgaacctaataataaacactgaataataaatttgtga

SEQ ID NO: 18528 - DNA, 392 bp, Homo sapiens
cggacgcgtggggaactgggaggccctccactgaagaagctgaaacaagaggttggagaacagagtcaccctgaaatccagcagcctcccccaggccctgagtcctatgtacccccataccgccccagcctggaggaggacagcgccagcctgtctggggagagtctggatggacatttgcaggctgtggggtcatgtccaaggctgacgccgccccctgctgacctgcctctggcattgccagcccatgggctatggagccgacacatcctgcagcagacactgatggacgaggggctgcggctcgcccgcctcgtctcccacgaccgcgtgggccgctcagcccctgtgtgcctgcgaagcccctctcgcagagttcgaggaagggctgc

SEQ ID NO: 18529 - DNA, 375 bp, Homo sapiens
gcagatgggctctcactatgttgcccaggctggtcttgaactcctgggctcaagaaatcccccaaccttggcctcccaaagtgctgggattacaggtgcgagtcatcatgcccagccccaatctcatactcttgaaatgctaaagccatgtgaagaatccaggcctagcttgctggatgatgagagactcagtccccctaatgccccaggtgacagtcactcaataccagacatatgagtgacaccatctaggactagccagcctcaacaacccaactagtgacctcagctgcatgggcaagtccagccaagataagctgagctggatccagactataagaattacctggaagaacgcaaactaatgaaagattg

SEQ ID NO: 18530 - DNA, 383 bp, Homo sapiens
atctgaagataggcaatgtcaaacccatgaaaatgggagattaatgagctttatttggccgtgcatggtgcctcatgcctgtaatgaggcagatggcttgagtccaggagttcaagactagcctgggcaatgtggcaaaaccgcgtgtttacaaaaaatacaaaaattagccaggcatggtggtgcatgcctgtagtcccagctgtttgggaggctgaggcaggaggatctttgagcctaggatgctaaggttgcagtgagccaagatggcaccattgcactctagcctgggcagcagagcgagaccctgtctcaaaaaatacatttatttttttcattttcagttaacagtgtactcttataacaccgttattagctggtac

SEQ ID NO: 18531 - DNA, 343 bp, Homo sapiens
aagttttactgtattacttcttactttcaatggatataaagcagagtcctggtaggcacattttgtatacctgcaaagatgcagaactaaacagttccatctcttccatattaaaacaaaagtcctgtaaaccttgggtgttgagtgtaatacttcagcactagcaccaaagcctcaaataagaaaagataccaagaacaccactagtgaacaaaactaaactctcggctgggagcagtagttcgcacctgtaatcccagcactttgacaagccaaggtgggaggattacttgaagtcaggagttcaagacaagcctaggcagcatagcgaattcacatatcc

SEQ ID NO: 18532 - DNA, 495 bp, Homo sapiens
atgactacgaatttaatacgactcactatagggaatttggccctcgaggccaagaattcggcacgagcagcccttgccttgagtcagtgcgccgctctccagcccgcttgaacgctccccgcagccaccgccacccattggaatggccaacaggggacctgcatatggcctgagccgggaggtgcagcagaagattgagaaacaatatgatgcagatctggagcagatcctgatccagtggatcaccacccagtgccgaaaggatgtgggccggccccagcctggacgcgagaacttccagaactggctcaaggatggcacggtgctatgtgagctcattaatgcactgtaccccgaggggcaggccccagtaaagaagatccaggcctccaccatggccttcaagcagatggagcagatctctcagttcctgcaagcagctgagcgctatggcattaacaccactgacatcttcaaactgtggacctctgggaa

SEQ ID NO: 18533 - DNA, 401 bp, Homo sapiens
attctatcaattcaagtattcttactatggttgctttccctatttgttcaatagactgataatactggaatttatagagtttgagccattacaacttttgtgaggatgtgtttcaaacatttctggacaaatcttattttgtatttctggaagaatgtagtaatcttctagaccgcttaaaaccaatgctcccaagctgaatattcttgagaaatttgtttttattatgccatttgacatttcaaatcagtgctcatatacagtaaacttgtgatagaaattgtattttattgctttttggattataattcatataaatataattacttgaatattgtttgagatcattaacatgccagggcagttcccactgatttagatggtccaagataatctcattc

SEQ ID NO: 18534 - DNA, 278 bp, Homo sapiens
  misc_feature (1)...(278): n = a,t,c or g
ggaccattgcagagatgaggaagcaggacctggctaaagacacggacccactcaagctgaagctcctggactggattgagggcaaggagcggaacatccgggccctgctgtccacgctgcacacagtgctgtgggacggggagagccgctggacgcccgtgggcatggccgacctggtggctccggagcaagtgaagaagcactatcgccgcggcggtgctggccgtgcaccccgacaaggctgcggggcagccgtacnancngnncgccnagatgat

SEQ ID NO: 18535 - DNA, 343 bp, Homo sapiens
tttaaattccaccttttctgtccttaataaatgccgtctttaaattcccatgatagcttcagagacttaagaagcagtgttttgtgtgcctgctgtgtgtcagtcactgttagatgattcctctttaatgattcatgatttctcctttaatcctcacagtactttaggacttattggtatctttattcccgttttctaatgattgttacttgtctaagtttaaatagctagtatgtagttcatcaagaccacactcatctatttgactctaaaatgttattgttggggcccaatctgtatggcaagtacacaataaatgtttgctgaaatgaaattttttttt

SEQ ID NO: 18536 - DNA, 374 bp, Homo sapiens
gagatcatgtagcataatttctgaaaccatccagtgttggtgaatcttttcttttagtttttctttcctttaggcatggtgtaatttttaagaaaagcctgtacttttcaaacagcgactgtcatattacttttaagtatgttaaatttgaagattttgaattaaggagcattgttccatcaccttgaattccacagtttaagcagaaaattgtattttagcttaaacatttttagcagagcaagaaacaaagaagtatttgcccccctccccatctttgatgcctccgtgctatttaaatgtagaaacagtcttgactgagtcctttggactgatagctcggagtggctgatgtcttgactgagtactttgga

SEQ ID NO: 18537 - DNA, 377 bp, Homo sapiens
  misc_feature (1)...(377): n = a,t,c or g
cttcaaaggaggaagaagaaagggaaagcagatggtggagctgaatatgccacttaccagactaaatcaaccactccagcagagcagagaggctgaatagattccacaacctggtttgccagttcatcttttgactctattaaaatcttcaatagttgttattctgtagtttcactctcatgagtgcaactgtggcttagctaatattgcaatgtggcttgaatgtaggtagcatcctttgatgcttctttgaaacttgtatgaatttgggtatgaacagattgcctgctttcccttaaataacacttagatttattggaccagtcagcacagcatgcctggttgnattaaagcagggatatgctggattttataaa

SEQ ID NO: 18538 - DNA, 549 bp, Homo sapiens
  misc_feature (1)...(549): n = a,t,c or g
ttttgaatncnncntnaaacnccnttttatnacatcnattacgaatttaatacgactcactatagggaatttggccctcgaggccaagaattcggcacgaggcgtggtggtgcatgcctgtaatcccagctactccggaggctgtggcatgagaatcacttgaacctgggaggcggaggttgcagtgagccgagatcgtgtcaccgcactcactcaagcctgggcaacagaccaaaactctgtccccccaaataaaaaggatgaatgaatggataaacaggtacatccaatcaatggactactacttaacaataaaatataaactggttcatgcnacaactcggatgaatctcanaggcattatgctaaataaaagtagccagtctcaaaaggttacatgctgtgtgatttcacttatgacatcaagaagataaaactacngtgaaggaaaagagactagtagttaccagggattagggatagaaggaagatataactacanngggatagaaagcacaagggaacttctggaagtaatgggacaactct

SEQ ID NO: 18539 - DNA, 501 bp, Homo sapiens
ggaatttggccctcgaggccaagaattcggcacgagctggatatgaagtgagaaattaatgagacagttgctgatggagaagagcacttgaatgtgttcaggagacagctgaaatgcagaactgcaagtaacagacatcaagcaagccctgacactaaaagaggagtccacacagatgtgatatgggactgtaatgtaaatgtgatcaaggaaacacgtatacagggaaaaaggaaaataagaataggtaaggatagatgatgagataacttggcaaattgccaagatttttcaaggttaagtgaatgtaataaatgccataggggttaaatctttaaaatatataattttcatatggggacactggtatcctgtgaacaactcttgaaaagagaggaggccgggcgcagtggctcatgcctgtaatcacagcactttaggaggccgaggcgggcaggtgatcacctgaggcgggagttgagaccacctggcaatatggcg

SEQ ID NO: 18540 - DNA, 426 bp, Homo sapiens
ggctcggcgaaaacatttaaaagtgcaacagacttagtcattgtgagccactaaagaaacaatcctctttggttttctcttagtagagaaaaataaatcagccactgcatccgacaacacctctgaaaagagacttattcctcaggttacactcagacataaaaagcttccttttcccattgccatttgaaataggaacagaaggaaactttggaatactgcatccctaaaaggaggtacatgtttttgaatgtaagataattcacacagaaaatcactgaaaaaggagcccattcgcctccaggcgtgcactttccacctcccatcccaggccagttccatcttcctaacatccatatcccacattccaattttgctctgcaaagacccatgacagcatgtttttgcagaacaaacaatgccagc

SEQ ID NO: 18541 - DNA, 488 bp, Homo sapiens
agctagtaagttcattctcagccatcatgaaatcttgaggaagttaaagtttcttatctgaagatgactgaagttggacaagatgctattagtttcattcacactcacgttttctaaagagtttctgagaaacaactttgctcactgtaacccacaatgctgtgtggcagtagatgtcagtcatgaaatgccagtgagaccactgaaatcctaatccgagaggtcccaggttaaccctgcaagtcaccaggaggaacctctctattctacctcttggctattaagtatcttaacattttcccgcctttgttttatgcaattctgggtgactcctttttctgctggaggctcctagtaaaattcacttttgcacactgtccaaactagtatcctaggttgtcaacctccctaagagtcagggagcaacagggtgtgcactggagtcataaggtgcaactaaggctgtcttaaagaaattgtgaagtttg

SEQ ID NO: 18542 - DNA, 392 bp, Homo sapiens
gactggggactgcaggcatgcaccatcacacctggctaattattttttgtagagacaaggtttcacgatattgtccaagctggtctcaaactcctgggctcaagtgatccatccagcttggcctccaaaagtgctgggacaacagggcatgagccaccatgcccggcctaataaaagtataatttcttagtaaaacttaatagatttttgaaaatgtgtgtttgtgtttagtgggaggttttttccccactaaacacagacatgcattttttaaaaattgtttatgtaaagtacagaaagtagttattgtgcaattattataacctctatcttcaaatattatcttggagagtcatctgagccttggaagaatgagagactgccaacatact

SEQ ID NO: 18543 - DNA, 511 bp, Homo sapiens
atgtggctctgtcctagaaaagaagtaatagaacaaactaaagcaccaaaggcaatgactccttctagaattgctgattccttccaagtcataaagaacagccccttgtcggagtggcttatcaggcccccatacaaagaaggaagtcccaaggaagtgcctggtactgaagacagagctggcaaacagaagtttaaaagccccatgaatacttcctggtgttcctttaacacagctgactgggtcctgccaggaaagaagatgggcaacctcagccagttatcttctggagaagacaagtggctgcttcgaaagaaggcccaggaagtattacttaattcacctctacaggaggaacataacttccccccagaccattatggcctccctgcagtttgtgatctctttgcctgtatgcagcttaaagttgataaagagaagtggttatatcgaactcctctacagatgtgaaggaatggacaagagttgagcagcctttctgctgattatc

SEQ ID NO: 18544 - DNA, 420 bp, Homo sapiens
gccagcctttgcccactgccattggcttatataagaaccaccctctgtatgccctgaagcggcatctcctgaaatatgaggccatctatcccgagacagctgccatccttgggtattgtcgtggagaagcggtctactccagggattgtgtgcacactctgcattccagggacacgtggctgaagaaagcaagagtggtgaggcttggagaagtaccctacaagatggtgaaaggcttttctaaccgtgctcggaaagcccgacttgctgagccccagctgcgggaagaaaatgacctgggcctgtttggctactggcagacagaggagtatcagcccccagtggccgtggacgggaaggtgccccggaacgagtttgggaatgtgtacctcttcctgccagcatgatgcctattggctg

SEQ ID NO: 18545 - DNA, 328 bp, Homo sapiens
  misc_feature (1)...(328): n = a,t,c or g
gccataaccccaggcatcccatcccttggggtgggggagaggggagacagggcaatcttgtccacagtctcccattctcatatgtagccctcatgataatctgggcatctcgtgccagggcaggctaccccttcatggtgactaacagttacatgaaagtccacgcttttgggaaaactgggtgggatggatgctggggagaagtgagggctgggcagctgattttgtcactgtnttcacaacctccgtgctgggcttgtagaccactgnnctggctgctctcatgcctgcctgataccctgcttggtcaaatccccggctgcttcct

SEQ ID NO: 18546 - DNA, 421 bp, Homo sapiens
gcagacccaaaccatagatttattaagtgatttggaaaacatcttgtcaagtaatctgcctgcccagacattggatcatcgtagtcttttgtctgacacaaatcctggacctgacacccagctcccatctggcccagcccagaaccccggaatcgattttgatatcgaagagttcttttcggcctcaaatatccagactcaaactgaagagagtgaacttagcaccatgaccaccgagccagtcttggagtcactggacatagagactcaaacggacttcttactcgcagatacctctgctcagtcctatgggtgtagagggaaattctaacttcttaggccttgagatgtttgacacacagacacagacagacttaaactttttcttagacagtagccctcatctgcctctgggagaatc

SEQ ID NO: 18547 - DNA, 504 bp, Homo sapiens
  misc_feature (1)...(504): n = a,t,c or g
ggctaagtcttacatgaaacctctatacctcaatttcttcacctatttaaaagaaaaacctacttcacaagtatgctggaattttaaaggagcaggtggcagtatttaaaaggaaaagaggccctactggctctttctggagagccagtcagggaattctagaaaacaaaaataggccaggtgtggtggcttacgcctgtaatcccagcactttgggaggtggacggattacttgaggataggagttcaagaccagtttggccaacatggtgaagccctgtctctactaaaaatacaaagattagccaggtgtggtggcacacacctgtagtcccggctattcgggaggctgaggcatgagaattacttgaacctgggaggcagaggctgcagtgagacaagaattgcttgaacccgggaggcagaggttgcagtgagccgggatcacgccactgcactccagtttgggcaacagagtgagancctgtttaaaaaaaaaaaaaa

SEQ ID NO: 18548 - DNA, 563 bp, Homo sapiens
accgctatgacatgattacgaatttaatacgactcactatagggaatttggccctcgaggccaagaattcggcacgagcggtagcgacggtagctctagccgggcctgagctgtgctagcacctcccccaggagaccgttgcagtcggccagcccccttctccacggccttgcccactaggtaaccatgtgcgaccgaaaggccgtgatcaaaaatgcggacatgtcggaagagatgcaacaggactcggtggagtgcgctactcaggcgctggagaaatacaacatagagaaggacattgcggctcatatcaagaaggaatttgacaagaagtacaatcccacctggcattgcatcgtggggaggaacttcggtagttatgtgacacatgaaaccaaacacttcatctacttctacctgggccaagtggccattcttctgttcaaatctggttaaaagcatggactgtgccacacacccagtgatccatccaaaaacaaggactgcagcctaaattccaaataccagagactgaaattttcagccttgctaagggaacatct

SEQ ID NO: 18549 - DNA, 471 bp, Homo sapiens
gaactggatttgggatatattgcaaaggaaaaatcaatcatatctgctgacaaattagaagtgaggtgtgagagaaagtaaggatcatggataactccaaggtttttggcctgagtaactgaaagaagtgaggccccaattaacaagatgggaaagaatgaaggaagtgcagatgtcaggcagaaaatcaagtgttaacttttggactagtggatttgaaatgtctaacacatttccaaatggaggtatccaagacatgattttgatctatgaggagttcagggaatgagactgccttagaactataaatttggcaaaggtaatcattttcaagagccaaaagcacagagtaagccatcaatcctcactgcaactcttctaaatgtatcctatattctacagaattaagccctgatcacacaaataaacatggtacacctgttataatgcagtacaatgttgacacacttt

SEQ ID NO: 18550 - DNA, 348 bp, Homo sapiens
ctagactgtagcaatgctctcctacccagccttcctgatgcctctcactccgccttttaaatccatcccgctcactcctactcttcctaaaagttccactttaatcatctcattcctcttctaaaaatggtcaaacaccttggctggcacttgaagcccatctctgtagggctccaggacacctttccacccttgtctcctaacaacctgaactgccgaaacccatcctcttaaattttgcacataaactgaatccatcaggccgggcacggtggctcatgcctgtaatctcagccctttgggaggccatggtgggtggatcacctgaggtcaggagttcaagaccag

SEQ ID NO: 18551 - DNA, 328 bp, Homo sapiens
ggttgtataacgttccattttgtagatatattgtcattgtatgtatgtttaataattcctttagagatcaatatttgtttttcatcttttcactgcattgaatattcttgtatggtatgtgttttgctcatagatgaatatatctgtaagataaatcccttcagtagaattgctgaaccaatgtgtatatgaattcaaaattttgataggcattgccaaactgactcccataaaggttgctcaggtaaaattttacaagctcatgctcatcaacttaaaaattatccacttgagtctgaacctgtttcttaactagatgccataggac

SEQ ID NO: 18552 - DNA, 344 bp, Homo sapiens
gctactggcaagttaagattccttggaattaaagctctttgtagcctaaccaaaaaaagatacctaatttttatcttattttactgtattttattcttcactgttacagcttcaagttatcccctgctggaagaccacatgagtgatactctgtcttctcagggaattatatttaaaggcacattagttttgatcacccggtccaggtgttgggatttctccattatgtagtaactgtttttcccattacaagtaacaagcaatctgtgggcagtcactttgagactcactgtgtctcccaggctggagtgcagtggcacgatctcggctcactgcaacctccg

SEQ ID NO: 18553 - DNA, 483 bp, Homo sapiens
gtagaagcaataaaaagactaaggtatactttatacagttacatatttttgtcacacttgaatagtagcacttgtgcatggtactttcctttatgatttagcatgataccatttgtagctactatgtaggccaccaagctttgaaccatttggtttctcccttaaatctgccttaaatttttatttctcttcaacttgagagcatgtacacaatataactacataacagatttgcatattgtactgtcataattacagggacatgtatcatcagggtagggaagtcacatttttcttgtgccttagagtgcatctttttcactgtggcatggtaaaattctttgaagcagttttccttttcatggcatgagtttgaagtagaaaataatgcagaggcctaatcatccatctttactttcagatgcctgaaaactaccggtaatctcattactactggtcaatttttaatgcatttgatttaaa

SEQ ID NO: 18554 - DNA, 477 bp, Homo sapiens
  misc_feature (1)...(477): n = a,t,c or g
tttgaancctaaagccntgacatgattacgaatttaatacgactcactatagggaatttggccctcgaggccaagaattcggcacgagcggcacgagatacacaaaagcaactccaaagtgaattgtttgagatttaaggtttgcttaactcttcccaaccctttggcttttagatttgcttggaacggtagaagaaatccttccaagcctctcagaaaatatcagtgtttgggggatgaaagattctgttccacaaggtgtaatttcactcaaagaaaaactgagcacctcacctgatgagcccgtgccacgcagccaccatgttgtctcactcctcaagtctacttgtctttacatttttacctctggaacaacaggtatgatccaattcttttgaaggctaaaatgaatgcgagaaatttgcaaagcaacagtgttgggcaaatttctaccatgtgtagtgccaaccatctgaa

SEQ ID NO: 18555 - DNA, 401 bp, Homo sapiens
gaattttaaaaatgaaaataaaaaatgaatggctaaaaaataaattagatattaattgcaatgccaaaaaaatcccacgataataattactggaaattactatctccaaaagaaagagtgagatggaaggagggggagggcggtagagaggacatgactgaaggaaaaagagaaagaaagaaaggaagagaagggaggggagggaaggggaggagaggaggaagaaactctccatgacataaaagatgttcaagcctaggaaatggctttcttcttggcacatccgtactgaaaatttcctcttgtttcacccttggagactttgctgttgttggctgggtctgcctgctcatgctccatttgactctgttgcacaactctcatttcagtgttctgtcagt

SEQ ID NO: 18556 - DNA, 374 bp, Homo sapiens
gtatgaaaaaataaaattgggagactgaaaaaacaatagaatgatgaggatgatgatgatactttaaccctactagtctatgtaagcataaactcattaattgaagaggagttaatgttaaagtccctccacaaggaggtgttataatttgtttttcccccagaacagaccaattatagacttagttgcatttataagctatgttttagcttttctttcctattggattttgtaactgcgacagtccaaggagtgttggtgagcacaatgagttaagtcccagagccagaggtggtgttttcaagcttaggaactggggggtcgggggtagggtcggggggaggtggaaattggctcctgaaattttattctta

SEQ ID NO: 18557 - DNA, 375 bp, Homo sapiens
ggcagctagaatggggttatgagaagcagctattgaaattgagaggaaagagttgtggatggccgtttaaaacaataacagtccatagtaggcttgttgagaaccatttttatctagagatgctggagagtggaagaatgtatgatacttatgaaaacaaaattgctcccaccattcgacactgaaggtagtatccaagtattgggattggttacatgtctatccatgcccttctaatctctttcccctattgccaataatacctgcgcctgagaataatataatactctttgaggtcacgtcgacgcggccgcgaattccagatctatgaatcgtagatactgaaaaaccccgcaagttcacttcaactgtgca

SEQ ID NO: 18558 - DNA, 368 bp, Homo sapiens
ggagagctagtgttcataccctgatttttttctcccctcacacagggtcttgccttgtcgcccaggctggagtgcactgatgcaatcacagctcactgcagcctcaactttccgggctcgatttagttttaaaattagtatactttcccaacaatttctgcagatgttataatttcttgtctttttgggtcagccctaatgtaccttgaggacttcagagataaaatccctgtgcttcctatttcccactgaatttcattactttattcttagattaacaagagactccaagaatagaaatgggaaaagagtactagcagagctggatgcagtggctcacacctgtaatccctgcactttgggacgct

SEQ ID NO: 18559 - DNA, 521 bp, Homo sapiens
  misc_feature (1)...(521): n = a,t,c or g
ggtnnnnnnnnattgaaccgtttgactnccgnttgactgattcgaatttaatacgactcactatagggaatttggccctcgaggccaagaattcggcacgagagagggtaaacctgaggcaccaccttcccagagtcctaatccatctacacatgtatgcagcccttctccgatgctttctgaaaggcctcagaataattgtgtgaacaggaatgacatacagactgcagggacaatgactgttccattgtgttctgagaaaacaagaccaatgtcagaacacctcaagcataacccaccaatttttggtagcagtggagagctacaggacaactgccagcagttgatgagaaacaaagagcaagagattctgaagggtcgagacaaggagcaaacacgagatcttgtgcccccaacacagcactatctgaaaccaggatggattgaattgaaggcccctcgttttcaccaagcggaatcccatctaaaacgtaatgaggcatcacttgccatcaattctt

SEQ ID NO: 18560 - DNA, 687 bp, Homo sapiens
  misc_feature (1)...(687): n = a,t,c or g
cggatccttggatcccctgcaggtaccggtccggaattcccgggtcgacgagctcactagtcggcggcccgctctagaggatccctcgaggggcccaagcttacgcgtgcatgcgacgtcatagctctctccctatagtgagtcgtattataagctaggcactggccgtcgttttacaacgtcgtgactgggagatctgctagcttgggatctttgtgaaggaaccttacttctgtggtgtgacataattggacaaactacctacagagatttaaagctctaaggtaaatataaaatttttaagtgtataatgtgttaaactagctgcatatgcttgctgcttgagagttttgcttactgagtatgatttatgaaaatattatacacaggagctaaggttanncncttaattcgctgcttctgagacttctctgtcaaaacagccccactgataatattagacagaacgagaatgcaggggtctcttccctcccctggggtttaggaagctcatgaggagctcggcttaaaatgtctttgatgtctcttcctttgtctcaaaaagtaatgtcaattttatatactatttcaatattactatctgcatttgttttaatataaaaatgtttgctgcctacctttttctcccaaaaaatctttaagtaaagatgatctgggaaaatgaaa

SEQ ID NO: 18561 - DNA, 472 bp, Homo sapiens
  misc_feature (1)...(472): n = a,t,c or g
ancttgnagancgctatgactgattacgaatttaatacgactcactatagggaatttggccctcgaggccaagaattcggcacgaggaagaaacaagaggctggagattgtcaaattcagtatcccagttggctcttgattcttggtgaaaccatccctcagctcctagagggagattgttagatcatgaaactaattaccatccttttcctctgctccaggctgctactaagtttaacccaggaatcacagtccgaggaaattgactgcaatgacaaggatttatttaaagctgtggatgctgctctgaagaaatataacagtcaaaaccaaagtaacaaccagtttgtattgtaccgcataactgaagccactaagacggttggctctgacacgttttattccttcaagtacgaaatcaaggagggggattgtcctgttcaaagtggcaaaacctggcaggactgtgaag

SEQ ID NO: 18562 - DNA, 496 bp, Homo sapiens
  misc_feature (1)...(496): n = a,t,c or g
tttgnnncctatcagctatgacatnnttacgaatttaatacgactcactatagggaatttggccctcgaggccaagaattcggcacgagcggcacgagttccaacttgactgtagccatgctagcaaacttgataccattcactctgaccctgatatcttttctgctgttaatctactctctgtgtaaacatctgaagaagatgcagctccatggcaaaggatctcaagatcccagcaccaagatccacataaaagctctgcaaactgtgacctccttcctcatattacttgccatttactttctgtgtctaatcatatcgttttggaattttaagatgcgaccaaaagaaattgtcttaatgctttgccaagcttttggaatcatatatccatcattccactcattcattctgatttgggggaacaagacgctaaagcagacctttctttcagttttgtggcaggtgacttgctgggcataaggacataccagtc

SEQ ID NO: 18563 - DNA, 309 bp, Homo sapiens
tctgggttcaagcgattctcctgcctctgcctccgagtagctgggactacaggtgcacagcaccacacccagctaatttttgtatttttagtaaagatggtggttcaccatgttggccaggctggtctcgaactcctgacctcaggtgatctgcccaccttggcctcccaaggtgccgggattacaggcatgagccactgttcccagccctcaagttttaactttttggctgagtaactgaagttcaaatcaatactaaattataatcacatgaattaaaaaaagacaatggtaaattactatttctaa

SEQ ID NO: 18564 - DNA, 164 bp, Homo sapiens
aaagaattacggaaaatgttgggaaatgaaatcttgtttatgtatagttggtaataaaatagacttggaaaaggagagacatgtttccattcaagaagcagagtcgtatgcagaatctgtgggagcaaaacattatcatacttcagccaaacagaacaaaggaa

SEQ ID NO: 18565 - DNA, 305 bp, Homo sapiens
gtttgtattttttgtagagacagggtttctccttgttgcccaggctggtctctaactcctgggctcaagtgatccacccacatcggcctcccaaagttctgggatttcaggtgtgagccaccacgcctggcctccccctggttgtttctggaacacaccaggcatatgtcttcttagggcctttgcactggctatttcttacacataaatgctcttccttagatggctttgttgcctagctccctttcctctttcacatctttgttcaaataccaccatcttagtgaaacctttttttttttttt

SEQ ID NO: 18566 - DNA, 467 bp, Homo sapiens
  misc_feature (1)...(467): n = a,t,c or g
tgganatccgntatgactgattacgaatttaatacgactcactatagggaatttggccctcgaggccaagaattcggcacgaggacacgttttattccttcaagtacgaaatcaaggagggggattgtcctgttcaaagtggcaaaacctggcaggactgtgagtacaaggatgctgcaaaagcagccactggagaatgcacagcaaccgtggggaagaggagcagtacgaaattctccgtggctacccagacctgccagattactccagccgagggccctgtggtgacagcccagtacgactgcctcggctgtgtgcatcctatatcaacgcagagcccagacctggagcccattctgagacacggcattcagtactttaacaacaacactcaacattcctccctcttcacgcttaatgaagtaaaacgggcccaaagacaggtggtggctggattgaactttcga

SEQ ID NO: 18567 - DNA, 388 bp, Homo sapiens
ttttagtagagacggggtttcaccatgttggtcaggctggcctcgatctcgtgacctcgtgatctgtccgcctcggccttccaaagtgctaggattacaggcgtgagccaccgcacctggccaacttttcatcttaagttgtttaaatttatgcacttttagatatcagaatatatgcttgaacaaaggaaatagtaaattagctatatgtctgctggtttcacttcgatgtggatatggatatgtggataaagacagtaaatgaaattaaaaccctgctgttttaaatatcattaccagatataattgagggaatattatatcaacaaacatattgaaacttggctttatttgtaacgtaaactatatataatccatacgtagccag

SEQ ID NO: 18568 - DNA, 544 bp, Homo sapiens
  misc_feature (1)...(544): n = a,t,c or g
tttgaancccttgtttatccacatgattacgaatttaatacgactcactatagggaatttggccctcgaggccaagaattcggcacgagggagcttacaaatagtggaagcagagatttgcaggagaaggaattacaagtgttccaggtattatgaagggaagatgcagacatgagcatttaacagacctaacagtcaagaggtgggttcagggaagaagtttctgtttcatcagccacagttcattctacatacttcaccagagtcagaggctagtggatatattatccctataattagttaaataattaaataaataatgacaaaataaatgtttttaaatttaaaagactatttgaaattaaatgtccacacaacccatgaaacagctttagacaagttctttcagaacacaagaacacttgaaagagttttgtcctaaagagtccccactctccctccaatatgggtttctactttggattctcccaagcctcaattacttgaatactgacagagttcctatgttatggttttacactct

SEQ ID NO: 18569 - DNA, 341 bp, Homo sapiens
gcagaatctcagggcagcaaggaagcatagtccaaggagagacgcggttccttgctgctcttggaaccaggttctcctggtttaggttcttcctctcacaccacaagcctgggtcctcagccctggggggtatatggccatgaataagacctggattcccacccccaggagccatctgcactgactgaactgataatgatgatgatgatagctaataattcatccaagaagcatttaccgagtacctactctgtatcaggcattacttgcagtgctggggatatagcagtgaacaaaacaaagaccctgccctcatagagtttgcattctagtttggagga

SEQ ID NO: 18570 - DNA, 362 bp, Homo sapiens
  misc_feature (1)...(362): n = a,t,c or g
gagaatctacaaagttcaaatccatttttgatccaaagaaagtagaggagtatttgagacatgagtgtacccattcctttttttaatnncaggcaatgcatgggtctggctggnncnctttgccaganacttnctngtgncnctganattttcaaantaaacctgtatataatatttgntaaaatnnangntttttctnnttctcctattntgcccttttttcnnanngantnnnnctantncnanatantttnntnttttcctncactannattttntctnnatgttnttnanctatggttnntnnantatttggccnangntnntttttggnancnttttctttcannngnntgtttttt

SEQ ID NO: 18571 - DNA, 310 bp, Homo sapiens
ggtttcttccgcacccccaggcaccgcagcccattgtaccaggactttctgttgttgctggggcttctgcatcagcagcggcagtggcatcagctgtggcagcaccagccccaccacaaagtactactgagcccctgccagccatggtccagactctgcccctgggtgccaactctgtcctaactaataatcccacaataaccatcaccccaactcccaacacagctatcctgcagtccagcctagtcatgggagaacagaacttacaatggatattaaatggtgccaccagttctccacaaaaccaaga

SEQ ID NO: 18572 - DNA, 814 bp, Homo sapiens
  misc_feature (1)...(814): n = a,t,c or g
aaccgttatgactgattacgaatttaatacgactcactatagggaatttggccctcgaggccaagaattcggcacgagccaaccagtgccctgagttctgaggcagagaggaggacagaagaaacaagaggctggagattgtcaaattcagtatcccagttggctcttgattcttggtgaaaccatccctcagctcctagagggagattgttagatcatgaaactaattaccatccttttcctctgctccaggctgctactaagtttaacccaggaatcacagtccgaggaaattgactgcaatgacaaggatttatttaaagctgtggatgctgctctgaagaaatataacagtcaaaaccaaagtaacaaccagtttgtattgtaccgcataactgaagccactaagacggttggctctgacacgttttattccttcaagtacgaaatcaaggagggggattgtcctgttcaaagtggcaaaacctggcaggactgtgagtacaaggatgctgcaaaagcagccactggagaatgcacagcaaccgtggggaanaggagcagtacgaaattctccgtggctacccagacctgccagattactccagccgagggccctgtggtgacagcccagtacgactgcctcggctgtgtgcatcctatatcaacgcactagccnaaacctggagcccattctgagacacngcattcagtactttaacaacaacactcaaacattcctccctcttcacgcttaatgaagtaaaaangggcccaaanacaggtggtggctggattgaactttcgaatttac

SEQ ID NO: 18573 - DNA, 465 bp, Homo sapiens
  misc_feature (1)...(465): n = a,t,c or g
ggcttctgtgatactggccttgctgaaacgcatctcactgtcattctattgtttatattgttaaaatgagcttgtgcaccattaggtcctgctgggtgttctcagtccttgccatgaccgtatggaggagtctagcactgaatggggaaactgggggcagcaacacttatagccagttaaagccactctgccctctctcctactttggctgactcttnaagaatgccattnaacaagtatttatggagtacctactataatacagtagctaacatgtattgagcacagattttttttggtaaaactgtgaggagctaggatatatacttggtgaaacaaaccagtatgttccctggctcttgagcttcgactcgtctgtgcgctactgctgcgcactgcntttctaangcattacatcaactcctaacgggtcctctgggattagtttgcaggtatnaaatcacc

SEQ ID NO: 18574 - DNA, 355 bp, Homo sapiens
ggtgctacccagcgctggctgcctcctcagcattgcaattcctctcccatctgggcaccagtcagctaccctggtgggaatctgggtagcctcacttgttagttatactaatagctctcatttatggaactacttctgtatgcaatgcttgtgatagacactgcctccgttactgtgaaacctaataacttctgggaggtaacagccccattttatggatgaaaaactgagggtcaaaaaggtttaaacagtttggctaagattgtgtagctcttaggttgcaaagcctagatacaaccctgtgttaagtcttgacagctcactcatctttttgtagacccatctggagagatct

SEQ ID NO: 18575 - DNA, 445 bp, Homo sapiens
  misc_feature (1)...(445): n = a,t,c or g
attgaattcnataccgtttgacatgattacgaatttaatacgactcactatagggaatttggccctcgaggccaagaattcggcacgagcagatctttcagtctgctgtatgaggaaatacaagtttctttctgctttctattatgattgttgatttgcatgagcgtgttttaggttaggctgtgttatgctgtggtaatacataccaccaacatcctcatgatttaacacaataaaaaacttctgctcacaccaagtctgcttgagggctcattggctccgtggaaactgatctccatgtccaggccagtttggtcttgtggccgtccgttttagggcagtgcttagggtcaggagagcaaaacacagggctggagagttaagcacaggcaactaaatgcttcagcatgggaatggcattcattttcactcacaggatgtgttc

SEQ ID NO: 18576 - DNA, 427 bp, Homo sapiens
ctacatgtgggagcttttggtatgtgacatgcgggctgggcagctgttagagtccaacgtggggcaagcacagagagggggccacctccccaggccgtggctgcccacacaccccaattagctgaattcgcgtgtggcagagggaggaaaaggaggcaaacgtgggctgggcaatggcctcacataggaaacagggtcttcctggagatttggtgatggagatgtcaagcaggtggcctctggacgtcaccgttgccctgcatggtggccccagagcagcctctatgaacaacctcgtttccaaaccacagcccacagccggagagtccaggaagacttgcgcactcagagcagaagggtaggagtcctctagacagcctcgcagccgcgccagtcgcccatagacactgctgtgacccgggcgtgc

SEQ ID NO: 18577 - DNA, 513 bp, Homo sapiens
  misc_feature (1)...(513): n = a,t,c or g
gtgaggagaagccagcttcaccctcagcagcagtgcctcctggcacagatcacgatccccacggtctcgtggtgaagtcaatgccagacccagacaaagcatcagcttgtcctgggcaagcaactggtcaacctaaagaagactctgaggagcttggcttgcctgatgtgaatccaatgtgtcagagaccaaggctaaaacgaatgcaacagtttgaagacctcgaagatgaaattccacaatttgtgtagggatgtcaaatttcagggtttttttgttgttgttgtgttattttgtggtattgtgcttgttttgtgaaagaatgttttgacagggccccttttgtataggactgccaaatcatgggttttgccttttgttgttgtatttatcctctgtggtaatactgaatggtagaatggtttgataggggcacatttgtgcctcactggaattatctttaaantctggatttttnaangtgtgaaanaaaaangggnttccnttttttta

SEQ ID NO: 18578 - DNA, 332 bp, Homo sapiens
gaaatttcaagttatcagccaacacattgtcctatatcaaacaaaggtatatttaagcttatttcatcaattatttccaaagctttcttttgtgactaaaattgtggcttcacctagcattaagaagaatgaattaggcggggcatagtggctcacgcctgtaatcccagcactttgggaggccgaagtgggtggatcacctgaggtcaggagttcaagaccagcctggccaacatggcaaaactgcatctctactaaaaatacaaaaattagcctgtaatcccaactacttgggagtctgaggcaggagaatcgcttgaacccagggggtg

SEQ ID NO: 18579 - DNA, 227 bp, Homo sapiens
  misc_feature (1)...(227): n = a,t,c or g
gccgcaacctgatttcacccaggatggagaaggccttgagtcaattggccctgcgctctgctgcgcccagcagccccgggtctcccaggccagcactgccggctaccccaccagccaccccgcctgcagcctctcccagtgctctgaagggggtgtcccaggatctgctggagcggatccgagccaaggaggcacagaagcagctggcacagatgacgcggngcccg

SEQ ID NO: 18580 - DNA, 356 bp, Homo sapiens
gaaagaacctaacaccggtgcctggggctccttcgcagacctgcttcgtgacctctttcgaatggtgctccaagaggcagcttgtggacctggtgatggaaggggtgtggcaggagctgctggacagcgcccagattgagatctgtgtggctgactggtggggcgctcgagagaactgcggctgcgtctaccagctccgggtccgccttctggatgtgtatgaaaaggaagtggtcaagttctcagcctcacctgacccggtccttcagtggactgagaggggctgccgacaggtctcccacgtcttcaccaactttggcaagggcatccgctacgtatcttttgagcagtacggg

SEQ ID NO: 18581 - DNA, 233 bp, Homo sapiens
gattcaaacccacatggggctccaaagtctgcatctggatttgggggtgttttttggcatggcaccctcacctctctccctgcctgttttccccaaagtggaaaggaaggcctttcaaaccagagtgtctcactcccctctgacctccagaccagatggggcatgagccagccagctcagccaggctccctgtgtcctgggaggaagtgtccccatcccccatgccccttatg

SEQ ID NO: 18582 - DNA, 291 bp, Homo sapiens
taaatagccctcaactgtctgccctcttatggaactgtctactgtagaaagcatcttgcccaagggcacacccccttcctagggtcaacagaacctagtgacagatcatcactaatgtataatgacccagcccctcatctccactaggaaagactctgaaaggccactctatcttcagagcacccaaaggagacagctgaaatatttgttgaggctgtaccatagcccagcttagccctctgcccaaccttgcttactctctttcctcttccatgagtactggtcccaaag

SEQ ID NO: 18583 - DNA, 361 bp, Homo sapiens
gtggagagcagtggattgagatctcgctaccgttcttcacctaccgtctacaactcacctactgacaaagaagactacatgaccgacctacgaactttggatacttttctcagaagtgaagaggagaaacagcatagggttaagctggggagcccagattctacctctccttccagcagtcctactttctggaactatagtcgttctatgggggattatgcacaaactttaaagaagtttcagtatcagcttgcctgtaggtctcaggccccatgtgctaacaaagatgaagccgatctcagctctaaacaagccgcagaagaggtctgggcaagagtggctatgaatagacaacttcttg

SEQ ID NO: 18584 - DNA, 494 bp, Homo sapiens
accagctatgacatgattacgaatttaatacgactcactatagggaatttggccctcgaggccaagaattcggcacgagcataccgaagagaaaccatatgagtgtgggaaaccctttagtatctgttcaagcctaactacccatcagacaatccatactggtgggaaaccttacaaatgtaacgtgtggaaagttctaaagtcagagttcaaaccttgcaagccatcacagaattcatagtggagagaaaccttacaaatgaaggtggtaacttttgcagttagaattcattcctttgacaacatcagagaatttatgcctgagagattccttgataatgcaatgactggctgggtgcagtggctcatgcctgtaatcccaacactttgggagtccgaggcaggtggatcacctgaggtcaggagttcaagaccagcctgaccaacatggcgaaaccccatttctactaaaagtcaccattagctagggctgg

SEQ ID NO: 18585 - DNA, 458 bp, Homo sapiens
gggacgtaacggaggcaggttggagccgctgccgtcgccatgacccgcggtaaccagcgtgagctcgcccgccagaagaatatgaaaaagcagagcgactcggttaagggaaagcgccgagatgacgggctttctgctgccgcccgcaagcagagggactcggagatcatgcagcagaagcagaaaaaggcaaacgagaagaaggaggaacccaagtagctttgtggcttcgtgtccaaccctcttgcccttcgcctgtgtgcctggagccagtcccaccacgctcgcgtttcctcctgtagtgctcacaggtcccagcaccgatggcattccctttgccctgagtctgcagcgggtcccttttgtgcttccttcccctcaggtagcctctctccccctgggccactcccgggggtgagggggttaccccttcccagtgttttttattcctgtggggc

SEQ ID NO: 18586 - DNA, 338 bp, Homo sapiens
gaagttgatatgagggttcatatggaaaaacaaaacatgcaagaaaggccaagaaaacactaaaaaatctgaaaacctacaaggaaggactagctctagctgacattaaagtaaagcctctgtaattaaaacagtaccggctgggcatggtggctcacgcctgcaatcccagcactttgggaggctgaggatcacctgatgtcaggagttcgagaccagcctggtcaacatggagaaaccccgtctctactaaaaatacaaaaattagcccggcatgatggtggacacctgtaatcccagctactccagaggctgaggctggagagtcacttgaaccc

SEQ ID NO: 18587 - DNA, 297 bp, Homo sapiens
ggtgattcctcgagccaagaagggtgccgagggaaagccccctggccacagcagccacgtcctctgcatggccatctcctccgacggcaagtaccttgcctctggtgaccgcagcaagctcattctcatttgggaggcccagagctgccagcacttgtacaccttcacaggacaccgggatgcagtgtcgggtctggcattccgcagaggcacccaccagctctacagcacatcccacgatcgctccgtgaaggtgtggaatgtggcagaaaactcctacgtggagacgctcttcgg

SEQ ID NO: 18588 - DNA, 500 bp, Homo sapiens
  misc_feature (1)...(500): n = a,t,c or g
gcagagacctaacttaacaaatggactggctaattaagggttaactatttgcttttcttttgtattgctgtattatctttatctgggtaccataatcatccttgtaaatttctagtctgagatacattctacactagacccattataggatattagaattgtatgaaatcttcaagggcatctaattcagtcctctcattttcacttgagcaaagtgagtgctagaaagactgagtaacttaaccaaaatcattgtgggagttaaaatcagagctagaactggaactagaacctagttctgctgactactagatttttactgtcaagaatgcaaattggccaggccagacacggtggctcacacctataatcccaacactttggggttccaaggcaagaggtcacttgagcccaaaaattcnaggntaacctgggcaacangggggcacccatctctacaaaaaataaatancnaaggcaagtgnattgntcaccctgta

SEQ ID NO: 18589 - DNA, 408 bp, Homo sapiens
gcaggctggaatgtagtggtgcaataacagctcactgtagcctcgacctcctgggctcaagccatccccaacctcaccctcccgagtagctgggaccacaggcgtgtgccaccacactcagctaatttatttaaaacaattttttttagagatgaggtctccctttgttgcccagctggtctgaaattcctggtttcaagtgaccctcacacgtcagcctcctaaagaggtgaagttataagcatgaaccattgtggccagcggtgggactgatccttacaaaggtcttgagtgcttcttatctctcttggaaccacgtcatggccatgaaaacaagctcaagctagcctactgaaggatacaagaaccatagaggaaagctgagtcactttagctgaggccataata

SEQ ID NO: 18590 - DNA, 338 bp, Homo sapiens
ggaactagttgcatgatattcagttgttaatggttctaggaatttctaaggaatttattgaatttcaggatgaggtcctggattttgtcagtgtctgacaggaaaagtgtaccctacctcatttcctgagggatgatcagtggcttcatttatacagggaatgccaccatcttatctcctttctgccttatccatgacttctttctggttgttgagaattgctgagttagttcacttgcttactttatctgacattattaaagataaggctgcctggtctgtcttcacattctagttctttccttctctgctccaagtaaattctaacccttacatgg

SEQ ID NO: 18591 - DNA, 430 bp, Homo sapiens
gaggaattgcaagttatgttgtaatgcaactgatctccttcttcctgagaaagttggtttctcgccagagtgttcaattcaggcccacgcaatctgggtgtatttatagagggtccaacaaggaagagaacatgataagctttcctccccagtatggtagacaacggcaaacaatcgccaggtgaatgctatggggagccaaatgccatttaggtatgtgacagcagacatctgctagactgagaggcccgcctgcccctcaaagcagttgaatccggtccgagaagttagaaatattattctggatgatggcaagatctcagagagttttgggggccctgtctgtgtgggggacatctaggagatgagacccactctaaagctgcctaattcttaacaaccttaaaaatgttaataagaaaataagaat

SEQ ID NO: 18592 - DNA, 413 bp, Homo sapiens
  misc_feature (1)...(413): n = a,t,c or g
gaactgcaacttgtgggacagccaccaccctgaggtaccccagcgcatcttgcggatcatgtgccgtctggaggagctgggccttgccgggcgctgcctcaccctgacaccgcgccctgccacagaggctgagctgctcacctgtcacagtgctgagtacgtgggtcatctccgggccacaganaanatgaaaacccgggagctgcaccgtgagatttccgcttntactccatntnnatncgtcnnngnacctcngcgnngttcncannttgccantgnttntctctgnnnatntnannnatantncaanntgtnttnagtccnttngtnnttnntcntntnnnnttctntngtannannnnnntnngnngtntntgntnaancntgttagctaannnngnnnacncnncttc

SEQ ID NO: 18593 - DNA, 362 bp, Homo sapiens
gcacgagctcagccaacatggtccccagcagcttttggcgtcagtgatagagaaatcggagatagtggaggttgtggcaagttgaagtgtgcccaccacgtctaagggaagcttagggactcagctctggctcacccctgctgtgcagaaatgtgcgttcatttttctagagaagccagaaaaacaaagatttacgtgaaattttcccaattttaaatgttagccacaaatgcagtgtttttttaagaaaaccacacactttggccaaacaaaatgcctacgtcggccgggtgaggcttaaaggttgccggcttgcatcagagatccagaggaagtcacagcattttaacagctaaacttaa

SEQ ID NO: 18594 - DNA, 793 bp, Homo sapiens
ggcacccaaaactacccgggtgacatacccagccaaagccaagggcacattcatcgcagacagccaccagaacttcgccttgttcttccagctggtagatgtgaacactggtgctgaactcactcctcaccagacatttgtccgactccataaccagaagactggccaggaagtggtgtttgttgccgagccagacaacaagaacgtgtacaagtttgaactggatacctctgaaagaaagattgaatttgactctgcctctggcacctacactctctacttaatcattggagatgccactttgaagaacccaatcctctggaatgtggctgatgtggtcatcaagttccctgaggaagaagctccctcgactgtcttgtcccagaaccttttcactccaaaacaggaaattcagcacctgttccgcgagcctgagaagaggccccccaccgtggtgtccaatacattcactgccctgatcctctcgccgttgcttctgctcttcgctctgtggatccggattggtgccaatgtctccaacttcacttttgctcctagcacgattatatttcacctgggacatgctgctatgctgggactcatgtatgtctactggactcagctcaacatgttccagaccttgaagtacctggccatcttgggcagtgtgacgtttctggctggcaatcggatgctggccagcaggcagtcaagagaacagcacattagttccagaagaaagatggaaattctgaaaactgaatgtcaagaaaaggatcaagaacaattcaca

SEQ ID NO: 18595 - DNA, 214 bp, Homo sapiens
gcccctaggtatacatttccaaaagaattgaaaacaggtgttcaaataaaatgtgtgcatgaggctggatgcagtggtttatgcctgtaatcccagcactttggggatctgaggcgggtggatcacttgaggccaggagttcgagaccagtctgggcaacaggctaatttgtctctatgaaaaatacagaaattagccaggcatagtagtgggg

SEQ ID NO: 18596 - DNA, 485 bp, Homo sapiens
  misc_feature (1)...(485): n = a,t,c or g
gtgcctaaccaatatgttgggtaaatttgacaaaatgattaaagaattgctaggggggcattcctctgagcctcagtttcctcatctgtaaattgggttgatagcttttttcttttttaagccttgacttcgctttttgttgttgtcgttgtagagatggggtctcactatgttgcccaggctggtcttgaactcctggccttaaatgatcctcctgccttggcctcccaaagtgctgggattacaggcttgagccaccacatccggccgggttgatagttgagacttccccaggatgcccgtgaaaattaaatgagataatatatgtgaaaggcgttttgtaaactgtgaaatctccataagccttcattgtttctggctttgttgatgagcgtccccacacatacgtgaatgcggncgccctgaaagnttcccanaaatncaanatttganancanggaaccaaggggacttggtgtcctgtc

SEQ ID NO: 18597 - DNA, 305 bp, Homo sapiens
gaacaaatgaaggatatttaccctgaaaaaatgaatactgcttcctcaaatatcttgaggcaaaagagaaactagatttgtcctatgactaataataatagtaataataatagctaccatttatcaatcacctgcctgtaccaggcactacaaaggcacttgcggggcgtgtgtgtgtgggggagagagaaagaagagagacagagaaagacagattaagaaaataatgctcaggtaagttggataattttcccaaggtcacacaggaagtggctgaactaagattcacatcctagcctttctag

SEQ ID NO: 18598 - DNA, 422 bp, Homo sapiens
  misc_feature (1)...(422): n = a,t,c or g
gcttagaaaaatgttagaatagctgttacatgtatttacattaaaagcaattatcatgattaatattttctcctggggaactgtgaagaacatcttaggaaatctttttggttcatcctgttcttagtttgtacccaaaaccattaagaaatagtcatagtttaattgaattataaggtgaaaactgatgtgttgtgaggattcatttttttttttcctatcggccttttttaaaaagaggtaggagtataataacccacaacataaaaattatgtgaataagcaaatagagaagggaaagttcttcctcattatagagggcaactaataaatgtggaaagattgataaattanaagatcagcatttgacaacaccataataatcaaccagtgtgggctaaaaacaggtgaaagtttaatag

SEQ ID NO: 18599 - DNA, 269 bp, Homo sapiens
ggtgccttctgtcctaccagttttcttttacagattctcacttctgctagcctaaccagggcttactccaggaatctaaatagatgccctagtccactttatctttgttcccaaggcactcatttttattttgattttgattgaatgtgagcaggttgacctcaggtcacactttgttccaaaaacttttggaattattccaggacttgtggtggagttatggtactctagggcagtctttctcaaactatgtatggtaaaggaccagg

SEQ ID NO: 18600 - DNA, 407 bp, Homo sapiens
  misc_feature (1)...(407): n = a,t,c or g
gcaataccctgaaaattaatataaaatgactaaactatgactgggatatttcaggagttatgtgattataaagacctatcaagacacataaaggggcgagcacggtggctcatacctgtaatcccagcactttgggagggcgaggcagttggatcacctgaggtcaggtgttcgagactggcctgaccaacatggagaaaccccctctctactaaaaatgcaaaatcagccaggtgtggtgnacatgcctataatccctctagtggaggtgggcaggagaatcnttgaccccgaggcagagttnaggaccagatacccttgctganctgcacaaagcnactatnnacacacacacaanagcctanatgggaataactggtcaggaatctactaagcttaaatntact

SEQ ID NO: 18601 - DNA, 474 bp, Homo sapiens
  misc_feature (1)...(474): n = a,t,c or g
tttggannctttgaanacccntatgacatgattacgaatttaatacgactcactatagggaatttggccctcgaggccaagaattcggcacgaggatcaaggaaggactcaccgtaatcacttgcttaaaaagaacacttaagcaaggactgaaagggagtgaagatgtgagacaaataggtatctggaggaggagcgttccagccaaggaaatgcccagtgctttggactcatggcagaaatgtacttgagtattctaggaccaactgggaagcccatggaagccagagtggaggtcggggagggagcaggaggacacagagccaaagcctttctgaaccaagagggacaggaattgggtgaccgttaataacttgtaattttctgcctccaggattcagagtttggttgganaaatgtcttcttgctttcagctgctgtnaacatatnggccctggttttctacctattttg

SEQ ID NO: 18602 - DNA, 453 bp, Homo sapiens
  misc_feature (1)...(453): n = a,t,c or g
gatcttctggtggtctttcccctctcccatccactttgctggatgcaccccctcttcaagccactctcccctaggcctaaaaaggatccctgctgcattagtgcatcttcagtgccggtgctcagtttggtttctgaggaattaatacagaacaggctcagctctagggaggcctctgggaaagaggctggaaagaggaatggagaataactggttcttactggtgacttacaactcttagctatttacttatttatttagagactgggttatgaggctggctaatttttgtatttttggtagagacggggttttgtcatgttgcccacgctggttttgaactcctgggctcaggtgatccacctgcctcagcctcccaaagtgctgggattacaggcatgagccaccacgcctggctcacaactctttaaatatgngaaatgaaagacaaaa

SEQ ID NO: 18603 - DNA, 798 bp, Homo sapiens
gaggaccagaaatcaggttatcaatactctggctgaccatcgtcatcgtgggactgactttggtggaagtccttggttacttatcattactgtgtttctgagaagttataaatttgccatctccctctgcacaacttacctttgtgtgtctttcctgaagactatcttcccgtctcaaaatggacatgatggatccacggatgtacagcagagagccaggaggtccaaccgccgtagacaggaaggaattaaaattgtcctggaagacatctttactttatggagacaggtggaaaccaaggttcgagctaaaatccgtaagatgaaggtgacaacaaaagtcaaccgcatgacaagatcaatggaaagaggaagaccgccaaggaacatctgaggaaactaggcatgaaagaacgtgagcacggagaaaaggagaggcaggtgtcagaggcagaggaaaatgggaaattggatgtgaacgaagtacacacctacatggaaatgtttcaacgtgcgcaagcgttgcggcggcgggcagaggactactacagatgcaaaatcaccccttctgcaagaaagcctctttgcaaccgggtcagaatggcggcagcggagcatcgtcattcttcaggattgccctactggccctacctcacagctgaaactttaaaaaacaggatgggccaccagccacctcctccaactcaacaacattctataactgataactccctgagcctcaagacacctcccgagtgtctgctcactccccttccaccctcagcggatgataatctc

SEQ ID NO: 18604 - DNA, 370 bp, Homo sapiens
ggtaattccattttgtgaatgtcccgcaatttagttccctgccctcctggtgatgggcgtccgggtagacgccagctcagcgtcattacaaaaatgttactgtaggtattcaagaacctgtcttttggtgaagagatgtaggcatttccctcagggctgtccaggggtggacttgctggggcatccaggtgtgcctgggttcagtgttcatggatttttcacagtgtttgtatttgtgctctaccagcagaggccaagttcccattactccacctcatcaccagtgcttgtcctctttttcaaatagccattctggtggccgtgtagaggtatctcattctggttttgtttgttgtttattttggagact

SEQ ID NO: 18605 - DNA, 451 bp, Homo sapiens
gaatggctagaaggtgctaaactatacaaaccatagaagaaaatagtgagacgcagagaaactatctgaggaagatttctgcaatcgtaggtcggagaacctcagccacaggaacaagggggacgatggggatttggacaaacactggggagagactggaaggagccaacaagcctggggatcaagtcctaggttcagaagacaatggcatggaggacgaccaagggcatggttttttaattgaaggccgaacttcattaatatttaagactgagggaaatcccccccgagccaaagaagaaaaaaatgtcttcagtatctcatccccattgtctttaccatgtcttcactgaacaagcagcttctgggcacctacaaaagccagacattaagtctgtcccaattctgggccatggaaaacaagactgtctggatcaagagattcagatgc

SEQ ID NO: 18606 - DNA, 343 bp, Homo sapiens
gtgccatttccggcttggttggaatagggtaggagccttttggcagggagcacattctcagtaatgcagagtgcactcacctgggttctagcttcaacacttaggatttgcttgatattttgtattctctgaggcactgcctgtatttgtttctgctatcacagtccagagtcaagcttcatttataaagactgggcagggcatggtggctcactcctgtaattccagcactttgggaggctgaggtgggtggatcactttaggtcaggagttcaagaccagcctggccaacatggtgaaaccccatctctactaaaaaatacaaaaaggccgggcacggtgg

SEQ ID NO: 18607 - DNA, 234 bp, Homo sapiens
gcaaatatatcctggaaattacttcctcttcctcttagttccttaagagcatcacccctcccccaacactttttgaatttttttttagagacagggtctcactttgttgccctggctggagtgcagtggtgtgatcatagctcactgcaacctcaaactcccgggctcagttctcccacctcagcctcccaagtagctaggaccacgggtacctggctaatttttttttttttt

SEQ ID NO: 18608 - DNA, 336 bp, Homo sapiens
gtaaatatggctcttagaaaattaacatgatcctttcttttgttttagtaatactttatgctttcatgttttatatttcactaactctgcacaataatcctgtgaagtaggtaggacaggagtggagtcaagactctttcaggttaaagtgactaaaaaataaaataaaaacaacccaaagtagtttaagctcaaagaaggtaatattttagctcaggtacttgaaaaatgaagggatggatctttcgtcgacgcggccgcgaattccagatctatgaatcgtagatactgaaaaaccccgcaagttcacttcaactgtgcatcgtgcaccatctc

SEQ ID NO: 18609 - DNA, 498 bp, Homo sapiens
gaggggccacctccatttgctggagacaagcatagatgggattctggctgatgtgaagaacttggagaacattagggacaacctgcccccaggctgctacaatacccaggctcttgagcaacagtgaagctgccataaatatttctcaactgaggttcttgggatacagatctcagggctcgggagccatgtcatgtgagtgggtgggatggggacatttgaacatgtttaatgggtatgctcaggtcaactgacctgaccccattcctgatcccatggccaggtggttgtcttattgcaccatactccttgcttcctgatgctgggcaatgaggcagatagcactgggtgtgagaatgatcaaggatctggaccccaaagaatagactggatggaaagacaaactgcacaggcagatgtttgcctcataatagtcgtaagtggagtcctggaatttggacaagtgctgttgggatatagtcaacttattctttgagt

SEQ ID NO: 18610 - DNA, 766 bp, Homo sapiens
gcagaagagaaccttctctatcaccaaaactaacttgccttcagaatttaaaatggtccacagcagtcgaattttgtaaaaagaaatcatgccctaatccgggagaaatacgaaatggtcagattgatgtaccaggtggcatattatttggtgcaaccatctccttctcatgtaacacagggtacaaattatttggctcgacttctagtttttgtcttatttcaggcagctctgtccagtggagtgacccgttgccagagtgcagagaaatttattgtccagcaccaccacaaattgacaatggaataattcaaggggaacgtgaccattatggatatagacagtctgtaacgtatgcatgtaataaaggattcaccatgattggagagcactctatttattgtactgtgaataatgatgaaggagagtggagtggcccaccacctgaatgcagaggaaaatctctaacttccaaggtcccaccaacagttcagaaacctaccacagtaaatgttccaactacagaagtctcaccaacttctcagaaaaccaccacaaaaaccaccacaccaaatgctcaagcaacacggagtacacctgtttccaggacaaccaagcattttcatgaaacaaccccaaatcctcaatggactgaacgatgctcacccacactgtgagggctggtcttctttattcaatccactgacttaagtgctgatctcttctggaaacaccttcacagacacacccagaaataatgttctac

SEQ ID NO: 18611 - DNA, 395 bp, Homo sapiens
ggcacgactgcccagcccagaactgaacacttatctcaaattaatcttccaaccacacaccaaggaaagaaaatggattactgccacgtagagatttaatttgggtatttcacgaattctgaactacgatttgaaatgtaaccactgtccaaccagaaacagtaaaaacaaagtgcttccctatgaaaagtattcacaggacattttattaaatgccaaagcattccaggtaagacacactgcccgttttataggaagttgttgagattctgctcctaagaatacagtagtcctttctctctccactgctagtgccctgataagctcagccaaccaaggccattcgcttttccatttgcaagcaaacacaccaaactaccctcacacccacgcac

SEQ ID NO: 18612 - DNA, 335 bp, Homo sapiens
  misc_feature (1)...(335): n = a,t,c or g
ggatgtgtgtgaggatgactttgacaatgatgctgtggtcgaccccctggatgtgtgtcctgaaagtgcagaggtaacgcttacggattttcgggcctatcagaccgtcgtcctggatcctgagggtgatgctcagattgacccaaactgggttgtgctcaaccagggcatggaaatcgttcagaccatgaacagtgaccctggcttgcagttggatacacggccttcaatggtgtggactttgaaggcaccttccatgtgaacacagtgactgatgatgactacgcaggctttctcttcagttatcaagacagtggccgcttctacgtantcat

SEQ ID NO: 18613 - DNA, 529 bp, Homo sapiens
  misc_feature (1)...(529): n = a,t,c or g
gggctgaggatcctgcctgcatccccatcttctgggtcagcaagtgggtggactattcggacaagtacggccttgggtatcagctctgtgataacagcgtgggggtgctcttcaatgactcaacacgcctcatcctctacaatgatggtgacagcctgcagtacatagagcgtgacggcactgagtcctaccacaccgtgagttcccatcccaactccttgatgaagaagatcaccctccttaaatatttccgcaattacatgagcgagcacttgctgaaggcaggtgccaacatcacgccgcgcgaaggtgatgagctcgcccggctgccctacctacggacctggttccgcacccgcagcgccatcatcctgcacctcagcaacggcagcgtgcagatcaacttcttccaggatcacaccaagctcatcttgtgcccactgatggcagccgtgacctacatcgacnanaagcgggacttccgcacataccgcctgagtctcctggaggagtacggntgctgcaagga

SEQ ID NO: 18614 - DNA, 293 bp, Homo sapiens
cccagatctctgagaccagttaaaagcaataatacaatttgaaaataaattttattcaccacaaaccaccgtagttttaaaggaagttactgcaagaagactatccagcagtcatatcagaggtcactaacaaagtagaagcactcatgatgaggtggccaataaaccaacacagagctgtaactttgcatccctagcttccacatcccagcacctgtcctaaagcaggaaagtggcttctgacttaaatggcacctgcctagtacacagacacactgcacgcacctttaaag

SEQ ID NO: 18615 - DNA, 528 bp, Homo sapiens
  misc_feature (1)...(528): n = a,t,c or g
ctcctttgatttnnataccgttatgacatgattacgaatttaatacgactcactatagggaatttggccctcgaggccaagaattcggcacgagggaaaacaactcgacccttctttatgaaagctctgtcaggccccggccttgttcgtatggtcacagtctgtgctgaatccctcaaaacacatctggacaggttggaggaggtgaccaatgaatcgggctatgtggacgtgttgacccttctgcgtcgtgtcatgctggacacctctaacacgctcttcttgaggatccctttggacgaaagtgctatcgtggttaaaatccaaggttattttgatgcatggcaagctctcctcatcaaaccagacatcttctttaagatttcttggctatacaaaaagtatgagaagtctgtcaaggatttgaaagatgccatagangctctgatagcanaaaaaagatgcaggatttccacagaagagaaactgnaagaatggatggactttgccactgagttgattttaaca

SEQ ID NO: 18616 - DNA, 709 bp, Homo sapiens
  misc_feature (1)...(709): n = a,t,c or g
ttttcttcttaaatctctggggtgtaagtcttaaaagatctgggcaaaaaagactctaaattagtttttggatttgtgttcaagtaagagagcctgcctggaaataggatatgcattcataattaaaaaataccaagactatgttacagaattagccacatttaagaactatagacctgaggtcaacattttgtataaatgccaactgggtttctcggcattttgctcacaattcaaaatacagctagtaacctcagaaatgtattttaagaccatgctaattcatcctttaaagacatttcatggaaaaagaaaagtccacattagctcttaggattgcatttgaaatcatgattgaaaaacaaaatctaattctactgaaggggaaaagattttgtttttcaatcatgatttcaaatgcaatcctaagagctaatgtggacttttctttttccatgaaatgtctttaaaggatgaattagcatgggcttacaatacatttctgaggttactagctgtattctcaattnngaacantcngccnncanacccantngncgtttatncnnaacgttggctcttngnctgtantntttangngtgtntanttcntntcananaatcngnattctntcntccgttncgctccgnttcttnccntgttcctcctntantnctttnngatatnttnngnntnnntnancgttat

SEQ ID NO: 18617 - DNA, 311 bp, Homo sapiens
attgacttgtatacttcattctgacaaacgcacagcgttcgcgactcaaaggaaaactggaggccgcctacccaaaatgcctgcgtgatttctgattgtggcagccaagaaggccatctcttacctgaccctgtggagaacaaagcccccacataatgatgaggtcctgaatgtttctcttaaatatcagacaattccagttaaaattttcatttgacaaacaaagaaagagatgcgcatttttgtttctgaattctactacttcccctttctccattacgctgtgtcctttctcctaacactgggtttgg

SEQ ID NO: 18618 - DNA, 777 bp, Homo sapiens
gcctaagaagctggtgcagacatactcagtgtttcccaaccaggacgagatgagcgatgtggtggtccagccttacaattcactcctcacactcaagaggctgacgcagaatgcagactgtgtggtggtgctggacaacacagccctgaaccggattgccacagaccgcctgcacatccagaacccatccttctcccagatcaaccagctggtgtctaccatcatgtcagccagcaccaccaccctgcgctaccctggctacatgaacaatgacctcatcggcctcatcgcctcgctcattcccaccccacggctccacttcctcatgaccggctacacccctctcactacggaccagtcagtggccagcgtgaggaagaccacggtcctggatgtcatgaggcggctgctgcagcccaagaacgtgatggtgtccacaggccgagaccgccagaccaaccactgctacatcgccatcctcaacatcatccagggagaggtggaccccacccaggtccacaagagcctgcagaggatccgggaacggaagttggccaacttcatcccgtggggccccgccagcatccaggtggccctgtcgaggaagtctccctacctgccctcagcccaccgggtcagcgggctcatgatggccaaccacaccagcatctcctcgctctttgaaagttcctgccagcagtttgacaagctgcggaagcgggatgccttcctcgagcagttccgtaaggaggacatgttcaaggacaactttgatga

SEQ ID NO: 18619 - DNA, 341 bp, Homo sapiens
gaggactccttatctaggacatagtaggcattcagtgtacattaattgaatgattggatgaatgaaaaagttaatttttatcatgagtaactttagcctgttaaaataatttagaattctgattcagtctcaaaaagcttcgtgtatgccttttttccttctgaattgggattgagttgtcagaattataattgccctttttgtccttattcttgagtaccatttaattctattatgggatttttacatacagagagagagagagaggggaaataaatagaatacacaatttattgttctaaggattttataatcttagtacaaaagatttttcagaagtc

SEQ ID NO: 18620 - DNA, 340 bp, Homo sapiens
gcttatagccatttaaaaatacccaacactgactatatcctgcacttgaagaagtgatagatatataactcactggattttaaagccctaaattctccatagttccatactgaccagcatccatagttccccagatttcatggagaggcaggggcaacccaggggagcagagggtggcatccctgcctggtgccctggttttgcagcccacctctgccacttgctgggtgaccttgagcaatcacttagcctctgtttcctacttagaaaatggggatgactgtgtttcttgcctcatggaaatgatgtgagattaaaggacatgatgcatttagatgcc

SEQ ID NO: 18621 - DNA, 338 bp, Homo sapiens
ggcgtgtgggagtatcggccacttcttttaaaaatgcgagatggtagctgttggagcacacacgtgaactgtggcggtcactcaacgggacactgcacagcactgagagtgactcattccaaccacaacacagccgcacctcgaagcacggggccctgatctgggttacagcacgtgtcctggtggctaagctgggcccctgggcagaagattccaaatgggggccaggccatgactggggatgccggtgacatctccagccccagatgctggtttcacagaagtggtcactgccacagttgcaactgcacacacagggctggacccttgtctgtgtc

SEQ ID NO: 18622 - DNA, 445 bp, Homo sapiens
  misc_feature (1)...(445): n = a,t,c or g
tnnnnntnnnnttttgaantccatcanctatgacatgattacgaatttaatacgactcactatagggaatttggccctcgaggccaagaattcggcacgagctcaagggcacctttgccacactgagtgagctgcactgtgacaagctgcacgtggatcctgagaacttcaggctcctgggcaacgtgctggtctgtgtgctggcccatcactttggcaaagaattcaccccaccagtgcaggctgcctatcagaaagtggtggctggtgtggctaatgccctggcccacaagtatcactaagctcgccttcttgctgtccaatttctattaaaggttcctttgttccctaagtccaactactaaactgggggatattatgaagggccttgagcatctggattctgctaataaaaaacatttattttcattgcaaaaaaaaaaaa

SEQ ID NO: 18623 - DNA, 406 bp, Homo sapiens
aattcggcacgagctccactccagccacaatgaccacttccagttcctcatctatactgggcaccctcctaccctagggcctgttgcttctgcctgaaaccctcctctcctccgccccatttaagttaacccctccttcttcagatctgaaggcaatcatcacttcctcagagaagcctttttaagctatctattagtagtggctatttcttttgtaggactaatcacagttataactttactgttctatgtgacattaattgatcaatatcagcctccctcattagactggaagttctgcaggagaaatcatgtctactttttgcttccctcacatcctcagctcacagaaaaatacttatagtttaaaaggaacttggtatttactaaatgagcaaacagtaat

SEQ ID NO: 18624 - DNA, 521 bp, Homo sapiens
  misc_feature (1)...(521): n = a,t,c or g
tttgacccctttgacaccacagntatgacatgattacgaatttaatacgactcactatagggaatttggccctcgaggccaagaattcggcacgagcatgagcctataatcccagctactcgggaagctgaggcaggagaatcacttgaacccgggaggcagaggttttggtgagctgagatcgcaccattgcactctagcctgggcaacaagggtgaaactccatctcaaaaaaaaaaaagaaagaaaaaaacctaannnnnnnnnnnnttcantacnctancancnttaaaaaaattattaaatatttcaaacncancaggcgattanagagtancanccanccntgtnctactacccantncangtntttngttaaaatacacttgacactggttgnaaggcaggggaaacaagggctntcaaacactgttagtaaaataataanttaggaaatatctggatggaattngaatncattnattaagncataaaatatgcngatttctttttttttcctt

SEQ ID NO: 18625 - DNA, 410 bp, Homo sapiens
attaaggctctggcaacactgtggagctggcctgtgtccccgagaagaagagtcagtcacaggggggtctccatctgatccagcagtttgaagcttctcattgttgtccttatccagggcaggaaacttgagaccctggtgaagacttctggaggaacccctgacgactttccataggagacgatgccgtgggccacattgttacacagcagggggcctccggaatcccccttgaaggcagccttccgttcccgccggtcccccacacaaatctgccttcgggggtcgtaggaaccgaagatgcggaggcactgcctatccctctgcactctcagctgcacctctcggagtgtatctgttcccctcctcatgctgaccctgccccagccggccacagtgcacagcgtccc

SEQ ID NO: 18626 - DNA, 315 bp, Homo sapiens
ttcccctcaaatacacagccatttcaaagacttttagaggaagatgtaatctcaatagaatcagtgtcacccacgttacggcactgcagtaaactttttatttatctttacaaagtagccacagattcttttgacaggtatggctctgctctgtcctctgaattaaagggtgtatactaagcatgacttcaacattaagacttgaattatgagttaatccaaaagaatataaaacagatgactcttctcctatttgtttgaggtgtatcactttatttttgaatattactcttgctctggtattgtttttttttt

SEQ ID NO: 18627 - DNA, 337 bp, Homo sapiens
aaaatggctttagtttcagaacatcatcatcaactaaaacccagaataaaattaggtgaaatgtattggagtagtaagctttaatatgtttcttgaaacctagaaattagcctccaagaatttatgtaagtacctaaaatggtatgaaaagtaaactatgttgtgtttggcatgaaaagtaaactatgttgatattaaattggactagtagaagaaacatatatgcttgtctatttcttgaaacattgtctttaagtgacatttgttattacagctatatgcacatatacatagtgtttaattcgtttttatactgctattttaatttaaatatttt

SEQ ID NO: 18628 - DNA, 475 bp, Homo sapiens
  misc_feature (1)...(475): n = a,t,c or g
gagaatctagaaatttaacaacataaaccagaaacaacgactattagattttacactaaaaattcgaaatcaatgagtaggaattcaaaggctctggaaggaagaagtgagcaacccaaaaggaagatggagcgataagaggaaagagcctttcaggaccctaaatacctgggtggtttttttaaggaactgttcattcttacagttatgctgccaaaccatgatatgcatgaaatgtcattgaaagtcaaggttgaaatgaagtcattttagagtttcaaagacaggtatgacagtcaccaaacagcacacaatatgacctcctggcatcattgaggaatcattcagaggaaaacgacttctgggaagaagaccaatggtaaagatgtatttcaagcaaaaattggctgtatggcaaaaacccttggaaagtctgaaaggaaggatgagtnccaaagaaaaagcttacttaact

SEQ ID NO: 18629 - DNA, 330 bp, Homo sapiens
ctgcttctccccacccactgggtgagtgtccccaccccatgtgccaggcgggacttgggcaatgctttcatgttgtcacacatgtcttgcactttgtattagccttcactagaagacaagggttggagttggtggcagaaggatgcaataaaaaggaaaagaagatgtgggttctaattctgacactgctgttaacacaagtttcaaggtcttattatatgccagcaactgtgcatatagacttgacataatctcatttaactgtttataaaactccactgaaatcccagatacacaacacacgaattagagagatttagtaacttgccc

SEQ ID NO: 18630 - DNA, 324 bp, Homo sapiens
caattctttgatcaaaggtaggagtttctgtaatctgttctcttaaccacatttgggatgcttgtatatatgactacatatatttatatattttttatgggcaatattttgactgtttctcttttgaaagacagtgcgaatgagtatgccaaaaatcacagatgatatgagaaatgctatcaataaaagcattttttcagaaaggtgaataaagtaaccccaagataacgtaaaatttttcctaatgttattttgcaaagtcattagaaaacctaatgcttgtgaccaatggggtgatgctcgtgggacagtacgtggctgacg

SEQ ID NO: 18631 - DNA, 394 bp, Homo sapiens
tcactatagggaatttggccctcgaggccaagaattcggcacgagaaagaagcaagtaaagagaagaaatactttgtctagaattgcctatttctttctggtgtggtctgaatgtgttcccccaagttcatatgttaaaacttaatcaccaatgtgatagtattaagacgacaggcctaagtcctgagagcagagccttcctggatggaattagggtccttacaaaagagcttgagggagtgttttttcttttctgttcttctgccatgaggatacagcattcacccccctttttgcccttctgtccctcccgccatgtcaggacacagtgcttaaggtacctccttggaagcagagaccaggccgtttccagccaccaaacctgctggcacct

SEQ ID NO: 18632 - DNA, 417 bp, Homo sapiens
ggaaaatataatggaattaaaggattaatgcattacaggaaggcttggaatcccacccccacccccaagacctgacatttagcttcaggggcaatttggggatttctggacaaatccagcagtcacaggggcctataagacagtctgtgtaaaggcgctgaaggcctgcttctcgcagctatgtgtttcttggctggtcatctgaggaagatgaatgataagggaggcccaggcccccacacagagtgagctgcttgagggcagtgacagggaacgtgtctgtaagagtgccgaggggtatggttaaagggaattttgaggcacttcggatttgtgtgacatgtcaaaagctgacaggctgtgctggaagcagcagttagagatggagttgccaaatcgcattcagtgaggaccagg

SEQ ID NO: 18633 - DNA, 402 bp, Homo sapiens
  misc_feature (1)...(402): n = a,t,c or g
taaattaccaataaagaaagtttatttggacatttttacatttaatttgatttttaaaataatatcagatgcatctaaatggcttccgggaaagactgaggtaaatttttgaaagtgacaattatataggcatctgacttgatggtacttaagaataaaaatttaaatctctagcaaactttaaaaattgtccaaatagtaagtttaatttgaaagaagtctgaagctattagagaaaatcatgtactagataggtatatatttttttctagtcagctattacgtacaccacataatatatataccctatatactatatggtttatataacatttataatggccctttcagacccatatacttacaaatgacattgnataactacctacatatgtattaatg

SEQ ID NO: 18634 - DNA, 335 bp, Homo sapiens
gctctgcccagctggtcccagagcacagactgcttcaaaactgacttggtactagaagctgcctcacggtgttttcagcatctcaggaccactaggtggtttgagggtttccaggccctgatggaaaagtgaatgtgacatcagtgaatgcgactgtgggtggctgggagcactagtcaggatgtgcgtccatcggggctggtacttgcgggcgttgggcaaggatgaatgggagtgcctcgtccttgcccatcaacaggcaaatctcaagtcagaatcttcctccccattttggacatgaggcccttttggcaaaagcatatcacagggttaat

SEQ ID NO: 18635 - DNA, 506 bp, Homo sapiens
  misc_feature (1)...(506): n = a,t,c or g
gttgagattgttgaaatgttctggaattacatagtggtgatggttgcacaacactgtgaatatactaaaaaaaatcaccgaattatgcactttaaagtgtgtattttaaaagataaattttgggccgggcactgtggttcatgcctgtaatcccagcactttganaggccaaggtgggcagatcacttgaggtcgggagttggagaccagcctgaccaacatggngaaaccgcatctctacttaaaatacaaaattanctgggtatggtggcgcatgcctgtaatcccagctactcgggaanctgaggcaggagaatcgcttgaacccaggaggtaaaggttgctgtgagccgaaattgtgccattgaactccagcctgggcaacacgagcaaaactccgtctcaaaaaagtaaaaatanataaatgtttgttatgagggaaaaaaatatggctgtaggnnctaaaaccctgggancctacccaccaattcntttatttttggttc

SEQ ID NO: 18636 - DNA, 435 bp, Homo sapiens
  misc_feature (1)...(435): n = a,t,c or g
tttgaaaccttntgacngattacgaatttaatacgactcactatagggaatttggccctcgaggccaagaattcggcacgagcaggtctcacctgtgtcaagaagcgcgcgctgagcccccagcaggtcacccgtctgcccaacggctatgggctggcctaccgcctgacccctggggtgcacgagctgccggtgcagcagccggagcaccgcatcctgaaggtgtccatgaaagagctcaacaagaaaacccctctcctcaccgagggccaggccatctgcttcaccatcctgggcgtgctcaccagcctggtggtgctgggcactgtgggtatcgtcttcctcaacaagtgcgagacctgggtgtccaacctgcgctacaaccacatgctgcggaagaagaagaacctgctgcttcagtacaacagcggggag

SEQ ID NO: 18637 - DNA, 356 bp, Homo sapiens
ggtttttctccgatttatagggttctctgttgtgtatgatggaaaaaaccgtatcccagttagattttttcattttgcctttttttcttaatgagttccatcccctatcctgagatcacaaaccattctgtcttttcttctgtttgttttaaagttgtatttttcacctgtagaacattagtatacctggggagacctaactttttgtcatctataaacttctcaattgtcccaacacctttattgagtggccggttccttctctataattttccagtaggcaggatttctggagacagagggcatgaacacaggatgtagggacccttacctgtccaacagtctggctgacccct

SEQ ID NO: 18638 - DNA, 346 bp, Homo sapiens
gttattttagcttgtgtttgttactatcttctgtcatgttaagggcatcttcgttgctagagtaatttcttctaaaatatggaaggtcaacacttttccctttagacttgtggatagtgatggataaaaataactctcttactctatagtaaacttgctcaagtgcaaaagttatatttagcttcagcaataggagtctataaaactgtgagagaaaagccttactaactgaagtcatccttcaaacctttctaccaggggttccaatagcaattgctaagaatacggcagcttaaaaaaattttttttcaattgacagatattaagaatgcctgatatttactgg

SEQ ID NO: 18639 - DNA, 412 bp, Homo sapiens
  misc_feature (1)...(412): n = a,t,c or g
gcggtccccgcgtgcactttagggccggtcaggccctaaagtattcactgagcacttaggaagaccgggcattgggctggtgtcatgaagaatactggaatataggaggtagggtctggagccctgacaagcacacagttcttttgcaggagtcaagatgtgctcataggagccaagggcaaactcgaaaacagccctgccctgtggttaggggaggtgggtgtggctttaggagttgagaggngaatcagntgactgcnngntggtgnanccannatgcntaagggtggatggnganancacnatagacttnnntacattgnccatangcngtttggaatgcngntngtgacgnantgtcntggngctcaggcttancngncnaaggcnnnggncnnngcnangacaagtt

SEQ ID NO: 18640 - DNA, 410 bp, Homo sapiens
aatttaatacgactcactatagggaatttggccctcgaggcctagaattcggcacgagcggcacgagcgaaatttatattaggtgttccatatgttacataggtaatagtttatttacacagaaagaaggaaaggcagggtctgctgtttctaatcacagagaaccaaatcaagagaatacatgcaatgaatcttaaatgaaggatggggttgtgtatatgtgagcacagtgggaaagagagatcatatcgtaggttacaagctggtgccatagtaatgtgttttgccccacacagatactgtttaaaaacttgagacaacattttggaaatcggaggtttcatataaaaatccaaatttccagcttcctttgaaaacttggaagagtcactcgcactgggcccacctcc

SEQ ID NO: 18641 - DNA, 497 bp, Homo sapiens
  misc_feature (1)...(497): n = a,t,c or g
attggannccaaagctatgacatgattacgaatttaatacgactcactatagggaatttggccctcgaggccaagaattcggcacgagaactggatttcttatttggtcctcagttctctcacctgtaaagtgggactaagcccaaccctcttagctgtgaagaccaaacccagagcacagggcacgttcgctgtgacagttcatcccccttccatgtaacaatgtctgtgcttttccacgctgctgcctgggctgcatctgtgcatgtcaacagctgccccatctctggggacgtgtagggccaacgctctgtgcccacgccactgttctaaatgccatcacagtgaacagggctgcacgctcagctgctgcttcttccagatcacctgccaggaatcatttcttagggatgggatgaaagtgtcaaagagtgtgcacagggcatgcaaggccactacccgccaagctgtggcggcctnacctgaacgtgcngccg

SEQ ID NO: 18642 - DNA, 480 bp, Homo sapiens
  misc_feature (1)...(480): n = a,t,c or g
gctcnannatngnnnntgnnnnnnnngattnnnnnangnactgnnagnnannnnnannanannnagtnnnanngnngngatnnnttnccctttganttccanctcctacatgattacgaatttaatacgactcactatagggaatttggccctcgaggccaagaattcggcacgagcaaggctgcagttagctatgatcatgccactgcactgcagcctgggcaacagagcaagaccttgttttttaaaaaaagacctagagagagaaagctatgatataaactagaaaagacagtagactagtcatagagagggtgccatagaagttgcaggagcaaggttgctttcagttggggaaaactaggagcagcttcattggacaagcacatagtatgtgccaggcctgagctactgccaagactacaaagatgaataagacagagtcctggnttgggnacggggggcttnatgnccggaaac

SEQ ID NO: 18643 - DNA, 349 bp, Homo sapiens
gattaaaatccagaaattagtatgggtgagttactggcatctactcttttgctgtttgtcccaataatgccttttatagcaaaaggatccagttcagaattatgtattgtgcttagttgtcatgtctctttagtctgggatagttcctcagtcttttctagatttcatgacttgatactgcttttgaaaattaaagggcagttatttggtagaaagtctttccattgggttttctggtatgtttcctcatgattagattcaacagatgtacctttggcaggaatatcatggtctccccaaccttaacatcagcttttgtaccactgctcccgctggaatggaatgataa

SEQ ID NO: 18644 - DNA, 455 bp, Homo sapiens
  misc_feature (1)...(455): n = a,t,c or g
gnnnnnggnngnnnngtnnnnnnnntttgntnnccnattntagccgctatgacatgattacgaatttaatacgactcactatagggaatttggccctcgaggccaagaattcggcacgaggccaacagctgcacccccaacccatgcgagaacgacggcgtctgcactgacatcgggggcgacttccgctgccggtgcccagccggcttcatcgacaagacctgcagccgcccggtgaccaactgcgccagcagcccgtgccagaacgggggcacctgcctgcagcacacccaggtgagctacgagtgtctgtgcaagcccgagttcacaggtctcacctgtgtcaagaagcgcgcgctgagcccccagcaggtcacccgtctgcccaacggctatgggctggcctaccgcctgacccctggggtgcacgagctgccggtgcagcagccggagca

SEQ ID NO: 18645 - DNA, 389 bp, Homo sapiens
ggcattgatatcattaaatggatggagcgctaccttagggataagaccgtgatgataatcgtagcaatcagccccaaatacaaacaggacgtggaaggcgctgagtcgcagctggacgaggatgagcatggcttacatactaagtacattcatcgaatgatgcagattgagttcataaaacaaggaagcatgaatttcagattcatccctgtgctcttcccaaatgctaagaaggagcatgtgcccacctggcttcagaacactcatgtctacagctggcccaagaataaaaaaaacatcctgctgcggctgctgagagaggaagagtatgtggctcctccacgggggcctctgcccacccttcaggtggttcccttgtgacaccgttc

SEQ ID NO: 18646 - DNA, 463 bp, Homo sapiens
  misc_feature (1)...(463): n = a,t,c or g
gagagataaaattagggggaggagcccagggccacataccaagctttgggacatggtgcctcatgctctctgggattgcagagcatccaggtctgtcttcgcccctgttagtgcacatatatccactcacatgtcttccctcaggctatcgggcagggggacttcaccagggggtttatggataggcttcaagagggtctgtgagcccccagaaattgtgtgtgagactgagtatgtgttcttttttccaggaaaggctccagtggttcttacttgatccaaaaaatgtcaagaattaatctaggaggccgggcctggtggctcacacctgtaatcccagctctttgggaggccgaggcgggtggatcactcaaggtcaggcatttgagaccagcctggccaacatagtgaaaccccgtctctattaaaaatacnaaaattagctgggtgtggtggtatgtgc

SEQ ID NO: 18647 - DNA, 500 bp, Homo sapiens
  misc_feature (1)...(500): n = a,t,c or g
cagcttgacatgattacgaatttaatacgactcactataggnaatttggccctcgaggccaagaattcggcacgagccagcaattgaggagacagccagaagcaagcttttggagctgaaggaacctgagacagaagctagtcccccctctgaattttactgatgaagaaactgaggccacagagctaaagtgacttttcccaaggtcgcccagcgaggacgtgggacttctcagacgtcaggagagtgatgtgagggagctgtgtgaccatagaaagtgacgtgttaaaaaccatgcgctgccctctttgaaagccagggagcatcattcatttagcctgctgagaagaagaaaccaagtgtccgggattcagacctctctgcggccccaagtgttcgtggtgcttccagaggcagggctatgctcacattcatggcctctgacagcgaggaagaagtgtgtgatgagcggacgtccntantgtcnccgaaaccccccc

SEQ ID NO: 18648 - DNA, 227 bp, Homo sapiens
gcggcacgagctggactgtacaaccgcaggctggggatcatgtactttcattggagtagctgctggtagcaaaggattgactgtttttccagaggagctaataatcggccgtactataaatggaacattctttggtggttggaaaagtgtagattctatcccaaagctggtcactgactataagaataagaaattcaatctggatgcactggtgacccataccctgc

SEQ ID NO: 18649 - DNA, 336 bp, Homo sapiens
gcaaggttgagaaagttacaatataaaggtcaagacacaaaggcacaattatggggctatactcctatcccagtgatccaacctcacagagtaactgcagagttgcaagtcttctggtacatagttgccattagatgaggataagtataataaaagatacatagaaataagccaaatctaaggtttaaccatttcaaaactttagcgtataagaagtatagggtgaagtacaatagatggaaatggcataaaattttttaatcattaagttcataaacgttgcaaactaataaatggagattatgtcctgtttttaaaataacaaaccataatcat

SEQ ID NO: 18650 - DNA, 331 bp, Homo sapiens
gctctctggaaaggtccctggaacttttaggcaggagggtgactgcaaaggagccagattttggttttatgaggatagagtaatcaacctttttaaggtggccataggcccctctgtgcatctgagggcctgcagcctctatgtgagctctgttttcctgttccacatcttcacactgatgccttggatgatcagtaatccccctttccccagccactactctcacgatgcttcctgagtaccacccctttcatcttccacaaacaccttctcccaaattcaagatggctaaagttaggaaaggctcctgcaaagtccctctgcttctctt

SEQ ID NO: 18651 - DNA, 519 bp, Homo sapiens
  misc_feature (1)...(519): n = a,t,c or g
gaancccnttaaaatttgaaatccctaacagctatgacatgattacgaatttaatacgactcactatagggaatttggccctcgaggccaagaattcggcacgaggtctaagaagggggctcttccctgtccacaaaatgtgggtttatttgttggtctccctggttggtttgtttgtttctgatgtagggcacgtgaagcactcagacagtgcctccctgaccagctgaaagacacaaccttcgcccaggtgctaaaagatgacaccaccacgaaacgctggcttgcacaactggtgaagaacctgcaagagggccaggtcaccgatccccggggtatccccctgccccctcagtgatccttccctgttccctcccactactcccccaagttggggaaaggagggggaacctacgagaaaaacagctcaggttttatcaccgactgggaatagacaacctcaatgctgaaccgcactggagaaaaggggcaaggtacccctgctgaggtgtatggctg

SEQ ID NO: 18652 - DNA, 374 bp, Homo sapiens
gtgtcactttcagggctcttggaagccaggggcattttaggattaaagagaaacaaggaaacccgtttgacaaaggtgtttttcaagattgaagagaaagaaatagaacatgctctgaaagataaagctttaattggaaatatcttagctactggattgccttaaattcttctcttacaccccacccgaaagtattcagctggcatttagagagctacagtcttcattttagtgctttacacattcgggcctgaaaacaaatatgaccttttttacttgaagccaatgaattttaatctatagattctttaatattagcacagaataatatctttgggtcttactatttttacccataaaagtgaccaggtaga

SEQ ID NO: 18653 - DNA, 1047 bp, Homo sapiens
agtgcatttgcaccgacggctgggacggggagctctgtgatagatatgttcgggcctgctcctcggccccctgtgccaacaacgggacctgcgtgagcctggacgatggcctctatgaatgctcctgtgcccccgggtactcgggaaaggactgccagaaaaaggacgggccctgtgtgatcaacggctccccctgccagcacggaggcacctgcgtggatgatgagggccgggcctcccatgcctcctgcctgtgcccccctggcttctcaggcaatttctgcgagatcgtggccaacagctgcacccccaacccatgcgagaacgacggcgtctgcactgacatcgggggcgacttccgctgccggtgcccagccggcttcatcgacaagacctgcagccgcccggtgaccaactgcgccagcagcccgtgccagaacgggggcacctgcctgcagcacacccaggtgagctacgagtgtctgtgcaagcccgagttcacaggtctcacctgtgtcaagaagcgcgcgctgagcccccagcaggtcacccgtctgcccaacggctatgggctggcctaccgcctgacccctggggtgcacgagctgccggtgcagcagccggagcaccgcatcctgaaggtgtccatgaaagagctcaacaagaaaacccctctcctcaccgagggccaggccatctgcttcaccatcctgggcgtgctcaccagcctggtggtgctgggcactgtgggtatcgtcttcctcaacaagtgcgagacctgggtgtccaacctgcgctacaaccacatgctgcggaagaagaagaacctgctgcttcagtacaacagcggggaggacctggccgtcaacatcatcttccccgagaagatcgacatgaccaccttcagcaaggaggccggcgacgaggagatctaagcagcgttcccacagccccctctagattcttggagttcctcagagcttactatacgcggtctgtcctaatctttgtggtgttcgctatctcttgtgtcaaatctggtgaacg

SEQ ID NO: 18654 - DNA, 319 bp, Homo sapiens
  misc_feature (1)...(319): n = a,t,c or g
ctaattacacaaagaaccaggaagatctcaaacagaaaaaaaaaagatgccaaaccaagatgacagaatgttagatatatctgacaaagatttcaaagcagccatgataaaaatgcttcaacaagcaatcacaaaccagcctaaaaccaatggagaaacagagcctcagctaaggaatgggagatttaaagaagaaccaaatggaagttttagacatgaaaaatacaaaaccaaaatgaaaagtgcacagactgggcttaatagctgagtcgagggaacaaaggaaagaaacagtgaaatgaaggatgaagcancagat

SEQ ID NO: 18655 - DNA, 431 bp, Homo sapiens
  misc_feature (1)...(431): n = a,t,c or g
ggcccagggtgaaggagattaaagagatctggcttctgccctgtgtagccaacagtctagaaggggcaactgttaatactttaagaatccacatgaatctaagctacttccttggagaaaagattcttgagctgagatctcaaggaacagtaggaattgcaggggtaaagaggccaaggaagagcatcccagacaacgagagcagcatgtgcaaaggccctgtgatgtgtgtgtggggagcctgataggtctgagaaactctacaaaggccatggtggctggaatgcagagatgtggaagcataagaatgagaagtagagctggaggtgttcacagagactggccaggcagatccttgcaggccaggcctgtgtgacattttctggagaaaagaccagcactttcattaagtaacccctggaacctntttt

SEQ ID NO: 18656 - DNA, 337 bp, Homo sapiens
gattgctttgttggtgtggagattgctttgttggtgtggagattgctttgttggtgtggagcactgtcacagtgctccttttttggagatggtgagtctgttggttcatgacatttgggtcctgtgaatatgccagggatccaccgcgcccagccccttccatcttttttcagaagctccctccaatatctgtggcaatactccaaatcaaatccattatttttagaattcagaaagaataatttgaagatttgtagatggatgactgaatatgtagacaaggttaggcaagcctgatgaaatacctgtgcaaaagaattcagtgtaaagtatttta

SEQ ID NO: 18657 - DNA, 439 bp, Homo sapiens
  misc_feature (1)...(439): n = a,t,c or g
tttgnnatttganaccgctatgactgattacgaatttaatacgactcactatagggaatttggccctcgaggccaagaattcggcacgaggagttgaactggctggaccatggtcggacactgagggagcagggtgtagaggagcacgagacgctgctgctgcggaggaantggtctttnnanctactttttcagtgattctagttantttttnagttgacngacatatgaagcaatttaattttgcacagactttgtatacctattacatatgaannctnattnttaaanaacantctgnantntanacnnnccaaaaatntatcaactctnaacttactgatntntttnctttcttacctgactctaccgnagaagaagttnttagctgtcgtactttagagggactgtttnactagatgagcacgttaccctttgg

SEQ ID NO: 18658 - DNA, 359 bp, Homo sapiens
ggaccactctgctcccccgcctaagccatgcacctctgtgggagcaatgggctgctgacccagacagaccccaaggagcaacaaaggcagctgaagaagcagaagaaccgggcagccgcccagcgaagccggcagaagcacacagacaaggcagacgccctgcaccagcagcacgagtctctggaaaaagacaacctcgccctgcggaaggagatccagtccctgcaggccgagctggcgtggtggagccggaccctgcacgtgcatgagcgcctgtgccccatggattgtgcctcctgctcagctccagggctcctgggctgctgggaccaggctgaggggctcctgggccctgccca

SEQ ID NO: 18659 - DNA, 607 bp, Homo sapiens
  misc_feature (1)...(607): n = a,t,c or g
cccgaactttaccacgatacgtaccatgaaccaacatgatctatcacagggaacccggtttctgaggttaagaacctggtatgaggctaaattacactaccttatcttcggttttccttaaactctacgctcctataccctaaaattaactacgttcctttaatagccctttaaacctcctatctaccctagtaccaatctaaaagcttatagcttaaagctccatttgagacaaggtaagctctccttatccacgagttcaaaaaataaaaagtaagccagccatccttcagacataacggaggcataggtaccggacaaacacatttaccttaaacgggagaaacgggctaaaatgaaggggttaaaggccttacgaaagcttgaaacttagtagggtagttaaactccaaagtcttcccgatcttacgctctatacttaggctacgtcgacgtaagaggcgggcctttacgggctccgggtagtctcgttttcgcggtcccgtagggcatatttctttcttcggtcgtcactacgggtcggtaccgagcgctcgcgatccccctaggtntacggcgtaancgcnanggttcattacnccggggg

SEQ ID NO: 18660 - DNA, 355 bp, Homo sapiens
gcggcacgagaaaacattagccaagtgttttggtgcatgcctgtagtcccagctactgaggatgctgagtcaggagggttgcttgaactcaggagttcaagattgcagtgagccatgatcatgcgactgcactccagcctgggggacagagtgagaccttgtcgcaaaaaataaataaaaagaaaatgtctagtgtttaaagaaactgacaagatatacaaagaaacaagaatgtgtcctatacagttgaaaggaaacagaatagaatccatctacaaggaagcctagatgttggacttactagacaaagatttgacattggctattttaaatgtgttcaaagaactacaggaag

SEQ ID NO: 18661 - DNA, 383 bp, Homo sapiens
ggagagcaggtctcttcaggcaacctgggagatctagggcctactggggagggagggagccaagtctaggcaaatggagaaagtgacatttcagcaaacttgttagcacttccatggagctgtgatcagttgtccttaggagtcgaggaggagaggaagccatcacgttcacctgacctagttttctgggagaagtttctctggcagaccttgtttttagataggctcatgtctctttctccctgaacaaaggttctggctctgttaaccaagtttgggttctatgttaacctccagatgatcctgagatcaattttcataaacagggataaagaggaagaggacttggagggactggtacagcaagacctacgtttcctgtc

SEQ ID NO: 18662 - DNA, 454 bp, Homo sapiens
  misc_feature (1)...(454): n = a,t,c or g
gacagccagatagtggaatatcctccatccgttcttttaagaccatccttcctgctgctgcccaggatgtttattaccgggatgagattggcaatgtttctaccagccacctccttattttggatgactctgtagagatggaaatccggcctcgcttccctctctttggcgggtggaagacccattacatcgttggctacaacctcccaagctatgagtacctctataatttgggtgaccagtatgcactgaagatgaggtttgtggaccatgtgtttgatgaacaagtgatagattctctgactgtgaagatcatcctgcctgaaggagccaagaacattgaaattgatagtccctatgaaatcagccgtgccccagatgagctgcactacacctatctggatacatttggccgcctgtgattgntgcctacaagaaaaatctggtagaacag

SEQ ID NO: 18663 - DNA, 294 bp, Homo sapiens
tgaactatgatctaattattgaataaaaatagaatgtatcaggccgggtgtggtggctcacctgaggtcgggagttcgagacaagcctgaccaacatggaaaaaacctatctctactaaaaatacaaaattagcagggcgtggtggcacatccctgtaatcccagctactcggtgggctgaggcaggagaaccgcttgaacccaggaggcggacgttctggtgaaccgagatcgtgccactgcactccagcctgggcaacaagagcgaaaccccgtctccaaaaaaaaaaaaaa

SEQ ID NO: 18664 - DNA, 868 bp, Homo sapiens
  misc_feature (1)...(868): n = a,t,c or g
ggcggaaccgcagccatgactgaggctgatgtgaatccaaaggcctatccccttgccgatgcccacctcaccaagaagctactggacctcgttcagcagtcatgtaactataagcagcttcggaaaggagccaatgaggccaccaaaaccctcaacaggggcatctctgagttcatcgtgatggctgcagacgccgagccactggagatcattctgcacctgccgctgctgtgtgaagacaagaatgtgccctacgtgtttgtgcgctccaagcaggccctggggagagcctgtggggtctccaggcctgtcatcgcctgttctgtcaccatcaaagaaggctcgcagctgaaacagcagatccaatccattcagcagtccattgaaaggctcttagtctaaacctgtggcctctgccacgtgctccctgccagcttcccccctgaggttgtgtatcatattatctgtgttagcatgtagtattttcaggctactctctattgttataaaatgtantactaaatctggtttctggatttttgtgttgtttttgttctgttttacaagggtttgctatcccccttcctttcctccctccctctgccatccttcatccttttatcctccctttttggaacaagtgttcagagcagacagaagcagggtggtggcaccgttgaaaggcagaaagagccaggaaaagctgatggagccaggacagagatctggttccagctttcagccactagcttcctgttgtgtgcggggtgtggtggaattaaacagcattcattgtgtgtccctgtgcctggcacacagaatcattcatacgtgttcaagtgatcaaggggtttcatttgctcttggg

SEQ ID NO: 18665 - DNA, 333 bp, Homo sapiens
gctttctcatgctgttctcgtgatagtgaagaagcctcatgagattgatcattttataaaggggagtttccctgcacaacctctctcctcttgtctgctgccacgtaagacatgactttcaccttctgccatgattgtcaggcctccccagccatgtggaactatgagtccattaaacctctatcttttgtcaattccccagtctcaggtatgtctttatcagcagcatgaaaacagactaatacagcccagttagcttctactaattaagattcaacttaggcatctcttcaacagaaaattttcctttaatgctacctatgcctctcacct

SEQ ID NO: 18666 - DNA, 298 bp, Homo sapiens
ttaacaggggaaagagtagtaggagatagttctgctggagagcctgtgtccatactttgattcaactgttggtcacttgtttctccatcttcactgatatatccaggaggtggcgtttctggaatataattactctgtggctcaattcctgctgggaagttagtgttttctggaatggagtgagtatagtcatccagaggcggaagttctgttaggatctcggtgtgtcggggcactaatactggaggcaaaactggtgtctcaactctctgatagtggtaagggtttacacatactc

SEQ ID NO: 18667 - DNA, 397 bp, Homo sapiens
gtagtgagacagctcttctacaaggggaaaaaattctccattttgtgatgtgtcagataataaccagcttcccagctagctttcctttgagagatttacccaccgcgcccagcctaacctaaattttttgtgcatgatactagaaaatttgccagtcacttgtgttttgtttcttcatttactcctcagaacagctgaatgaggctgttcttatcttcctcttaaacacatgaaatatgagaaacctgctcaggttcagacaggagaccaagggtccagaatattagttattttagcctttttactcagttgaaagagagagaaaaagaaagagagaattctccattgagggaactgtgccctgtggtgtggtggctggagtgtcctggtgagtgaa

SEQ ID NO: 18668 - DNA, 298 bp, Homo sapiens
atcagcgagttcacactggagagaagccctatgactgtggtgactgtgggaaggccttcagccggaggtcaaccctcattcagcatcagaaagttcacagcggagagactcgtaagtgcagaaaacatggtccagcctttgttcatggctccagcctcacagcagatggacagattcccactggagagaagcacggcagagcctttaaccatggtgcaaatctcattctgcgctggacagttcacactggtgagaaatcctttggatgtaatgaatatggaaaagctttcagtcccac

SEQ ID NO: 18669 - DNA, 392 bp, Homo sapiens
gtttgagaagcgctacgctgcggccatgcagtggctgtggagggatgccggcatccgggcctgctatgagcgtcggcgggaattccacctgctcgattcagccgtgtactacctgtcccacctggagcgcatcaccgaggagggctacgtccccacagctcaggacgtgctccgcagccgcatgcccaccactggcatcaacgagtactgcttctccgtgcagaaaaccaacctgcggatcgtggacgtcgggggccagaagtcagagcgtaagaaatggatccattgtttcgagaacgtgatcgccctcatctacctggcctcactgagtgaatacgaccagtgcctggaggagaacaaccaggagaaccgcatgaaggagagcctcgcat

SEQ ID NO: 18670 - DNA, 436 bp, Homo sapiens
ggaatatgacaaaaatgatgttgtgctcttcttagtgtgaaatatcaggagacacagaaagttgaattgcctggtggtagttaactttgatccagtgtggtgctgacaaatgtttaacaactcaactggctctggagggggagatattgccctgttctgtggcatttgccattgccccattctgtgttgtaaatattcccaccatgcccaatttctaaatagagtctgtcatcacggaacacaaggttgggaaatgtccctttcctgggttggtaggaatgggctctagcacaccactgctttcatcatgtggattaacgtggtgtctgcctggttctccactgtggttacttttttttctcccttttaattaagcggccgcaagcttattccctttaatgagggttaattttaacttggcactggccgtcgttta

SEQ ID NO: 18671 - DNA, 364 bp, Homo sapiens
  misc_feature (1)...(364): n = a,t,c or g
gagctctataaatggaacaacaaagcctcgctggcagcacatctgtttgcggcatggtttactgtatattttaagcccactgttgagacctactgcttgggaaaaaaaaaattcctttcaaaatactactgctgattgacaatacaccatgttacccaagagctctgctggagatgtgcgaagagattagcattgttttcgcgcctgctaccacgacatccagccgaagcccatggatcaaggcgtcattgtgactttcaaatctaactatttaagaaatacatttcaggctgggggaggggagaaaaaagaaaaacnagannggangaaacnnatcattncataaggcnatactgccanacat

SEQ ID NO: 18672 - DNA, 377 bp, Homo sapiens
ggagacgtggaaacaacatttaattcttaatctcaggcattgtccggttttgaaaaaggccttgacaattatttttctctcccaatgctatatattttgcgagagctctggagacaagttttgagctactaacaaaggaatggaaatgaatgagtttagttgcatgccagtgaacaagttatcttctgaaagtgtcactactggtggttactcatagtaaatgtggacccgggaagtgagagctcctgctgcttcttggggtcttctaaaggctgctgttactctgcagagcagacccacccttgtttatcttctccctattttctagtcagccttctcttagagctcatgggttccacaatacattacccttaagg

SEQ ID NO: 18673 - DNA, 337 bp, Homo sapiens
gcatacgtgtgactgaagctcccaaacacccaatctctgaagaactggaaactcccataaaagacagccacctgatccctacgcctcaagcccccagtattgcctttccactcgccaacccccctgtggctccgcaccctagagaaaagattataacgatagaggagactcatgaagaattaaaaaaacagtacatatttcagttatcatctctgaatcctcaagaacgtattgactattgtcatctgattgagaaactaggtggattggtgatagaaaagcagtgctttgatcccacctgtacacacattgttgtgggacatccacttcgaaacga

SEQ ID NO: 18674 - DNA, 510 bp, Homo sapiens
  misc_feature (1)...(510): n = a,t,c or g
ttttnactactnantcccntttngntatgccatgattacgaatttaatacgactcactatagggaatttggccctcgaggccaagaattcggcacgagtgtaaattatttaataacttggcatagtccactgtgtgatgactgagcccacaggccctacacgcagacagacatgcacattcagtgcacggttgtctctcagccaatggcacttttcactgtaaatgttactgtcttaaagcaaacactagataactacctaactacctaggtaaggagacaggcaggatgtttagcttttactctgcctcacagtgtgtgcttcaaagaaactttgccataaggtcataagtttttgattgttttggttatatcaactgttctcatagatagctcttactaattagaattcgtggaaggaaccattttacattttagttggcagttggattttttcatcactcctcaatgggaaaatatggcaaaattagaatatttgtaagtacaagtg

SEQ ID NO: 18675 - DNA, 419 bp, Homo sapiens
gcaactgcactccagcctgggggagacagagtgagactccatctcaaaaaataaaaataaaataatgtattgctttttaatcccctatcctaaaaaccatctttcaaaccatatgatccaaccaaactgttttaatggatagtgtttaaaaatatatacttcagggccttccttgccaatctttgattattgacatttttggcttactgctgcatagagacttccatgataccctagccagactcttaccttttcagtatgttacttgtacgtttgaacgtttaaattattctgacttgtgtaatgctcagtttacctgtttcccctgacaagattgtaggtttgagaatagtgacctccggccaagcacagtggctcatgcccgtaatcccagcactttgggagaccaaggaaggagg

SEQ ID NO: 18676 - DNA, 354 bp, Homo sapiens
ggggaagtatatctcttcttaccacttttcttccacattatactggaggttctaatctgtatgatgaagtaaaaaaaaaagaaataaaaggcatccagattggcaaggaagaagtaactttttatttgcagatgacattgattatctacggatagattctacaaaaaagctactagaagtaatatgtgagttgaacaaggtaggatagaagatcaatatgtagacatgaattgtatttttgtatattggcaatgaacatttggaacttgaaataaaaattaatgccatgtataaaaacatcgagcactatgaagtacttagagataaatctaaaaaaagatgtttaagacttgt

SEQ ID NO: 18677 - DNA, 654 bp, Homo sapiens
ctatgactttggatacgaatttaatacgactcactatagggaatttggccctcgaggccaagaattcggcacgagaattgtattaaatagcattggggaatagctaaacctttttaaaaaaatttattggattttcctccctgcttaaaagatttcaccagaaaaccttcatataaaaattcaggccctttttggacaatttttaaaatttgtatctttactagaacatgagaatctttttcccttggaagcttgaattataaatgtggtgtttggcctgcctcagcagcaccagttgactgctcgtgtgccagcggtgtggggaggacggggcaggacgctgcagctctctccagccctgttggcatcctcagtgcctgcaggcctctcgctgcctgttgggctgtctggggggtggccatttagggatcgtggggacggggtccaccccaagaagaaagaaaggcccgtccacaggcccggctctgggccacgtgccccggaagcaggtgtgtccagagtcagctgagggctctccccacaccacccagcaggcgctggtgctccttctgcctcatggggaccagtccagcttccagccgctctggctcgagggtggtctgaccacttccttctgaatgggcttctctggga

SEQ ID NO: 18678 - DNA, 360 bp, Homo sapiens
gtctccttaacactaactttatgcttggaccaaatcaggtttcccgtcagtattatattctacagtatatctttcatagtaatactgagttcaactttaaaagcttgttaattgagatcatactcttactaggattatactaaaggttctacttgagtttgtgaacatacatgacaaaaacacacatattaaaattatttgtttccgagttttatactatctaatgacacaactgtgtaagcatggaattttactgtttaaaattgtaaagtatcctgttaaactttacttttaaatttttcttaggacttcttaagttgcagtaactgtctatcataaattgaccttaacaaccatctc

SEQ ID NO: 18679 - DNA, 352 bp, Homo sapiens
ggagagggtaaaactcttcgaaagagtcttgtggttagtcagcttctgtgagagtgagagtgggctgccctgaggccatctgttccctctccccagctgatatttttgtgctctcagggtaaacatttaagcctgtgagttaaactcagccttggactagctgagttcctctggaggccttgcaagtagcagtttggttggcagggcaattaagtatgctaggtgcactgtgctgaaccccaggagggagggaaggaatggaatctagtctttgcttgcgttatacatgcttattggtttgtggcaggcgtgattgatgccagaatcaaaatgacttaaagcagcttccctt

SEQ ID NO: 18680 - DNA, 314 bp, Homo sapiens
cttaattttgacacacagtaaggggtaaagatggaaaataacttttccccaaagagtaatcacatacaccaagactgtttttgactaatccagaaaaggaagttaatgaatgtactctttgggtcatgcatcccatgcaattttaggataaaacagcaaaataggaaaaacatgtttcttgctcttatgatgcttcctggtgtagtggaacagaaatgacaatgtagcaattccatgtgagatggtcctttgaaagagctaggtacagtgacagctatggactcttacctctaagctgtggtggaagatgtttg

SEQ ID NO: 18681 - DNA, 314 bp, Homo sapiens
ggtggaaatcagttccctatgaggagggtgcaaagttatactgattggtgagtcactcccagaataaacaaataatggtttcacacctcattgcttcattcagtgtggaaggaacattctaggtttgtgtgtaagtttggggagaaggagacagagccagagggcagagcagccctgcagccctcagttggcctccattttcttcccggtctgaagaaaatgaaacagaggatttaaagtgttgcttgaagaatttaagttagacttaaaggagagatgctggtctttactctcctttcggcaaggagagttta

SEQ ID NO: 18682 - DNA, 353 bp, Homo sapiens
gattataaagtaataatataactgtaaaataaattatacagttatatataactgtaaagtaaaattgtaatattataatataacttgtgcagttatattataaagtagtcaattaattgactactttagaatctcagggtgtttcagtaataattttttcagtcctttccatttccttcacctgtctccatgccagcttcatgtcaagcaaggcattattgtgtaaggtgtaattattgggtaaagtatttctgctacaggttgagtattcaaaatctgaaacgctctaaattcatgaacttgttgagcaccaacatgatgctaaaaggaaatgcttattgaagcatttcaga

SEQ ID NO: 18683 - DNA, 377 bp, Homo sapiens
ggaaaatacaaaaacagctgatttgttttagtaagaaaccacgtcttgatgcttcagagttggtttagggtgttagctgctatgaacctgttgcccctttcgatcgtgtatttatgtaggtttatcagtgaaatgaaaggcttgtttccgtctagtctaactttttgagtgtgtttctatccagccacatagcccatatctactctaaatggcttgcttaagcaataattattttaaaggatgtgaatcactgattcacacagactattgcacgttggggcattaggggcaataattcttatccagtcatgggagccagtgaatttaatttcagagattaaaaattcactttagatcctctagtttgatctcttaat

SEQ ID NO: 18684 - DNA, 442 bp, Homo sapiens
  misc_feature (1)...(442): n = a,t,c or g
nctnttgannttcgttatgncatgattacgaatttaatacgactcactatagggaatttggccctcgaggccaagaattcggcacgaggacaatgagatttaagccccctcctccaaactcagacattggatggagagtagaatttcgacccatggaggtgcaattaacagactttgagaactctgcctatgtggtgtttgtggtactgctcaccagagtgatcctttcctacaaattggattttctcattccactgtcaaaggttgatgagaacatgaaggtagcacagaaaagagatgctgtcttgcagggaatgttttatttcaggaaagatatttgcaaaggtggcaatgcagtggtggatggttgtggcaaggcccagaacagcacggagctcgctgcagaggagtacaccctcatgagcatagacaccatcatcaa

SEQ ID NO: 18685 - DNA, 345 bp, Homo sapiens
attatgatgttacattttttataatccacaattatgtttagggaatcacacaaacatagatcactgatttgaatgaaatgcataaatttgtagcaaagctttgtagttacaaaaaacaaaaaaaattaccaaagaatgcacaaaattaatgtttattccacctttgtgtcatattcctggatccttcaccaatgttacatgaggaaaaaaacaaaagcaaaacaaatgaaaaactgaaatcagaatcactaatattatcaaatagggaaacaaataaattaaaatctagcagccatcagcaagagtacagcaaagacaatgctgtaaaaagaaacaaagaaaatt

SEQ ID NO: 18686 - DNA, 466 bp, Homo sapiens
  misc_feature (1)...(466): n = a,t,c or g
ctgaancctntnagccatgacatgattacgaatttaatacgactcactatagggaatttggccctcgaggccaagaattcggcacgagcacagagacagaagcagcagggcgggggtggggaccatagctaaaaagtaccaagcttcccccttgaggtggaagttctaaaattgacttgggatggctgcacaactgtgaatatacccaaaaccatagaactgtacccttcaatttttatttactttttttgttttttgttttttgttttctttttgagatggagtttcactcttgttgcccaggctggagtgcaatggcatgagctcggctcactgcaacctctgcctcccgggtttaagtgattctcctgcctcagcctcccgagtagctgggattacaggcatgcgccaccacgcctggctaattttgtatttttagtagagacatggtttcgccatgttggtc

SEQ ID NO: 18687 - DNA, 439 bp, Homo sapiens
gggacaattcaagaataattgttagccgggcgtggtggctgactcctgtaatcccagcaattcaggaggctgaggcgggtggattgcttgagctcagaagttcgagaccagactgggcaacatagcaagtccccgtctcatttaaaaaaaaattattgaagattataatatactgctttcaataatgaaggggacaactaggccaatcaataaggagatagaagccttaaatgacactgttgaccaactagagctaacagatctctgtagaacactcaccccaacaatagcagagtattcattcttttcaagtgcacccaaagtattaatccaaccataagggcaggaaactagaaatcagtaccagaagtaaaactgaaaattcactactacagggaaattaaacaacatactcctaaataaaaagcgaaagaaaaaa

SEQ ID NO: 18688 - DNA, 425 bp, Homo sapiens
atgattacgaatttaatacgactcactatagggaatttggccctcgaggccaagaattcggcacgaggggcagttccaaaggtccttctaatttccttaggagccccatggcccgtggccaccactagcgtgactacacgatgactgcctcccagcttccacaccgggctcccagtgcatgtcaccgagcttgcctggccatgactcatgcaggaaaggctgcacaggtgacgccaggtgtggacatggcagaaggaacggaagatgaggttaggctctgtgtcctcgggaaggcaaaggaacgtcttggcttccttgcaatcaccttctgaagggctgtgggctgcagcaggggcactgggcattccaagctgggggagaatgcagccttcacagacttgccacaggcacctaggccccagggg

SEQ ID NO: 18689 - DNA, 323 bp, Homo sapiens
gtttttttttcttcttcccagcgccacttagcccctgaagtgtttcgggaaatctttggaatgtccatacaggagtttgacaggttacctctttggagacgcaacgacatgaagaaaaaagcaaaactcttctaagtcccactcgtgaatggcaattagagaaaggactgacagtggcggtgccccataggatgtcatattgaggcccaaacttgattggagaatttgcaaactaccgtcgctcagcaacaccaaaaagagaaagtctggttaaaacaccatgagtcaaatgtcgggccagccaacagtaacacttgccaaga

SEQ ID NO: 18690 - DNA, 505 bp, Homo sapiens
  misc_feature (1)...(505): n = a,t,c or g
aacagctatgacatgattacgaatttaatacgactcactatagggaatttggccctcgaggccaagaattcggcacgagcaccacgtcctgccccccgccatttatcgccctgattggattttgtttttcatctgtccctgttgcttgggttgagttgagggtggagcctcctggggggcactggccactgagcccccttggagaagtcagaggggagtggagaaggccactgtccggcctggcttctggggacagtggctggtccccagaagtcctgagggcggaggggggggttgggcagggtctcctcnggtgtcaggagggtgctcggaggccacaggagggggctcctggctggcctgaggctggccggaggggaaggggctagcaggtgtgtaaacagagggtccatcangctggngcanggtggccgcttcgacacttgaggaaccctncctntccttggngaaanttgccgccntnnnancctgcttgntncngagg

SEQ ID NO: 18691 - DNA, 545 bp, Homo sapiens
  misc_feature (1)...(545): n = a,t,c or g
ttnnnttnnnaaatctgaatccctttgctatgacatgattacgaatttaatacgactcactatagggaatttggccctcgaggccaagaattcggcacgagcatggaggtgcaattaacagactttgagaactctgcctatgtggtgtttgtggtactgctcaccagagtgatcctttcctacaaattggattttctcattccactgtcaaaggttgatgagaacatgaaggtagcacagaaaagagatgctgtcttgcagggaatgttttatttcaggaaagatatttgcaaaggtggcaatgcagtggtggatggttgtggcaaggcccagaacagcacggagctcgctgcagaggagtacaccctcatgagcatagacaccatcatcaatgggaaggaaggtgtgtttcctggactgatcccaattctgaactcttaccttgaaaacatggaagtggatgtggacaccagatgtagtattctgaactacctaaagctaattaagaagagacatctggagaactaatgacagttgccagatgg

SEQ ID NO: 18692 - DNA, 434 bp, Homo sapiens
ttatgacatgattacgaatttaatacgactcactatagggaatttggccctcgaggccaagaattcggcacgaggaagtctgttgggtaccgcagtgtcctaagcctggaaaggctccctgacccccagaggacccatgtgatgtgggcaaccagcaaggacttccgggatgtctgggctccgctttggcacgctgtacacagaaaaccaggatgtggccactgccgtggcttccctctgccgctaccacggcctcagtggcttggtccagtaccagatggcacagctgctccgggaccgtgactggatcaaccaggtgtacctgccggaaaaccatgcccggctcaaggctgcccacacctatgtctcagaagagcttagggcattggggatccccttcttgagtcgtggggctggcttcttcatctgggttg

SEQ ID NO: 18693 - DNA, 351 bp, Homo sapiens
gcccactgcaaactccgcctccggggttcaagcgattctcctgtctcagcctcccgagtatctgggattacaggagcccgccaccacgcctggctaattttctttgtatttttagtagagacagggtttcactatgttggtcaagctggtctcgaactcctgaccttgtgctccgcccaccttagcctcccaaagtgctgggattacaggcttgagccaccgagcccagccctgatgatgttttaaaagctgcagtagtaaacagtttcttttttaaaaattaggtattcacaacagaaagccccagaatttggtaaattttagcttgagttttgttatgtatggtgggaa

SEQ ID NO: 18694 - DNA, 681 bp, Homo sapiens
  misc_feature (1)...(681): n = a,t,c or g
gctttaatctcagcactttgggaggccgaggcgggcggatcacctgcggtcaggagtttgagaccggcctggccgacacggtgaaaccctgtctctactaaaaatacgaaaattggctgggtgcagtggcgtgcacctgtggtcccggctcctcgggaggctgaggcaggagaatcacttgaacccgggaggcggaggttgcagggagctgagatcgtgccactgcactccagcctgggggacagagcaagactctgtctcaaaacaaacaaacaaaaaataataatacgataatgctatttgacgtgttttttggtttataatgattttaaatgcagttaactttcagtacactgaatatttccccagaaaattggaaacttcatatacttggctacgaacatactacagagtaatactatcaggaatacaggtgtataagaatacatttatagatattgttgaaaactttgaactgtttgataaaaattgtgatttagtattttttcttttgtctttttttgaaacggagtctcactctgtcgcccaggctggagtccagtggcgcgatctcggctcactgcaagctccgcctcccgggttcacgccattctcctgcctcagcctcccgagtagctgggactacaggcgcctgncaccaggcccggctaaatttttttt

SEQ ID NO: 18695 - DNA, 336 bp, Homo sapiens
ggcagctggaacctctgagtcaggtgccctagggccaaagactaggcccctcttcagagcccaccttgctgggtgatctctaggacccaggagcagagtggtggacaggaccatgccctcctcagaactggagctgccacaggggcagttgatgaggcagaggtttgaggatcccccctctgctaccagccccagtatcaccttccccatgctcttgtggctgtggactaagggagaaggattaaggggtatggctgaattcccccggcaccccttgccctcaggcttccttcttcctttccctttggttaatcctgcatgggattagctgaccat

SEQ ID NO: 18696 - DNA, 309 bp, Homo sapiens
gaaagatcttgaaacagggattgcttcaaggtctgaagcagttgcaaaatattttgagcaatacagatcatctctggtcttgtgactgttgtagaaaagcttttcgtgcagatctctacttggacaggaaaattgaaccctataaatcaagtcagtgaagtcgacgcggccgcgaattccagatctatgaatcgtagatactgaaaaaccccgcaagttcacttcaactgtgcatcgtgcaccatctcaatttctttcatttatacatcgttttgccttcttttatgtaactatactcctctaagtttc

SEQ ID NO: 18697 - DNA, 344 bp, Homo sapiens
ggtactgtagccagttcgtcaataatgcatttttctttctgtagaatgtctagttggatgagtcagttttacttccactatattttactttcctaaatgctgatccaagtaactctgggcattcacataattcatttgcaatttggttacacttcaaaataaggctataattcatttcatcagttatgacactgtcttgcttgtagtcaggatggtttgcgataaactccctcatccatctggcaactgtcattagttctccagatgctctcttcttaattagctttaggtagttcagaatactacatctggtgtccacatccacttccatgttttcaaggtaa

SEQ ID NO: 18698 - DNA, 341 bp, Homo sapiens
gagcaggggagggttttattcacatcacattatggatgtggcatctgaggctagcctacctgccaaagttacttagccagttggtgctaagacgtggtcactacccacaaacacccctggggcttttcaacaaaaagccatgggttcaggctggctggcttcagctgtcctcctgggagaaaatgctactgaggtaagttgaggtgggcaagcctggggtggggcttgcagtcggggatgggggaataatggaggttcccacatccttccaggcaggtgcccacagccgcacccggaggcagtacagcaggcctgtggaagagggtgtggctaaggctgaa

SEQ ID NO: 18699 - DNA, 429 bp, Homo sapiens
cggacgcgtggggatggcggtagcgatcgctgcagcgagggtctggaggctaaaccgtggtttgagccaggctgccctcctgctgctgcggcagcctggggctcggggactggctagatctcacccccacaggcagcagcagcagttttcatctctggatgacaagccccagttcccaggggcctcggcggagtttatagataagttggaattcatccagcccaacgtcatctctggaatccccatctaccgcgtcatggaccggcaaggccagatcatcaaccccagcgaggacccccacctgccgaaggagaaggtgctgaagctctacaagagcatgacactgcttaacaccatggaccgcatcctctatgagtctcagcggcagggccggatctccttctacatgaccaactatggtgaggaggg

SEQ ID NO: 18700 - DNA, 199 bp, Homo sapiens
ggaaattctattactctcatagaagtatggtcttattctagcaggttttaccttctgttccacttagcctgtctttactagttctatattgtagtatgtggagaaaaacaacttaggattatagttttttcctcctatttttattaagggtctgaatatgaaggaccagcatatttcttgcttgctttttttttttttt

SEQ ID NO: 18701 - DNA, 628 bp, Homo sapiens
gctgcatctgtagatgatagaactcgggaggagcgaggactggagccattgaagaacaataactataggatcagtaaatcccgatatgactcaatagacagctatttatctaagtgtggtgagaaatataatgacatcgacttgacgatagataaagagatctacgaacagctgttgcaggaaggcattgatcatctcctggcccagcatgttgctcatctctttattagagacccactgacactgtttgaagagaaaatacacctggatgatgctaatgagtctgaccattttgagaatattcagtccacaaattggcagacaatgagatttaagccccctcctccaaactcagacattggatggagagtagaatttcgacccatggaggtgcaattaacagactttgagaactctgcctatgtggtgtttgtggtactgctcaccagagtgatcctttcctacaaattggattttctcattccactgtcaaaggtaaggatatgtttctttatggtgatgggtatagatctatctgtagatatatttatttatatatgctatttatttcccacctacctttcatcttgaaattgtttaccctttgcaataaaatgtttctccatcc

SEQ ID NO: 18702 - DNA, 382 bp, Homo sapiens
gacagaagaaagatgccagttaagaagagaagtggtcaggattttaagagactccaaactgagcagcatgtcaataattaggaaagagacaatttcagaatgggagtggaaattgtgaccaacacagccaaatcctggagagaaaaacagatgcagacttttatttggtacttaacaagttatcagagacttttacaaaagaaatttcaagatgtacaggaggttcagaaggcactagaattaggaaagcaatagggtataagccactctgtcatagagtttggcattgacaggacagagagagtgaagatttcattgggagaagggattatttctatgggataactgggagccgaaagaggagatgaatttccacatagtc

SEQ ID NO: 18703 - DNA, 377 bp, Homo sapiens
gctagcaccatgagcttcaataccctgatgtgattattacacattacatatctataacaaaatatctcatgtaacccataaatatatgtacctatgtgcccataaaaattaaaaattaaaaactatactcagagtttaaaaataatgcaactccacattttatgcaatcaaattttaaaatctcaattatagttttatgatgtagtttttgctgaaactggatgggggagctccaaccaaactattaaaacttgaggccagcacggtggctcacacctgtaatcccagccctttcggaggccgaagtgggcagatcacctgaggtcaagagtttgagaccagcctggccaacatggtgaaaccccatctctactaaa

SEQ ID NO: 18704 - DNA, 339 bp, Homo sapiens
ggggtcaggaattttcaggagtaacatgatgtctcggagcagtctgtccgaacacagtgcctctttttaggacttatctagaggtaacattaagcttagttcttgccagttgctgccacgctatccactttggatttaatgggcaatggcgaatgtctggaggcagggcctggctagagtagatgtcttaatgtgaatttgtgagcccgttaattggggcaagtcctagatggagtgatcaggagtggagttggttagataaaggagaatagaagaggatgagacctctttcctatgaaggccacacctccatgtgcctcccttctcaagtgagaagtt

SEQ ID NO: 18705 - DNA, 344 bp, Homo sapiens
gagtaaactatctcagaagaagttaaactgaaaacttactgcatctatgcatatgcaccctctgaaaatgtaactaattaagaagaagaaagattttgaataaaacacgttaaaagacaataaatagatttgatcttgaaggctggggaaaaaatgaatgacaggatcttatagaaacctgtgtttgtaaattgtggcaccactaatggttattctgttctatcccatcccctatttttatttttatcatattcatggtagagccaggaaaggccacctgagaattgtgctatgagacagcagtgatgcggaagcaagcatggagccggcctttatggtgaccg

SEQ ID NO: 18706 - DNA, 370 bp, Homo sapiens
aacagcatgatattcgatcattttttgtaccacaacctaaaaaaagacagttgatgacctcctgtgacgaatcaaagagattccgggaggaaaatactgtagtgtcatcagaccctacaaaaacagctgcaagagatatcatcgattatgaaagtgatgttgaacctgaaacgaaaagattgaaattggctgcctcggaagaccactgcagtccgtcggaagagacaccatcccagtccaagcaaatccgaactccactcgtggaaagtgtacaggaggccaaggcccagttaaccaccccagcctttcctgtagagggctggcaatgtagtctctgcacctatatcaataattcagagttaccttattg

SEQ ID NO: 18707 - DNA, 246 bp, Homo sapiens
  misc_feature (1)...(246): n = a,t,c or g
cttaattaagcctgctgaaacttcagggaaggcaattctatgagagatttataattattgtggtccaactacacagcctcgatccaaggtttcaacctgaagtcctgaggtacaggtcagttctgcatgtccctgggggtactccctggagtttcagcaggcttaattaagtacctgactacctnctgtgcacctagcactgtgaaggttggcagctangtncantctcattntantcagggtgaa

SEQ ID NO: 18708 - DNA, 382 bp, Homo sapiens
cccacgcgtccgcaacatatagaaaaatgtatagatgcttggacagacccggtaatgggtggccattggtaaatgttaggaacacaccaggtcacctgacatcccaagaatgctcacaaacctgcaggcatatcattggcgtatggcactcattaaaaaggatcagagaccattaaaagaggaccatacctattaaaaaaaaatgtggagttggagggctaacatatttaattaaataaataaataaatctgggtctgcatctcttattaaataaaaatataaaaatatgtacattacattttgcttattttcatataaaaggtaagacagagtttgcaaagcatttgtggctttttgtagtttacttaagccaaaatgtgg

SEQ ID NO: 18709 - DNA, 280 bp, Homo sapiens
gagggaggtgggtggtaatcgtttgagctcaggggtttgtgtccagcctgggcaacatggtgaaactgtctctacaaaaaatacaaaaaatagccaagcaaggcagtgcgcacctgtagttccagctacttgggggcttaggcaggaggattacttgagcccaggaggtcgaggctacagcgagccatgttcacgccactgcatttcagcctgggaaacaaagtgagactctggctcaaaaaaaattatttatctcaagtatctaaaacaatcttacctc

SEQ ID NO: 18710 - DNA, 349 bp, Homo sapiens
gcaaactagataatcctcagtgattggttttttaatctacataatagattcaaaacaaaatgcttcatgagcccctccctggattgcaattaatggcagtgtgaaaaaaagattatgtgattaatcacagataatgtaatcaaccagggcagtgtgcccgccctctctttctggagtataaaaggagttgtgagaggcttgggtcaccatttggtgagctgagggtgaagctacaaaggttgaagcgttcttcagacgactctacctgagggtgaagctacaaaaattgaagcgttcttcagacgactctacctgaagaaagaaccctgctacagagaggggtgagtag

SEQ ID NO: 18711 - DNA, 430 bp, Homo sapiens
gtggttgcatagggtttcattatactgtgtctctctacctttgcatatatttggaaatttccataatcaaaagtttaaaaaggaaaagttaacagggttggcccaagcatatagacagtagaactaggctcaggccttctgattaattcaagcatggttgggcagtagttctgggtcccagtagcaaattagaatcacagggagaaagttttcaagtgctaatgccctggactcactcccagagactctctgttttaattggtctgtggtggagccagcattatgcttttacaaaaccctacagggtgatttaaatgtgtgcccgagatgagggccgctgggctgggggaagcacaactcacagagaagttcaaggatattgcaagttaaattatatatagaagggcccattataaaccagctcttacct

SEQ ID NO: 18712 - DNA, 193 bp, Homo sapiens
agctcagtttgtctccttgcagaaagaggttgctgcagtttggagctggttatgccaaggaaaatacggctaaaaaagaacttactgattcccataggtgtgtcaactgacaaatgaatgttccatctccctacgacaatttgctgcccctccccaaaaaaagcactatggccaaaatttcagtttttaaagg

SEQ ID NO: 18713 - DNA, 497 bp, Homo sapiens
  misc_feature (1)...(497): n = a,t,c or g
tgaanccaacagctntgacatgattacgaatttaatacgactcactatagggaatttggccctcgaggccaagaattcggcacgaggggagcctgagcttcctgcccaccctccgggagctccacttggacaacaacaagttggccagggtgccctcagggctcccagacctcaagctcctccaggtggtctatctgcactccaacaacatcaccaaagtgggtgtcaacgacttctgtcccatgggcttcggggtgaagcgggcctactacaacggcatcagcctcttcaacaaccccgtgccctactgggaggtgcagccggcactttccgctgcgtcactgaccgctggcatccagtttggcaactacaaaaagtagaggcagctgcagccaccgcggggcctcagtgggggtctctggggaacacagccagacatcctgatggggaggcagagccaggaagctaagccagggccagctgcgtccaacccaccc

SEQ ID NO: 18714 - DNA, 441 bp, Homo sapiens
  misc_feature (1)...(441): n = a,t,c or g
gactcattcatatatgtggatttttcttctcttctgatgtagtattgatcatgtttttcatttgatagtaacccaaataatggaaactactaatagaagttgtaaatattgcttttatttaaccatttcataacatatctgagcattcacactactggaaatcgctttttaaaatgccagaaatgaccacattgtgttttgatcttcttctaagtataggaaaaggcctaccacattgaaatgctaatggtgtccactgagataaatcacaggctttgtggtttatccaccaagaacaatagccagtgatgcatcctcaggtttacaaagcaatttgtgatgccccatgaaattctataaccgaataagagttttgcaaaacnnggttngngaaanncntnngaaggttttttgcaaggggaccatntntttttccctggc

SEQ ID NO: 18715 - DNA, 211 bp, Homo sapiens
  misc_feature (1)...(211): n = a,t,c or g
gcatgactttgtcagagtgccgtgctctgcaggatgagcacctgcccactccctctgtacatggtgtgtaccccagctttccatacaagaattcagtgcttatcacattcataaacaagtgactgttattgatacntctggccttcatagataactttctaattaanttntangctaataataatnangnttcntnnccacntattccaca

SEQ ID NO: 18716 - DNA, 347 bp, Homo sapiens
cttcaatccctactttttatctacatttcctcttcatccccaagtggctgtcaaatcatcctgtattttatggtctaaagctattttatgactagctcatttaactcaccagtgaccagtgacacaatccatgttaggcatggacagatgtactcagaatgataaagaaggtcactgggataaagcactccatatttaagtctgcagagtcataaacataaaagccaaatttaaaccactcagaagatttaaatttaagtcctctgtaaatttaaggagaatgctaagattaaaagtaaaaaacaaaggccaggcacaggggctcacacctgtaatcccagaacttt

SEQ ID NO: 18717 - DNA, 511 bp, Homo sapiens
  misc_feature (1)...(511): n = a,t,c or g
taccagctatgacatgattacgaatttaatacgactcactatagggaatttggccctcgaggccaagaattcggcacgagtttttccccaaaacaaaagccctgactttgatgagggttacttattaccttgagtctcaaagtgtggcccatgaaccagcagaatctgcatcgactgagagcttgttataaatgcagtctcaggcaccaccctagacttacggaatcacaaagtagagttcaacaagatctccaggtgatagtatgtatgttaaagtttgagaagcactagcttactacattgttaagacaatgatgctactaaatatgaaaaatctgtgaagctctgctccctgacatggtcaagctgattgtacagcagtggctcttaccctggctgncattagaatcacctggggaggctggntgtggnggggntcacacctgcnatctcagtaanncccaactttgggagncaaantggcgcatcgctganccnaagngttcatccg

SEQ ID NO: 18718 - DNA, 476 bp, Homo sapiens
tttgaaaccctatgacatgattacgaatttaatacgactcactatagggaatttggccctcgaggccaagaattcggcacgagtcggggtgaagcgggcctactacaacggcatcagcctcttcaacaaccccgtgccctactgggaggtgcagccggccactttccgctgcgtcactgaccgcctggccatccagtttggcaactacaaaaagtagaggcagctgcagccaccgcggggcctcagtgggggtctctggggaacacagccagacatcctgatggggaggcagagccaggaagctaagccagggcccagctgcgtccaacccagccccccacctcgggtccctgaccccagctcgatgccccatcaccgcctctccctggctcccaagggtgcaggtgggcgcaaggcccggccccatcacatgttcccttggctcagagctgccctgtctccctccacagccaccc

SEQ ID NO: 18719 - DNA, 368 bp, Homo sapiens
gggtatgtgccaccacgcccagctaatttttgtatttttagtagagacagagttttgcacggctgttctcaaactccttgtctgaagcaattctcctgccttggcctcccaaagtgctgggattacaggtgagagccaccacacctggctgaaaggaaggggttctcttaagagtttttgctctctgtgtccactgtgaagctctatagttcatgctgcaggccacccttgtgtggaaggcaaaagatgaagaaagaaaaaaaacttggaaactcactggtattggtcatttttcaagtttttatttctctcccctgctgttgtttacttttcagagtcttcaggtagatgctttttgttctcaaaat

SEQ ID NO: 18720 - DNA, 460 bp, Homo sapiens
  misc_feature (1)...(460): n = a,t,c or g
gacccttcagcaagtgacaggcctgcctgccttatttcttcttgggagaagctgtgactgacatggggactgacattccagtgtctcctgtggagaattttggtgttggcatctttatgatgtctttggtgttacctatgccagttgacctggagcatgggattggcgaaataacatgggatattcaggggggcccctctcatttgtttggggctcagagtaagtttatgggctatcttggtattattataggtctgacttagaagatgtagacagggccaccttggtggggacctagtttagcagacatagcataggtccagacttcttctgcaggtgaacgacagggttcaaattcaccagcagtcacagagtttttgagactttaacttcctctgggacaattcaagctatctagagacccttgggaatanatccccctgctgtaggcttccggagg

SEQ ID NO: 18721 - DNA, 153 bp, Homo sapiens
ggaaggagcgagccttgcagggcagcctcgggggtgtggagaaggagctgacgctgcgcagccaagccctggagctcaacaagcggaaggctgtagaagccgcccagctggccgaggacctgaaggtgcagctggagcacgtgcagactcggt

SEQ ID NO: 18722 - DNA, 449 bp, Homo sapiens
  misc_feature (1)...(449): n = a,t,c or g
tgaanctttganncnctgctatgacatgattacgaatttaatacgactcactatagggaatttggccctcgaggccaagaattcagcacgaggtcctgggaatcaccctgacactagctgtcgagatacttaccagtttttctgccctgattggacatgtgtaactttagccacctactctgggggatcaaccagatcttcattccataactcgtgcttctcgtcctaaattatgtactagaaaaaattgtaatcctcttactataactgtccatgaccctaattcaactcagtagtattatggcatgtcatgggaattaagattttatatcccaggatttgatgttgggactatgttcaccatccaaaaaatcctggtctcatggagcccacccaagccaatcggcctttaactgatctaggtgaccctatgttccagaaacccccta

SEQ ID NO: 18723 - DNA, 356 bp, Homo sapiens
gctttgtcttacctcaattgagtaacagaatatagctcctgaaggaaacactgatttgctttctgtttcccatatctcacctctaggatatgatggaagaagtgcttgaaagagaattttagcagatggtacttttctcagtgacctctggaataaaagaactgacttttgatagttttaaaattaatctttgcatgaaggttggtttcgctctttttcctttaagtttgtttttaaatgtattagtccaggggattttgccttatgctgaggtcaaactaaggataagcaagcttttgtccttcattttaactgttatgtcatactgttatgttgacatatttctttataagaga

SEQ ID NO: 18724 - DNA, 344 bp, Homo sapiens
caaaaattttctatcaagaattatgatacacacattcccaaaatagcatcacttaagagtcagggtcttgaaatagttttctctgtgttccttggtcagaaaagcagaaatagttatgctttttaaaagctttttagggtaaagtttttaactttggtagtgctagttttgaaaatggcaaactattacataagtttaagtatttaaggttatctgtatgtaaaaagaaattactttgaacagttatatgaatgcacatttagaatgtaatgtatcgttttgcgactgaagaacacagtatgttccttggcttaaacagaaatgcctttggaagatatataccc

SEQ ID NO: 18725 - DNA, 377 bp, Homo sapiens
gaccatagtatactagaaaattcgttgtttatctgacatacaaggttaaccaggtatcctgtattttcatttgctaaaatcaagcaaccctgtatgtgggtagtgggttttcagattgtatgatcgtactttctgacttctgactccaagtccatccatcctttctatgtgccacattctgttctgtctcattcttgggtctctgctgtcctcttggggaagagagtgaatggcttacctactctagcccctgtactaaggggcccagtggctcatgcctgtaatcctagcactttgggaggccgaggcgggtggatcatctgaggtcaggagtttgagaccagcctgggcaacatggtaaaaccccgtctctacta

SEQ ID NO: 18726 - DNA, 468 bp, Homo sapiens
cctttgacatgattacgaatttaatacgactcactatagggaatttggccctcgaggccaagaattcggcacgagccctgagaccctgaatgaactccacctagaccacaacaaaatccaggccatcgaactggaggacctgcttcgctactccaagctgtacaggctgggcctaggccacaaccagatcaggatgatcgagaacgggagcctgagcttcctgcccaccctccgggagctccacttggacaacaacaagttggccagggtgccctcagggctcccagacctcaagctcctccaggtggtctatctgcactccaacaacatcaccaaagtgggtgtcaacgacttctgtcccatgggcttcggggtgaagcgggcctactacaacggcatcagcctcttcaacaaccccgtgccctactgggaggtgcagccggcactttccgctgcgtcactgaccgc

SEQ ID NO: 18727 - DNA, 464 bp, Homo sapiens
gacaaatatgagagacttgtgaaacttagtcgggatataactgttgaaagtaaaaggacaatttttctcctccataggattacaagtgctcctgatatggaagatatattgactgaatcagaaattaaattggatggtgtcagacaaaagatattccaggtagcccaagagctatcaggggaagatatgcatcagttccatcgagccattactacaggactacaggaatatgtggaagctgtctcttttcaacacttcatcaaaacacgatcattaattagtatggatgaaattaataaacaattgatatttacgactgaagacaatgggaaagaaaataaaactccctcctctgatgcacaggataagcagtttggtacttggagactgagagtcacacctgtcgattaccttctgggagtggctgacttaactggagaattgatgcggatgtgtattaacag

SEQ ID NO: 18728 - DNA, 321 bp, Homo sapiens
gaatattgattggtaatagtaaatcgttctccttacaatcaagttcttgaccctattcggccttatacatctggtcttacaaagaccaaagggatcctgcgcttgatcaactgaaccagtatgccaaaaccaggcatccaatttgtaaaccaattatgataaaggacaaaataagctgtttgccacctcaaaactttatgaacttcaccaccactagtgtctgtccatggagttagaggggacatcacttagaagttcttatagaaaggacacaagtttgtttcctggctttaccttgggaaaatgctagcaacattatag

SEQ ID NO: 18729 - DNA, 361 bp, Homo sapiens
  misc_feature (1)...(361): n = a,t,c or g
cttttcttaatgtattcaaaccaaaagacagcaatttttagagcctgaataggttttggagggaaaagtaattacgttcaacttcgattgaaactcttgcctcaagaatgaagaacagcaaaaattaaatcacagtttcttagctttttggttaaagatgtaagttaaattcttggccgggtgcggtggctaacgcctgtaatcccagcactttgggaggccaaggcgggtggatcacctgagatcaggagttcaggaccagcctggccaacatggtgaaaccccatctctactgggtgtggnggtgtgngcctgtaatcccagctgtttgggaagctgagtcaggagaatcgcttgaacg

SEQ ID NO: 18730 - DNA, 414 bp, Homo sapiens
  misc_feature (1)...(414): n = a,t,c or g
gggctttggtgctggcagtagtaaaggttataatggatttgaatcttgttatttagtgcctggtggtgacagggatagtggtttcctcaccagatccttgtgcaacattattttgggtgatcttatctttgcatctgttttttcacccctcctagtgagaatcagagcgtctactgcacctttcagatgaccgggtgccgtggctcaacacctataatcccagcacttgggatgggaggctaaggtgggtgaatcacttaagcttgtgagtttgagaccagcctgggccacatggtgaaaccccgtctgtacttaaaaacaaaaacaaaaacaaaaacacaacatcagctgggcatggtggcacatgcctgtggcctagctactcaagaagctnaagtgggannagancnctaa

SEQ ID NO: 18731 - DNA, 501 bp, Homo sapiens
gggcaactacaaaaagtagaggcagctgcagccaccgcggggcctcagtgggggtctctggggaacacagccagacatcctgatggggaggcagagccaggaagctaagccagggcccagctgcgtccaacccagccccccacctcgggtccctgaccccagctcgatgccccatcaccgcctctccctggctcccaagggtgcaggtgggcgcaaggcccggcccccatcacatgttcccttggcctcagagctgcccctgctctccctccacagccacccagaggcaccccatgaagcttttttctcgttcactcccaaacccaagtgtccaagtctccagtaggagaacagtccctgggtcagcagccaggaggcggtccataagaatggggacagtgggctctgccagggctgccgcacctgtccagacacacatgttctgttcctcctcctcatgcatttcagcctttcaaccctccccgactctgcgggtccctg

SEQ ID NO: 18732 - DNA, 346 bp, Homo sapiens
gaattaaactctcttcccgtttccatctatattttggacattttccagtatttgacatagtttttaaaatgtaatctttataattcttatctgctgggagtccacaggaccacctctttgtcaatagtggaaactgagtgtcctcctagaaagcttttgggattaaataagtatctttaaatgactgtctctgtacacagaagtatttggtttaatgtttttgaccatattttttaaaatgtggatgtttaaagaagtattgcctttttaaatgtttacgggaaatgaggactgtctcattactacctattacgccactattgctttcataaactccttccaaaac

SEQ ID NO: 18733 - DNA, 321 bp, Homo sapiens
agataatctttaacatcattaacaaagtcagtgaagagcttctgatcatgtataaagacaccgtttaggaaaaacttattgatgaactgatcaagttcgttccagtgacaaaaagtatccagttcttttaacatgtacctttgaattatctgtctaaattcatccatccttataggattcaccactgtgttaaaaaggctcatggactcttgttgagcacaatcaaatacaccagaacaagcctttctgaaagaatgagaattttctctacaatcatgcccaggactgcatttctttgaatttgtattttttctgaattct

SEQ ID NO: 18734 - DNA, 180 bp, Homo sapiens
gctggatacgaaaatgaacaaattatgctatgcaagtaacatggatggatctcaaccttgaatgaaaaaaggaaactgcagatgataaacacagcataatacctaaatgaagtttaaaagaatgcacaggctgggcgcagtggctcacgcctgtaatcccagcactttgggaggctgagg

SEQ ID NO: 18735 - DNA, 336 bp, Homo sapiens
gggcacacctagacccccacaagctgaaagtagctttgcagtgctgcatttatttattcagtatgcaaatccacatttagtaccagcgtatgccagaacctgtactagacatgctagagcagttcatgtctcagtctgaaaacataaccctttgttattggcccttgcctttagggaataagaacatgactgttaatagtagaccttggtgttgggaatcctacttttaactgtgcaagtgagagcattctgaaactttttaacattttatgccctccttcctctttgcactgctgctggggcctctcctagaggagaatgcatccgacctctgct

SEQ ID NO: 18736 - DNA, 295 bp, Homo sapiens
gcggcacgaggacggctttggaatccaccagctacatccagctccctgagggcggctgggttctgccctgctgtcctctgccaccctaacagcccacttgacgaggagaatctgacccaggagaaccaagaccgagggacacacgtggacctcggattagcctccgccaacgtggacttcgctttcagcctgtacaagcagttagtcctgaaggcccctgataagaatgtcatcttctccccactgagcatctccaccgccttggccttcctgtctctgggggcccataatacca

SEQ ID NO: 18737 - DNA, 409 bp, Homo sapiens
gaggagttagatgtgtcaatagctaaattacatggctgtgtcctctagctggccagggactgacaacatcagtatcacctggtgactctcccaggggagatgtttttaaaaatcttttccagtaattctgtgcaacatggcaatctgaaaccagtctttcagacctggaagttctttagagaccacaggactctctttgatattttttcttttgaatttttttaaaatacagaatcctttttcatgttctctgtttataaaacaactgcatgtcaattacattattttttagaagataggtacaagagccaggcgtggtggctcatggctgtaatcacaacactttgggaggtcgaggcaggtggatcatttgaggctggaagttcgagaccagcctggccaacatggc

SEQ ID NO: 18738 - DNA, 486 bp, Homo sapiens
ggaggatggagtttgggtttataacccaaccctcgaacgaaccagcctgtgggggcctggagtggagctggttttggggagtcacaggtgcggggggttcatcatctcctttctccttctcctttcctgacccctccgacagcttccatgttggccatgggtcaggtgaatggatggagctccaagcggggctcagcccattgacccgagcgaggcgcacacacctgcagcgtggatcaagcgcactctctccagcatcgccctgaccattccatgtgctttgtcctagcatgttcattcttgactttctccacttcattttattaaaaagttaaatgctttaggaatctgtggcgtgtggccactgaccgcccccacctcctgccgctcctccaagtttgagctgagatggttctgtgagtccttggcaggggtcaaagggcacatctccttgaacctagaaagccccctacactctcagaggac

SEQ ID NO: 18739 - DNA, 324 bp, Homo sapiens
ggcagagactcagaagaagagatgctggcctagagccagccggttgcagcgttggattgtgccggctaagacctgccagggagatgggacccttgtgccacctgggccagcaaagaggaggggtccagagaacagctgaaatactgtcactagtggtagtgacttgcttttcctgtgcacacatgtagcccatcaggacagcgagccgacgggtcacgccaggggccggcacgcactggcacctggccccaggagcggggccgtgtgaacggtgatgaatgttgaaaatgcgtctcagagaggtattcacatgaactttgtatg

SEQ ID NO: 18740 - DNA, 429 bp, Homo sapiens
  misc_feature (1)...(429): n = a,t,c or g
ggggtatttttgtattctctgctgtttgtgctctgagtacatgtgcacaaaatgcagtgacactgatcaataaactctttaagcctataagcatatgcagtctcatagcaatgaggacataaacagggagaaggatcttaggtgattcaaattctcttttgttggccaggcacggtggctcatgcctgtaatcccgccactttgggaggccgaggcaggtggatcacctgaggtcaggagtttgagaccagcctggccaacatggtgaaatcccgtctctactaaaaatacaaaaattagctgggtgtgggggcaccgtgcctgtaatcccagcttcttgggaggctgagacaggagatcgttcaaatctgggaaggccgaggttgagtgagccgaattgtgccactgcactccancttgggtgaaaga

SEQ ID NO: 18741 - DNA, 373 bp, Homo sapiens
tgattatttacattatcagtaaaatttccagtcaatagtaaggctattagcatttaagctttgggagagtcaaaagtcatatgtggattttcgactgcacaagaggtagggtggtaggggagttggcactcctaactccttcattgttcaagtgtcaactatactatactacacacttaaaaacttgttagtagggtagagttcatgttatgtgtttttactacaataataactttttagaaggtaagttggagttatgttcaaaataactcggtaagctatagtatttggacttgtactatgagacaaaatgggtcggaactgtcgctgtgtgaaagagaacggggaagaaaagagaacttctggaatttat

SEQ ID NO: 18742 - DNA, 318 bp, Homo sapiens
gacattttaagtagtgctactctatcttctagcttcactggttactttttaaattttatgtggagacaaggttttcttgctatgttgcccggggtggtctcaaactcctgtgcgcaagctatcttaccacctgggctcctcaagtgctaagacctacattacaggggtcagccacggcacctgccctggtttttcaaattggatttaacatccaattagcagctaaactcagcaaatgggatattttgatctgtgtataattgaaattccaattttggcttctctggacaaaatgggaaacaatggaaatctttcata

SEQ ID NO: 18743 - DNA, 606 bp, Homo sapiens
gcgtcactgtaataagttattccttattgattttggtttggccaaaaagtacagagacaacaggacaaggcaacacataccatacagagaagataaaaacctcactggcactgcccgatatgctagcatcaatgcacatcttggtattgagcagagtcgccgagatgacatggaatcattaggatatgttttgatgtattttaatagaaccagcctgccatggcaagggctaaaggctgcaacaaagaaacaaaaatatgaaaagattagtgaaaagaagatgtccacgcctgttgaagttttatgtaaggggtttcctgcagaatttgcgatgtacttaaactattgtcgtgggctacgctttgaggaagccccagattacatgtatctgaggcagctattccgcattcttttcaggaccctgaaccatcaatatgactacacatttgattggacaatgttaaagcagaaagcagcacagcaggcagcctcttccagtgggcagggtcagcaggcccaaacccccacaggcaagcaaactgacaaaaccaagagtaacatgaaaggtttctaagcatgaattgaggaacagaagaagcagagcag

SEQ ID NO: 18744 - DNA, 294 bp, Homo sapiens
gggctggagaagaaacagcaagggagtctgtgaagctacatgcgaacctggatgtaagtttggtgagtgcgtgggaccaaacaaatgcagatgctttccaggatacaccgggaaaacctgcagtcaagatgtgaatgagtgtggaatgaaaccccggccatgccaacacagatgtgtgaatacacacggaagctacaagtgcttttgcctcagtggccacatgctcatgccagatgctacgtgtgtgaactctaggacatgtgccatgataaactgtcagtacagctgtgaaga

SEQ ID NO: 18745 - DNA, 419 bp, Homo sapiens
gctggaagtggggataagatagaattcatttaatgcttataaatcataaataataaacatcattaataagtgttttaagagtctaggaaaaaagactgcctcatatcactacgttatactaattatgctgtgaactggttgggcttttcctgtcaattttttctgtgaattttccaatgcatttgttgcctacaattctagcagctgccattaggtggtgccttctcatgggagctaaggcctaaataaaggaagaggtaaggtacacaacacaattctataaacagtagaacatgttatcaataatcataataaaatgtagctaactattcactctaagagatggctggctacataagaaacataatttaaagaaatgtaaataattccctaatacatatttaaaccatatatttaac

SEQ ID NO: 18746 - DNA, 351 bp, Homo sapiens
  misc_feature (1)...(351): n = a,t,c or g
gaacgaaatgtgatagaattactgagaaaataattcactatttctttacatggatgactggtttggatctagagtatgtatttttttttttcattacattacaggaagcanaatctggtaatataagtcaaaagtctgatgaanaanattttgtaaaagttgaanatttaccactgaaactgacaatatattcanaggcagatctaagaaagaaaatggtagaagaagancagaaaanccatttatctggngaaatatgtgaaatgcagaccgaagaattagctggaaattctgagacactaaaagaacctggtaagagttatcaatttaaatcttgccatattgaaaaat

SEQ ID NO: 18747 - DNA, 436 bp, Homo sapiens
ggcattagaggttattaaagcacatcctgagccactttacctagttgactttggagttgaggaagaagcaccaactatttagtgatttgatgttccatgcatatacgaaagtaaaaggatatttgattgaatacctatgtcttgaatcacacactgttactttccctcttaagatttctggtttagctggtctgtccctcagtgagagtctctgtctcaaaaaacaaaacaattttatttttggttttgttttaaatgtacctttattgtttgactttgggatctgggagagagtatgtcttttaatgccattcttctttcttgagtcttcggtgacacatgtttacttgtgggaatatttcactttttagttcttttaaagaccttttgctattcgcttgctcttactcaaaccagaagttaaagtggcttgcat

SEQ ID NO: 18748 - DNA, 320 bp, Homo sapiens
  misc_feature (1)...(320): n = a,t,c or g
ttctaaaggcacttcaacagtacaatatatccgtaaaaccaaacccattctgtttatgagtctacactaattcctgccaccctttttatttcctctcctccctctgtcccatctctctgcctcttctcgttttttctttctttcccattatctttcccccttgacttttgctacttgtcttacccttaatatccctgttttcttcctttcctctcctccgctatctcctatctcctcttaacagctnatgcgnagtatatgctaaanaataaaaagaaaagaaagtcccaagtgacttataaatcactcggcttaatagg

SEQ ID NO: 18749 - DNA, 349 bp, Homo sapiens
ccagatctaacatcattgaatactctgccctctagagccttcagccttaatggaaggttggatccaagagggtgtaatggagcatcaagccactcggcggcagcatggagctataactaagcatcctttagggttctgcctctccaggcatttagccctcacattagatctagttactgtggtatggctaatacctgtcaacatttggaggcaatcctaccttgcttttgcttctagagcttagcatatctgattgttgtcaggccatattatcaatgtttacttttttggtactataaaagctttctgccacccctaaactccaggggggaaaatatgtgccaatcaa

SEQ ID NO: 18750 - DNA, 1021 bp, Homo sapiens
tatgacatgattacgaatttaatacgactcactatagggaatttggccctcgaggccaagaattcggcacgagcagaaaccaaattaaaccccccccccatgtaacaggggggcagtgacaaaagcaagaacgcacgaagccagcctggagaccaccacgtcctgccccccgccatttatcgccctgattggattttgtttttcatctgtccctgttgcttgggttgagttgagggtggagcctcctggggggcactggccactgagcccccttggagaagtcagaggggagtggagaaggccactgtccggcctggcttctggggacagtggctggtccccagaagtcctgagggcggaggggggggttgggcagggtctcctcaggtgtcaggagggtgctcggaggccacaggagggggctcctggctggcctgaggctggccggaggggaaggggctagcaggtgtgtaaacagagggttccatcaggctggggcagggtggccgccttccgcacacttgaggaaccctcccctctccctcggtgacatcttgcccgcccctcagcaccctgccttgtctccaggaggtccgaagctctgtgggacctcttgggggcaaggtggggtgaggccggggagtagggaggtcaggcgggtctgagcccacagagcaggagagctgccaggtctgcccatcgaccaggttgcttgggccccggagcccacgggtctggtgatgccatagcagccaccaccgcggcgcctagggctgcggcagggactcggcctctgggaggtttacctcgcccccacttgtgcccccagctcagcccccctgcacgcagcccgactagcagtctagaggcctgaggcttctgggtcctggtgacggggctggcatgaccccgggggtcgtccatgccagtccgctcagtcgcagagggtccctcggcaagcgccctgtgagtggccattcggaacattggacagaagcccaaagagccaaattgtcacaat

SEQ ID NO: 18751 - DNA, 389 bp, Homo sapiens
gcttgactgctatctccactgacacaaccatagtgcatccacccttacttacccagatgactacaggacttcttaactggcttctctggtgctcttcttgctgagcaagaagtacatcctccacacggttgccaaagggatttctaaagtacagtcaggtatacatcaaatcatgcatacaaacccaccaagggcttcccattataaccacgataaaattcaaatgcttggtcacatcctggaaggccctgtgtgacctggcccctgcacatctctccacccttattttcacctctctccctcgcttacaggatgcttctgccatgccagccttcttttggcctcttgaacatgttaggcttgttccaggcatattcccttcccggggg

SEQ ID NO: 18752 - DNA, 390 bp, Homo sapiens
  misc_feature (1)...(390): n = a,t,c or g
gcagattagaagtgatgcggggacctgacagaggcaggctcaatgatggcaggctaaaggtcatagggagaagttgcagccgatagtctacagatggacagtctggccatgtcatatcactcaagacatctgtgtggcatctaaaatcagtacaggcgatgccgttgctgttcatttgatggtaacctctccccgccatcggagcagagcaagcatcacactttgcagttctgccctccaagtatctaggacagcttttctcacctgcttgccttttgtcattcatttaagagtaaggccaaaaagacaaaatagggtgaccaaccatcttgatttgcccaggaccaagggatacaggaccctcagtgccacaaattgggaaatnccagc

SEQ ID NO: 18753 - DNA, 334 bp, Homo sapiens
gaatcagaaggcaccatgcctcctaataaagaggccagcggtctcagtagttcaccagcggggctcatctgcctccctccaatctctgaggagctacagcttgtgtggacgcaagcagcccagaccagtgagctagacagcaatgaacacctgctcaaaaccttcagctactttccctatcccagcctagcagacattgcccttctctgcctacgttatgggttgcagatggagaaagtcaagacttggtttatggcccagcgcctccgctgtggtattagctggtcatctgaagaaatagaagagactcgagcccgagtagtctaccgtcggg

SEQ ID NO: 18754 - DNA, 444 bp, Homo sapiens
  misc_feature (1)...(444): n = a,t,c or g
gagtagaaagtaaatcaactatagaatccggctacagggtcaatttgaaccagctcttcatttacctgttatgaccgtgggcaagctttgtcctgcctaccacatccctttataatttcacttcacttttctactcccatagaaattaatggctgtgccattcatatgaggcttattgtattcattttaaatcctttattttcatatatgtcctgtcttttcaactagagtgttagcccctcaggggtaggaaaatgtttttatattcccagagactgatggtgctgtacatatagtaggtgtactatagatataggtgtttancngtnancgtgnnnaccanacagttttaanatctntaggnnnnttgngangngcttanngccctgagattanccccaccanngcatanacgtatctntanagggncnncagatnttttcg

SEQ ID NO: 18755 - DNA, 484 bp, Homo sapiens
  misc_feature (1)...(484): n = a,t,c or g
gtcgacttttacagattgtggccagtgaggatattataatcctatgtaaacagaaaagtcccacttaccgattcattctttcactgtttgtatctgcgcccagaattctcagtgacgtgggggtgagggtgggtggcgattgccttagagggaacccctaaattggttttggataagtttgagcccttgaccttaatttcattgctaccactctgatctcttagcacatttcttaggattaagggtccaaaaatgctgatctaaggggttgccatggtgttgaacaatgcaactttttatttaaaaaagctctgcactgccatgtatgaaagtctctttatgatgtttgnttttttgcatttttgntctttacatcaagaaattttatgtttaaatatgcggagaatgtatattgcctctgctcctatcangggtgctaaaccctgggccatcggatataaaagggttaaaactggggtttggt

SEQ ID NO: 18756 - DNA, 419 bp, Homo sapiens
  misc_feature (1)...(419): n = a,t,c or g
gcaaaagaggaaaaagcagaaaggctttttttttccttccaaaaaaacaatagccaaagtatcagctttttatacttctgaccgtagaactctgaaaaagaatgttttcaaatcttatcatcagatttcagcacaaacataaagtacgtttcccatttagtttctctggttctaaagccaacttttcccccaattaggtacacagattaattattttagacacttaaaggatgctcattttggctactgctgctcacaactgtcctgtgttaggcggctccactttctaaatgtaagagagtgccccctaagtgcacacacatccagctgatgtttccacaaagactgctcagattgnaaagccaattttggataatttactaacttctgaaaaggnacnaatggctgggaatgnggtt

SEQ ID NO: 18757 - DNA, 416 bp, Homo sapiens
atttctacagagactccacattcaggtgtaaaatactagacagacatctggcaatattgtccaagaaacacctcgagaccaaatttttgaagctgaatgtggaaaaagcacctttcctttgtgagagactgcatatcaaagtcattcccacactagcactgctaaaagatgggaaaacacaagattatgttgttgggtttactgacctaggaaatacacgatgacttcaccacagaaactttagaatggaggctcggttcttctgacattcttaattacagtggaaatttaatggagccaccatttcagaaccaaaagaaatttggaacaaacttcacaaagctggaaaagaaaactatccgaggaaagaaatatgattcagactctgatgatgattagagctcaataattctttg

SEQ ID NO: 18758 - DNA, 409 bp, Homo sapiens
  misc_feature (1)...(409): n = a,t,c or g
gattcaacagaaaattggcatcctgaaaagccagataaaacctgcctcaaaagggaaaacaaaattaatgaacagacaggaaatctgagaattatttttctctgaagtaggatgcgggggaggtaatggctttgtgaataaactggaggaggagggagagagaaacaaagctgtgtttccaaggttgattccccagctgctccgggtgtttcgagctagagggcactcagtggcagagtttgttaagcaccatggctccgtgggctcccagggccccaagctcgtggtgacgagagcaaggcttggtattttctccaggttccagtcaattatcacagttaaattggaacatgcatgtccttctgtggacagaagtgcagganctgccgcacttcttccaaataaagct

SEQ ID NO: 18759 - DNA, 430 bp, Homo sapiens
  misc_feature (1)...(430): n = a,t,c or g
gatttttcttaagatttttagagtctccagatttccaacctaatatagcgaagaaatatattgatcagaagtttgtattgcagcttttagagctctttgacagtgaagatcctcgggagagagattttcttaaaaccacccttcacagaatctatgggaaattcctaggcttgagagcttacatcagaaaacagataaataatatattttataggtttatttatgaaacagagcatcataatggcatagcagagttactggaaatattgggaagtataattaatggatttgccttaccactaaaagaagagcacaagattttcttattgaaggtgttactacctttgcacaaagtgaaatctctgagggggctaccattcccagntgggatactgggnnangcnngttttttaaaaanggccnccccctc

SEQ ID NO: 18760 - DNA, 380 bp, Homo sapiens
  misc_feature (1)...(380): n = a,t,c or g
ggttataaagagctaaatacagcaaaacgaataagcaaactagaagaagactagtagaagaaccagttgtgtctctaccatggccttcagctgactttgcctggagggccaagataagctcactctgtccagtagatgtgaggctgaagttgagttactttccaaaaactgaaacatgacccttcagctctgtagcagacactctgctagtcccaggaaaacaaaataaagacgatacgctccctgtcactgaggagctcaggtctttctgctatagcccaaaaggagaaaggtttagcctggaggggagtctcattttaaaaagtacaatanattgggaggccaaggcggccggatcacgagtcantanttgagaccct

SEQ ID NO: 18761 - DNA, 351 bp, Homo sapiens
gggggaggcgaggctgggcagggtaagcaggtttagcactggctcatctgcatcatttccgtgggctctggggtgtggttggctctggttgtgggtacctggccctgaaggtgactgttgcctcctggagtgtcagaaccagcaggaaggaggtggctggataggcctctggattggttaattggcaaataaagggtacactcacagggagccatttgccatctctaagaattggctagcccggggagggaagtagctccccagtcaacaaggcctcaggtgtcagagagtacagaaaattaaaaagtacagagggaaaagatcaggggttgccaggtgctcacgaggaga

SEQ ID NO: 18762 - DNA, 378 bp, Homo sapiens
gggactgagaaattgcccatgggctccataaaaaatgtggtcagtgaacctatcgaaggacatgaagactaccacatgatggcgtttcagttgggccccacggaagcctcttactactgggtgtactgggttccaactcaatatgtggatgcaatcaaagacactgtgctggggaaatggcagtatttttgaaagcactttcacctctggcccaggagactgacccaaagtgaaggacattgccgggagaggcctgcagcatccctggatttcagagttctggaactttgttcataaaaaatctatattcaatctgaggtgatgtggtgactgaagccagaggtgatgtactttcaccattagcttaattttaactta

SEQ ID NO: 18763 - DNA, 491 bp, Homo sapiens
  misc_feature (1)...(491): n = a,t,c or g
cagntatgacatgattacgaatttaatacgactcactatagggaatttggccctcgaggccaagaattcggcacgagaggaggcctgggaggaggagagaggggagagtggccagttggtggagcagtgagaacatagcatttgttaagtttgctgtcttcgaaggttgtggtttgtggtaccccaaaacaattaaaataggaacatcaaagatcacagagcagccgggcacggtggctcacacctgtaatcccagcaccttgagaggctgaggtgagtgaatcatgaggtcaggagttcgagaccagcctggccaccatggtgaaaccccgtctctactaaaaatacaaaaaattagccgggcatggtggcaggcacctatagtcccagctattcaggaggctgaggcaggagaatcacttgaatccaggaggtggaggttagagtgagctgagatcacaccactgnacttcacccagtgacagaatgag

SEQ ID NO: 18764 - DNA, 679 bp, Homo sapiens
  misc_feature (1)...(679): n = a,t,c or g
ggccggtgacctatgacatgactaggattttaatacgactcactatagggaatttggccctcgaggccaagaattcggcacgagtgtagatttcctggagtttgtctccctgcagctgaaattctggcagccaataggggactcagcctcaccccagtctctagaatcaaaccaggtattaataggagggattaagttgctgtgactcaacgcttaggcactctagcagcaaagatgcttgatgttgtccagccctgatcttgggccccagttttcacaacaggcttctatcttgctccaatctgctctttacacagctgcaaaagcccctgccttggcaacgttcctggtaacaagatccctctggggaanggctcagccttggncttccactcctcctcccccccatcacttctgctgcccctcatatactgaagccttgcccttgaacactgtcttcttgatatttacacgttgtgctcagtatgatgcttgggtcacagacgattactaaagacntgaactaaggtcatcattcctaaggggnaagggaanggccanggttcannaaangggtgtcatnattgctgatgtcntanaaccngaantgccagtntgagtttangaaanactaannntcgactntnntgtnctcnaatggggtnngnagggnttgttg

SEQ ID NO: 18765 - DNA, 574 bp, Homo sapiens
gctaaacccagatatggtgcttaaaactacttctcgttacataagtggatatggctaaaagtggttctctttaaaaatatgtatattgttcgttgtatactgagggaaatgctttgaacatagtaattaaattattatttatgtttaggagagatacattcaaccacttgacaacctggttagaagatgcccgccagcattccaattccaacatggtcattatgcttattggaaataaaagtgatttagaatctagaagagaagtaaaaaaagaagaaggtgaagcttttgcacgagaacatggactcatctttatggaaacgtctgctaagactgcttccaatgtagaagaggcatttattaatacagcaaaagaaatttatgaaaaaattcaagaaggagtctttgacattaataatgaggcaaatggcattaaaattggccctcagcatgctgctaccaatgcaacacatgcaggcaatcagggaggacagcaggctgggggcggctgctgttgagtctgtttttactgctagctgccaacggggcctactcacttattctttcaccccct

SEQ ID NO: 18766 - DNA, 349 bp, Homo sapiens
gctttttttaaccaggcattttatttgctgctgcttgtaattttgtcaataatcatcaccacctgatttaagttgtcctttctgcctcctcagtactcatttctctcactcaggcatttttcccttgtctttgtcaatatggtgaatatgaaaaacaataaacttaagtaagatattttatcagaaagattaactctgaaagagttaatgttaaatttattatgtcttagtaagttagagcattccctgaggacatagtaattgaaagtctacatttaaattagactttaaatgttgactttcaattactaactttgaaaataagagatacaaatgtaaatgacatccg

SEQ ID NO: 18767 - DNA, 333 bp, Homo sapiens
taggaagtgcctgggaacatgcctgccgaacgcccagcctgcccaggcgcacacggctcgccactgccagcatgtgctgctatctcaaaaaggttcccacattcatcacattcgtgcagaaagcacagcatacttcttgacacccagagttgggccagggatagagtagcaggtttatgcaacattttactttacatggtttgctctgcagagaactctggcaaatcacagatggtaggcataaaggtagatagggccaggttcttttcaaggttgtcacttcacacacctatctgctctgtcccctaccggatccaccccagctcccagcca

SEQ ID NO: 18768 - DNA, 316 bp, Homo sapiens
  misc_feature (1)...(316): n = a,t,c or g
ctttgannccaacagctatgacatgattacgaatttaatacgactcactatagggaatttggccctcgaggccaagaattcggcacgagatcagaaaatagaaattatttaaccaccataatatttgtgaatttaaaaaaatgtcagtgatagctaacgtaagttggtattgcttttcttttctgtcttcctggaattaagagttatcattgtgtgggaatggtaattgacatcttttaacttactctgaaatgtttttggggggagtaaggtactttttacagtctactctaccagntgagctgtcaaancntgc

SEQ ID NO: 18769 - DNA, 374 bp, Homo sapiens
tgtacatgaggtaggctttttttatcagggtaatcctggggatcctttgtcaatgccttgttaatttcaaactggctcactgggacactgccatttagcacattttctccaatttctatcagcctcttctgaatgttttccactatagggtcccggctttgatcaaaaagaatctggccaatcacaaagtttccagtgtctttagcaagatcacaccaatctcttctaactatatctaatcctttgagctcctgtttggtgacataattcccatccgacgttggctcaacaactttcaaggaaaaaaatggctatctgcacagcctcaaagcatctccccaaagtatttcttaattaccacagtggttttaaca

SEQ ID NO: 18770 - DNA, 425 bp, Homo sapiens
  misc_feature (1)...(425): n = a,t,c or g
gacatgattacgaatttaatacgactcactatagggaatttggccctcgaggccaagaattcggcacgagcgctgcctaaaaaatggagttagttatgttcttttgctacttcactgttacactattacctttacatacttatatgtgagatgaattgagctgctgtccgttcttggaaatctgttccttttaataccttttattacccgtatgtcatgtaagcactagtaaaattatttctaccaagtgggtcttatccctcagtgctgttttaacagccctcgtgctctgcatagcctttaaatactgcctgtctccccactccctggttctgacccactcaggagtacattagagttgcccattttcccagtgattgctgccttctcaatagataataggcaatanaagcagacagataaac

SEQ ID NO: 18771 - DNA, 450 bp, Homo sapiens
ttacatgattacgaatttaatacgactcactatagggaatttggccctcgaggccaagaattcggcacgagaaataaaataaaataaaataataaaagaagagaaggaaggaaataggtttacatgtcttaagactggatatttcagtggtagaagaagagggccaatgatacggagggatgttaaccaattctctacacttaataaatttaaaattaatattctgacttttaaaggcaaccctttggtcctccaaaagattaaccataattcataatgctagatgagcatcttggagcaagtacttctctttcactctcataacattcaacatactttggccttgcaaaaaacaaagttcaattaactggatggggtggcatgtacttgtagtcctagctcctcagaagggtgaggtaggaggatcacttgagctcaagttcagggttg

SEQ ID NO: 18772 - DNA, 421 bp, Homo sapiens
ggaggctcagaaaggttcactgacttgcttaagcttacatagtttataagtaggaatctggctttgtctcattctaaaccctattctgtaaatagcaaaacaaagcattaacctattttaaagaaaaatttatattaatatgagaacataatggaaatgtcagttttatggcatttttcatctggctgggaaatactgttcacaactattaggattctcttcttatactcaaaccctgtcacttggcctgccttctgagaagcagtacagatttgataaaaccttctcctggccgggcgcggtggctcacgcctgtaatcccagcactttgggaggccgaggcgggtggatcatgaggtcaggagatcgagaccatcctggctaacaaggtgaaaccccgctctactaaaatacaaaaaat

SEQ ID NO: 18773 - DNA, 334 bp, Homo sapiens
gcagttcggttgttcaaatcttaaatcttaggctatttagctaaaacatgttaggatattgccttcaccacttgttaggacagttatttgatagccattatgcttacctatggatagcataatggtatttaaggttcaacaaaccgcagattattatcatcagctagaactgacatatgttacaagaaaactgtaaattaacctcctgagagaaccattctgccctgcattttaagtcaggtatttaaatactgcgtgttgttaatattgcgttgtcttagtgcaacatttcttaaagtattcccgttatcttccttggctgtttttcagagga

SEQ ID NO: 18774 - DNA, 363 bp, Homo sapiens
gcaaacaaataaaaaattaagtggccctattaaattaccaatttttttcttctctctcactgtcctgtgcctcagaataggatttctgcctactttaaatttgacccactgtagtgaaattcttccaccctcttgtagacagggttgaataataaaggattgaattaacccagaaataatcagtgacataaatggatctattatagtttacagaatgactaaacaagccaaccagtcagtgcatttttacattgttttcctttccacccaacattgggaagcattaatttattttcaatatctgaaaatgttgatttcattcttctatttcctttttccagttgccctgggctctatgagaat

SEQ ID NO: 18775 - DNA, 399 bp, Homo sapiens
  misc_feature (1)...(399): n = a,t,c or g
ccancagctatgacatgattacgaatttaatacgactcactatagggaatttggccctcgaggccaagaattcggcacgaggataaatactgaagaaggtataacactagagaactcctttgttttacttcggtttgatcaaactggacttatgaagcaaatgatgactaaagaagatggtaaacaccatgaagtaaatgtgcaattttcatggtatggaaccacaattaaaagagacaaaagtggtgcctacctcttcttacctgatggtaatgccaagccttatgtttacacaacaccgccctttgtcagagtgacacatggaagaatttattcggaagtgacttgcttttttgaccatgttactcatagagtccgactatccncntacagggaata

SEQ ID NO: 18776 - DNA, 389 bp, Homo sapiens
gagtggaataagttaatgtgttttcctttaataaactttaagaagttggatttgggtatgaagagtcacctgagacagaattatagttcagaatttacaaagtagttaatgaaaacagaggcttctcaggaggcagggaaattctgagtggaaatattgggtgaaaaggtatccacaatctgagctgtgcaggatgccagcccctgggaggggctataggcagtacaggagccacagaggctggcctgccctcagatccaggagctcaagggaggaagcccagggcgccatgcggttgtatttctgtcaccacttcaggccacagcaggctgaatgagggtctaggatgtagatggaggtgcttgtagagtgaaactctatttctggga

SEQ ID NO: 18777 - DNA, 428 bp, Homo sapiens
catggggaggggggactgctctttggttccaggtggttggagagagacccagggctttggattgtgttccttcccctgccacctgtcacagagccaggggacagaccaggaggactagacaggccactgttttggcttttccttccataaaataccagcattttttgccagatgcagtggctcatgcctgtaaccccagaactttgggagcctgaggcaggcaaatcacttgagctcaggagttcgagaccagcctgggcaacatggcaaaagcccgtctctacaaaaaatacaaaaaattagccgagcacggtggtgcatgcctgtagtcccagctacctgggagactgaggtgggagaatcatctgagcctagcaagtcaaggctgcagtgagtggtaatcctgctactgcactccagcctgggtg

SEQ ID NO: 18778 - DNA, 501 bp, Homo sapiens
  misc_feature (1)...(501): n = a,t,c or g
cccccctctgnntnncanccctntgacatgattacgaatttaatacgactcactatagggaatttggccctcgaggccaagaattcggcacgagaagcactgttgtaaaaatgactgaagagcccatcaaggagatcctgggagccccaaaggctcacatggcagcgacgatggagaagagccccaagagtgaagttgtgatcaccacagtccctctggtcagtgagattcagttgatggctgctacagggggtaccgagctctcctgctaccgctgcatcatcccctttgctgaggttgtcttcatcgccggcatcgnggncaccgcggaggcttacagcttcaattcccatgggtctattatctccatctttggcctggatgtctgtcatctggactttttttactagcctccagngccttgtgctggaaagtgagacaaaggagcaagaaagccaagagacgggagagtcaaacagctctcgtggcaaatcagagaag

SEQ ID NO: 18779 - DNA, 408 bp, Homo sapiens
cttggattctatccctcctggtcagtacatggattcttcacttgttaagagttatttataccaaatcctacaggggattgtgttttgtcactctagaagagttcttcacagagacttaaaacctcaaaatctcttgattgatgacaaaggaacaattaaactggctgattttggccttgccagagcttttggaatacctatcagagtatatacacatgaggtagtaacactctggtacagatctccagaagtattgctggggtcagctcgttactcaactccagttgacatttggagtataggcaccatatttgctgaactagcaactaagaaaccacttttccatggggattcagaaattgatcaactcttcaggattttcagagctttgggcactcccaataatga

SEQ ID NO: 18780 - DNA, 339 bp, Homo sapiens
ggtatttagatatgagctaggcatgccaccctatagctaacccaaagcaagctttccagccaatttacactgttatttctttatttatttagagacagagtctcgctgtgttgtccaggcaggagtgcaatggtgtggtctcggctcactgcaacctccgcctcccgggttcaagcgattttcctgccgtagcctcccgagtagctgggattacaggtgtccgccaccatgcctggctaatttttctatttttagtaaagacggggtttcaccatgttggccaggttggtctcaaactgctgacctcgtgatctgcccaccttggcctcccgaagtgcg

SEQ ID NO: 18781 - DNA, 371 bp, Homo sapiens
gactggtcagcacagatacagaacattttccatcattgcagacagtactatcagggagtgctgagtcttaggtaagtgtcctccattcaaaattacactctagctggttctatgcacacccccaccccgccccgcgctgcccacaaaagatgggagagtctgactacaaccctgcatggctaccatgtatcatgaactacaaccaagttatatcacttatgcatctcaagctacccaagctcaatcaatatatagaaaatgaaagctatcatcataaaatgaaagccccatcccatcccaccataaaaacttatagtttcccagttgtttctcaacttagtaaatggtaacactattcaaccagctgcttg

SEQ ID NO: 18782 - DNA, 541 bp, Homo sapiens
  misc_feature (1)...(541): n = a,t,c or g
tttggnnnnccntttgannaccagctatgacatgattacgaatttaatacgactcactatagggaatttggccctcgaggccaagaattcggcacgagcaagatcttttaaggtcttttccagttctaaaatgaaaacacattcatgttttccagtatttaactgttttctatagtaagcttagcagttctttaaagactgatcatggtctcctatagaattcagttggtgaccaactaatcctgggttgacagggcaaatgatatcccattgtacagatattgacaagcagtcatagagtttgacttgccagaagccgcatgcctaagtaaatggtaaagctgggaattgaatatgagacttctcacttgtgagtcagttgccctttccactggatttacagtgtcactcagtactttctgaagtactctataaccaaacctaatatgggaaaggggaaacaaaatactgatttcctttttagtgtagttggcctgagcatttaatgaacattctcatctgtgcgtaatactctgagggg

SEQ ID NO: 18783 - DNA, 498 bp, Homo sapiens
  misc_feature (1)...(498): n = a,t,c or g
ggatggcaaatgttaagccttctaaaaggaaagtgtagattggaaaatgattttttttccaaatgatgtttttgccttctaatatactgtaaggtaatgagcttcagaacaggcaacctgaccctgcagaggtcgcgtgctgtgggatgacagcgggacgggagctcacaagtgctttcactgaagattttttcatatactgtgtattgattgttgtgtaatatatcatcattgcttttgtaaatacgtaaaactgtaattttttaatggtgtgcttcccttatacttttttgatcagagaattttggaaagtaccaaagaagcaggggaatcattggccagtgttacgttttcacattgtctgtctcccaccctcactgatcacgcctgccccagagcantgtgtggcggtgacaccgtcacccagcaatgcgccangccgtngtcccaccancagtgcaccgccaccanacccaagatccacccaccttgcagtgg

SEQ ID NO: 18784 - DNA, 351 bp, Homo sapiens
gatttagtattaaagctctcaaatgtatttattgagcacctgctgggtacaaggctttgagcttagtgatgaaagcatatgacatagtctgtagcctcaaattttctataatctcgtgataaaagtaggtaccagttcattagttgctttccagtggggcacaaattatggaacatcgtctggctggccgggcgtggtggctcaagcctgtaatcccagcactttgggaggctgaggcaggtggattgcctgagatcaggagtccaagaccagcctggccaacatggtgaaaccccatctctactaaaaatacaaaaaatgagccaggcatggtggcaggccgcctgtgat

SEQ ID NO: 18785 - DNA, 197 bp, Homo sapiens
ggggatggcgggcccagtgtgggagggctcaggtgtggtgggacccatcagcaccacccactcaccgcctccatgggaagtcgctcctgggtgcctgtggctgtggccacatgggaattcaagccgagcttttcaagagaagatggaaatccagacttcactgggcagctctctctccatttctttttttttttttt

SEQ ID NO: 18786 - DNA, 505 bp, Homo sapiens
acagttatgacatgattacgaatttaatacgactcactatagggaatttggccctcgaggccaagaattcggcacgagggactatgctgctattgtggaacagaacttgcagcattttaaaccagtgtttcagctgctggagaagcagatactgtcccgagtccggaacacagctagctttaggaagactgctgaacgcctgctgagattttcagataagagacagactgaggaggccattgacaggatttttgccatatcacagcaacagcagcagcaaagcaagtcaaagaaaaaccgaagggcaggcaaacgctataaatttgtggatgctgtccctgatatttttgcacagattgaagtcaatgagaaaaagattagacagaaagctcagattttggcacagaaagaactacccatagatgaagatgaagaaatgaaagaccttttagattttgcagatgtaacatacgagaaacataaaaatgggggcttgattaaaagg

SEQ ID NO: 18787 - DNA, 444 bp, Homo sapiens
ttgaaacccctatgacatgattacgaatttaatacgactcactatagggaatttggccctcgaggccaagaattcggcacgagtactacttgagttgctatggctccagctgaaagaaagcccgtgcagtcatatcacgcgtaaacatttgctttatgctaaaaatatggtggacctggcattacagctattacaaatctcctaagatgtctcgggtagtgtattagttacttttcatactgctatgaagaaatactggaaactgggtaatttataaagaaaaagaggtttaatgtactcacagttccacaaggctggagaggcctcagaatcatggtggaaggcaagcagggaaactgccctttataaaaccatcagatttagtgagatgtattcactatcacgagaacagtatgggaaaaacctgcccccatgattcgatta

SEQ ID NO: 18788 - DNA, 353 bp, Homo sapiens
gaagcaatataacaacaaggtggatgaaatctctcggcggttaaggttgggaaaaaaacctgaagtatatttccatccataaccttgaggcttctcttgttgtccatacatatgaactggctatgaaccacctgggggacatgaccagtgaagaggtggttcaaaagatgactggactcaaagaacccctgtctcattcccgcagtaatgacaccctttatatcccagaatgggaaggtagagccccagactctgtcgactatcgaaagaaaggatatgttactcctgtcaaaaatcagggtcagtgtggttcctgttgggcttttagctctgtgggtgccctggagggccaa

SEQ ID NO: 18789 - DNA, 436 bp, Homo sapiens
gatttacaccaccaagagtagctggtttctagggactcaacctattctggtgttttgctgtgatctatttggctttcataattatctatcagcaagtaaagaaaaggaaaaaaattcaaattgtttatttgagttccccatcagagtctgaagctggaattctttagaaaaaaagtccagaagtcatgtatgagtttgactttgaaggtttctgtccagccctgcagccaaatgctgaatgttgactgcctttcccctccattctccacctggaacttgagggccttcttgtttctttcttgcccctgggctggcctgttaactccatctaatgcagtgcagacctcagcttctaggcagcactgccaagggctctgcaagaaggtggccaccgcagagctgcagtgggaggggtctggttctgggagcaagccat

SEQ ID NO: 18790 - DNA, 374 bp, Homo sapiens
gttaaatgctctttttgtgtcttttgctctgagaacaatgctaccggtagtttccagtgtgtttgctttgcctttttatttgaattttagaatttattattttaaaattttatcttatttaaatgttattcatttttcttctactaattttgagtatcacagcttcgtactccttgacttgcattctctcaggagctggggagccaagctcggtctccgcttcggtggtttcaggtcccgggttctgtctggcggctctgcttctaatgcggagctggcggttttgcagcaacgcttttgccagtagcgcccactgagcggtttttcagttgctgcaccgttcttagcgcccaacggaacgtttcccgtacgcg

SEQ ID NO: 18791 - DNA, 307 bp, Homo sapiens
atattattgaaactcgaagggtccttgatttaaggataaatctgaagccttcttatctagtagttccacagacgggtttccaccatgaaaagtcagatcttctgattttagattttggtacatttcagctcaacagtaaagatcaaggtttacagaagactactaattcatctctggaagaaataatggataaggcatatgacaagtttgatgttgaaataaaggatgtacaactactttttgcaagagcagaggaaacctggaaaaagtgtctatttcagcatccatcaactatgcgtatattgca

SEQ ID NO: 18792 - DNA, 350 bp, Homo sapiens
  misc_feature (1)...(350): n = a,t,c or g
ggtgagactgcccagagagtccatactattggtcagaaggcagaagaatgaccagcaccttcggcgtgtccaggctctgctcagtggacgccaggcaaaggggctgacctcagggcgctggttcctacgccagggctggctgttagtggtgcctccccatggggagcctcggccccgcatgttcttcctcttcactgatgtgctcctcatggccaagcctcggcctccactgcacctgctgcggagtggcacctttgcctgcaaggccctctaccccatggcccagtgtcatctcagcagggtctttggccactcaggaggcccttgtggtgggttgctcantctgcctt

SEQ ID NO: 18793 - DNA, 477 bp, Homo sapiens
  misc_feature (1)...(477): n = a,t,c or g
ggagattgcttatacctggaaactataaacttacagcctcagctccaggctatctggcaataacaaagaaagtggcagttccttacagccctgctgctggggttgattttgaactggagtcattttctgaaaggaaagaagaggagaaggaagaattgatggaatggtggaaaatgatgtcagaaaggaaagaagaggagaaggaagaattgatggaatggtggaaaatgatgtcagaaactttaaatttttaaaaaggcttctagttagctgctttacatcatactacattatatacatagatttaaagcagctaactatataatgtagtatgatgtaatgtggtcttttttttagattctgtgcagttaatacttaacattgatttatctttnantcatttanatattactccctttccttacaatanctagcctcttacgtaaacntatcagancttgatatncntcattctct

SEQ ID NO: 18794 - DNA, 334 bp, Homo sapiens
cttcttctcatttgtattgcttcagtaatgaattatgcttttatttctatttttgtttctttgtatgtaatgtatcttttttctgggtacatttaggttttttttccttcttgactggttttgtgcaatttaatgatatatcttggtggagttttctccccttttctcattcttgaattgagcttcttgggtgtgtttttcatcaaacttgtaaaatttttggccactatttcttcattattttttctgtcgtccccacctcctgtctcctctttccttttgggactctaattacacatatgttaagtttcttgatgttgtcccatagtttgcc

SEQ ID NO: 18795 - DNA, 210 bp, Homo sapiens
  misc_feature (1)...(210): n = a,t,c or g
gaactggaaggagaaaggatacaaaaaaattaacttttgctgaacacttacatgccaagtgttttcgaatatgatatgtgacttaatcctgaacaaactagagtaatacaaactattattgctttttaagaattcagtatttatttatttattaaacagataaggaaatagggttttaaanctgcataagtgttagaacaagatagaaac

SEQ ID NO: 18796 - DNA, 548 bp, Homo sapiens
  misc_feature (1)...(548): n = a,t,c or g
gaactggggacaaccttcaggcctgacaaaagacacttgccttactttcacctaactcaagactttctcaaggcagaaaagtggctatacagagggcattctttgaaaacattgaaaggcaaatgaacaaaccaccgtcacctgaagcaaaagattactgttaaggcacacaaaagatatgctgcagcctgggaagaaagattctttggagatttagtgcattgaaaagctgccatgtgttactggggaatttagaaagccatatgcatgcccgtggtaggatgcatattcagaaaagacctgagaagaccccaaactttcacatcttgctgatctttaggctcagttcaagcaggctatgagaggactgtaaataacctgtctaagctttgaaaaagtgccccagtgcagagccaatcagcaaattttagaagaatacattttgttgtttaattaattttaatttggaagtagtggtgangtggtggtnagntccngtatcaaggncatccgtcaaacaattgctaaccacaagctacaancagcac

SEQ ID NO: 18797 - DNA, 330 bp, Homo sapiens
gaaaaaaaacaaaaaacaagaaggcaaaacaaaaatattcccagacagataaacaaaactcagagaatttgttgctagcagtcatgccttacaatgacacaggattttttttggcccctttgccagggtcacagcaggggggcaccctgtctacttgtcccacctgggctaagtctgacttgtgcaccagcacagcctgcagctagaccaggggtgtcccagctcacctgtgctatagcttgtacccacattcagtggttcccaagctcttgtcccccatccgagaagaatggggatacactgacagttgaagagtgaggaaggcggaga

SEQ ID NO: 18798 - DNA, 501 bp, Homo sapiens
  misc_feature (1)...(501): n = a,t,c or g
atttaaancctttnactatcacttgattacgaatttaatacgactcactatagggaatttggccctcgaggccaagaattcggcacgaggaggcagcgccatatcctggaggtgaaggtaccacctcatggagacccccgcggccgccgcccccgctgggagcttattcccctccttcctgctcctggcctgcgggacgctggtggccgccttgctgggcgccgctcaccgcctggggctcttctatcagctgctgcacaaggtggacaaggcaagcgtccggcatggcggagagaacgtggccgctgtgctgagggcccatggtgtgcggttcatcttcacgctggtcggtgggcacatttccccgctgctggtggcctgtgagaaactgggcatccgtgtggtggacacacgccatgaggtcacggccgtctttgctgctgatgctatggcccgcctgtccgggacggtgggcgtggcggcagtgacagcaggccctgc

SEQ ID NO: 18799 - DNA, 539 bp, Homo sapiens
  misc_feature (1)...(539): n = a,t,c or g
tgnanncccnttnnnnnnnnnnnntttggnnaacagctatgacatgattacgaatttaatacgactcactatagggaatttggccctcgaggccaagaattcggcacgagaaccctgtctctacaaaaacaaaaaaacaaaaaaccggaaattagccaggcacggtggtacacacctgtagtctcagccaccagggaggctaaggtgggaggagacctgatcccagggatgtttgaggctgcagtgagctggagtgcagtgacatgatcacagatcactgcagctttcagttttaaaacagcttctattacattttctttgtggaagctgtatttctaccttagtactcactttctgcttggtctgaaagatacctctagtagtggcaacattgtgttaagtagagttcattgggtctcttgtaaccctacccctacataatggaccactggtgcaggcttacataaacacacatactgtggcacttcagctgaagacaagggacaaactaagatagtctgaaaggtaaaaaaacaaac

SEQ ID NO: 18800 - DNA, 511 bp, Homo sapiens
  misc_feature (1)...(511): n = a,t,c or g
cctnnnnnaanctgaatccttaacagctatgacatgattacgaatttaatacgactcactatagggaatttggccctcgaggccaagaattcggcacgagggggtttcaccatgttggccaggctggttctcgaactcctgacctcaggcgatccacccgcctctgcctcccaaagtgctgggatcacaggcgtgagccactgcacccggcctgtattattactatttttttttagccacttattctcaaagatatattatgtacaatttagtatggtgctaacatgactcttggtttaaaaagatactagacttccctagtttgcgtgatcttttagtgaaaacactaagaaacaataatacaggtttttgctacaatatttggtgtgtatgactgaagtataatgttttacttgtttgcattttcttcttgaaaatgtgaaaactaagatgtcttaagataaaattcaacagttgttctcattttaaaagattgctttaaagccagtct

SEQ ID NO: 18801 - DNA, 353 bp, Homo sapiens
tagatttgaagagctctttccaatttttttttgtggacatcttggttaactttttttggtaatatttatttgttcctttctttgtttgtgagacaaatattcagtacattataattgcatcattacctttagcaggaacattaaaaacaacatgcaaaatacaagccaagaataacataataatttaatagtcatttcaaattagcagacaggattgtaatgattcatttctaataacaagttaaatggaaattacatagaataaacagaaccttattttttgaagtacgactgcagcgtggtcacagaggactgatgcatggcagttcaaatttatctatgttcctctccat

SEQ ID NO: 18802 - DNA, 439 bp, Homo sapiens
  misc_feature (1)...(439): n = a,t,c or g
ggaaataacttctttccaagtgacttatgaagttgtcaacttttcataaagccttggaacaaagtgggcagaaaaattataaataaaaagtcttgtctaggacagtacaggtctgtcttattcctaaattagatcagaatcgggttatgccggttttttataacataccattataattgggtatgttaaagaatgtattagagatgcattagaagagcgacctcattataagcctcttcacccatggattccaaggatatcttacaataaacctctgggataccttacgctacagagcaactaaagtccagctttagagcacaagggaaaatgcaggatattgggtcctggaaactacnaaaaccatcaaactctactttagggctaaaactttcttttaatcaatctgcatatttattgnngaattngaaaaaggggg

SEQ ID NO: 18803 - DNA, 367 bp, Homo sapiens
  misc_feature (1)...(367): n = a,t,c or g
anaacnncttgacatgattacgaatttaatacgactcactatagggaatttggccctcgaggccaagaattcggcacgagcttctccagatgccctatggctgtggagagcagaatatggtcctctttgctcctaacatctatgtactggattatctaaatgaaacacagcagcttactccagaggtcaagtccaaggccattggctatctcaacactggttaccagagacagttgaactacaaacactatgatggctcctacagcacctttggggagcgatatggcaggaaccagggcaacacctggctcacagcctttgttctgaagacttttgcccaagctcgagcctacatcttcatcgatga

SEQ ID NO: 18804 - DNA, 374 bp, Homo sapiens
gtcgaagaactcatcctcagaattaaaacagcaagcagcacaaaggaaactttagttacagccgaaacccactttgacttgagaataaaattaggatacttctgtaaaggacttggatttctgttcttattaggtcacagcaaaaatggtattttaaaaggctactaggagtacgatgaatgatctcaatgagaaggaaaagctgacagtatatcatagagaactacgaatatagcaggtttgccatttggcatggagagaaatcgagaatgtggacttgaaccttgttgacttgagccatggctcttccacctaagtgactttaggtacattgttttctatatctgagtagcagggataacagctctacctat

SEQ ID NO: 18805 - DNA, 328 bp, Homo sapiens
gcggagtcttggtgaggcaggcgcgcgcccggccgtccccgggcagagacgtttaaagagcatgtattgttgcagcatctggcagtgagactgaggatgaggacagcatggacattcccttggacctttcttcatccgctggctcaggcaagagaaggagaaggggcaacctacccaaggagtctgtgcagattcttcgggattggctgtatgagcaccgttacaatgcctatccttcagagcaagaaaaagcgttgctgtcccagcaaacacacctgtctacgctacaggtctgtactgggtcatcaacgcccggccgaagcttctt

SEQ ID NO: 18806 - DNA, 405 bp, Homo sapiens
  misc_feature (1)...(405): n = a,t,c or g
gattaccaacaggaagaagctctacttctgatgtactagacatacaaaagcctccactctctcatcagacctttcttaacaaagggcttagtaaatctatgggatttctgtccatcaaagatacacaagatgagaattatttcaaggacattttatcagataattctggacgtgaagattctgaaaatacattctccccttaccagttcaaaactagtggcccagaaaaaaaacccatccctggcattgatgtgctttctaagaagaagatctgggcttcatccatggacttgctttgtacagctgacagagacttctcttcaggagagactgcacatatcgcgttgtcaccctgagcagaacagtgcggcttcactactnctagaaaaaaggaggccngaaact

SEQ ID NO: 18807 - DNA, 346 bp, Homo sapiens
ggagagctagcaccatgagcttcaataccctgtttggttaaaagtatccaggaggaagaaccagggaaagcatgcaagctgcctgtccttcagtccgtgaagcagccttccctccagagatggtttcacggccacggtgtttccagctctcaaggcgaggtgtgtctgatctaggcaggcccttgacgccactgagcccgtctctcaccattttgtggcacagccctgctgtgtcctggaggctgtcctagacccaacgtttctgagtgtgcacagaccctgtagcttaacattcccaaggccagttgcagcttcggcctgacatccccaaggagacctcaccaga

SEQ ID NO: 18808 - DNA, 345 bp, Homo sapiens
gcgaacatatcaaacataaactgaactgatagtctcctaacctgaaacctgcttctatagtcttccccaactaagttattggcaaatacgtccttgcattttctcaggccaaaatcacatcatgatccttggcatttctttctctggtaccccatgccctgtctgcagatctattggcaaaacctcccaacatcttaacagcagctttactaccacacttttccaaacggattacctctagcctgcatgattgcattagtctgcctccctgcttctggcttttacctactcaggctattcccagcacccagcatgacaactttgaaaacaaagcttgccgccacg

SEQ ID NO: 18809 - DNA, 369 bp, Homo sapiens
ctttcgaatatctggacttagacagtcttagcctttggcctctcaagggctctaaatctctatgcacaattttgtgttttcattttggtgtggaaaatctttgtaaattttatcctattgtcagagtagtcatagaaccataaaaggataaagaagcctgatctagatctttgctgctgcttcagagaatcttttcagagagaaataaatgagttgaatatttttcaagactaacattttctgaaactttaagaagaaaaaattttctaacattgtgaacagattaagtagctattttattaaatgctttgattttaattgaggtagtttttttgaaaacacgggaattttagtttggaattaggccaa

SEQ ID NO: 18810 - DNA, 282 bp, Homo sapiens
  misc_feature (1)...(282): n = a,t,c or g
ctttcttggggggtaactgcttgagaacctcttcttttactcttctgagaataaatggctttataatttgnnntgcatgngctatnctctccttttcntatatgctttgctcttctgctacagattanagtgcgganganggagttgccaagcacaaaanccaagtgcctgacatanaggatnanagtgagaaaggtatttatgtaggaggaggcaacantnngagacttgctacctacagggatgttgatgaaatatgtaagtacattntgaataacatga

SEQ ID NO: 18811 - DNA, 323 bp, Homo sapiens
gggtatttcgtggtattaaatatctgtgttcttttcttctctgttgttgaattatggagaaattgagaggggaaagaagacccttccttagaatagttgttactgtgacataatcaccactatatttatgccttcaacatctacgtcttttgataaaaagtcttacagtgctgggcacggtggctcatacctgtaatcccaacactttgggaggccgaggcgggcagatcacttggggtcgggagtttgaaaccagcctggccaacatggtgaaaccctgtctctactgaaaatacaaaaattagccgggcctggtggcagac

SEQ ID NO: 18812 - DNA, 299 bp, Homo sapiens
  misc_feature (1)...(299): n = a,t,c or g
gagcatttggcaagcacatcctgggtgccaggcccaagcaggctggtctcgaactcctgacctcgggtgatccgcccacctcggcctcccaaggtgccgggatgacagctgtgagccaccgcgccccgcccagaagcagaggtgttttaacgggaagacttcaggcttcatcggacggccgggaaggaatcagagcaggggtttcttccgagatggccagtggtcacctganatggancanagagcacctgtggcgggcatnttntntanaanccgnctgtgaccctacngangccctg

SEQ ID NO: 18813 - DNA, 307 bp, Homo sapiens
  misc_feature (1)...(307): n = a,t,c or g
ctcgggtctctttcctaggcatgttcacacagcctttcttcaccaggctcccattcgatgtataacaatacaatagatagtgaccaagttatgcccagctgttcattgttattagattcagttacaatctcatcctatgtccttaattccccattggtttacaacctgaaagatttaaccccagtaagcactatcctgagactggagcctaggtctcctggatgaccatgcctacacttagctgcctactttctaactgatttttggggggccagacttatctnactnattcananttnttttttaa

SEQ ID NO: 18814 - DNA, 384 bp, Homo sapiens
  misc_feature (1)...(384): n = a,t,c or g
cgcggccgcgtcgaccgagcgagggagggggcaggggagccgagttagctcagccaggcggcgacttcggcggcgccacgagagcgggcagcggaggagattgacgtgagtgaattcagatataactcaagcttgttagagggctttttaaaaataaaaagttgattccgtgcatgagagcaagttactgctgcttaccgttcagagacttacaggtgcttgcctgcattgnaataaaggactcatttattgagcangacttatatttatctcttcattttggagagcctaataaactgttattacagtttctctactgactttcaaaaggtttgaagtttgaaagacctttgcaattaaaacagcatgagcacggccataaca

SEQ ID NO: 18815 - DNA, 650 bp, Homo sapiens
  misc_feature (1)...(650): n = a,t,c or g
gtcccacaaagcactttcttaaaccttgagaatctccaagagaaaaatatttggggaaggagggaggaaatatgtcccttgcacaccacccctgaagcacatggcagtaggaaacagcataggattgtatgtgggaggtggataggtcggtgatgtgtggagcggaaaagcaggttggtaaagttcccttcttgggacttattcctggagtcagtggatacaagtagtgcagaaggttcacactgcaaatagtgttctcatctcaaagcaaactatcattccagaaggaaaagtgtgtcagggcaagcagacaacacaatttcctatcagaatatgtccctcaacccccgaaacaaggcttctctcagcctccccaccagtgatggataacagctcctattctcagctgacctgactgagccaacccatgaactcttcactccttggggaagccacctcccatcacacccctgagcanagttaggagggaatctacctcccataaangnctcncctgnanaggnnanaccttgttgcctcnacangggntccctccttgggtcaatncaangnttnngccattgggggattnggaatgnnggtnnccgtggtcccccnnttntcgnnngngcnnntttgtnagcntgctg

SEQ ID NO: 18816 - DNA, 555 bp, Homo sapiens
  misc_feature (1)...(555): n = a,t,c or g
gtgnnnnnnntttgaatcctttnatttgaatcctttgacatganacgaatttaatacgactcactatagggaatttggccctcgaggccaagaattcggcacgaggtgaggtgaaacagatggataagaaggaagcccttttacttttacaatcattttaaattgattgtttctaaagccttgatttatcttattttggacactttcttgccatttaaccttggacaaatgactttatcatctctctcctgctcatttgtttgtgaccaaagattcacaacagtattctaagaattggtgagggtgtttataaatctaaataatattttaggaaaaagtaggaagaatgagtctccttgtttatcacgggtgctatatcatgtgcagatccttctgtcacttcttaacttttgtttggtgtctgttggccacttgtttgctagttatttcaccagacatagaactggtttttaaagaaaggtataaacaaagtgacttcattttggtgaaaaatgcattacagcagaggttacatcttaacgaatttcactttgg

SEQ ID NO: 18817 - DNA, 274 bp, Homo sapiens
gggtagacaatacctagttgtatgttttaaaaataggccattggcttctattttggcctgggtctaggacaaggctcaggtctgcccgatctgtgggcagctcccaacttcctgctttggtataatcgtccatggctaaggcctaattccagacatacttcttgggccctcccctgtgacgtttggggtgtgtggtcagaaagccaagactgattcctgtccttatttagccattactagccaccatcaaacagaggtaacttttggacctttt

SEQ ID NO: 18818 - DNA, 336 bp, Homo sapiens
ggtaaaagcagataaaatatttaatatgtaatttacaatgtattttaccagctcagcatacaggatgtatacagattatatcaaagtagtagacagttacgggcctgtgcaaaccctgcaaaaatagtacttcagatatctgctaattaaaaacaaaaacagtttgctgtttagaagtgatacaatttccactaccacaaaatacaaagggctgcaaaaatgtaaccattccaacaacatatataagttattaaataaagatttgatttgaaagaatataaatgaagactttaagtaggtcttttctacatgcatattattcctcattaaagaaaa

SEQ ID NO: 18819 - DNA, 443 bp, Homo sapiens
  misc_feature (1)...(443): n = a,t,c or g
tttgaancttnagctcctgacatgattacgaatttaatacgactcactatagggaatttggccctcgaggccaagaattcggcacgagggaagtgcgggcatctgacggtgtgctggctgggtcctcggtcacacatgggccccaggaaccagagcaaaaccagggccggcctgcgggctctctcccgctccccacgggcggtctctctcccgctccccacgggtgttctgcgtgtccttaatactgctagtccatacatcctggacatttgtctcttgcctttggattttaagtgcatgatttaaaagaactaacctagtaaaccaggttaggatgttgtcaataaaatgcccttacaatgttgtcaaagactttgctttatggcaggcactcttgcaggggcaatggaagagccaaccctgtgagtanttntaagggatct

SEQ ID NO: 18820 - DNA, 336 bp, Homo sapiens
ggtggcactgaagaaagtctgaagagttgcatattagtaggctcactgagcttgtacttgaccttttcttctagaaagttcttacagctataacctgacaaacaggaaaatgatttttaagcagtttcatagttttaccttgagataatagtatttttcccttcttaaatcattcattctacaaatatcaaatgccctgctttatactatgccctgtgattgcagaatcaagctaagacagactttttttatattaccataaaaaatgttatggcaggaccaggcgtggtggctcacacttgtaatcccagcactttgggaggccgaggcaggtgg

SEQ ID NO: 18821 - DNA, 318 bp, Homo sapiens
  misc_feature (1)...(318): n = a,t,c or g
gtcagcttttagcaacgtgttatgataaacacttcttctgttaatgtccatcagctctttctggtatgtgggctctattaatattccagttgtcacagctcattgtgagtctcctttcacctgagtgcttccttagtttttattgccactgatggctggatgtcagcttcctgaagtggctccttcaaatgaattcccttttttttttnaattcatanangcaagtananataggnaagcgcatgcgtacacacacacntacacacacaccccccncattntganagggaaaattaatgccattggaaccaanggaat

SEQ ID NO: 18822 - DNA, 426 bp, Homo sapiens
gctatgacatgattacgaatttaatacgactcactatagggaatttggccctcgaggccaagaattcggcacgagtttgtcagtgtgcatatacttacatagataacctgcctgagtttttaaaaatccttttgaagttattcaaactctggaattagcattccttaaagaggtcaggcatcttatttttcaggtgagctatttcctattatttatggattattacaggtcttcttaaaagtattcaaatgatagtagaaaggcagatctgggcagggcacggtggctcatgcctgtaatcccaacagtagattaggaggttgaggtgagaggatcgcttgaggccaggagttcaagaccagcctcagcaacatagtgagacgctgtctctacaaaaaaattttaaaaattagctgggtatgctgg

SEQ ID NO: 18823 - DNA, 330 bp, Homo sapiens
agatttctgttaaaattcaaaatccagtctcctcaccgtggactgtatgatcatacctctaaatctcttaccttatcttgtacttcccatcttaaatcaccttgctgaccatgcctgctttcttgctaattctcaatataccgtacttcataccttaactacctcagtgctgttcactctgcctagaacattcatgtgtctccatatggcttgttccctcacttcattgagtgctcagaaatgttacctcctttgcctgtaatcccagtgttttgggaggccaaggcagaaggatcgcttgagaccaggagtttgagaccagcctgggca

SEQ ID NO: 18824 - DNA, 350 bp, Homo sapiens
gaacagtagcaacagctctgaaccaggagaaacacctaccttggagctgggtgaccgaactgcgaaaaaggggaaacgaaccagaaagtttggggtcatctccaggcctcctgccaacaaggcccctgaagaatccaagggcagcgctggctgtgaggtgtccagtgaccccagcactgagctggagaacggccctgaccctgaacttggaaacggccatgtctttcagctagaaaatggcccagattctctcaaggaggtggctggaccccatctagagaggtcagaagtggacagagggacagagcatagaattccaaagacagatgctcctctgaccacaagcaatg

SEQ ID NO: 18825 - DNA, 324 bp, Homo sapiens
gcattggaaagaggattttaaaaatgtttttataatattgaagtatgaaaacatggttatagatggtaacctaattgtttgaaccaagaaggaaattttacagagttctttgtacttcctgttatatacagacaatatagtatagaagaatgtggattctgtaatcaggttgcatgagttaaaataacagctctacaagttaacttctctgtctcactttgatatcagtaaaatgaggatcagagtagtacttattgaggattaagtgagattatgtatgtatgtgtgtatatatatatatagtttctagtccagtgcctggca

SEQ ID NO: 18826 - DNA, 421 bp, Homo sapiens
gctccacattaaagtcaaggaactgtatctctccatctttggatcacatctctgtccccaaatgcttgtgcacactgtggagtctggtgttttctttcctaactccaccaggcccatgcaagtccacatgactcatgagaagagatgagtcgcagctccagtatccctgtgggtttggggaggggtcaggctgtgaataaaccactacgtggctgattttacatccttctctttcaccacaaaaacctcaatttccctttttgtggaaaacaaaaaccctctttcagtgttccatcaaggggactgtggcctttgaattgcacggtgtccctgagaaattttaaagattaatcagcttttttggggagtggctgggagaggccctattcctgccattagggagtagcaggtctccccttct

SEQ ID NO: 18827 - DNA, 499 bp, Homo sapiens
aatagctatgacatgattacgaatttaatacgactcactatagggaatttggccctcgaggccaagaattcggcacgagctggccgatgcccggagagtcctggatgagacggctcgagagcgtgcccggctgcagatagagattgggaagctgagggcagagttggacgaggtcaacaagaggtgagtggtcacggctgggcacgacgtcaccctgatcccggcaccacggggtggacgggggcaggtgggcgctgggctcgtgcggggcatgctctgatacgggcacagcctggagctcacagctcccatcctctctcccccaccagtggctgccacgtcactttttctgttctgaggaaagtgatagatgctcacatcggacagcaggaagcgcagggcagcttaagctcacaagtaaaatctcccgcgagcctcccagagagggcttctggtcagcctgcctgctccttatgtgcacacgcgcttgcacatgctt

SEQ ID NO: 18828 - DNA, 338 bp, Homo sapiens
gcggcacgagcttaagcatagctcttattaaaacagaagggaagactaaagaaacttattattccaatatactagattcaagactctttaataaacagtttgtatttttaaaaagttaatttgacaaagttcacaggcaagataaagggaatgagaaaaacccaaacttggtaaatctgcttttaattaggacatagagttcagtataaataatactctataaacattcttctttatatcaaaggtttggccagactaaaaaaaaggaaaaaacaaaagcagctagtttacaattacacttgcattatgtgaaaaattcagagaaaaagatacccagt

SEQ ID NO: 18829 - DNA, 356 bp, Homo sapiens
  misc_feature (1)...(356): n = a,t,c or g
gctggaagaaagtggtataagttatggtctctggccttgaagagcctgcttttgagttgtgatctgtacttatatgaaggtagacctaagtttgaagctctgtaggctggtgccaaatgagcctaagaagttcagatcgggggtaatcattagtagctgaaaagcccggaagcttttacagaactgttgtgggtatttgagccaggcacttaaagatcagtgagtggcacattcccagaaggaaaacacttttaatacagatgtggagttagaagtgtcgctggcagtttcagtgggtagcttgtcactttgagttggtgggtattggaatgtggaatgggaaanaaagttggaaa

SEQ ID NO: 18830 - DNA, 417 bp, Homo sapiens
accagctatgacatgattacgaatttaataccgactcactatagggaatttggccctcgaggccaagaattcggcacgaggctaaacatcccatagaatatcttagacaaagaaaattacagtaagtagagaaatggatcaaagagtggctattcttggactctctactttccaggtctttttggctagagaactctttttctaactttgttgcctggctcttggcagtcaatgtccaaagtagtgcattgagctgccccccaaaaggggcacagtttgtaaggaaaccatatgccctatgggacctcatgggatgacactcagttagtacataaggatctcttggaagggagctgcctttatgtcctctaaaccaggtcatctcttatcagttaaatcctggtgctgactagtaca

SEQ ID NO: 18831 - DNA, 369 bp, Homo sapiens
ttcaaatgctcttttccctataacctcttttctcaccaaaaaggagataaatttgaaaacagataaatgtaacaaccagtcaaagaagcaggggaaaagtaagctcctccaaagttgcttgcagtgctggaaatagatctcatttttaggttttctcttcgttccagataccaaataaatgggacagagaataaaatttttgttaaaatatgtgctcatctcctaagtagctcttcagagtctgaccgtaagtaaaaacacacagaattgtgttgactgggggaggtgaatcacaaaaaagttacgaggagtttaagagttaaatgtcgacgcggccgcgaattccagatctatgaatcgtagatactg

SEQ ID NO: 18832 - DNA, 461 bp, Homo sapiens
  misc_feature (1)...(461): n = a,t,c or g
tttgannncntttgaaaaccgttatgacatgattacgaatttaatacgactcactatagggaatttggccctcgaggccaagaattcggcacgagaaagattttcttttattgggcccttagggtgatgagatgccctctgaatttgtagtgaagaggggttgtagcttggtcacaaggctgctgggtctccattaggtttcatcttcagttggcttgttacaggggcttgggtagttgtaatttccattttatttttggacagactgcatatccttcgggactttgctctgtagggcagacactagggcatgtttttgcagtcaggtctgcagatgctgggccttaaatcaggatgtggatgagtgtggctttcagtgagtaccagagagcatttcctcaggtaactgtgtgggtttctatataggcaggactgaccatgaactgtggctcgtgtaacgg

SEQ ID NO: 18833 - DNA, 615 bp, Homo sapiens
cgttctcacactgctctacttagactcaatagcagcaccattaagtatctagactttgtctttgctgtgaaaaatgaaaaccgattttatctgaaggaagtgaacatcagcatgtatttggttaatggctccgttttcagcattgcaaataacaatctcagctactgggatgcccccctgggaagttcttatatgtgcaacaaagagcagactgtttcagtgtctggagcatttcagataaatacctttgatctaagggttcagcctttcaatgtgacacaaggaaagtattctacagctcaagactgcagtgcagatgacgacaacttccttgtgcccatagcggtgggagctgccttggcaggagtacttattctagtgttgctggcttattttattggtctcaagcaccatcatgctggatatgagcaattttagaatctgcaacctgattgattatataaaaatacatgcaaataacaagattttcttacctctcagttgttgaaacactttgcttcttaaaattgatatgttgaaactttaattcttttatcaatcccagcattttgagatcagtctttattaataaaacctgttctctttgaaaaaaaa

SEQ ID NO: 18834 - DNA, 375 bp, Homo sapiens
ctggagtgcctctccagtattaaataaaatgtgctaagcattatctagagcaaagatttagcccatcctcccgaagagcccatgctcaacaaaaaaacacagacctcagccgggcgcggaggcttatgcctgtaatcccagcactatcggaggccagggcgggcggatcacctgcattcaggagttcaagaccagcatgaccaacatggagaaaccccgtctctactggaagtacaaaattggccaggcctggaggcgcatgcctgtggtcccggctgcttgggaggctgaggcaggagagtcgcttgaacctgggaggcggatgttgtggatacaatgtctctttgctatatgaccttgaaaatcttccggcat

SEQ ID NO: 18835 - DNA, 458 bp, Homo sapiens
  misc_feature (1)...(458): n = a,t,c or g
gccaaaatagtaaacattgcaggcttttcatctttatagttagaccaagtttattgctgaacaacttgggacgataattgctaatgtattttgcattttgatactaactctggtttcacttttattttatatattttattttattttattggagacagagtctcgctctgtcaccagtctggagtgcagtggcactatctcagctcactgcagcctccacctcccgggttcaagcaattctcctgcctcagcttcctgagtagctaggattacaggcgtgtgccaccatgcccagctaatttttgtatttatagtagagatggggttttgccatgtcggtcaagctaagtctcaaaacgccctcaggtgattcacccacctcggcctcctagagtattgggattataggcatgagccaccgngcctggggctaagttcactttaaatattatgggatt

SEQ ID NO: 18836 - DNA, 438 bp, Homo sapiens
gaggaaacttaatattctgactcactgaattcttccagcggaaaacctccactctatagagaccctgaaattagtaaggatgttcattaaagccattgtgtttttttagcgtcatgcactgcactgcccaagagccagaggacaccctgctcacctggtccaggcctggctgtggtacccctgcccaccatggctgagtgggagggcgagctgtcattgagcagtgcaaactactcccctggctcagagcctgtacccacaccatcctctcacgcctgggccaggcaacctttgctgacttagcttccacagaacatttgttttctgctttgtagtgtactgcctccacagaaatgaatggagaattgaacagctggagaaaggttttcaccatccagaattcaccagtgcatctcattatctggctggaaggatcaa

SEQ ID NO: 18837 - DNA, 525 bp, Homo sapiens
  misc_feature (1)...(525): n = a,t,c or g
tgggaacncctatgacatgattacgaatttaatacgactcactatagggaatttggccctcgaggccaagaattcggcacgagcaaattctttgttggttatgtgtgatttaacaaagtaccttttttggcttatatttttgtgcttaagaattttttcttacctctcattcataaggataattcacccaaatttccctataaaagtggaataattttgccttttagaagcctggagttgattctgtggatttttggagaagggatttaattatatttattttccatgtggggaaccctctgtcccacagcgacttcataagaagtctttcctggacaggcacggtggctcacacctgtaatcccagcactttgggaggccgaggagggttgatcacgaggtcaggagatcgagactgtcctggctaacacggngaaaccctgtctntactaannatacnnnnnnatactgggcgtggnggcngacgcctgnggnncantctnnngangctgnngcnnganaatg

SEQ ID NO: 18838 - DNA, 387 bp, Homo sapiens
gctgcctatgcctatgataaggtagcagtctgcattcttatggccattagatgttacaaactccttgcctctaaagtcagatcatgaagggataggtgttcatctaaggttacagttatgttaccgaaacacaaaactgccaaaatcttactctgctgttatgaatgtttaccatcagcattattttatcatttaatatgtgctcactgattgttaactgtagcttcagcgcgtgccaagcagttgacttaataggatcatcttgtgaatttgtttacgtgatgccaagcatcaagtcatgttttctttagtgtgtgtgcttacacaggtgttaaacagtttttctctattttaaactgagccttctttttaatatattcccgaaga

SEQ ID NO: 18839 - DNA, 384 bp, Homo sapiens
  misc_feature (1)...(384): n = a,t,c or g
gaaggctttgtgcaccatctcctgcctgatcgtgagaccgatcaggtccctctgagatacgcttcatgggagtaggtattcctgaatagcgttattactgacagtcacagtccgggttgtcatccactcactgcctgtcttcccttttagactgtgcgatccatgagggcagtgccccgtccttgcacctancacagtgcctggcattgctcaagtcatattggctaaatgagggattgaagggaccgtggggccagtgactgtcacttggtatgagtgtcactganaaatgtcaattcttccaagcaccttaattgttctcctcctgttggcatcttcncttggcacacagcagccacttacgctggggctttagacctgtgg

SEQ ID NO: 18840 - DNA, 412 bp, Homo sapiens
gttgagacagagtctcactctgtagtccagcctagagtgcagtggcgcaatctcggctcactcactgcaacctccgcctcccggttcaagcgattttcccgcttcagcctctggagtagcttggactgcaggcgcgcacaaccatgcccggttaatttgttcccttctatttctcacattaaatttgccttacaggagccattcattttggctgtttagcttggttttctgttcctcaaactactgtttttttttggtttttccaagacagggtctcactgtctcatgcagctggagtgcagtggcaagatctcggctcactgcaacctccgcctcccggttcaaacgattttcccgcctcggcctccggagtagctgggactacaggtgtgtgccaccacgcctgcactcg

SEQ ID NO: 18841 - DNA, 449 bp, Homo sapiens
ggtccttggctcacaaccctccaatgacttcccatcctatctcaatgtaaaagcccaatccttcccaggactacacggcttcacacaccttggctagggagctgacccatctgctgctattgtctgcttctctcaactgctctagccacactggcgccctcactgggcttctagcacatcaggctccttcctaccacagggcctttgcactagctacctcttgcagaacattcttcccccagagaccctcacttcattcaagtgtctactcagatgtcaccttctcagtgaattcttctctgacttattttaaaactggactctctatacccatagcccctaacccccatccctagcaccagtgagcacctagaacagtgctggcatgcagtaagtactcactcaatatctaacgatgaataaaggaagcactgttttacagatagtag

SEQ ID NO: 18842 - DNA, 326 bp, Homo sapiens
  misc_feature (1)...(326): n = a,t,c or g
gggatcacttcactatttagtatctgaactctgtgcattattggccccagtgccttctctcatgttttctctttcttagcattattttcctttttccttgaacctccttaagttgcctttgtcttttatagtgccagcaaatttgtaccttctggaggcttttcaagattttttcagagtgagactccatctcaaaaaaaaaaattttcttgccccacccatactcagcctttgactcttttagtgtttaatagttngattaattgttaagttgnggncataaatattaagattatggagtttaatataagtcctaaaaagcttag

SEQ ID NO: 18843 - DNA, 341 bp, Homo sapiens
gttttcaaaccgcagctccctagagtcacagacagtttagcagagatgtctcagggactctgtagggggaaagaggatgtcaaagtgacaggatgagagctctgggcctacatttctatgccagtttcaaccacaatactgttatctctctcacgtactggcattctatgttaaaatatcctttttcacatttctttcaaatggcagaaactctatttttcaatctccagattacatcaacattggaagtctgtgattgggaaacagcagtgaacacctggcattagattgcctgggttcaaatccagctctaccacttaataggtaagttctgtggcctt

SEQ ID NO: 18844 - DNA, 344 bp, Homo sapiens
  misc_feature (1)...(344): n = a,t,c or g
gaataatgaggagaaaataatagggacagcatatccaaactccctgctgaccatggctcctgcttagagaaactgagtgagaaactatatggcaaagagtctttgaaggtgagacatatcctgcagcactcttggtgatcttgagaggctgggcagactatccaaaaacggtgactggctcaaaagccttacccaactggacattcagtactggaagacaactggctgatttcatcagttctctgttagagaagactatttattgttaatggaaaataagataagcagaaatgtgtacacattaagaagacnaaattaggaagcccgggtagcagaagacatgt

SEQ ID NO: 18845 - DNA, 378 bp, Homo sapiens
gaactggctatgtgactttggacaaagtgactggatctcttaaaatgcatttgcctgcttttaaaggaactgaattcgataactagttaggtttcttccagctctaaaacactgattctcacctcttgtgtggtcagtgaggaaatgtctgccacttcctggccaagttcaaatggacattgccttttaagagatggaaccctcttctctttcgtcaggcagctccctagaggctgggctaaggacagccagaaataaagtgcaattacctgtgatgtgctgccggcttctgcttttgcagccacagtttgtaattagctcaggaatgaacacatcatcatgacagactgaacagtaaaacaaggctctggacaatta

SEQ ID NO: 18846 - DNA, 449 bp, Homo sapiens
ctttggaaccccccttgaaacaccttgactgattacgaatttaatacgactcctatagggaatttggccctcgaggccaagaattcggcacgagaatatatgcagaaataaaaccatattcagaattatttcttttagaattagagtaatcatgctttagaaaaaactgcatttcttatctcttttaatgtgtataaaataaacttgaaatttcactttgggttaccatagaaaatagttgatcatatatattttgtgttatatgtattacacactgtgctcttaaagcaagccagataaaagaaaatgttattaagaaaatcataaaggccaggcgtggtggctcatgcctgtaatcccagaactttgggaggccaaggtgggtgtatcacctgaggtcaggagttcaagaccagcctggccaacatggtgaaacctcatctctaata

SEQ ID NO: 18847 - DNA, 425 bp, Homo sapiens
gggcattttgtacacagtggcaactggatgggatttgtggtctggggaggttttcttttccaaccctatttgttccagcaccctgaaggttggatgctggtaagtgcatctgctgtgtcttttatgaggtaatgtgcataccagggtactggagggcagcggcagacagagcctggccgcctgggaggcgacgactggtcctgcatgaggccgagaagccacctgtggatggttgacctgccttgggcttaggtagtagagtctgcagacctgtgggcctggcccggagaggacctcgtgagtcttctgacatggactctgaagcctcaaaccaagagaggtgtctgtctagccctgatagtcgggcagcttaaaggagtggggaggagaactcagcctgagttcagtcaagattctctggatgg

SEQ ID NO: 18848 - DNA, 415 bp, Homo sapiens
cttgacatgattacgaatttaatacgactcactatagggaatttggccctcgaggccaagaattcggcacgagctataatactatttttgcttgcaagtatataccatattggccctcatgtattttaaataagcattcatttaagggccatggattctaatacagattctatgtcaaaatgtattctgaattagaaaagtcagttttataaacatagctgtttgtaaagaatcttgttccaccatacagtaactttttctttcttctaatggtataggcacatctcccccgcctcatcttaaccctgtaactaaatataatttctttatggaatgatcactgtctattattctctgtccaacatttatataagcaacaaaagataaaatttttaaaactgaaagccattgcctt

SEQ ID NO: 18849 - DNA, 413 bp, Homo sapiens
gggagaggcacccaaatgccccaatagcagtgcggagtcttcatgcacaaacaaaagtgcttcaagcttcaaaaattcctcccagggctgcaaattaacaaacttgcaggcggctgcagctcagtgccatgccaattctttacctttgaactccacccctcagcttgataatagtctgacagaacattcaatggacaatgatattaaaatgcacgtggcgcctttagaagttcagtttcgaacaaatgtgcactcaagccgccaccataaaaacagaagtaaaggacaccgggcaagccgactcacagtcctgagagaatatgcctacgatgtcccaacgagcgtggaaggaagcgtgcagaacggcttacctaaaagccggctgggcaataacgaaggacactcgaggagcc

SEQ ID NO: 18850 - DNA, 325 bp, Homo sapiens
tcattaattttctctattgcttttttccctccattttgtttgtctttaatctttaatatttctttccttctgctacctttgagtgtagtttgctcttcttttactagttccttaagttatttatttatttatttatttttgagacggagtcttgctctgttgccaggttggagtgcagtggtgcaatctcggctcactgcactgcaacctccacctcccgcgttcaagtgattttcttgcctcagcctcccgggtggctgggactacaggggtgtgccaccacgaccagctaatttttgtatttttagaagagacaggatttcgc

SEQ ID NO: 18851 - DNA, 375 bp, Homo sapiens
  misc_feature (1)...(375): n = a,t,c or g
ggtgttcctcactggagtgtaagtgtgacaggtacagggactgctgcctctgctgttcatcagtgtatcccaagcacttagaatagtaccagccacatggtgtatctctaacacatgtttgtagatgaatgaataaatgatttgctgtaatgtttcacgtgcatgaccatttttctcaggggattttatactgagtgtttttaagtatccctctcattcttgagattttgccgttctgattctgtctggtccataacccacatactgcaaaacagacaggttttcatgaatcaattaatatagcaaacctttttgcatgtgtgtgtgantctataatttncctancacctganaatccnctttggcggttggatg

SEQ ID NO: 18852 - DNA, 448 bp, Homo sapiens
gcagccaacgaagtacccttacataccaaagaaataattatgctctgaacacaacagctacctacgcggagccctacaggcctatacaataccgagtgcaagagtgcaattataacaggcttcagcatgcagtgccggctgatgatggcaccacaagatccccatcaatagacagcattcagaaggaccccagggagtttgcctggcgtgatcctgagttgcctgaggtcattcacatgcttcagcaccagttcccatctgttcaggcaaatgcagcggcctacctgcagcacctgtgctttggtgacaacaaagtgaagaatggaggtgtgtaggttagggggaatcaagcatctggttgaccttctggacccaagagtttttggaagttcagaagaatgctttgggggcccttcgaaaacctcgttttggcaagtctacagaatga

SEQ ID NO: 18853 - DNA, 472 bp, Homo sapiens
  misc_feature (1)...(472): n = a,t,c or g
ctatgnanaccgttatgactgattacgaatttaatacgactcactatagggaatttggccctcgaggccaagaattcggcacgagcacacacagacatatgcactcgatgtaaaagtggcttctgaggcccataaaaaagataatgaaggaggtcttgaagagatttgggaagattggtaaagttttcctgcagttagcatttcaaaggaccctgaaggatagataggatttcagcccctttatttctctgctcctgcttaactacattatagtaaaaatgctgtaaaagaatatctgggccaggtgcagtggctcaggactgtaatcccagcactttgggaggccaaggtgggcagatcacgaggtcaagagattgagaccatgctggctaacatggcgaaaccccatctctactaaaaatacaaaaattagctgggcttggtggtgcgtgccagtagtcccagctactcg

SEQ ID NO: 18854 - DNA, 78 bp, Homo sapiens
  misc_feature (1)...(78): n = a,t,c or g
gagatgataatgggtgagaagcaggctggtgagactgggctgaggttggagaagggcagcccggnggcactgntgaag

SEQ ID NO: 18855 - DNA, 503 bp, Homo sapiens
  misc_feature (1)...(503): n = a,t,c or g
aattgaancccatcagctatgacatgattacgaatttaatacgactcactatagggaatttggccctcgaggccaagaattcggcacgagcaccttattgcagtaaagatatatggatgcttataaggaggaagtgttagaatgttgtaggatttcagccttgtacccattttacattagagttaaccttagacctgagtgctcccatgtgtgggtgccctccttgcttggggatgcgatctgccaatatttgcctcagttttgtcacccactctctatgggtacacacttctgtgctttgctctatcccagcagttattttgtccttgggttaacagttcctaaaaaaaatgacatattccatggtaaaattgaagtccatataaatggggtaatatgtgaaattcttttctcaccgctatgtttgtgagatttattcatgtgttctatgtagctgttcttttttgagcatttttgtttattttatgaatacaccatatgtg

SEQ ID NO: 18856 - DNA, 388 bp, Homo sapiens
gggggtgtcaggtgtaaaattgcagaagtcatagttgataaaaaatgggaagaaaaatgctggaatattgacatgttttcagtgaaataaaagacaaaagttgataaccaggggcaagtctagcagagaaaaggaaggattctttggagtttgttttctggttgttgtgtattaagataaaaaaaatacgatgtattaagttaggagtggctcaacataaacaatacagagcaaagctctcaggtgtcaggaaatgatgggatgaaaagttacttgattatgggttataaagatcagcacaccttcccttgcaattattttttcagaaaataaaatatcaggttaagaagaataaatccaagagattccatcttttcaatgaagccaa

SEQ ID NO: 18857 - DNA, 352 bp, Homo sapiens
  misc_feature (1)...(352): n = a,t,c or g
ggcgagcgttttgtttatttataactgatgtccccatagcgagtgcttggcaaagaagtgaaccttgctggataccaacctgcagggggagctggatgtccccactgaacactgaccctcaaatgccgggagagaaaaccccaattatgcatgttccgagggatgccattcgtcaaaatgaatttatggtcttcaaattctgaattctgttcagcagatttctggtcgacgcggccgcgaattccagatctatgaatcgtagatactgaaaaaccccgcaagttcacttcaactgtgcatcgtgcaccatctcaatttctttcatttatacatcgttntgccttcttttatg

SEQ ID NO: 18858 - DNA, 532 bp, Homo sapiens
tttggctttgaatacccgttatgacatgattacgaatttaatacgactcactatagggaatttggccctcgaggccaagaattcggcacgagaacggaatcgaacaatgagaacacatggacacaggaaggggaacatcacacaccggggacggttgtggtgtcgggggagaggggagggatagcattaggagatgtacctaatgctaaatgacgagttaatgggtgcagcacaccaacatggcacatgtatacatatgtaacaaacctgcacgttgtgtacatgtaccctaaaacttaaagtataataataataaaaaaagagttaagatcttgcataaagaatatacaaaatgatcagtgagaagaagaaagtctaaaaataaacccacacttatatggtcaactgaatttcaattaaaaattctaaaacaaatcaaggaaaaaggaaaattttctcagtaaatggtattagaaaaatttgaataatcttctggggaaaaattaacttagaccatgtcctccaatatata

SEQ ID NO: 18859 - DNA, 323 bp, Homo sapiens
  misc_feature (1)...(323): n = a,t,c or g
cttggttgcttaattataacattaataaatgtattaacctgaagttaattttgcaagttactgtctataagcagtttttcttttaaataactgggatatacaatatgtaaatttgttaatgtaaagatagaggtgctaagaaaactgaaagctggaatgctaaaattgctaatagcttgtgataatgcatcaggctcagttggccatcattgcataatacctaggaaaaaaaaaaanccagtntgngaaacaaagtttaanagtaaaanaaaagcttttancgactgaaatgtttgaaanagncncctttggatcaanatcat

SEQ ID NO: 18860 - DNA, 366 bp, Homo sapiens
gcatagggcgtggcgtcatacgtggccctcaggtttctcttcttccattgcttgactgtctgttcctttttcattagtgaccccttctgaagtcttcttgcccattgctttattggcctcttccttggcatcctgctctgcaaacttcttgaacatgttggcgtatatcctgcggtcccgctcgttgtgctccttggcctttttctggcacatggagatctgcagtcttgcagccttattctgggggtttacttccagcactttctcaaagtcacccttggctgactcaaactcgttcatgagcagctgggcttcacccctcctatacaagcctttctcattggcactgtccagtccaagggcctt

SEQ ID NO: 18861 - DNA, 458 bp, Homo sapiens
aatttgaaacccttgacatgattacgaatttaatacgactcactatagggaatttggccctcgaggccaagaattcggcacgagagtaatttgccattacttaacatttcattaaatgtatgtttccaaaattatatttgttcttgagaccttttgagtgatcacagtttctgctattctccataaggcctcagtttgacccagtgatgaaatcttgaataaaacacagaggaatgtgtttgtatttgtaatgcttcccttgcaggtgaaatggccaccagacccaggctttctggaatgcattcattttctgcagttgaagggacgatcccggatctgaaagaaagagccacagtgactccaagagtggagccagggcatgctggacactgcatagctatggccacgtgtgtcacctccgagggagatgtgagagaaacacagagggatcgcttgtg

SEQ ID NO: 18862 - DNA, 379 bp, Homo sapiens
gtgcaaaaccatacctgctccatgcaaaaccaaaacttcaagactctaaaaccatgccagtctccaaaacatacccttttctgtagacacatttattttattcttgtttcatgaatacattttacttcaacatctctgcctttgttcatattgtatttctttgtggaatgacctctctttctccttccttctatccaaatcctattcatcttcaggacctggcataagtcccacctccctgtgaagccttttcggaccacagcagccttttcctgactttagtgaagttcccacagactgaatcacacctcatcttgcattgcttccttttcccccatgtgtttttcttgttctcacaactatattaactcttgggggg

SEQ ID NO: 18863 - DNA, 484 bp, Homo sapiens
cgaatttaatacgactcactatagggaatttggccctcgaggccaagaattcggcacgagttcaaagagggaattttgatttcttgttaatgtgcttcgtttgtgttttgtttattcttatggaaaatctgtgggaattagagtttttcctctgtgtgctggattaggatgacctatagaaagtgaatcacaaagttactttctctgtggttgttggacagtctgacctctccagtgttgttacacactgatattagctgtatttttaaatttttttaaaaggttgtagacaggaaattgtataggaagttccacaatgaccctgtaactgcttttaagagaagtcagaacacaagagtacaactgaaggatgtagtcagttctcaggacttgattagaatctcttttgactttgttttgaaaacagagaaactaagtaaccctaaattaggatataccacatattttatcttttacccaaatt

SEQ ID NO: 18864 - DNA, 518 bp, Homo sapiens
  misc_feature (1)...(518): n = a,t,c or g
nnnnntttgnnnnnttgannccanagctatgacatgattacgaatttaatacgactcactatagggaatttggccctcgaggccaagaattcggcacgagcaccatcgcccttctggagattcctctcacagtcactcaccctgttgtccgcaatgccctgttttgcctggagtcagcctggaagacagcacaagaaggggaccatggcagccatgtatataccaaagcactgctggcctatgcttttgccctggcaggtaaccaggacaagaggaaggaagtactcaagtcacttaatgaggaagctgtgaagaaagacaactctgtccattgggagcgccctcagaaacccaaggcaccagtggggcatttttacgaaccccaggctccctctgctgaggtggagatgacatcctatgtgctcctcgcttatctcacggcccagccagccccaacctcggaggacctgacctctgcaaccaacatcgtgaagtggatcacgaagcagcagaatgcc

SEQ ID NO: 18865 - DNA, 346 bp, Homo sapiens
gaaagttatggagcgtacagcattgaaaggaatgaggcattctgttggaattattcatttaagcatatgggtattggcgtcccttttctaaaaccggatcctctcccttatttctcatttttctataacactattataataaattcacatggaaaagtacaaggatgagcaattttttactttagaaatgtttcaaaaggggaggtaaacttgatggttatctgtctgaagggtgacgcactatagtggcatgtgagaatgaggccagaggtaatcatcagttttgaaattgttctttcaacaaattcataatgcatataaagtaactcgtgcacacatttatggc

SEQ ID NO: 18866 - DNA, 335 bp, Homo sapiens
  misc_feature (1)...(335): n = a,t,c or g
gatgaactgaggatcagccggaagagaaaatgaagaccccagagacatttattggggagtaggatgtggctgagtgcttttttttttggccagactancggattcagtcctggaanagagtntcntataatgagacccacaggcactggcncccttgggttggcantanaaggngacatggantggagaaaaccaagattccanatggggatagtaactaaaaggtgcgtcnacncggccgcaanttccagatttatgaatcgtanatnctgaaaaaccccccangttcacttcaactgtgcntcgtgcnccatctcantttctttcatttatcc

SEQ ID NO: 18867 - DNA, 396 bp, Homo sapiens
gcaagagtgtaatggaggcacacatgttagaaagtgcccacattcttgtgttacgaatggaccttttcattgggataatgggcctgtttcctatttccacagggtataggatcctgattaaccagagtttccaagatgaactcaaagtactggaaaaaatgttctgttaatacttttcatgagatagttattaccatcatatactgaaatagatacaaactcatgggaaagccttgttctgtgtgatccaataataaaatcaattagcactgctacttaattatcagcatgtcagacagatgagcataccaaacagagggttgatgggcagaagaaattgaattggaaacaacacacggggctgctgagatgtttaggcctcttagctttagggcg

SEQ ID NO: 18868 - DNA, 342 bp, Homo sapiens
tttaagacgttctcagaaaatacatttcctcctcttcataggctacagcaggaaaataatgttttttaatcagcatatcagtgttagatataacgtgttattattctctaaaagagataaataaaattgttagtttggaaataacgatgtctttacaaggttaaaaggaaaaccgagtgttaaaacaagctcagaagcagtttctgaagcttgggttttttttgtttgttttcaataaaaacttaggagtagcgccctatggtattttgagaggagcatttattccaacaagaggaaaaactgtatttggtattgattagtactcattcctctcaaaactct

SEQ ID NO: 18869 - DNA, 283 bp, Homo sapiens
ctgtgacacacctagatgcgtgttacttcaattaaaattctcaaatttaattttgatttgcttcagcagggaaaatattctcaataatgtaaaataattaaggtctatacatgggttgtatttttctggttcacaacagcacaaagtgtctttcatttttttgttggttttcttttaagatcttttttaccctgaagtcggtgaatacttttctagtttatttgatactctttctgtgtatatattaagcttttgctgtagattgcctagtaaaattactaag

SEQ ID NO: 18870 - DNA, 681 bp, Homo sapiens
  misc_feature (1)...(681): n = a,t,c or g
atttggccctcgaggccaagaattcggcacgagttcaatcctggagcacatgagatttgagcccgaacaaacccacaggactctacatcttcttcaggatgactcacatccctgagaggagagactgttacctgaagtttgcatgaggtagacacgaatggcattggcggcagcaccacacagaaacacggcactgagccctaggcagaggcgggtcaggttgtcgctgtagtccacagtggggttggtatagatgacatcaatgatcttccccaggaagaaaggggcagacatggagataacactggacatcgtgagaaatccaaccgcagctagaaaacacaagcactctcaatgttcaggttgcttcagcaaaggggctgcggtgctgagtccaggaggcttccttgccaaataagctgttgtcagagtatgcgttgatctcagtctctagcagtttcctcccttttgctcctcgatctctgactcaagggaagaaccaaatggttccaggtgagaacaagcaggttgactaaggaagtgagtgatcatatctgaatcagagaagatgacttcttagtctgatctcgtgccgaattcttggcctcgagggccaaattccctatagtgagtcgtattaaattcgtaatcatgtcatagntgnnnttcaatggnntccaa

SEQ ID NO: 18871 - DNA, 457 bp, Homo sapiens
  misc_feature (1)...(457): n = a,t,c or g
tganaccgttatgactgattacgaatttaatacgactcactatagggaatttggccctcgaggccaagaattcggcacgaggaggaataaatacaatgaatacatgcaatccatttagaacatgtatgttaagttgaatcacaggcaattgctgttttggtggatctaaaatgaatattgtcagggccaggtgcggtggctcatgcctgtaatctcagcactttgagaggccgaggcgggcagatcacttgaggtcaggagttcgagatcagcctggccaacatggtgaaaccccatctccactaaatataaaaattagcctggcatggtggcatgcctataatcctagctactcagaaggctgaggcacgagaatttcttgaacctgagaggcagaggctgaagtgagctcagactgcactccagcctggacagcaaagtgagactccatctcaat

SEQ ID NO: 18872 - DNA, 338 bp, Homo sapiens
ggttgtatggatgaacagcctcaaaaaaatgaggctttgcaaaggagtgggcagttctgaagccacaatggcaggaacaacaaagtatctccaacgtttacatttatgataacatgataaagcttgtcaacatttattctttagtgttgtgcttggaacatcacattgctccgattatgccaatggctatcactttatggtaaaacctgaggaagaccagattatggaaggtaaagtggtaggaataaggtttttctcctgaacactgaacatattataaacaggaaagaaccaggacaagagattgaaattttaagaaagggattaagagatgggtc

SEQ ID NO: 18873 - DNA, 342 bp, Homo sapiens
gaggactacagacctagatttccccttaaaaagatccttctcctgcagttctgggacgggcatgggtggcaagacaggaaggaagcaggcggcaaattcagtgcagggctggtaaagcacgagtatgtgcgcgcacacgctcagctgcatgggtggggacggggatgggaggggagctgcctggatcctgggatttcaggaatacttgacgggcttatttaaggctctgatgtctctttctaactgcatacaccgtttgagaataaagctatggaaaatgctgttgttatactgtctgccagaatcttgtgctgtttttcgaggtggttttcttttctttga

SEQ ID NO: 18874 - DNA, 360 bp, Homo sapiens
  misc_feature (1)...(360): n = a,t,c or g
gggtgaatgtggaagactatgggtccagcctggaggaggacatccaagcagacacaagtggctacctggagaggatcctggtgtgcctcctgcagggcagcagggatgatgtgagcagctttgtggacccggcactggccctccaagatgcacaggatctgtatgcggcaggccanaaaaattcgtgggaactgatgagatgaaattcatcaccatcctgtgcacgcgcagtgccactcacctgctgagagtgtttgaagagtatgagaaaattgccaacaagagcattgaggacagcatcaagagtgagacccatggctcactggaggaggccatgctcactgtggtgaaatgcaccca

SEQ ID NO: 18875 - DNA, 324 bp, Homo sapiens
gcgagatcaaggaaggcatccagtacgtgttccagaccaggaacccactcacactggtcatctctggctcgggacactgtgccctggaggccgccctggtcaatgtgctggagcctggggactccttcctggttggggccaatggcatttgggggcagcgagccgtggacatcggggagcgcataggagcccgagtgcacccgatgaccaaggaccctggaggccactacacactgcaggaggtggaggagggcctggcccagcacaagccagtgctgctgttcttaacccacggggagtcgtccaccggcgtgctgcagccct

SEQ ID NO: 18876 - DNA, 455 bp, Homo sapiens
tttgaaggcctgatgtatataactatctattcgatgatgaagataccccaccaaacccaaaaaaagagatctctcgaggatccgaattgcggccgcgtcgacatcatttggcttttcatatgctcatgttgccaaaaaggagtaagtagtaaattattcctttatcttagtggagacatagttcatcatgttcaaattatcagtattataacatttaaaaaatctggaaattatcctgtcatcggaagacaaaacaatcttagaattgttacttatatttaagacatatgtttcacactggcaggttctagttataaaattagggcttgtttttccagttgaacaatgtatttgtttaagggaggactcccaaaacaattaagtcactcagagtgcttctggaatctggctttatgaactttgatccaaatcataacaatgctagttaagatgcc

SEQ ID NO: 18877 - DNA, 460 bp, Homo sapiens
  misc_feature (1)...(460): n = a,t,c or g
ggtnnnnnnnnattggaatctttgactgattacgaatttaatacgactcactatagggaatttggccctcgaggccaagaattcggcacgagcggcacgaggtagctgtacacctgatctcgaagaaatataacttccctgtttaaagcccttcctagtgctcttaaaataagacccaaagacttcccaaatgtgccagggcccggcattatttacgtaacccccggctgctgtttgcttggcttgctaacttttctacaaagtttctggccttacttctgttccttcaccaccccaagcacacgccctcctgcctgggaccctcttcacctttgtcctgctgtgccagctccttcttatcgcctaggtgtcagctcaatcatcacctcctttgcaaatcttccttgacccctagacctccctttcacaaagtaccttgagtttacactttgatgagtgc

SEQ ID NO: 18878 - DNA, 331 bp, Homo sapiens
  misc_feature (1)...(331): n = a,t,c or g
ggaacatttagctgtatgtagttttcaaaaataatgccaccaaaaaaaaagagaatctcagattggcttgaaattctgccataaatgccttataaaacacacacctgtagaatttcagatgagattaaagcactagctaaaattttttgttgttttgtgtgttccatgctttaagtaaaacactcagatttgctgtgaacactatgaacacagaaaaaaaaaaagacccaattnggnaatacttcccttcgnagnancttttcccaacatgcagcttcagcctgggttcaccaccacataccccagcattnttctgcatcgcccacagctc

SEQ ID NO: 18879 - DNA, 467 bp, Homo sapiens
  misc_feature (1)...(467): n = a,t,c or g
ccagttttgaccngattacgaatttaatacgactcactatagggaatttggccctcgaggccaagaattcggcacgagcggcacgagggtgtttattggagttatgtgcctagttctgtgctagagcctgtggaagataccaaagaactgaaatacccagcctctgacctagtcactgtacaagagttaggagtgagaattctatcaaaggcacattcttatcacaataagtctgcaggatctctatgactactgcaaagaaacaacatgcattgtgctatatggcttgagaatattgattaaaacttcagttttgatgttgtaaaagcctgccatatctaatggtttccagtgtttctcgttcattcttttcaaacatgattcccaaatttggttagggcaaagctaaccctgaacattgagtctcatatccaaatcttatcagaagtatcaaaacttcctggttg

SEQ ID NO: 18880 - DNA, 357 bp, Homo sapiens
gttttgtagagacggggtttcaccatgttggccagtctggtcttgaactttgacctcaaatgatccgcccacctcagcctcccaaagtgcaactgcaatagctttctaactggctcccctacagctaccctgaccatcatttcactcccttccaccctccttagagttatctttttaaaaacacaaatatggatattttactgccatatttaaaaacacgatgatctcccagattccccaacctactacatttctgacctttcatctccacatgctcctggctatcctacgcccagttcacaccctagttaattatggtgaagtccttccccttccttcttacataaaccatcacat

SEQ ID NO: 18881 - DNA, 452 bp, Homo sapiens
gggaattcacaactactcagactgggaaaatacagattggttcaaagaaaccaaaaaccagagtgtccctcttagctgctgcagagagactgccagcaattgtaatggcagcctggcccacccttccgacctctatgctgaggggtgtgaggctctagttgtgaagaagctacaagaaatcatgatgcatgtgatctgggccgcactggcatttgcagctattcagctgctgggcatgctgtgtgcttgcatcgtgttgtgcagaaggagtagagatcctgcttacgagctcctcatcactggcggaacctatgcatagttgacaactcaagcctgagctttttggtcttgttctgatttggaaggtgaattgagcaggtctgctgctgttggcctctggagttcatttagttaaagcacatgtacactggtgttggacagagcactttgct

SEQ ID NO: 18882 - DNA, 401 bp, Homo sapiens
  misc_feature (1)...(401): n = a,t,c or g
cgagaagatgtattccatcccatgtcatttttctgaaccctcagcgtaggaagttaaactaaaacatggggcagaatctgctttaagcctttgaattcttggctcttaaagccaggttgagggttatgtgtttttattcttttatatctccttttcacttaggcttggcaactagttcattgaaacagagccaacaagaatgagtgagtcactcagtgatatgaagcaagctgtggtcatttatctactaccttccatacctacttcctaggtttgataagtagtgtttgtagtgtagttggcagtaacttttctcagcttacataagttgtatgtggaattcatttacaaatgtgtgattattacgatngatgttattttataaattncaaggntcttta

SEQ ID NO: 18883 - DNA, 490 bp, Homo sapiens
aacagctatgacatgattacgaatttaatacgactcactatagggaatttggccctcgaggccaagaattcggcacgaggacacagtggctcacgcctgtggtcccggcactttgggaggccaaggcaggcggatcatctgaggccaggagttcgagaccagcctgaccaacatagtggagccccctttctactaaaagtacaaaaattggctaggtatggtggcacacgcctgtggtctcagctacccaggaggctggggcaggggaattgcttgaacctgggaggtggaggctgcagtgagccaagatcatgccactgaactccagcctgagtgacagagtgagactgcatctaaaaaataaaattatgcctttttgtagcacatatattttgtaacatacaactgaagccagtattatattattagttttcatttaatgttttcagcccatctcccctgatatttctgggagacaggaaatatgttt

SEQ ID NO: 18884 - DNA, 392 bp, Homo sapiens
  misc_feature (1)...(392): n = a,t,c or g
gaacaaactattgtatattaaatgcttaatatagcgaaaataaagaatacacactttttaaggaatagattaactaaaactgtaaataaaattaacataaaaggaggaaagcaaggaaataatgagaagaggattccggggaaattacatgaatgggttgggggagtagtatggttgagtgtggtttcttagtctagatcctgtcttgttttgggtggtgaattcacaggtgcttgcagcattataataattaaacaaaagcaggtaataagtgtgtgaatggatgaaagtgtgatgttactatgattaatcccattctgtgaacttaaaattccgtgaaaatgagaaaaaccaagaaagcccttttgcatttgctgngtgcccananttta

SEQ ID NO: 18885 - DNA, 525 bp, Homo sapiens
  misc_feature (1)...(525): n = a,t,c or g
ggngnnnnnnttgannccntttgaanaccgtttgacatgattacgaatttaatacgactcactatagggaatttggccctcgaggccaagaattcggcacgagcggcacgagcgaggagtcctgggggctatacgtccagcttctgttcccaatcagtgaggcctaagtactcttgggggtcaggggaagggagtaatcataacagcagctaatattggcatgctaatgcgtgcttaaggcccggtgcattacctcactgaatccttctcgtggttctcacaaggtacctattagacaggctagactgagctagtttttttaaattgttgcagatctctggccgggtgaggtggctctcacctgtaatcccagcactttgggaggctgaggtgggcagatcacttgaggtcaggagttcaagaccagcctggccgacatggtgagaccccatctctactaaaaatacaaaaattagccatagccaagcgtggtggctggcacctgtgatcccagctactcaggag

SEQ ID NO: 18886 - DNA, 251 bp, Homo sapiens
gcagtgctacccaccacacacaccttgctggcccggccaccactgctggcttcagccccttgagcagcccatggcttagcagacccccagatgtaggtcagtggccttacctgtctctatccatgctgtcaactcctgcctccacctggggtcacccagtcacattgggaagggctgtgaaggcctccaggctggccccttccaggggaatcctggaggcctggggtgggctcctgcccttctgcctgctt

SEQ ID NO: 18887 - DNA, 301 bp, Homo sapiens
aaggcctgctgggcccccgcggacccaggtgctctgggtcacggtccctgtccccgcgcccccgcttctgtctgccccattgtggctcctcaggctctctcccctgctctcccacctctacctccacccccaccggcctgacgctgtggccccgggacccagcagagctgggggagggatcagcccccaaagaaatgggggtgcatgctgggcctggccccctggcccacccccactttccagggcaaaaagggcccagggttataataagtaaataacttgtctgtaaaaaaaaaaaaaa

SEQ ID NO: 18888 - DNA, 469 bp, Homo sapiens
gagattttataatttttgtcccagtggcattttgttaatttccaaaaccgttttaaggatctgcaaagattttcaaattctgtattttttctttttcttttttgagacaggatctcgctctgttgcccaggctgaagtgcggttgtgcaaacagtactcactgctgccttgacctcttgggttcaagcaatcgtgctacctcagccttccaagtatctggggccacaggcacgccccaccatggctggctaattttttaaagtttttatagagatgggtttcgccatgttgcccaggctggtctcaaagtcctgcactcaagcgatcctcccacctcagcctccaatagttttgggattacaggtgtgagccattgtgcctggccccaaagtctctattttaaattattttgccaccttcttccaaatagatgtcactgagtataaatcacctaagccctgagtaagaa

SEQ ID NO: 18889 - DNA, 199 bp, Homo sapiens
gcggcacgagccctggagactgacttcatcaacgggattcctatggcttcagactgagtttggtcaatggcgtaccttagcaggatattattgggaagaggtattgccctccagctagctgtgtcctttgatcaaaggtttcagaatctcccaaggtgactccctgttcagggctctattcttcaggattctggtcacc

SEQ ID NO: 18890 - DNA, 491 bp, Homo sapiens
  misc_feature (1)...(491): n = a,t,c or g
gagaaagccttatggaggagaggtacagtttatctggaggagggagctcaagggaaatcttacatttttgcctgggtctctgtgacttgttgctgccttcctgagatggctggtcaagtagaaaggtgctgtcctaacatgggaacgcagggtttctcttcagagcaaatgggcgtgtgatagcccatcctttaaagacagtgtcaatgtgatctgtagatactgactttctacttccagactttgtgacactgaggactttcattaaaagtcctaactcagtggctgggggctgtggctcacgcttgtaatcccagcactttgggaggccgaggcgggtagattacctgagatcaggagttcgagaccagccaagncaatgtggtgaaacccctctccaacaaaaattccaaaaaggaaattaggctggaatggcaacgggcacctgtaatcaactacttggganactgaggcagganaattcctgaatc

SEQ ID NO: 18891 - DNA, 807 bp, Homo sapiens
  misc_feature (1)...(807): n = a,t,c or g
aattcggcacgagcttccaagaaccaggagtggctgaggctgaactggaacagaacctgagtcggactttcaaaagcctcttcagagcaagcgatgagagtgttttatccatgcataaagtctgtgaagcgggaggactttttgtaaatagcccagaagagcccagcctcagcaggatggtcactgaggaggaaatccagttctatgtgcagcagttcaagaagtctggtttcagaggtcctctaaactggtaccgaaacatggaaaggaactggaagtgggcttgcaaaagcttgggacggaagatcctgattccggccctgatggtcacggcggagaaggacttcgtgctcgttcctcagatgtcccagcacatggaggactggattccccacctgaaaaggggacacattgaggactgtgggcactggacacagatggacaagccaaccgaggtgaatcagatcctcattaagtggctggattctgatgcccggaacccaccggtggtctcaaagatgtagaacgcagcgtgtgcccacgctcagcaggtgtgccgtccttccacctgctggggcaccattcttagtatacagaggtggccttacacacatctcgcatggatggcagcattgttctgaaggggtttgcagaaaaaaaagattttctttacataaagtgaatcaaatttgacattattttagatcccagagaaatcaggtgtgattagttctccaggcatgaatgcatcgtccctttatctgtaagaacccttagtgtcctgtanggggacagaatggggtggcc

SEQ ID NO: 18892 - DNA, 344 bp, Homo sapiens
ggagagcgccaggtgcttagcaggtacgtgcttcctactttagtatattcatattaaaaatttcaaattgcatacgatttgggttcccttctgcggaaggggcagggatggtgaggggaagacgggggcaaaagggatttctttgcaaactctattttttagtggctcggagtccccggataattgtaatctttagcttccatcaaatgctgtttttggttttgctagagggacatgtgtgtaatggagagtaagtggaaaacctacttgtgcttgagattttacagtgggctgaatcagaatcctttagcaaagagttcagaacccaggtcctgtgtttctgg

SEQ ID NO: 18893 - DNA, 407 bp, Homo sapiens
  misc_feature (1)...(407): n = a,t,c or g
gttttttttttgagacagggtcttgttctgctgcccaggctaaagggcagtaccacagatcatggctcactgcagccttgacatcctgggctcaagggagtagctgaaaccacaggctcaagccaccatgctcagcttctttaatttttgtaaacaaggtctaactatgttgcccaaggtggtcttgaactcctgggctcaagcattcctccaaccccagcctcccatgtagctgggactacaggcatgtacctatgcttggtctttagggccttaatattaaatttacacacagcttctgaaacagtgcttcttaataacacanagttgcgtggcatgtacttaaacagtaactttaggttcacacagtaaataaaatctcacaatgccaaaattttgaaaatagg

SEQ ID NO: 18894 - DNA, 366 bp, Homo sapiens
ggtaaagtagatttatggtaacagtagctacttctagggctcttgtaagcttttgactagtcaacttagacttaaaattttaagttaacattaacttaaaacagcacctggcaaaaaactaagtcttgaggaaatatgagctatgattataatcatcgaagtagagaatggatatgaaaggcccctctgttaaatggctggccatcatcccatgctattattttaaaatgtttattataaaaaacttcaagcatacaaaaaagtaaacaggatagcacaagtacaatacatatctatatacctactatagagatgcaaaatttttttatattttgccatatttacttcatatatatgtacatacag

SEQ ID NO: 18895 - DNA, 445 bp, Homo sapiens
tatgacatgattacgaatttaataccgactcactatagggaatttggccctcgaggccaagaattcggcacgagcagaaacctcacagaacacagcaaaggtactgtgctttttcacatttcactctttgaaatgtgtgtgtgtgtatgtgtacatacatataagttttatttattgattgatctatctatcggtctgtcttgtaacagggtcttactctatagcccaggctggagtgcagtggtgtgatctcagcttactgcgatctctgcttcctgggctcaagcaatcctcctaccttagcttcctgagtagctgggactacaggcgtgcaccaccacacccagctaatttttggattttttttgtagagagggggtttcgccatgttgccaggctgtcctcgagctcttgggctcaagtgatctgccaacctctacctccc

SEQ ID NO: 18896 - DNA, 510 bp, Homo sapiens
ccctctatgacatgattacgaatttaatacgactcactatagggaatttggccctcgaggccaagaattcggcacgaggagagagctagcaccatgagctcaaccctgaagacattatgctaagagaacaaagccagtcacagaaggacaaatactgcatgattccaattatataagtagtaaaattcatagagagaaaacgtagaatggtagttgctaggggttgggggaagggagaatgggagaattattgtttaacaagtacagaatttcagtttggaagatgagaaagttctggagatggttgatggtgaaggttgcacaacaatgtaaatacacttaatgccactgaactgtacatttaacatacatgtacagtggttaaagtataaatgtgattaaaatggtaaagtttatgttatatatacatattctaccacaattttaaaacaaaaacaaaaaaatggttaaaatgatagattttatggtatgaatattttaccaaaatct

SEQ ID NO: 18897 - DNA, 358 bp, Homo sapiens
ggttggccaggctgatctcgaactcctgacctcaggtgatccgcccgcatcagcctcccaaagtgctgggattacaggcgtgagccaccgtgctcggcccaaattcattcttttacatgtggatatcccattgtcccggcaccatttgttgaaaagactattctttcttcattgaatggtcttgtcgcccttatcaaaaatcagttaaccacagatgtatgtaggtgtactgccttttgaagtagttattacttaaaagttattgatacaatttctggcagtagctgttcaataatacataatagctgatcagattatttttacatcactgagaagtttgtaagtgatagagctagga

SEQ ID NO: 18898 - DNA, 335 bp, Homo sapiens
gtaaaattcagatgggtcagtgtcccaaacctgagcttctttgctaccaagctgtgacagaggtgtttgtagtgatggctttcttcgaagtattagcaccacttttactagattgtgtcttttcttctatgttttcaagtactttttatgaattagttactttttctacacctcagtttaagggtatgaatgtattttatgtactatgtggtagttcaaggcagtaggtgcagggggagtgagacccagggaccagttggggggcccccagctgcttctcccctctaatgcagtttcaagaggcgtgtgatgggtgcatggggagctcctgcatt

SEQ ID NO: 18899 - DNA, 519 bp, Homo sapiens
  misc_feature (1)...(519): n = a,t,c or g
gggcaccaggtctctctgcaactccatcatctccttgaacactacaattagctgttctgaagcccagaaaattccatggacaccccctggaactgctctgcagttttactccaacctacacaatgctgaaacctcttcttgggtgaatttggtattgtggtgtgtggtcttggtgctccaggtcgtgcagtggaagtctgaagccaccccataccggcctctggagaggggtgaccctgagtggagctctgagacagatgctctcgttgggtcacgcctttcccattcctgaagaataagcggagtgcttcctgcagccgaagactccatgcccaagtgcctgtaatcccccccctcaaggccctgtttatgttgggagtcttagttttcctttcgttggggggtgggggggaaacataatgacaggccccccttcacctcttcctgaactggttttgncccaaatatatattactggcttatcttaaaaanaanannaaaaaaaaaaaaatntttttt

SEQ ID NO: 18900 - DNA, 459 bp, Homo sapiens
  misc_feature (1)...(459): n = a,t,c or g
gaaaaccgctatgactgattacgaatttaatatcgactcactatagggaatttggccctcgaggccaagaattcggcacgaggtcagttagaattgtttctttctctccccgtttctctccccatcttggctgctgtcctgcctctgaccagtggccgccccccacgttgttgaatgtccagaaattgctaagaacagtgccttttacaaatgcagtttatccctggttctgaggagcaagtgcagggtggaggtggcacctgcatcacctcctcctcttgtagtggaaactttgtgcaaagaatagatagttctgcctcttttttttttttnnnnnnnnnnnggncnttngnntanttaatttngggaaaaaaaaaattnagnccntnaaaggcnnaanntttngnagnaggnntanggntttaccttnggaaacgntgnnccccnacaaactttacc

SEQ ID NO: 18901 - DNA, 513 bp, Homo sapiens
  misc_feature (1)...(513): n = a,t,c or g
ccaatgaanccctatcattntatgacatgattacgaatttaatacgactcactatagggaatttggccctcgaggccaagaattcggcacgagccatcccccacccctgccatctctaagcgtaattcttgctatttgtacctgttgcatttgttttattcttattggtttctgatttgttttgctgctcattttgtattatatgcttatttactgtacatgcctttgaatccttcatccaaactgatgacggtgtttagaatcaacattgattaattgattgagacagggtctcactctattgtctgggctggaatgcagtggcacaatcacagctcactgcaacctggacttccccaagctcaagtgatcctcccacctcagcctcctgagtagctggggctagaggtgggtgccaacgtgcctggttaatttttataattcttgtagagatggggttttgccatgttgccaggctggccttgaactcctgagctcaagtgatgcccctca

SEQ ID NO: 18902 - DNA, 267 bp, Homo sapiens
aagtcagacttgaacccagctgatatgcaaggtcatggcgtgcccagggtggtgacagttgaacaaagtgtatagtacgtgcccagtggtagcaatggaaaaaagtataccaaatggactttgaaggaccaaaggttttaaaagtcaattggtatcacctccacactgactagggtagtggggtgcatttggttttcaaattgggtacttttaacactttagtgcctgactgctgttctttactgacttgattcagtcactcgtagg

SEQ ID NO: 18903 - DNA, 355 bp, Homo sapiens
gtggcacatctgggaaggtgcaagagataggaggaggcatgtcaggccccaagaaccagggctttttccagctttatttgctttgtgtcttcacttgcacattctctgctttgcctgggctgaggtcaatgaagcagtctagaccaggagtctggccatgaacatgcagcctactgataaatggcatagagttggggaggatagaaggggtgggggctggccaggaggccttcccaggagaggtggtaaccaagttgaaacctgaagagtaagaatgagttggccagataagatgaaaaggtattcatgccaagggggccagtgagtacaaaagattagggtgaaagaaacacgg

SEQ ID NO: 18904 - DNA, 461 bp, Homo sapiens
  misc_feature (1)...(461): n = a,t,c or g
ttaatacgantcctatagggaatttggccctcgaggccaagaattcggcacgagatctcctgaactgtgctggaaggtagagacaggcaaggaggcttgccaaagggtcaggagaacctgaccccacaaatcaactgatcttcaagagacaggatggagggagggatcattctagagaaccctgctccttgtttcctccctgtggcaaaatctggcgccaggaannnnnnnnnngngtangcgtgngngngcangtgtaagngtgcangcaccgtgngtgcangtgtgtatgtacagccgngngtgcacgcatgtgtgngcaggtgtatgtgngtaggtgtgcgngngcaggcatgtgtgngtaggtgngcntctgcaggtgtgtatgtacagactntgtgtacaggcatgtgtgtgcaggtgtgcatgngcanggagtgcggttnccagcatgctnggcc

SEQ ID NO: 18905 - DNA, 527 bp, Homo sapiens
  misc_feature (1)...(527): n = a,t,c or g
caagcctgttgagagaaagggagctgttcaaaaaacgagctctttctactcctgtagtagaaaaacgttcagcatcttctgagtcatcatcatcatcgtcaaagaagaagaaaacaaaggtagaacatggaggatcgtcaggctctaaacaaaattctgatcatagcaatggatcatttaacttgaaagctttgtcaggaagctctggatataagtttggtgttcttgctaagattgtgaattacatgaagacacggcatcagcgaggagatacgcatcctctaaccttagatgaaattttggatgaaacacaacatttagatattggactcaagcagaaacaatggctaatgactgaggctttagtcaacaatcccaaaattgaagtaatagatgggaagtatgctttcaagcccaagtacaacgtgagagataagaaggcctacttagctcttagacagcatgcccgcgaggattaggaggaatcttttagaaactngaanaagcctggccattccngaagctgc

SEQ ID NO: 18906 - DNA, 322 bp, Homo sapiens
tggaattctgtctatcttctttagcttttctatatctttcctttttcgtttctcttcttctttccatttcctcctctcttcttctctttgtctttttctttctatttctctcctcctcctttcttctctcttttcttctctcattctctgcttgtttttcaggaagctcaaaagtggggttgtctttttagctattaattctctattttttgcttctatttcctctagcagtgtctctggagtagatgtcattttctcattatctgtggcataactttccaaaaactttctatattctggatcatcatcgatagtcccgact

SEQ ID NO: 18907 - DNA, 401 bp, Homo sapiens
gactcatatatctttaatttgtctatggaaaaaaatagaaccttaattgtgaaaaaggttacattgcttttagacttcttcgacctttgcttctttcggaactttctatacacatttgctctttttttcacatatcagttaaaaccatgtgatgaaaatgtgatgatgatttttttatggatgtgaattatttaaattatttaaattaatagattattgttattattattattatttttgagataggatctcgctctgttttccaggctggagttcagtggtgtgaccacggctcacggtagccttgatctcctgggttccaagtaatcctccacctcagcctcccagtagctgggatcaaaggtgcccactaccacacttggccaattttatttttattt

SEQ ID NO: 18908 - DNA, 467 bp, Homo sapiens
  misc_feature (1)...(467): n = a,t,c or g
gtaaagtaatctataaagggatagatgggtatattcagggatttagtcctagaaaaagttcggaaccgctgctatagatgctgtgtagtgtcagtgaaaggattgctgagcagtagtgaactcacttaaaaagaagcagcatgacttttcttgattgaatcactgctaagaagagtaatagcagagattgctggtacaagggaccactttggtttggctctagctggtgaggactgagcaggagatttggaccagaagatgaattagaagggactgagagtttggcagtcacaatgagtcaaagaggtagaagttcacagggaagaaactcagaatttacaatcttggaggaatggtctgtatgataacggggttaaaaatccaatttcacatttacttttacnaaattaaaagtaanagctctggagacaagatacttggttttgaatcctggttgtgtgancttg

SEQ ID NO: 18909 - DNA, 337 bp, Homo sapiens
gacttaagcaatatggttggagggagaaaaactctatacaacaaccagcccattgacttcctgaaaaagatggttgctgcctccatcaaagatggagaggctgtgtggtttggctgtgatgttggaaaacacttcaatagcaagctggggcctcagtgacatgaatctctatgaccatgagttagtgtttggtgtctccttgaagaacatgaataaagcagagaggctgacttttggtgagtcacttatgacccacgccatgaccttcactgctgtctcagagaaggatgatcaggatggtgctttcacaaaatggagagtggagaattcatggggt

SEQ ID NO: 18910 - DNA, 334 bp, Homo sapiens
gaacaacaacaaaattagccaggcatagtggtgcacatctgtagtcccagctacttgggaggctgaggtaagagaattgcttgagctcaggaggttgaggctgcagtgagctgtgatcccaccactgcactccagcttggggaaagagcaagactctgcctccccccatgcgcccccccacccctgcccctgccagaaaaattgtttgtggatccctgttatcagaataaggacattccctcatattcctagtgtgatgtgagtttttatcataaaagggagtactattttgtcatgtccattttctgcattggttgaaatgatcattttgttt

SEQ ID NO: 18911 - DNA, 194 bp, Homo sapiens
ggagcgcaccatgagagacaaggtcttggagtgcccaccctgattccaagtgactgtctgcaagttagctagctttctagggtgattgttcctcagatagaaacaaaatgttgaaaacatgccttcatttaatgttcagcagcaaaatgcttatgatcccaagggtgagtctcagactagtttttttttttttt

SEQ ID NO: 18912 - DNA, 867 bp, Homo sapiens
ggtgatgaagattgctgactttgggctggcccgcggcgtccaccacattgactactataagaaaaccagcaacggccgcctgcctgtgaagtggatggcgcccgaggccttgtttgaccgggtgtacacacaccagagtgacgtgtggtcttttgggatcctgctatgggagatcttcaccctcgggggctccccgtatcctggcatcccggtggaggagctgttctcgctgctgcgggagggacatcggatggaccgacccccacactgccccccagagctgtacgggctgatgccgtgagtgctggcacgcagcgccctcccagaggcctaccttcaagcagctggtggaggcgctggacaaggtcctgctggccgtctctgaggagtacctcgacctccgcctgaccttcggaccctattccccctctggtggggacgccagcagcacctgctcctccagcgattctgtcttcagccacgaccccctgccattgggatccaagctccttccccttcgggtctggggtgcagacatgagcaaggctcaaggctgtgcaggcacataggctggtggccttgggccttggggctcagccacagcctgacacagtgctcgaccttgatagcatggggcccctggcccagagttgctgtgccgtgtccaagggccgtgcccttgcccttggagctgccgtgcctgtgtcctgatggcccaaatgtcagggttctgctcggcttcttggaccttggcgcttagtccccatcccgggtttggctgagcctggctggagagctgctatgctaaacctcctgcctcccaataccagcaggaggttctgggcctctgaaccccctttccccaca

SEQ ID NO: 18913 - DNA, 373 bp, Homo sapiens
  misc_feature (1)...(373): n = a,t,c or g
ggtaatctcccaaatggaattggtgaaagcctgtaaaatggttcctcgcaagcgggaagcactattgtaattgtctggtccaatctccctcattgttcagcagataacttcttgaggccctactaagtgttggatggtcgggggttggatcctggagcctctgcagtcttggaggggagcgggtggtaaatgtgggaacaaactctcttggcctatcgtttattgctctgaacctgcactgtgagagggacacagcggacaggcaggggatcggtggtagccagagatcacgggggctgcttggaagagggggcctcaaaatcagggagggtgtgtaggattgnattttggntttgaggcananncttgcctg

SEQ ID NO: 18914 - DNA, 422 bp, Homo sapiens
gggcagtagagtattctgtcagtttgtaattatttgtgtttttgtttagtgtttactagattgtaaagctgtatgagtacaaggaccttctttattattgtattttcaactgttagcaaaatgcttagtaaatatttgttgaatggatgaatgaattgtttagaataagttcctggtaaatgtgctataaaactaccctttgattttccaaagctgtcagtgataaagagtttgaagaaaacatcttgagtttgaggtgtacacggtactgtgtgcgaacttttaattagtgctctgtgtgcatacacacgtgtacgggttttcatttacacttaacaatttctttgaactaaccattagcattacactatgaaaatcgcaaaagaaatttactctgttacgtatctcttattttttgactt

SEQ ID NO: 18915 - DNA, 553 bp, Homo sapiens
  misc_feature (1)...(553): n = a,t,c or g
ggtggtngataantanatctacngnatacccttatgacatgactacgaatttaatacgactcactatagggaatttggccctcgaggccaagaattcggcacgaggagactgcatagggccggcgtggtggtgggtgcctgtaatcccaactacttgggaggctgaggcaggagaatcgcttgaacccgggaggcagaggttgcagtgagccaagatcatgccattgcactccagcctgggtgacagagtgagactccatctcaaaaaacaaacaaacaaaatatttgtaagatattctaacagtaataattctcaatcttatcagaaagcttttccataacacatgaacccaaattttatctcaagctcaacaaataaaatcagctgggcatggtagatcaggctggtaatcccaacacttagggaagccaaggcagggggattgcttgagcccaggttggagaccaccctggcaacaaagcaagactccgcttcgaaaaatataattcgggtgggcacagtggctcacgcctgtaatcccaacactttggg

SEQ ID NO: 18916 - DNA, 441 bp, Homo sapiens
  misc_feature (1)...(441): n = a,t,c or g
gtgatggaactgtgaggaaaaacagttttcacaattacagtgngattttagcacctctcaataattgctaagtagaaaattaataagaatgtaaaagacttgaaccacattatcaaccaacttgatgtaacagatatttacagagtacctagcagcaaaaataaattatattaaaaatgcgggtgcagcacaccagcatggcacatgtatacatatgtaactaaccggcacattgtgcacatgtaccctaaaacttaaagtataataataataaaaaaaattatattaaaaatgcttcttaaaataggggatttgataaacatttttaaaaatanaaactatacagcactcagcatcaacagaaaactttttttcaagtgcacaagggactttatcaagataggctaagttctgggcagcaagtatcaatgcatttaaaag

SEQ ID NO: 18917 - DNA, 367 bp, Homo sapiens
gggctttttctatcaagtgctcattgtccaattctttccattccccaagccatttccccatttttgggtatttgctatggtagtaccccacttcctggtactaaaacctcacacatgataatgacagccccacactgctcaggtttgtgatggagagaagcagggagtctgcaggaacctggggcaggcccctaacagcctgggagatcaaggagggcttcccagtggaggtgacatttgaccaggccttgaaagatgggtaggagttggcaggcgagaggcaggcattctgagccaggtggagggccaggtgagaagtctccatccccccaaaagttgtccccttggagcctgcaggtgttgatgg

SEQ ID NO: 18918 - DNA, 352 bp, Homo sapiens
cagctctttccaaaaactcggctctgtagggggatggagcaggtgaaactggagggggccaggagaggctgtgattctttattgtttcagagatgagagaatctagagcatgtctgaatgctgatgcttgttgagacaatatagaaaagagagaggtcgacgcggccgcgaattccagatctatgaatcgtagatactgaaaaaccccgcaagttcacttcaactgtgcatcgtgcaccatctcaatttctttcatttatacatcgttttgccttcttttatgtaactatactcctctaagtttcaatcttggccatgtaacctctgatctatagaattttttaaatgacta

SEQ ID NO: 18919 - DNA, 344 bp, Homo sapiens
gttttgatattactgttttgtacttgtgactattgtaggactcttgaggtaaatattggtaatgagctaaatacagtttgttagaatttacaaacaatttgttcatgccttgtcttgtctcgacggcacttgaaagtagtaccagttgaggtgaagagctagactgccagcctggttcaaaagctgctgccacctgctcctggaaaagtacaggcccagctcccagcatcagggcctggggcagagtggttagtgctcaatagatatctgctgaatgactgagtggcagatgatgagtgaggggatttggaagtacatgagaaaggaccaagtcttaaagttct

SEQ ID NO: 18920 - DNA, 1140 bp, Homo sapiens
tataaatatataatcattgctaagtaagaagttaagttgttgctatcgcaacaatcctggcagacaattgagtaatattttgatgacttattttgtttgtaattagttattataagaagatctagatcctagatattagaataaaatttattttctactgtatccatttcaaatgttaaaatattgtttaatatttttgaaatccctgagtatcaggccttgttataaataagctgcataatcaataaatagaacaagggactttttgttgataatccaaatactcaaagtttacgtaatgaaaattatagcgtgtgtgcaaactcttgagggttgattatgctgcaatttagcatgttggaacgtctagggagaaggttgactttttgcacttctgtatatagtcaaaagagagaaacctgtataatagtaagatcttattttgaataaaaacgtctataattacaaggagttttgttaaggctaatacaatgacagactgagcaaaattgcttgcaaaagtggcacagagttagcactccataccccttcaaacatgttgctttgctttcttgtggacagcttgtagtttgccaggattttttcagctggaaagatacgccatcctttcaaaccctcatgactgacaaaaactccatggggccaaatctgcctgaagatcattaccaaaaatagcaggtacttctaccattaaggtgaaatcatggatcagatattccttacatttttcaaaactactgcatgtttaaaacttcaacaaaaaaagagagaaagaactatactaagaacatatattattcagatcagtttctgccaatttcagtggtttattgttcacaaaaaaatcttcaaaacaagtattgactttcacaaaatttaaatcataaacaggcaaaccaaacagcacactgtagctatagttgttatgtgattgttttttaattgctgtaggatcctgttctttcagcaggtgaaaaataaaacgcagttcaaatttcatggttttaattttcaactcagaagcactcaaaaatgcaaaatgtgataatgggcacttgtttaaaagaattagtgtatccagccttcactccagctggttaaaaatgttgcacttatcac

SEQ ID NO: 18921 - DNA, 352 bp, Homo sapiens
ccccatccctgtcagtatctgaggcctcaacagaactcccagaacttatcagaatatatccagaatatgactattttaaatccctttttttggttataaatggtaatactgctatattttaaattctaacaaaatcacttatattttaatgaacagaaagcaagattagtaaatatcagggcttatatacatccatatttaactttaattgataacatttctaactcaattggtttaacatatttaaaaccaataatttgcctaaaatgtactaaaggagggggcaccagggctcaaaacacatactgtacacagtttacccacataaaaaatttacccacattagccaggc

SEQ ID NO: 18922 - DNA, 305 bp, Homo sapiens
gcggcacgaggaacgtatcaaagagcctactgtcccagtgataattcttggacaaagcagttaggacattttccatcaaatccttttaagccccctctcagcctcccaaaggagtgcacctcctaaaaggccgggcgcggctggccttttgacttgtaattttgactagtaattctgaggggtggagagaaaatcttttaaattttcattagttgcctactttttaaaaacctgttaagaaaagtatacaaaagtctacaaaatctatttgaatcttacagatatacttctgaattttttttttt

SEQ ID NO: 18923 - DNA, 323 bp, Homo sapiens
caggattttattttcttctttttgtgttttccaggcatagtgctctgcccatagtcgcatagtctgtatcccccaaaatagccattaggtgcttttggatgagacactcaaactttttctgggatcatgtgataaaacttggtttccaggggtgcccacatttcacaggcatgagcctgggcagccttactcctctgttggtcaggaagaattaatctttcaaagataaacatttacgcttcatgggtgcctttcctctttccctctttcaatccacagtgaagtaaattgttttaaatttgcaaagattattttagagtatc

SEQ ID NO: 18924 - DNA, 278 bp, Homo sapiens
ggtgtctgctatttacatgttatttgttcccagtgagctttatcaacatcaaccctgtttatataatatgttattttgctcttcttgatctgtgccttttggtttagctttatacaaaatgctaggtttgttatattctttatgtatcataatatataattcaacttttcctgatgaatgtatgctgaataattaaactaaaccatgtgcttagaaaagacccagacaggttgtatatgcagttatgtgtaaatatttgacaaagaaaaaaaaaggaa

SEQ ID NO: 18925 - DNA, 334 bp, Homo sapiens
  misc_feature (1)...(334): n = a,t,c or g
cttctacattctggaggagtgccataagaatatatcaagtttagtaagcttatgtgagtggctcactgtcccacttggcattacttattgaatttcatattattttattaggatgttgatacagacactatgtaaaactctacaattaagttaattcaatcttgtcatctcacataattacaaatattacagagctcaaaccaaatcaatggccaagtgtacaccacaagatttaaaccaatgaaatctggtttgacatacagaaaccataaaattcaagaagggggaatgaatccctttaccttggccttgattatccaaatatgntacccat

SEQ ID NO: 18926 - DNA, 407 bp, Homo sapiens
gtggagaggaggatagtgacctctcacctgaagaacgagaaaaaaagcgacaatttgaaatgaaaaggaagcttcactacaatgaaggactcaatatcaaactagccagacaattaatttcaaaagacctacatgatgatgatgaagatgaagaaatgttagagactgcagatggagaaagcatgaatacggaagaatcaaatcaaggatctactccaagtgaccaacagcaaaacaaattacgaagttcatagacgagatttgttcaacactgcaattgtttgttagatgtaaaccctgtgactatagtacgttgcttcttgttcttcacaattcatgacttaagtaccaaaatgcataccagttattatatattgccaagaattaaatgataaacttagagactg

SEQ ID NO: 18927 - DNA, 449 bp, Homo sapiens
gacctcagcctgagtgagtgtgtttggtggggtgagcagtgatggcagtccctcctgggagctgctgtgatttggggctttctactttattcactcaacaaacgtttctcagaatggagggtgctcggggccgtagggcacagatactgatgtggccctttagggtcacagggtccagggttcaagtcccagctccaccactatccagctgtgcaacttttgacagtttgctgtacctctctgagtctcagatacttcatctttgaaatgggcagaagagcacctgccccgtggcttcctgtgaggatgtatagaaaatgctggtccagctcctggaatggcatgtccctcccccaccctaaagtgcacgtttagtggaaggaaaggggggatggggaaggatgggggatggggacagaagtgagcatctgaacctaacaggagggctg

SEQ ID NO: 18928 - DNA, 455 bp, Homo sapiens
  misc_feature (1)...(455): n = a,t,c or g
ggatggtttgatttccacagagaggtcacagtgagtaatgcatgagtatggagaataagtctccttcaatattgtcaccccttaatttaaatgccctggtacttggatttacctctgtaatgtttctgaggcttcattcctgttgtgtgtatacttatctgtcacttttgccatacaatgaggtttttaagtcaaaatttctaatgtatttttctatcttcaacacaagcacaatatctgacaatagacatttgaaaaaaaatgaatgaatgaatgaatgaatgaatgaatcaatcaatttaaaaacataactgttgatccctgggagctctgtgctttgacccagccatgtatttctccttgatggttttttcaaacatcaccttctattggtcacccatgccctgcacactgnttcaagaatgaagatggcactctcattttaacttgatccg

SEQ ID NO: 18929 - DNA, 353 bp, Homo sapiens
gaagtacagagtaccaggaactgcccattagggtgggtttgccagatgtcctatcattaaaaaagaataccagctttaaacagagcagttcctggtactctgtacttcattgtgtttattctatctggattcccttatttgtcccttagaaagattcagttagccaacacagttttgcccttccatgtagcaagacctattacaaaacgatagtaaataaaacagtaggccgccgcggtggctcacgcctgtaatcccagcactctgggaggccgaggcaggtgaatcacctgaggtcaggagttcgagaccagcctgaccaacatggtgaaaccccatctctactcatacaa

SEQ ID NO: 18930 - DNA, 452 bp, Homo sapiens
  misc_feature (1)...(452): n = a,t,c or g
aacagctatgacatgattacgaatttaatacgactcactatagggaatttggccctcgaggccaagaattcggcacgaggcgcctcactgcatctgtgcaaacgggcggcaaactgtgtcctgggcagtaaccccaaagtcattaggaaatgtgaatttcactgtgagcgcagaggcactagagtctcaagagctgtgtgggactgaggtgccttcagttcctgaacacggaaggaaagacacagtcatcaagcctctgttggttgaacctgaaggactagagaaggaaacaacattcaactccctactttgtccatcaggtggggaggtttctgaagaattatccctgaaactgccaccaaatgtggtagaagaatctgcccgagcttctgtctcagttttgggagacatattangctctgcatgcaaaacacacaaaatcttctncagat

SEQ ID NO: 18931 - DNA, 399 bp, Homo sapiens
atttaatacgactcactatagggaatttggccctcgaggccaagaattcggcacgaggcgcccccggggccggtcccggagggctcgatccgcatctacagcatgaggttctgcccgtttgctgagaggacgcgtctagtcctgaaggccaagggaatcaggcatgaagtcatcaatatcaacctgaaaaataagcctgagtggttctttaagaaaaatccctttggtctggtgccagttctggaaaacagtcagggtcagctgatctacgagtctgccatcacctgtgagtacctggatgaagcatacccagggaagaagctgttgccggatgacccctatgagaaagcttgccagaagatgatcttagagttgttttctaaggtgccatccttggta

SEQ ID NO: 18932 - DNA, 375 bp, Homo sapiens
gaaattttgtttggtttgtgctgaagtagaaaagaaagtagaggataccacacttggaaggaagactgctgtgtcaggacattcttgcttcacttacacacatatgtacgtgtgcatgcgccgggcggcagtgtgaagtgtatgtctcattgtagggtcatgaccagaaaacacccctggtaacaatgccaggggtctatcgcgtgttaagtgcgctttaaaaaaaacaggtagttatgggaggaacttaccttgatagaaatggaatattgatctttgcagatgatgatgctactcgttagagccaagaaaataaagcatgaaaagctttttttccccttagctacatcatggagaaagcagatcttgtcatag

SEQ ID NO: 18933 - DNA, 540 bp, Homo sapiens
  misc_feature (1)...(540): n = a,t,c or g
ccttggnnnccnctnaanccctaacagctatgacatgattacgaatttaatacgactcactatagggaatttggccctcgaggccaagaattcggcacgagcagcggccagggcaggaagagagctgtgcagtggggtccaaggaggtctggcaggccacggtgaggacgtggctcatgaggaagccacaggagagttctgagcagggcgtgcaggagatggaccttgtattttgtcagtgtgtccctgtggttgtggagggccacggggactgcagagggccaggaatagaagcagggagaccagccggggtgccgctggtgagatggattggagttgatacaagagagaaaggcattgtgggtgacacctgctcttttggcctcagcctttgggtgaaagatggtgccattgattgatatggggagactggtggaggatgagctttatgatgttcacatcagcctctggacttagtgttgntttattcccattttacagatgtggagaccaagggggagagaagtaaaaagtttgccc

SEQ ID NO: 18934 - DNA, 473 bp, Homo sapiens
ggtgctatatcctttttgtgtgagcaatgggctaagattcaatatatgagcatggttatgagcattccatttaaatcccagcaccagtctttactaaatcttgaccttgggtgggttacttaacctctctgaaccttaggttctttggcatttgggaataataatgcctgcctcctggggttataaagaacccatgaatcttgcatgtagagcgtccagcatagaacatggtaggtactcaataaagggtagtcattgttgataagaattcaaaattggtggaaatgtctgcatatatgagaaactccatctattttcctttttctttgggaaaggcccaatttctgcctccagttctgtgttggtctggagagttcaggctcttgcctgatggaccccgaatcagggtaagcttctttgcagtcgtccttgcctgacgtcccagagaacctctagtccctgtagtggtacac

SEQ ID NO: 18935 - DNA, 426 bp, Homo sapiens
gagcacttccaaaaagttagtggctttcaatcacctctttttacagttaaagaaactgaggcagaaaaagtaacttgactcaaccaggttatcagctaataggtggaggagcctaaatttgaattcagttatttcaatccatccataagtatttctttaacccttacacttatagtctgtttggaaagaaaaaacacttatgatacaaatagaaatgcaagcaagtgcaatgatagaaatgcaagcaagtgcaaattcatgtacctcaatgtggttgttaatatctgaagggtaaaagagtaaaaagagatactttattgaggtagcctaaacaaatcaaagcttgttaggaaagcagaatactaggagatactatgtgttttctttttccaaataaacatggaagtgtggccactgcactgtgag

SEQ ID NO: 18936 - DNA, 429 bp, Homo sapiens
  misc_feature (1)...(429): n = a,t,c or g
cctntgnaaaccctntgacatgacacgaatttaatacgactcctatagggaatttggccctcgaggccaagaattcggcacgagatttttagaatcaggagatatggactagattattttcagcatctttttaactcagatatttataattctaagaatcttagcgtttttcccctaaaaagcaatttttataataataacaacacagtgaaaaatattgaaattcagataaaggcagaaaaatggattgggatgtaggaagtcttttgtaaattccaaactgattagcattgccagtggcataattctttcatatctatgtgacaatctaatttttaaattatttttttgcccgggctttggantataggaattttgtaatggaaatgcttgcacagcttcagctacatggnattaacatgcccctgg

SEQ ID NO: 18937 - DNA, 442 bp, Homo sapiens
ccagaggagctcggcctgcgctgcgccacgatgtccggggagtcagccaggagcttggggaagggaagcgcgcccccggggccggtcccggagggctcgatccgcatctacagcatgaggttctgcccgtttgctgagaggacgcgtctagtcctgaaggccaagggaatcaggcatgaagtcatcaatatcaacctgaaaaataagcctgagtggttctttaagaaaaatccctttggtctggtgccagttctggaaaacagtcagggtcagctgatctacgagtctgccatcacctgtgagtacctggatgaagcatacccagggaagaagctgttgccggatgacccctatgagaaagcttgccagaagatgatcttagagttgttttctaaggtgccatccttggtaggaagctttattagaagccaaaataaaggaa

SEQ ID NO: 18938 - DNA, 367 bp, Homo sapiens
gggtgggaagatcctcaggccttacctcacaccttcctcaataaaaccctgtaatgctcttgtcctgggcttcagatctgagaccatcccagaagtcagaaagaggagaacacagccgggcactgtggctcatgcctttaatcctagcactttgggaggccaaggcgggtggatcacttgaggtcgggagttcaagaccagcctgaccaacatggagaaaccccgtctctactaaaaatacaaaattagctgggcttggtggcatgccgcctgtggtcccggctgctctggaggctgaggaaggagaatcgcttgaacccgggaggcggaggttgtggtgagctgagatcgcgccattgcagtccag

SEQ ID NO: 18939 - DNA, 435 bp, Homo sapiens
ggaaaatctgaactcagagattcaggacttggtgagcacttcaatatttctgtgtctggagaatgttaacttaggcctggatcacttgaaatttttaccatttattgagtaaaaattttgtgtatagcactatgctaacccctgaggctctctcattgccaagttttttcaaagactctggatttatgtaaaagaagataggccaggcacagtggcgctcacctataatcccagcacttggggaggcggctgaggcgggtggatcacttgaggtcaggagttcgagaccatcctggccaataaggtgaaaccctatccctactaaaaatacaaaaattaactgggcgtggtggcatgtgcctatagttccagctactctgaggcaggagaatcacttgaactgggaagcggaggttccagtgagcggagatcaac

SEQ ID NO: 18940 - DNA, 466 bp, Homo sapiens
  misc_feature (1)...(466): n = a,t,c or g
ggtgcactagagcattaagacttgatcctcctgtctcactggatctttgtaccctttgaccaacatctatttccatgtccctgtatcccccagcctgtggtacctaccatctaatctctgcttctattggcatatgtttttaaagagagtttattttagaatttacttactagcaaaatctcttgattttcctcaaaaaatgtctttgagcaaaactggtgcttcagtggaatgtatgtgctttccatatcctgttaaaacaccgtgtactccctggggattcactggcccagttttagaagtaatagagtgagatcagaggagcacttagtgcccagtaggattcttgatctctatatttttttggagtgagtggatggttagagaggctaatagacctttttgaaaagctgaagaaaactttatatctattctgcatataaaatacncctgccaaactttgtat

SEQ ID NO: 18941 - DNA, 321 bp, Homo sapiens
gcggcacgagaactggatattcatatggcacaaactcatcactccacatattacctgacagctgcaattttaaaaagcataactccacaatagcaagatctggtcattgccacttagtatcactaatattaataagactacccagcactaagtgactccttgatataatgcattgcttatgaacattctcgccaaaaatatttaacctgaattcaattaagattttgggcttagggccaggcgcggtggctcacgcctgtaatcccagcactttgggaggctaaggtaagcggatcatttgaggtcaggaatttgagacct

SEQ ID NO: 18942 - DNA, 355 bp, Homo sapiens
ggagagaggtcattaaaacaaaataggaagactaaaaagagttaccagtaaacttcaagtatttgaaaggctgggattccaatgttaatatatagcataaaataatttagagcagaaatgattacatgtgataaggagaggtatcaggatgagaggcatgggtggtggcagcataattacatggaatctaaatgccataaagacagagcaaaacatatatgcaaatatctctgagaaaaaagaagtagaaatgataaaaatatgattataaaattaaaatacttcattatcaactacataagaaattcagcaacacataaaggagctgaagatcaaaacaaggtaacattaatgg

SEQ ID NO: 18943 - DNA, 421 bp, Homo sapiens
gcctttattcatgtctctggctctgaatgggtacagaagttcattggggaatttctgtgatggcagagaaaatgctcatctgtcatcttcatggatgaaattgactcttttggctcctcaaagctggagggggatgctggagggaacagtgaagtgcagcagatgatgcttcgagggtggctttgaggccaccaagagtatcacggtttatcacggctgctaatacaattgatatcctggactcggcactgctttgcccagggcacattgacagaaaaattgaattcccaacctgcaatgagtaggcctggctggtcactttgaagattcattctcagaaatgaacctgacccaggggatcaacctgagaaaaattgctgagcttatgcccggagcatcagctgaaatgaaaggcatgtgc

SEQ ID NO: 18944 - DNA, 338 bp, Homo sapiens
gcaaacttgaaggtccagctcagatgtgacccagttatcagaattagagttcacaaagatggacgtgggcttggaacaagcaaaatccccgtaatcagaattaaactccaaagggtgaggctagcacaatttaaggagctgttgctttaggccagatgtcataaactttctgcacaaggctagatagtaaatattttaggctttgtgggtcatacagtctctgttacaactacttagctctaccattgtagcagaaaagcagaaggcagccatagacaatatggaaatgaatgggcattactgtattctttatttacaagaacaggcagtctgtggtt

SEQ ID NO: 18945 - DNA, 335 bp, Homo sapiens
cagacgctcaggtgccacattggggtgcgctctcccggctcctccacacgctacgcagctgcccgcctcaagagcgtctgcgtgcttccagcgttaagtggaattccaagcagcctccggggcacagttagtctggtcactgcggccagactgccgcctcaggacccagagaacgcagcacactttagttgggcgtcgacgcggccgcgaattccagatctatgaatcgtagatactgaaaaaccccgcaagttcacttcaactgtgcatcgtgcaccatctcaatttctttcatttatacatcgttttgccttcttttatgtaactatactccc

SEQ ID NO: 18946 - DNA, 169 bp, Homo sapiens
ctttgtttctcaggaaaaaaagtcacaaaaaccaaaactttcagaatcaccaagtcttgaaaatagattatgaagcagactttttggatggtgcttaatgacatcaggcgacatttaaatgccacctagtgaggaacactgaaattgcagctaaatttttttttttttt

SEQ ID NO: 18947 - DNA, 756 bp, Homo sapiens
gcggcacgagggaagtcccgctcgtgcgccggaatttcagggaagagccaggtcctgtttgctgtggtgttcactgcccgatatctggacctcttcaccaactacatctcactctacaacacgtgtatgaaggtggtctacatagcctgctccttcaccacggtctggttgatttatagcaagttcaaagctacttacgatgggaaccatgacacgttcagagtggagttcctggtcgttcccacagccattctggcgttcctggtcaatcatgacttcacccctctggagatcctctggaccttctccatctacctggagtcagtggccatcttgccgcagctgttcatggtgagcaagaccggcgaggcggagaccatcaccagccactacttgtttgcgctaggcgtttaccgcacgctctatctcttcaactggatctggcgctaccatttcgagggcttcttcgacctcatcgccattgtggcaggcctggtccagacagtcctctactgcgatttcttctacctctatatcaccaaagtcctaaaggggaagaagttgagtttgccggcatagccccggtcctctccatctctctcctcggcagcagcgggaggcagaggaaggcggcagaagatgaagagctttcccatccaggggtgacttttttaagaacccacctcttgtgctccccatcccgcctcctgccgggtttcagggggacagtggaggatccaggtcttggggagctca

SEQ ID NO: 18948 - DNA, 238 bp, Homo sapiens
gggccagccatgtctgcatttcggtggctagtcaagctcctcctccctgcatctgaccagcagcgcctttcccaactctagctgggggtgggccaggctgatgggacagaattggatacatacaccagcattccttttgaacgcccccccccacccctgggggctctcatgttttcaactgccaaaatgctctagtgccttctaaaggtgttgtcccttctagggttattgcatttgg

SEQ ID NO: 18949 - DNA, 398 bp, Homo sapiens
tgctcagttggtatttaagggcatccacaacatgaatccaacctacctattcatcattctctccctctggagatccctgctctcccccaaacctatcatcctatttccatcattttgagagggatgctctccttttacccttcacctgcccagaacagtacttcacactcatttaaagtgatcatgtttgtattacacaaagcacccacaagtgtctggcatacaaaagatattcaatacaaatttattgaaatgactctttaggagagaaacacaatgaaaggactcgaatttatttctttttttcttttttctttttttggagacagagtcttgcgtcatggcactccagcctgggcgacaagaacggaactccgtctcaaaagaaacacagtgaa

SEQ ID NO: 18950 - DNA, 492 bp, Homo sapiens
tgactacgaatttaatacgactcactatagggaatttggccctcgaggccaagaattcggcacgaggaaattctgaagtttgatgtagtcccatttctctattatttgttccttatgcatttgatttcagagctaagaaaatgacatcaaattcttggtcttttgtaacaagaaattagtgccaagtccaatgtcatattttcccccatatacttatctaggaagtttgttatatttttatgttcaagtatttaatccattttaaatactgtttttatatggtgcatgtaacggaagggctcaactttatttttttcatgtagatactcagttttcaacatcatttgttgaaaaaactgttttcttccccattgtgtggccatagcaatcttatgtaaggttatttgattatgtacacacgtgcttaattctgagctattttgttttatcatccatttatttttctttgtgctaataccacattatttctat

SEQ ID NO: 18951 - DNA, 483 bp, Homo sapiens
  misc_feature (1)...(483): n = a,t,c or g
ttganncctttgaaacngctatgacatgattacgaatttaatacgactcactatagggaatttggccctcgaggccaagaattcggcacgaggtttgaggctgcactgggctatgatcgcaccactgcactccatcctggacgacagagcaagaccctgtctcaaacaaaaggcaaaaacagataaaattaatctctggtgatggaagttagaacagaggttactttttgggtgggtcccaacagggaggggcatgagggggccccctgtggttggaagcattctgtctcagtgctactcaaagtattgcaattgccagccaccttgccattcaccccactggctcctggatgataagtataagggtgcacctttgtctgaaccccagtgcctagcacagcccccgccatgtagagcagatctcagtggacatttattcaagaatgagcaaattgcccaggcgcantggctacttctgtaatc

SEQ ID NO: 18952 - DNA, 628 bp, Homo sapiens
gcactgctaggggcttaagcggagggagtcgagccagcgtcgccgcgatggtgttgttggagagcgagcagttcctgacggagctgaccagacttttccagaagtgccggacgtcgggcagcgtctatatcaccttgaagaagtatgacggtcgaaccaaacccattccaaagaaaggtactgtggagggctttgagcccgcagacaacaagtgtctgttaagagctaccgatgggaagaagaagatcagcactgtggtgagctccaaggaagtgaataagtttcagatggcttattcaaacctccttagagctaacatggatgggctgaagaagagagacaaaaagaacaaaactaagaagaccaaagcagcagcagcagcagcagcagcagcacctgccgcagcagcaacagcaccaacaacagcagcaacaacagcagcaacagcagcacagtaaagggcatacatttcctgctttcaccaattaaccactgaattgctattttttccttttggccagatagctaggtttctggttcccccacagtaggtgttttcacataagattagggtccttttggaaagaatagttgcagtgtttataggatagttgtggtaagaatctag

SEQ ID NO: 18953 - DNA, 411 bp, Homo sapiens
ggtagcttttatataaacaggcatccagttaacatagtggagattacaaagaccatacccagcaggaggtcagtggattttgatattctcctttttcccaaagggaagaggcttcccattggggttacaaagtagcaggtacttggctggaaggctgagaagagagaatggaggctgccctgttgaaagactgtgtatcagaaaggaatgtttaaatcctgaacttaggccctcacttctgcttgagcagagcagagctacttatgcctaagtattggcataagtgatgcctccacacagctttctcaaacccagatgtgagacaaagagagcagacagaaggcaagtgtccagggaaataaaatggccacaagcagttatcctggcccagtgtccctgcaccaaaggagc

SEQ ID NO: 18954 - DNA, 438 bp, Homo sapiens
  misc_feature (1)...(438): n = a,t,c or g
aaaccctttnnattttgaaaaccgttatgacatgattacgaatttaatacgactcactatagggaatttggccctcgaggccaagaattcggcacgagggagaaattcagaaacagctaaatgtattaatacttggaagctgatggaatgaatcaatatggcatggcaaaagaatctcgcagttgccatttccatatttcctgagtttaagacatgctgattagatgctcttagcacatccattttgaaaaacagcacatattttaaagacatatggcatttagaaatgtcacaataaatgaaacagtagcttaattgtttagggtaaacatttattttacagctagataactttgtaaaattatataatttaactcaatgtttttaaaacaaactgtaagtatgtatgtatgtgacacaaaaagtaacatatctctt

SEQ ID NO: 18955 - DNA, 428 bp, Homo sapiens
aaatccttgacatgattacgaatttaatacgactcactatagggaatttggccctcgaggccaagaattcggcacgagtgaactttgagctggtcattggtgaaagaacatggattagctgagcagaaaagaagaaggaatactggatgcagtaagtaaccactttgggactaaatttacaccaaaatgagtattagttcctttggttccaaatggttcagatgttctttaaaggcactgttcttactgcccagaggaaagagagtgagctgaaccatacatgcttgtagtaaagattgtatgtatgtcatatatgtatatctatatgtaatatatctacccatgattatacgttgtctataaagccccttcacacttttttttaacctcatagcagctcagcaggtcagtttaatatgatcattatt

SEQ ID NO: 18956 - DNA, 308 bp, Homo sapiens
ggatcatgatagacttgttagggcttcaaggccctcagagatgatcagtccaactgaacgaccttacaaatgaggaaaccaagataaatgagctgccagaatcaggtttccaatcaacagcagtgagttgggattggacagtagaatttcaatgtccagtgagtgaggttcttgtaccacttcatcaaaatcatggatcttggctgggtgcggtgcctcatgcctgtaatcctagcactttgggaggctgaggcaggcaatcacttgaggtcaggagttcgagaccagcctggccatcatggcgaaac

SEQ ID NO: 18957 - DNA, 283 bp, Homo sapiens
ggagcctgactcactttcactgtccagattctggggggtatatgctggtgacttactatggctgggagagccacgctcatgctttggagtggaaccactgatgagtggagagccatagtttttagaagaagccatttgaggcctaagcccttctccactactttccccaggtttctgcaaagtcactttggctttaatgctaggggagcctccatcatgcttactgatgataatttttgccacacctgtgctccccacattttttgactctgaggtcttctta

SEQ ID NO: 18958 - DNA, 450 bp, Homo sapiens
  misc_feature (1)...(450): n = a,t,c or g
gtttagtagagacggggtttcaccatgttggctaggctggtctcaaactcttgacctcgtgatttgcccgcctctgcctccccaaagtgctgggattacaggcgtgagccaccacgcccagccgtacatttactttttaaagcagcagactaggtacactaattctcactcaaatattttcatgggaatgtagttatcaccaagtcctaaagtattatttatgccaaaaatttcattttaaggactacaaaaatgattctaattaaacattttataatcaatagtaggttgggtctttagccattatatgtgtatatatacagacacatatgtatacacttacattttgacagggtcttcattgagtcttgatgcactttaaacccagctggctaccagagatgcgaaggtgggctctttgaagattancaaaanggacgttctgtcctt

SEQ ID NO: 18959 - DNA, 390 bp, Homo sapiens
aattcggcacgaggcaactgctccaacctcatctgccaccactggactctccctctgtacccctgtgaccacagcgggcgcccccactgctgggacacagggcttcagcttaaaggcacctggagcagcttccggcacctccacaacaacatccaccgctgccaccgccaccgccaccaccaccagcagcagcagcaccaccggctttgccttgaatttaaaaccactggcgccagccgggatccccagcaatacagcagctgccgtgaccgctccacctggccctggcgcagctgcaggggcggctgcagctccgccatgacctacgcgcagctggagagcctgatcaacaaatggagcctggagctagaggaccaggacgggacttct

SEQ ID NO: 18960 - DNA, 359 bp, Homo sapiens
gcggcacgaggatcacagccagtcctgcctgaggaagcctaagtcctatgtctttgggtatatagatggcagtggagctggagcatttgaggacacacgggccatgctagggacttgggcttttcccctgagcagctgtgaagtgttagggtttggagaggagtagtgcaacctgacttacttgccaatcagatgctgatcagaccatactggttgctgcactgagactaactaaacacggtgagtgagctgtgctggagggacagagggcagattgtgagcacccagtgaagatgcagttgcaggggtccagaaggcagatggctgggggattctgcatctgttttcgaagatggaac

SEQ ID NO: 18961 - DNA, 545 bp, Homo sapiens
  misc_feature (1)...(545): n = a,t,c or g
gaggaaccccagctacccatggctctgggaggacggttctcctttgatgccccacttatttagagtccgaggcgctgtctcccagacatacccttcaggtacctgtgcatatatacaacgaggagctgtttatgcggaaaactgcattttagctgccttcagtatatgtcagaagaaggcaaacctaagagcacagtgaatttgaaggctctggaagaaaagaaaaaagtctttgagttttattctggaatttaagctattctttgtcacttgggtgccaaacatgagagcccagaaaactgtcatttagctggctgcagaactcctttgcagaaactggggttccaggtgcctggcacctttatgtcaacatttttgattctagctatctgattatttcacctagcttgcccaagcttcctgcagcctgaggccatttcccntttattttaaaattggctccttttannttgaaaccctnggactcagcttntttacctattatcaccttccttanactcctaaatgctgaagacgacatggaa

SEQ ID NO: 18962 - DNA, 455 bp, Homo sapiens
  misc_feature (1)...(455): n = a,t,c or g
gagtagtggntttnnanttttnacncacagaactcttanganatgaccacgaatttaatacgactcactatagggaatttggccctcgaggccaagaattcggcacgagcgaatgcagtcactctccctgaataagtaactgcgacccgtgggaggagatgccggggacctgggccgcgctgccaggacctctgctgtgtctcgcccaccctgtgccctggcgccgctgcaacagcccctcatggccaggagccccccatggcctggggcctcctcttcatcttggcacagaaattgtttgggggatggggggggggactgggggaggggtagctgctatctttgagacagaaagatgcaggacagcatttcatttgtctggtagatagatagcatgtaagggggtggttgtcccaggaggcaantgctgacaggtttgctacacacagccccgg

SEQ ID NO: 18963 - DNA, 370 bp, Homo sapiens
ggtggcagggaaggttgtctgctccagaggcttccctagagtgaagagctctactatgtatgctttatgcggcagaaggagtgctttggaggagtttttaaatttgttttttttttaaatcttatcggttttaattgtagcaatgattcaagaaacgttagtaggtgcccataacttcggtggtggagatccaaaagtgaacaagacagtgttctggctgctaaattcttcttaactggttatgcctggagaccttcacttggttctgtgccagcactgcccatgagcttcatagactgtgatctttgctaaggcctaaatgaatgaaggtgcaggaccggaagcagaagacagaaagtggagaccagat

SEQ ID NO: 18964 - DNA, 436 bp, Homo sapiens
  misc_feature (1)...(436): n = a,t,c or g
atttgaancctttgaatacccnttttgacatgattacgaatttaatacgactcactatngggaatttggccctcgaggccaagaattcggcacgaggatattattaaagcacccttggaattacagtatgttcgaactttttaccttcagggtttttctttctcccagtttcctgaaaaacttaaatgaaccaggggaacaatatttgaaggaagcctgtgttagcttaaaaacccatctactaaaaattcagagactatacatatcagggctctctaaagtcagatgaagggggcacacattctttcacagctcatatcttcataatacttaaaaaatagtcaaatgataccatttcacatataaaacaaagctctagtacactgcagcaatgaataaatggtcattgctatttatcccaaacactctcaggaga

SEQ ID NO: 18965 - DNA, 535 bp, Homo sapiens
  misc_feature (1)...(535): n = a,t,c or g
aaaccnctntgacatgattacgaatttaatacgactcactatagggaatttggccctcgaggccaagaattcggcacgagaaaaagggtaatgatggcttatgtaataatgtcatcctgtggatgcacatccattgtacttcatactccacgggacatacactttgagtgattctcctcccagcattggtaatgtattttcactgaactcacatcttttgagtacccattataaccattgacagatactttccatttcagagagaaaaaaatattgggatttagagtgtgaagagcaaaattggtccactcaaacaccaaacccatgattggctttttaactgtcattttgtttgtttgtttttgttttgagacggagtctcactctgtcacccactgcactccagcctgggcacagagtatgacttcgtctcaaaataaataaataaaggccaggcatggtggctcatgcctgtaatcccagcactatgggaggccgaggcaggcggatcacctgtggcaggagttcaagacca

SEQ ID NO: 18966 - DNA, 418 bp, Homo sapiens
gagcagttatgcccagagcccagcgtgtcggcatcaccagtctgacctgagcaccatgtgctgcacgacatgacacgtggcaccgggggaactgcccagcgtggaaggtctgggccagattctcaggggctgctagattcatccctgatggcatcaggcactgccagccgctcagaggatgaggagtcactggcagggcagaagcgagcctcctcccaggccttgggcaccatccctaaacggagaagctcctccaggttcatcaagaggaagaagttcgatgatgagctggtggagagcagcctggcaaaatcttctacccgggcaaagggggccagtggggtggaaccagggcgctgttcggggagtgaaccctcctccagtgagaagaagaaggtatccaaagcccccagcactc

SEQ ID NO: 18967 - DNA, 878 bp, Homo sapiens
tatgactgattacgaatttaatacgactcactatagggaatttggccctcgaggccaagaattcggcacgagggaggaggctgcccggaagaaggaagaggaaaggaaagcaaaagacgatgccacattgtcaggaaaacgaatgcagtcactctccctgaataagtaactgcgacccgtgggaggagatgccggggacctgggccgcgctgccaggacctctgctgtgtctcgcccaccctgtgccctggcgccgctgcaacagcccctcatggccaggagccccccatggcctggggcctcctcttcatcttggcacagaaattgtttgggggatgggggggggactgggggaggggtagctgctatctttgagacagaaagatgcaggacagcatttcatatgtaaccatttgaatgtttttgctgtttttagaattcagagcccttgctggggggtgcctgggagatggggtaagaagagctttcatttgtctggtagatagatagcatgtaagggggtggttgtcccaggaggcagctgctgacaggtttgctacacacagccccggactgtgttgcctgggtgctcattcagagaggggctatcatctgggagcctgtgcccctgggtcctcgagggtcatggcttgtccctggtcagtcctgtctgactgacctcagggcctcacctctctgcccttccctgcccggttcctactcacctggctagggccagtgcccattttcagccctacccattgatcaattcaaagaaaactccggttactgtgtgggaaccaagcaaaacatgctcaacaaattcaacttgtatatttggcagattaaacttgacattatcgtaaaaaaaaaaaaaa

SEQ ID NO: 18968 - DNA, 332 bp, Homo sapiens
caagaaatctggtatgagccagccatatccccagactcaagaaatggtgtcatttaagtgatcatggaataaaagccaacttctggaaacgtgagatggccacatgggctatatataacacataagactatagacattttctctggggttcaggttttcagagacccacaactagaatatcaaaagaaatttcgtgctcagtcgacgcggccgcgaattccagatctatgaatcgtagatactgaaaaaccccgcaagttcacttcaactgtgcatcgtgcaccatctcaatttctttcatttatacatcgttttgccttcttttatgtaac

SEQ ID NO: 18969 - DNA, 332 bp, Homo sapiens
gagggagaagctgctggtcggactcacaatgaaaacgctccttcttttgctgctggtgctcctggagctgggagaggcccaaggatcccttcacagggtgcccctcaggaggcatccgtccctcaagaagaagctgcgggcacggagccagctctctgagttctggaaatcccataatttggacatgatccagttcaccgagtcctgctcaatggaccagagtgccaaggaacccctcatcaactacttggatatggaatacttcggcactatctccattggctccccaccacagaacttcactgtcatcttcgacactggctcctccaacc

SEQ ID NO: 18970 - DNA, 505 bp, Homo sapiens
  misc_feature (1)...(505): n = a,t,c or g
gctgggtggcttaatagaataaaaacgtattccttcacagctcgggaggccataagcctgaaactaatgtgctggcaaggctggttccttttggaggctctgaggaagaatctgttccatgtctcttcttagtcacattttggtctctggcattcctcggcttgtagttacctcactccaatcctgcctctgtcatcatggagccttcttcctatgtgctcctctgagtttctgtatccttatcctatcttctttgtaaggacaacagtcattagattcagggctcacctaaatccagtatgacctcatcctaacaagtccatctacgaagaccctatttccaaataaggtcacattctgaggttccangtagacatganatttggggggtactctcacaccaccatcnnctntanacttttctcaagtnnananaattnggngtttncnattgaaaaagcanaaccacctgtcanctgtgncattgaaaacnctttgtcccggg

SEQ ID NO: 18971 - DNA, 355 bp, Homo sapiens
gcacattcagtttattgcagtatttttcaagtctcctattttcttattgaaactgggtaactgaaacctccaaccatgattactgaattatccatttcttcctttaatcctgcaagtttttgcttcatggattttgggactctggtattagatgcttatatgtttataattgttaggtcttttatcatcataaaaatcttctttgtcttaaagtctatcttgtcttctattaatatgggtctctggccctcttttggttactgttgggtggtatcttcttacttttaacctctttgtatctttaatctaaagtgtgtctcttgtagacacaatatagttggatctgtttttttta

SEQ ID NO: 18972 - DNA, 470 bp, Homo sapiens
  misc_feature (1)...(470): n = a,t,c or g
gcaaggtgggagaattgcctgagttcaggagtttgacaccagcctgggcaacataacaagaccctgtctctacagtaagtaaaagattactggatgtggtggcatgtgcctgtggggccagctgtttgggaggctgaggtggaaggattgcttgagcccaggagtatcaggctgcagtgagccatgattgtgctattgcactccagcttggtgacagagtgagaccctgtctcaaaaaaataaaaccttgaggacccaaatttgatttaaatttagatgtactatctgctttgggagagttactttattattatttagtagagacagggtctcactatgttgcccaggctggtctccaacttctggcccaagcagtcctcccaccttgggctcccaggtgctggggntacaggcgtgagccccaaccctgccttangnatttttttgacttnatgactgctgggggcaaa

SEQ ID NO: 18973 - DNA, 357 bp, Homo sapiens
gaaaaatcagattgtagagccctacagatgcagataggagagccattcataaagcttcaataaagtgactttatttcttctagaaggttctattttccagtgggtcatcaagaataaaacattatatcaagttcctgaaagctaaaaaagtacttcctggaaaaaaaatataactctaaacagcaaacaataattttaagaaccactgattgagataagagcctttcaaatcaaaattttattttaaatataagttatggaatagattcaaattgtcgacgcggccgctaattccagatctatgaatcgtagatactgaaaaaccccgcaggttcacttcactgtgcatcgtgcacc

SEQ ID NO: 18974 - DNA, 490 bp, Homo sapiens
ggcaagatggcagaagtagagcagaagaagaagcggaccttccgcaagttcacctaccgcggcgtggacctcgaccagctgctggacatgtcctacgagcagctgatgcagctgtacagtgcgcgccagcggcggcggctgaaccggggcctgcggcggaagcagcactccctgctgaagcgcctgcgcaaggccaagaaggaggcgccgcccatggagaagccggaagtggtgaagacgcacctgcgggacatgatcatcctacccgagatggtgggcagcatggtgggcgtctacaacggcaagaccttcaaccaggtggagatcaagcccgagatgatcggccactacctgggcgagttctccatcacctacaagcccgtaaagcatggccggcccggcatcgggggccacccactcctcccgcttcatccctctcaagtaatggctcagctaataaaggcgcacatgactccaaaaaaaaaaaaaa

SEQ ID NO: 18975 - DNA, 335 bp, Homo sapiens
ggtgaaagtgaaagcttgtgaaagatgctgggattggcagccccgcagactgaagtcctctgttcatccacagaacagatccaaaaaattaatccaagaatcggatcagcacctgaaagatgtagaaaaaattttacagaatgacaaacggtatctagtactggactgtgtgccagaggagaggcgtaaactgattgtggcatatgttgatgacctggatcgccggggtccacccccacctcccacagcatcggagcccacgagacgatcaacaaaataattctaaatactcttccatagggacatctattcaaaatgcttgcatgagccaattt

SEQ ID NO: 18976 - DNA, 467 bp, Homo sapiens
  misc_feature (1)...(467): n = a,t,c or g
tttgaacacctttganaaccgttatgacatgantacgaatttaatacgactcactatagggaatttggccctcgaggccaagaattcggcacgagctggtaaaggattaacttaacaaactggctttccaagaaaataaagccttgattggtagcacttgcaatttctatggtacaaacgcttcccgcatgactgagttcaagctgtcaaggagacatcactatacatggacttgggaagagatgagaacaatcagcccactgagcctatgggaactggctccagcacatccctgcaagtcaactctcatcagggtgagtgagttgaggaccaagaagcagttatcctcttgcctttgcaggacccaggcaaagggaagggcatagtgacagtgatgatctctcttccggaagtctttggtttgctgagagtaaaaggcgtgggcttcaccagtggtgangccagtc

SEQ ID NO: 18977 - DNA, 325 bp, Homo sapiens
gctctcttttcaatcacaggcatcaaatctttctggtaagcatgaagagttattatcaaacagttgtgttagtgttttccaaggtgtgattaaaaatggagatttcttacctcatcccagtcctgctaaaccaaaatctcttagggaaggatgggccccccagcattcacagtttaagcagcattacaggagattattatttacattaaaatttaagaatcattggcttaaacacaaagaaaaaaatgtaattttattcttccagaattggcaaatgcacagccttaaccagtcaacaaagatcttcacctgtgggctgtttacg

SEQ ID NO: 18978 - DNA, 533 bp, Homo sapiens
ggccccttcccttgacagaacctgggatgagatcctcgtttcagaaaatgatttgatcctcctgaaggcgctccctgctaaggatctaaactcaggagacgaggtttcaccgtgctggccaagctggtctccacctcaggtgatctgccccgctaagcctccgcaagtgctgggattacaggtgcggagctgtacttcaacgtggaccatggctacctggagggcctggttcgaggatgcaaggccagcctcctgacccagcaagactatatcaacctggtccagtgtgagaccctagaagacctgaaaattcatctccagactactgattatggtaacttcctggccaacgaggcatcacctctgacggtgtcagtcatcgatgaccggctcaaggagaagatggtggtggagttccgccacatgaggaaccatgcctatgagccactcgccagcttcctagacttcattacttacagttacatgatcgacaacgtgatcctgctcatcacaggcacgctgcaccagcgctc

SEQ ID NO: 18979 - DNA, 445 bp, Homo sapiens
  misc_feature (1)...(445): n = a,t,c or g
gggtaaaaatcacatcaaatctcaaattgttattctttggaatggataaaaaggatattagtatttttgtcaatttaagttttatagagaaagttggaaaaataattatatagggacacttgtcttggttaacttggacagagatttttttttctgttgctgtggaaaagatacaggcataggatttttctaagaagtttcattttttatgcaagtgatatactgtgggaggaggttaaaggaaacagccagaaagacaggtaataagcttgatgtttgtgacaaattgataacttgcagcctgtgatgttggcaggtgttgctgacagggtcatctggggccaggtggncgctgtcctgaggacctgccgggtacccagaatgctgcctgctgttcggtggctctcaaacgtcagcacctggaggttctggctctggcgcctgg

SEQ ID NO: 18980 - DNA, 181 bp, Homo sapiens
ttcttttcagacataacactgagttctgtccccatggcctcagtccatgggcagaagtgtgggctgcacagcaccaagggcctcactggggacaggaacgacttatccttcctatgcctctagcacttagtacagctgacattggcagctatttgttgagtggctgagtgaggcgggctta

SEQ ID NO: 18981 - DNA, 438 bp, Homo sapiens
gcgacgagccctcaggcgaacctctcggctttcccgcgcggcgccgcctcttgctgcgcctccgcctcctcctctgctccgccaccggcttcctcctcctgagcagtcagcccgcgcgccggccggctccgttatggcgacccgcagccctggcgtcgtgattagtgatgatgaaccaggttatgaccttgatttattttgcatacctaatcattatgctgaggatttggaaagggtgtttattcctcatggactaattatggacaggactgaacgtcttgctcgagatgtgatgaaggagatgggaggccatcacattgtagccctctgtgtgctcaaggggggctataaattctttgctgacctgctggattacatcaaagcactgaatagaaatagtgatagatccattcctatgactgtagattttatcagact

SEQ ID NO: 18982 - DNA, 334 bp, Homo sapiens
gctttatgcgttattaaacaagaagttgctttaaaataatgagttagtaagttttttttaacatttacatagtgaaagttattgtgtgttaatgctttgggcaacacatttaacacagttctcacttaaggagtttatagtttaattggagagatgagacataccttaagtaagatataaaacttcttaatagattttaaaaatcagtttcttgggcttttctaaaatttaaaagcatattttatagtattaagcttttataatcttactgctattgtgggtttcaaacaacttaaacattttcaagaagtttatacatagagccaaggcatcc

SEQ ID NO: 18983 - DNA, 487 bp, Homo sapiens
  misc_feature (1)...(487): n = a,t,c or g
tttgaattccattttgatatcacatgattacgaatttaatacgactcactatagggaatttggccctcgaggccaagaattcggcacgaggtggaggagacgtgcagctacgaggaggccttcgaggctctggagtcctccacggctacggatgtgttctgggccaagtacacagcttgtgagacagcgaggacgcctcgagataagcttgctgcatgtctggaaggtaactgtgctgagggtctgggtacgaactaccgagggcatgtgaacatcacccggtcaggcattgagtgccagctatggaggagtcgctacccacataagcctgaaatcaactccactacccatcctggggccnnnnnnnngnaaaattntnggcngaacccgacagcagcaccacgggaccctgggngctacactacagaccccaccgtgaggaggcaggaatgcagcatccctgtctgtggcaggatnaagtcactgt

SEQ ID NO: 18984 - DNA, 497 bp, Homo sapiens
  misc_feature (1)...(497): n = a,t,c or g
tgaancctttgctatccacntgattacgaatttaatacgactcactatagggaatttggccctcgaggccaagaattcggcacgagactgatgaaaactggtggaaaaggttgtttagtgaaactacgctgaagttaaactttaaaatggagggcaatactggttctttgaagagaaatctagaactcactgtatccaacaggagagatttacaaagagtttctgttattttttccatccacgtcatttccctgcttagtaacttctagtgtgaaaatatcaaaagcaggtatctctgagaagtggacttaggcttattcttcttttcttttagaccttattctggtttgaggtttttgtgatcatcatgtactacttttattatataagaataaaaaaaaattaaccccaaacccctcaaatttccaggcgcttcctgttgcccagaccctgcaccattctggccccactcagcctagtttatttccactgnttgc

SEQ ID NO: 18985 - DNA, 350 bp, Homo sapiens
gtttatgggtgacttagaaaccattaaatgagttattgtttcagtgcaataagttacatttgcaatattgctgcctatggaccattattaatcttagaaaatgaaataggtggtctaattacctgtctaattcttttcagattctggctgaataaaaatataaactaaatgatataaaatggtgtttcaaacattatgttaaaatcgaataggacaaatattttttaaattttcatatataaagtgattgctgacataaaaatatgtaagcaatccttgttaagatggtactataagattattcattggtcttccttcctctgctgtaaactcagttagagataaaacct

SEQ ID NO: 18986 - DNA, 501 bp, Homo sapiens
  misc_feature (1)...(501): n = a,t,c or g
tttgaatntcgctacacatgattacgaatttaatacgactcactatagggaatttggccctcgaggccaagaattcggcacgagtggacccagccccaaaaggaacactgaaaaacgtaatcgtgaacaggaaaataaatatatagaagaacttgcagagttgatttttgcaaattttaatgatatagacaactttaacttcaaacctgacaaatgtgcaatcttaaaagaaactgtgaagcaaattcgtcagatcaaagaacaagagatgggatctcactaggtggcccaggctggtctcgaactcctaagctcaagagatcctcccacttggcctcccaaagtgctgtgattataggcatgagtcaccacgtccagctgtttcacttttttattgttgatgcattcgctgaagtagctgggattacagtgcccaccancattgcctggctaatttttggattttagtanagacagggtttancatgttggtcaagctgg

SEQ ID NO: 18987 - DNA, 379 bp, Homo sapiens
  misc_feature (1)...(379): n = a,t,c or g
gctccccttggagaggaggcaggctttccctccagctctggggaagggggcccctgtgaggggaggtgtttgttgggggactgaggcagcatcctcccaggggaagcagctgctctcctaccccacccactgcgcctgagagcacgcagtctccaacccgagctccctcccgcccttctcttctcgtcatttcattattgatccaccttttcctaggccaatcctggggcttggaaggggtgggggaagccaggttggggtgaggagagtagataagggacagttatactttagtgtggtggcggtggttgctttgggatgggagaaaaaggattatcaagcaaagttattccttanaaaggacttggggttgctctga

SEQ ID NO: 18988 - DNA, 345 bp, Homo sapiens
gggagaagtggtatttctgtatggaatgtcttttgaaaagagagaccatcacaaatggtgttattaagaatgttgaactgccgggcgcggtggctcacgcctgtaatcccagcactttgggaggccgaggtgggcggatcatgaggtcaggagatcgagaccatcctggctaacacggtgaaaacctgtctctactaaaaatacaaaaaattagccaggtgtgctggcgggtgcctgtagtcccagctgctcaggagcctgaggcaggagaatggcgtgaacccgggaggcggagcttgcagtgagctgagatcgcgccactgcactccagcctgggggacagac

SEQ ID NO: 18989 - DNA, 330 bp, Homo sapiens
ccagcatgagggtcgcggctctgatcagtggtgggaaggacagctgctataatatgatgcagtgcattgctgctgggcatcagatcgttgctttagcaaatctaagaccagctgaaaaccaagtggggtctgatgaactggatagctacatgtatcagacagtggggcaccatgccattgacttgtatgcagaagcaatggctctctcccctctatcgccgaaccataagaggaaggagcttggatacaagacaagtgtacaccaaatgtgaaggtgatgaggttgaagatctctatgagcttttgaaacttgttaaggaaaaagaagaa

SEQ ID NO: 18990 - DNA, 437 bp, Homo sapiens
  misc_feature (1)...(437): n = a,t,c or g
gnnnnngnnnnnnnnttnnnnnnntttgnnatccnctatcacatgattacgaatttaatacgactcactatagggaatttggccctcgaggccaagaattcggcacgagcggcacgagatcacgaagcagcagaatgcccagggcggtttctcctccacccaggacacagtggtggctctccatgctctgtccaaatatggagcagccacatttaccaggactgggaaggctgcacaggtgactatccagtcttcagggacattttccagcaaattccaagtggacaacaacaaccgcctgttactgcacagggtctcattgccagagctgcctggggaatacagcatgaaagtgacaggagaaggatgtgtctacctccagacatccttgaaatacaatattctcccagaaaaggaagagttcccctttgctttag

SEQ ID NO: 18991 - DNA, 1392 bp, Homo sapiens
actccgaacagctatgacatgattacgaatttaatacgactcactatagggaatttggccctcgaggccaagaattcggcacgagactatggcgcacgtccgaggcttgcagctgcctggctgcctggccctggctgccctgtgtagccttgtgcacagccagcatgtgttcctggctcctcagcaagcacggtcgctgctccagcgggtccggcgagccaacaccttcttggaggaggtgcgcaagggcaacctggagcgagagtgcgtggaggagacgtgcagctacgaggaggccttcgaggctctggagtcctccacggctacggatgtgttctgggccaagtacacagcttgtgagacagcgaggacgcctcgagataagcttgctgcatgtctggaaggtaactgtgctgagggtctgggtacgaactaccgagggcatgtgaacatcacccggtcaggcattgagtgccagctatggaggagtcgctacccacataagcctgaaatcaactccactacccatcctggggccgacctacaggagaatttctgccgcaaccccgacagcagcaccacgggaccctggtgctacactacagaccccaccgtgaggaggcaggaatgcagcatccctgtctgtggccaggatcaagtcactgtagcgatgactccacgctccgaaggctccagtgtgaatctgtcacctccattggagcagtgtgtccctgatcgggggcagcagtaccaggggcgcctggcggtgaccacacatgggctcccctgcctggcctgggccagcgcacaggccaaggccctgagcaagcaccaggacttcaactcagctgtgcagctggtggagaacttctgccgcaacccagacggggatgaggagggcgtgtggtgctatgtggccgggaagcctggcgactttgggtactgcgacctcaactattgtgaggaggccgtggaggaggagacaggagatgggctggatgaggactcagacagggccatcgaagggcgtaccgccaccagtgagtaccaaactttcttcaatccgaggacctttggctcgggagaggcagactgtgggctgcgacctctgttcgagaagaagtcgctggaggacaaaaccgaaagagagctcctggaatcctacatcgacgggcgcattgtggagggctcggatgcagagatcggcatgtcaccttggcaggtgatgcttttccggaagagtccccaggagctgctgtgtggggccagcctcatcagtgaccgctgggtcctcaccgccgcccactgcctcctgtacccgccctgggacaagaacttcaccgagaatgaccttctggtgcgcattggcaagcactcccgcaccaggtacga

SEQ ID NO: 18992 - DNA, 500 bp, Homo sapiens
  misc_feature (1)...(500): n = a,t,c or g
atttgaancctttgctatccacatgattacgaatttaatacgactcactatagggaatttggccctcgaggccaagaattcggcacgagcggcacgaggtgaggtgtgccctggagcctacctacctgtaactatagctctcagagtactcttagctcaattctcttttctgtgtgagttggagtacaaaagaagtcacttctgaggttagtttatctattcccttcacttcataaatgtataaatgagaaccagagtgggaaataaaatcaaggaactgattacccaagggaataaaccaaggcaagtctagtactgtgacttcaatattctgacctccagttcagacctttttcttgtacttcccgctgctcccacacattacaccatccttgggcctgcacctagacctctgccacagccaccccatactgcactcagtgtggccaatcatatgcctgccatgttccagggcctgcctgagactcagaaccaccccc

SEQ ID NO: 18993 - DNA, 410 bp, Homo sapiens
  misc_feature (1)...(410): n = a,t,c or g
gcaagtttcccctcatggagcctgtgctttgttgggagtcatgggtggaatgaatccccctcctcccagcctgggggtgctctcctcattgccttccactccccggcagctgagatagtgctgaggctgttggctggggcagggcctaggctgcgaggtggccccatcgtgggcacactagccctgcacccctgggcattggtgcgtccgccaagaaatgtttaggtttccattctcagcctggtttcttccccctcagggcccagcaagaaagaacagccccttctggccttcctgctgggggacagaggctcccagagccacttctgagttggggtacagacttcggtggtcatcaagatgaaaggaggtgcaganagagcctgaaattggctctgtgatcccgactt

SEQ ID NO: 18994 - DNA, 430 bp, Homo sapiens
ggtgaaaccttttctaagggcatgaatctttctgtaaatccctgtacagttatgttttgccatttacaatcagttttcccataggaatggtcacacaatgaagttttaagttcccaggctaccacgtagtccataattaatgtgtctgaaatataatccttgtagtacaatagacccaaatcatggtttggcactgattgctttcaaagttctggcatgaacacagctcttcctgttagaaccaggactgcactctcccactccgtcatgtagcagggcaggctccccgtgctgtagacagtgcttcctgcattcagaatgtggagtaaagaccgtggttgggtaaaggaggcatgaggaccagaatggggaggaaagcaagaagagatggtagggatagggttttcacttctcttcttttccgatatgc

SEQ ID NO: 18995 - DNA, 331 bp, Homo sapiens
aaaacagattaactggacagtggaagcagactatggaaatggtttgcaactaaatgaccacacctgcagtcaaacgaattgaaaaagtaggcaaaactctatgtttaactaaacaacctagttttactgtacatgctaaaacacttatatattttatgaccatcatcacgctccagctgtttaaaaacagctgggcaggtagaagggtcagtatcttcaaaggcactgaaaaatagttgttaacagtaggaatcagggaaaaggggtgacactggtctatatgacaatggaactaaatgaaattctccttgcaaaggagaattacatcagc

SEQ ID NO: 18996 - DNA, 373 bp, Homo sapiens
  misc_feature (1)...(373): n = a,t,c or g
agacatgcagatgaagaaatattaatgaccccaaaatggttgccagagataaaataagcatccaagagggtcagacttccctctccccaaatagccaggaatagccctagcaatccatagctcttagtaatctcataaagagtgatcggatcatggtctcttaatacacatcatccttcttcatggnatctttcaactgcagaactaccaaaactggggccagaagattcacatattcttatcctaactctgcccagagttaacgctgtctgtgataaatgacttgccttctctctgcctccatttcctcatctccaaaacaaacatttaccgagggtctacaacggatcttacagacttatgcaaacaaatg

SEQ ID NO: 18997 - DNA, 435 bp, Homo sapiens
ggttccacaaattagacttgcttattgaagaaaacaaatgatctacctttaaataaatacctttcaataacttgcttggcccaggtcaagttgaccagactgcttaaaaggcacgatgaattacaatattgtccaaaactgtggaagatacaagtgagggatattggctcaaggaggagtcgagtccaagggtttagggtcaaaacgaacagacaaagagtggtgatacaatctctgcagcaagcacacatataatttccatgtagctggatgtgtctggctcccgtcgcttctagcaaaacatcttctctgacttggcttgtgattgtgtaattgctccgtgaagcctggcttctctcagacttgacaaatgtgaagtccacagactaacaatggatcagttaacccaaactccaccagcattgtaaagacttg

SEQ ID NO: 18998 - DNA, 523 bp, Homo sapiens
ttttgaccaccgttatgacatgattacgaatttaatacgactcactatagggaatttggccctcgaggccaagaattcggcacgagtgaagaacagggaggtattggcccattgacttcatgttttactactgcttacgtgtttgtctgttgactgggaacggtttctctagttcaacaatgaacccaataggtgggttttcacactggctaggctttggaggattgcatttttttagacataatgtgtggggcttagggagggcagccaggcagtgtgggatgcaatctcttctctgaagcagctggttctcgctataagctcagccacgtacattccactcccaagtttccttggcgctaaaactgcttggaatagcctaagcctacggaagcaaagatgacttatttaaacagcttcatggttcctattacctttctttttctgatctctaactttccatgtcttcctgaaggacatgttccttttgcactgatatttccagtcaaatttaagtgatctt

SEQ ID NO: 18999 - DNA, 549 bp, Homo sapiens
  misc_feature (1)...(549): n = a,t,c or g
tttgaannnccntnnatttgaaacccttgactgattacgaatttaatacgactcactatagggaatttggccctcgaggccaagaattcggcacgaggtttcttttacttcaaaatctttcttcagggagcaagacatgaactgactaattggtatccactacttgtacagcttacataaatgagttgatgatatttaaccagtttttataaacttcatttaggtctctaaacacagactttttaaattgcaactgtaaatatgaaatggtcatcacatctgaccttggtcagtggggaggggaactggtatcctgccaagcctggttgtaatttgtaaccattttctatttgtgcaaactctgtaaatatgtgtttaaacaaatgtaatattttgtacaagatacactggagaacaaagggaactcaagattcttccagccacatgtcacctgtaggtagaagtaaactctgcagtgcagcttctgctcttggcccctctggccagggcccctgtggcttcctgcacactggacaggtgactgtatgg

SEQ ID NO: 19000 - DNA, 437 bp, Homo sapiens
  misc_feature (1)...(437): n = a,t,c or g
aagacattgtcttgcatatccataagcagggcttagagcattattccaaactctagctgtttcagtagttctatgaggattgcaagtcataggtgtgtgtggcatatcagtccatctccctcatctccattctcagtttcttccccacaaaatttggaatcaaagcttttatgacgcttgccaattgcagaacttcttcagctaaggttaatttgacgctatgataaaactgagagatgtcaaaaagcctcttacaaattttaatcttgaaagacttttcagggtatctcattttttaggtgggggtggcaggtgtatttcttttttaacaaataaaaggcatttaagtaaaactaaaatgaaaaaagtaggccttctgacattgtgtacttggtggttctgtccctctgctgtaacaaatctcatttttgntacca

SEQ ID NO: 19001 - DNA, 428 bp, Homo sapiens
gaaacaactcagaattgctgtgcctcccgactgggtggttttcctctgggcagatgggtgagtgccaaaagaacaggtcctggcatgaggattctggctctgaatttaaaatatacattggatcatgggccatgaagctgttcactgtgtagaaacagcccagtgttctgtaccctctgcctcagccgtgcccggcagcaacattgcctccatcgctcagagacacccgcttctccagggccaggcagggtagcatgtggggagatggagaaaggcctgaagccctgaacaatgggaaagatggccagctggggttagtgaggttcccaaaaaggctcaagtgtgcaagcgagagagaaggcttacagaaagcctgtgctggtgttttatgtgttctggtgtgaggtacatgtgaagtgaccacgtct

SEQ ID NO: 19002 - DNA, 356 bp, Homo sapiens
gaaaatatgtggtgacatccatggacaatactatgatttgctgcgactttttgagtacggtggtttcccaccagaaagcaactacctgtttcttggggactatgtggacaggggaaagcagtcattggagacgatctgcctcttactggcctacaaaataaaatatcctgagaatttttttcttctcagagggaaccatgaatgtgccagcatcaacagaatttatggattttatgatgaatgtaaaagaagatacaacattaaactatggaaaactttcacagactgttttaactgtttaccgatagcagccatcgtggatgagaagatattctgctgtcatggaggtttatcac

SEQ ID NO: 19003 - DNA, 539 bp, Homo sapiens
  misc_feature (1)...(539): n = a,t,c or g
gctgggtcaagtgatgtctacaaaagactttcctgtctccgtaaggctgaggtaagccactggccccacagcattgcctatctctgctataaaggatattaccctctgccttagattagggttcactttgttgtatctctctcctccactaagctgtttgctctttacagaagggactatggcttcacgtcttcttcatttctgtattctccaccaacttagcatagtgcctcatcactagaaataattcaggacaacggtaaactgatgtaacccaatcaaactaactactaatatttgtaaagtgcttcactaagcatgtttacatacagtaaagtagtagagtacactaggtgaataagcatttccaagcagacccactgggagcttccagcccagcaaggagagcctgctctgaacactgccctttggtatgataccatactccttaaatctnctccttcaaagattcnctacttttcaaccacaacactgactgtaatgtgaaatcananccaaatagttaatcattaattagg

SEQ ID NO: 19004 - DNA, 358 bp, Homo sapiens
ggctgcagcctgtgtgtaccccaccctgtgcacccgaggctgtgtgccgtgcaggcaacagctgtgagtgcagcctgggctatgaaggggatggccgcgtgtgtacagtggcagacctgtgccaggacgggcatggtggctgcagtgagcacgccaactgtagccaggtaggaacaatggtcacttgtacctgcctgcccgactacgagggtgatggctggagctgccgggcccgcaacccctgcacagatggccaccgcgggggctgcagcgagcacgccaactgcttgagcaccggcctgaacacacggcgctgtgagtgccacgcaggctacgtaggcgatggactgcagtgtct

SEQ ID NO: 19005 - DNA, 393 bp, Homo sapiens
gaattcatgacaaaagacatctcaaatcagtggggagtcaataaatgagatgggactattggttacccatttgggaaaaaaaatttaagtgaaatccttgtctcatatgaaaacaaatacaggccaggtgcagtggctcatggggttacatgcctgtaaccccagcactttgggaggctgaggcgggtggattgcttgagctcaggagttcaagagcagactgggaaacatggcaaaacaccaaaaatacaaaaattagccgggcctggtggcacatgcctgtaatcccaactcggcaggatgagacaggaaacatggcaaaacaccaaaaatacaaaaattagccgggcctggtggcacatgcctgtaatcccaactcggcaggatgagact

SEQ ID NO: 19006 - DNA, 524 bp, Homo sapiens
  misc_feature (1)...(524): n = a,t,c or g
gcgtggttgccttggtcctcctgaacgtcgcagcggggggagccgtgccgctcttggccaccgaaagcgtcaagcaagaagaagctggagtacggccttctgcaggaaacgtctccacccaccccagcttgagccaacggcctggaggctctaccaagtcgcatccggagccgcagactccaaaagacagccctagcaagtcgagtgcggaggcgcagaccccagaagacacccccaacaagtcgggtgcggaggcaaagacccaaaaagacagctccaacaagtcgggtgcggaggcaaagacccaaaaaggcagcactagcaagtcgggttcggaggcgcagaccacaaaagacagcacttgtaaagtcgcattcggagctgtnnntccaaaagacagcactggcnaatcggttctgaggcgcanacccanaanacagcccaacagtcnggttgcggaggcaaagacccaaaaaganagccctaccaagtcangttcggagcgcagacccaaaanatgtcct

SEQ ID NO: 19007 - DNA, 866 bp, Homo sapiens
ggtgtcttccataatgtataaagaacaaggtagtttttacctaccacagtgtctgtatcggagacagtgatctccatatgttacactaagggtgtaagtaattatcgggaacagtgtttcccataattttcttcatgcaatgacatcttcaaagcttgaagatcgttagtatctaacatgtatcccaactcctataattccctatcttttagttttagttgcagaaacattttgtggtcattaagcattgggtgggtaaattcaaccactgtaaaatgaaattactacaaaatttgaaatttagcttgggtttttgttacctttatggtttctccaggtcctctacttaatgagatagtagcatacatttataatgtttgctattgacaagtcattttaactttatcacattatttgcatgttacctcctataaacttagtgcggacaagttttaatccagaattgaccttttgacttaaagcagggggactttgtatagaaggtttgggggctgtggggaaggagagtcccctgaaggtctgacacgtctgcctacccattcgtggtgatcaattaaatgtaggtatgaataagttcgaagctccgtgagtgaaccatcattataaaccgtgatgatcagctgtttgtcatagggcagttggaaacggcctcctagggaaaagttcatagggtctcttcaggttcttagtgtcacttacctagatttacagcctcacttgaatgtgtcactactcacagtctctttaatcttcagttttatctttaatctcctcttttatcttggactgacatttagcgtagctaagtgaaaaggtcatagctgagattcctggttcgggtgtta

SEQ ID NO: 19008 - DNA, 338 bp, Homo sapiens
gtgcagtcaaagaggccatcgtgagggctcttgtcggtcggccatggtgccgggagcaaagagatgattaagacaccatcccaggcctcaagccccacgaaacgcaggggaagcgccatgctatgcagccagcaatcgttttaccttttaagagctctgagagagacacccactggaaaggggtgcagaggaccccagaggatcaactaacccagtgtgggagggtcagggaaagcttcatagaggccgtgacccttagggcaaatcttgagaggaagatggccaggcagaggaaatgggaaagtctgttccagcaccatatttgctagattcttggc

SEQ ID NO: 19009 - DNA, 214 bp, Homo sapiens
ataatttctgggttaaggcaatagcaatatttctgcatataaatatttctgcatataaattgtaactgatgtaagaggtttcatattgctaatagcagctacaatccagctaccattctgcttttattttatggttgggataaggctggattattctgagtccaagctaggcccttttgctaatcatgttcatacctcttatcttcctcccaca

SEQ ID NO: 19010 - DNA, 386 bp, Homo sapiens
ggcgtcgcccggctgcctgtggctcttggctgtggctctcctgccatggacctgcgcttctcgggcgctgcagcatctggacccgccggcgccgctgccgttggtgatctggcatgggatgggagacagctgttgcaatcccttaagcatgggtgctattaaaaaaatggtggagaagaaaatacctggaatttacgtcttatctttagagattgggaagaccctgatggaggacgtggagaacagcttcttcttgaatgtcaattcccaagtaacaacagtgtgtcaggcacttgctaaggatcctaaattgcagcaaggctacaatgctatgggattctcccagggaggccaatttctgagggcagtggctcagagatgccctt

SEQ ID NO: 19011 - DNA, 414 bp, Homo sapiens
  misc_feature (1)...(414): n = a,t,c or g
gcaaactctggctgggtacaatgactcatgcctgtaaggttcagactctggctgggtgcagtgctcatgcctgtaaggttcagactctggctgggtgcagtgctcatgcctgtaaggttcagactctggctgggagtaggggctcatgcctgtaaggttcagactctggctgggtacaatgactcatgcctgtaaggttcagactggctgggagtaggggcttatgcctgtaaggttcagactctggctgggtgcagtgctcatgcctgtaaggttcagactctggctgggtgcagtgactcctgcctgtaaggttcanactctggctgggtgcagtgactcatgcctgtaaggttcanactctggctgggagtangggcttatgcctgtaagggtcaaatctgctgggtgcac

SEQ ID NO: 19012 - DNA, 426 bp, Homo sapiens
  misc_feature (1)...(426): n = a,t,c or g
gaattaatgcaaccatatgtcacaaagagtattgcgttaaccttcaacaaatctgtttgtttccattcttgctacttctccttaggaaaataagctatttctagcacctgacagaggacatacatagtgcacatagtactcaaatatttgaggggatgaatagcaaccatgacactattatctttgtcttaactctctctctaaactgtaaattccatgagagtaaagagtgtgtcctgtttcctgttaatatccagtatgtagtacctttatgttgtaagtggtctataactagttggtgacagtatgaaggaacaactttttaatgnaaaaatagagatgttcttaccatcttcctttttctattgcatcccagttcttataaatgaaggaactgagcttaaggcccaaataattgctggtttt

SEQ ID NO: 19013 - DNA, 450 bp, Homo sapiens
  misc_feature (1)...(450): n = a,t,c or g
aaacgggccagaaaacatgtaaaacaagactcaaatgtaaatgaagaatggaaaagcatgtttgggtcactggacccaccaaacatgccacaggccctacctaaagggagtgatcaggaggtgattcagactgggaaacctcctcgttccgagtcctctgctggcatttgtgtccctttgtcaacttcttcacaggttccagaagtgacaactgtccaaaataaaaaaccagtaataccggttttaagtagtacaatcttaccatccacctatcagattcgaattacaacttgtaaaactgaacttcagcaactcatccagcaaaagcgggagcagtgcaatgctgagagaatagctaagcagatgatggaaaatgctgaatgggagagtaaaccaccaccacctggatggcgtcctaaanggctgtagttgccattttatgaacataaa

SEQ ID NO: 19014 - DNA, 171 bp, Homo sapiens
gagggatggtaaaagcagttagctcttgtcagctgcttccctctgctagtgcttgagctgccaattttatttgtcagtatttcctgatctcccactcctgttgtgaaaggtcacagagttactgtcactggcaacaatttcgccccttagaagaaaactggtacagaggga

SEQ ID NO: 19015 - DNA, 390 bp, Homo sapiens
gatcgcttgaacccggtaggcgaaggttgcagtgagccaagatcgccccattgcactccaagcctgggcaacaacaagagcaaaactcagtctcaaaacaaaacaaaacaaaagaagttcagggtcttcccattgcaagcagttctagatcgaggagaggggttcctagcatgggacccagcagaaggactgtccttcgctccttcattgtctacgtggacagtggatgaagcccagccgaacctgccttgttcccgttttctgggtcagcagggaaagcctttcacagagtagccaccgtgccatcctgaggaaggccctgggtcaaaagcttctgtgcttctttgtaccccgggcgagacacacaggtgctcacactgctctgtagaa

SEQ ID NO: 19016 - DNA, 456 bp, Homo sapiens
ttggggtgggcagcctcagtggctatgtcctggaaactgagaaagtcatttggcatctgagggggcccagccatctcactggcccggtgcaatcccaatacaagcaaatccatcaccaggccataatactgcacgatgaatgaggcaaactgcaggcctctgatgatcccatatgaattcgtatggttcatgtccttatagttgatgacgacgttgttcttggctgtcatgtagtcggctatgttgtggtccacgatgaggcgcagcagcctgttgagcagagtcaagtcgatcttctcatacatcttctcaaagcgggattccagcatgacattgcactcgccttcactcgtctcccacacgtcctgcaggttattgatgccttgacaccacttgtaaacaagcagtggaggtggtctgtgtctgcagcttaatccaggtgggaacaggccgcct

SEQ ID NO: 19017 - DNA, 490 bp, Homo sapiens
  misc_feature (1)...(490): n = a,t,c or g
gaagtttagctcccttggggggctctcttcctccctttccctttgaaagggaaaaaaagagaatgtggaatacttttgctccagggttagggagctgaactgagccagcaggaagagggtggattgtggggccaggtgcaggccaccctgagtgggtgggcactgttatgcctgacactcagggcctctggagtcagtcctgggtgggttagtgtcgatgttccaatggcgaatgctctggcagagttaggaggcagagacttcagaagggccatccctggactcctttcttggcacttgcgtcattgggagcactgtggggctgcgatgccagcttttggactggactcctgggaggatcagcagtgcccttcttcctgttggcttgtgcactgagcttccacaccacgaatgcaggggcctccagatgcatctgcttggtgaccctttgaacttgggaatggcttcaagccngggagaaanattgctt

SEQ ID NO: 19018 - DNA, 455 bp, Homo sapiens
  misc_feature (1)...(455): n = a,t,c or g
aacagctatgacatgattacgaatttaatacgactcactatagggaatttggccctcgaggccaagaattcggcacgagctcatggttcctatgtttttttatcataattaaaagcaaaaccatctggatcacctaacagtcagaggtcagtatctcagcgtgtgaattatagaggaaatacagagagaacctcttccacttttacttttcgtccaaataaaatgcatggtgtaccagaagttgaagatcgggttgaggattggggctagctcgatgacactaaggccccaacatcgcgggacctgctgtggccggattcttaggacgctgttctagccggccccctctccaggggtcgccgtggccggcattatttnctaggtcttcttgaaaccctgaggtgccancgcnnggagtgangangggcaggnncnnnggangcgncnntgaggac

SEQ ID NO: 19019 - DNA, 283 bp, Homo sapiens
gagacagatatggcgaaattagaggagtgcgtcagaagcattcaagcagacggcttagtctggggctcatctaaactagttccagtgggatacggaattaagaaacttcaaatacagtgtgtagttgaagatgataaagttggaacagatatgctggaggagcagatcactgcttttgaggactatgtgcagtccatggatgtggctgctttcaacaagatctaaaatccatcctggatcatggcatttaaataaaagattgaaagattaaaaaaaaaaaaaa

SEQ ID NO: 19020 - DNA, 572 bp, Homo sapiens
gctggagaagcccatgtgagaagtgaatgctgggactcagccttcagacagagaggactgtagggagggcggcaggggcctggagatcctcctgcagaccacgcccgtcctgcctgtggcgccgtctccaggggctgcttcctcctggaaattgacgaggggtgtcttgggcagagctggctctgagcgcctccatccaaggccaggttctccgttagctcctgtggccccaccctgggccctgggctggaatcaggaatattttccaaagagtgatagtcttttgcttttggcaaaactctacttaatccaatgggtttttccctgtacagtagattttccaaatgtaataaactttaatataaagtagtcctgtgaatgccactgccttcgcttcttgcctctgtgctgtgtgtgacgtgaccggacttttctgcaaacaccaacatgttgggaaacttggctcgaatctctgtgccttcgtctttcccatggggagggattctggttccagggtccctctgtgtatttgcttttttgttttggctgaaattctcctggaggtcggtagg

SEQ ID NO: 19021 - DNA, 387 bp, Homo sapiens
gaaatagttttcttcttaggaggacttctgttaccatctcctcttcatcttttatacatttaaacacatgccacatccttggggcagagctgcccatgttgacatctgggccacagcgaggacctgcctatccctggggaatggtggggctgctctgagtgaggggcttagcagcctggaggacaacctctcttggagaatccccctgattcccctgtaaaggcaagctgagccaggagtggggtgtggatgattctgtttgtgaatcctgggaagtacttgccttccccagcctgcagatatgacatttggatgatgggacccagtaacctatttgtgcagacttctatgctgactttctgatcaaaggaggagatgagaggtacg

SEQ ID NO: 19022 - DNA, 945 bp, Homo sapiens
cagatcaagcaagaaccagaccccacgtggtagacctcttccctcctaggcttaaagtatcagtggttgagaagagcttttcggacctgttactaccccaagctgtgtaatatacttgtataacagaaataccttctatacaaacctttttttctacttttagatagaaatgtctactttttcagcagttctgtgaattaaagagcagagtgactgtgggtctggaatggctggtgtacttgggaatgtactatcaggattttacagcaatgctgggaaatgacagggaaaatgacaggaatgaatctcaccagattttttatgtacgcagcagagccttgagttacggtgtttattttccaatcaagtgaagatatctcctacttctcctactggaacatctcagcttctgcagtgaagaaaaattcctgtgatagttcagttctttagtttttctatttgaaaaaaaaaaatcatttaaatgatcctttgttcacggctctccttaatgactgagtgaacagttcctatctgtatatttgactaaaccttttcctaagctatctctcatggttcctatgtttttttatcataattaaaagcaaaaccatctggatcacctaacagtcagaggtcagtatctcagcgtgtgaattatagaggaaatacagagagaacctcttccacttttacttttcgtccaaataaaatgcatggtgtaccagaagttgaagatcgggttgaggattggggctagctcgatgacactaaggccccaacatcgcgggacctgctgtggcgcggattcttaggaacgctgttctagccggccccctctccaggggtcgccgtggccggcattatttcctagttcttcttgtaaccctgaggtgccagcgcggggagtgaggaggggtcagggggctaaggatgcaacctctgacg

SEQ ID NO: 19023 - DNA, 545 bp, Homo sapiens
  misc_feature (1)...(545): n = a,t,c or g
gcaacntctatgncaacagctatgacatgattacgaatttaatacgactcactatagggaatttggccctcgaggccaagaattcggcacgaggatcatccaaaaactgtgtgctttacctcccttgagtttcatttgtaatttgtgccattccagaacacagttaattcttagattggacttaataaatcattatttcctattgagaggttaggcaggggtgaaagggaaaacaatgaatttttcacttgagctagaaatcctttaatcttcttggacccaagtttctctaggtctgttttttaaatctaaagtctgacttccttccagtattgttttacattcttattaattctttcaatgatgaaacggagtacttcagtaaatgttcctgagtcttcagatgtgattggtgactgttactaagagaaccagattaagagtcacaatgatttanccatgtaaccttggagggacataaactggagaccatttaagattggtaagcacagggtgattggcttatggagagagcaacctgaccc

SEQ ID NO: 19024 - DNA, 500 bp, Homo sapiens
  misc_feature (1)...(500): n = a,t,c or g
gtgggaagatggcggacggaaagggagacgccgccgctgtcgccggggctggggctgaggctccggcggtagcgggagccggagatggagtcgagactgagtccatggttcggggtcatcgccccgtatctccagcgccgggagcctcgggactgcggccgtgtctgtggcagctggagacagagctgagggagcaagaggtgtcggaggtctcatctttgaactactgccggagcttctgccaggagttgtttcgaattactgctttcagtgtctgaaagtgaactgccatgtgaagtctggctaccattccttcagtctctacaggagtcacatgatgcattattggaatttgggaataataacctacaaatattggttcatgttaccaaggaaggggtgtggaaaaacccagttcttcttaaaattctgctcaacagccagtagaaacngaggaaggtaagtcttaagactatattggatgaggatttaagtctgag

SEQ ID NO: 19025 - DNA, 502 bp, Homo sapiens
  misc_feature (1)...(502): n = a,t,c or g
tttgnnnncttgannccanagctatgacatgattacgaatttaatacgactcactatagggaatttggccctcgaggccaagaattcggcacgagggaatgttgggactcctcactgcatggtccctggggtgtctggctcatccccatcatgacatgagttggtagcagaggactaggtgttaggacagactctcctcacctcagttgctgctgctctgggccaggaaatctctctatggattccctcatctcctgccacactgctgcagcatcaagtgtgctatgagagctgtatgtgcccaggggtgggccctgccactggccaccccgagcccaggacgcattctggtcatctctgagcccacttgtagtgtagcttcttctgttaaagatgttagccttttctctctgtggcgacttttctgccttcccttcttctggtttttgtgatcattcttagctacctgtgccaagtcacagttagactacctcagaatgta

SEQ ID NO: 19026 - DNA, 329 bp, Homo sapiens
gcaagggatggtttaacaaaatgaaggcactcattgcagcactgcttttgatcacattgcagtattcgtgtgccgtgagtcccactgactgcagtgctgttgagccggaggctgagaaagttctagacctgatcaataaaaggcgacgggatggctaccttttccaattgctgcggattgctgatgcccacttggacagagtggaaaatacaactgtatattacttagtcttagatgtgcaagaatcggactgttcggtcctatccaggaaatactggaatgactgtgagccacctgattccagacgtccatctgaaatagtgatcgga

SEQ ID NO: 19027 - DNA, 365 bp, Homo sapiens
  misc_feature (1)...(365): n = a,t,c or g
agaaaatatattctttcaaaggaacattgtgtctaggattttggatgttgagaggttctaaaatcatgaaacttgtttcactgaaaattggacagattgcctgtttctgatttgctgctcttcatcccattccaggcagcctctgtcaggccttcagggttcagcagtacagccgagactcgactctgtgcctccctccccagtgcaaatgcatgcttcttctcaaagcactgttgagaaggagataattactgccttgaaaatttatggttttggtatttttttaaatcatagttaaatgntacctctgaatttacttccttgcatgtggtttgaaaaactgagtattaatatctgaggatgac

SEQ ID NO: 19028 - DNA, 466 bp, Homo sapiens
  misc_feature (1)...(466): n = a,t,c or g
ggggcctgattcaatgggtgtggggaggggccaggcatataacgccagttaaaagcaccctgcatgatttaaaatgcttccagggatggaactgagtgccanagaggtggcgtataccatttgttttagacggagtcttgttctgtcaccaggctggagtgcagtggtgcaatctcagctcactgcaacctccacctctcaggttcaagtgattctcctgcctcagcctccggagtgactgggactacaggtgcgtgccgccacgcccggctaattttttgtattttagtagagatggggtttcatcatgttggccaggacggtctcgatctcctgaccttgtgatctgcccaccttggcctcccaaagtgctacggattacagatgtgagccaacacgcccagcccaaaaaacctttccttggtttggntggttggtttttggnangaaattttgcccttttgcc

SEQ ID NO: 19029 - DNA, 350 bp, Homo sapiens
ggctgatttagatgaagaaatgattgtgttattaaaacggcgagatgtagctgaaaatctgaacaaaaaattgcagttttgtcatcaaagactgcagataatttcacaggcacttagttcatgggtaaaatctgatatgagcagcccatttcaagactttgtggagcaaattcagaaaaccaaatatttacaaggtgaccaaggcattgttgaagaactaatggaagatgatccacgcagggcaaaagaagctgaaattatgcttcactacattgaaaggtttaatgagttaatctcacttggtgaatatgaaaaggcagcttgttatgcagcaaacagtcctagaagaa

SEQ ID NO: 19030 - DNA, 208 bp, Homo sapiens
tattggaccatgaggtcactgtaacttgtatcacagggcagttgtgaggacccttggagttaatggacatgaatgtccctttcaaactatcccaagggtgacccaaattcagaaaggtaggcaggaagcctaaggcaaaaaagcaaagcaaagaagcccaaagcagcgcagggcactcacatgagctgaccctccctggcctggcact

SEQ ID NO: 19031 - DNA, 317 bp, Homo sapiens
gggagggtggccggactgtgccatgctgctccagacccaaggtggcagctctcactgcggggaccctgctacttctgacagccatcggggcggcatcctgggccattgtggctgttctcctcaggagtgaccaggagccgctgtacccagtgcaggtcagctctgcggacgctcggctcatggtctttgacaagacggaagggacgtggcggctgctgtgctcctcgcgctccaacgccagggtagccggactcagctgcgaggagatgggcttcctcagggcactgacccactccgagctggacgtgcgaacggcg

SEQ ID NO: 19032 - DNA, 342 bp, Homo sapiens
gttggggatgtgtgaagagaacgaggcctggcttagaaacactgctgattgacttcataaaggagtcattggaagggacaaagaagtaaaggaagacaacatcagcggatgtggcctgggtcatctacatgtgaggacagtcacacactagacacaaggcaaaaggtgtgtcttttctgacctggtcatgcagattaatgagtttttgaaataccactttacatgtcatatacttaggaaaaaatatgatttcattcaatgtattttgcagatgaagaaagaggaggtaggcctgccccacacatcccgattctggtaaggcagagaactgaacttataccc

SEQ ID NO: 19033 - DNA, 548 bp, Homo sapiens
  misc_feature (1)...(548): n = a,t,c or g
atctnnntnnnangnnnnnacnnnncnnannncnnnnnnnnnnnnnnnnnanatnnnnnnnnnantgnggcnctncnagtnnnnnttggantnggatacnctcgaggccaagaattcggcacgagtgatgatgttcctgcacagagagaaggaatccaagcaaaataagactggtcttatagtggagaaaccaaacaggtaccaactctcccaggatggcagcggctacgagaaccctgaggatgagcccctgggtcctgaggatgaagactccttctccaacgctgagtcttatgagaacgaggatgaagagctgacccagccggtcgccaggacaatggacttcctgagccctcatgggtcagcctgggaccccagccgggaagcaacctccctggggtcccagtcctatgaggatatgagaggaatcctgtatgcagccccccagctccgctccattccggggccagcctggacccaatcatgaagaagatgcatactcttatgagaacatgggataatcccgatgggccanacccagcctgggg

SEQ ID NO: 19034 - DNA, 219 bp, Homo sapiens
gggagacccctgaactcattgagctgaggaagaagaagattgaggaggcgatggacggaagtgagacacctcagctcttcactgtgttgccagagaagagaacagccactgttggaggggccatgatgggatcaacccacatttatgacatgtccacggttatgagccggaagggcccggctcctgagctgcaaggtgtggaagtggcgctggcgcctg

SEQ ID NO: 19035 - DNA, 503 bp, Homo sapiens
  misc_feature (1)...(503): n = a,t,c or g
atttganaatcgntatgacatgattacgaatttaatacgactcactatagggaatttggccctcgaggccaagaattcggcacgagatggtggctcactcctgtaattccagcactttgggaggctgaggcgggtggctcacctgaggtcaggagttcgagaccagcctggccaacatggtgaaaacctgcctctactgaaaaacaaaaattggccaggcttggtggcgggcgcctgtaatcccagctactcaagggactgaggaaggagaactgcttgaacccaggaggcagaagctgcnnnnnncccgagatcacgccactgnactncaacctgggcgacagagccngactccatcttaaaaataataaataaattaaaaatacctatttgnaatatgtgangaatgagacatcaaagttctgctatngaaaggaaaaaagtaggtctggagttcataaatgggttttccttnttaagnatnaaacccttgcctataaatg

SEQ ID NO: 19036 - DNA, 463 bp, Homo sapiens
gggcccgtggcgccgacaggatgggcaagtgtcgtggacttcgtactgctaggaagctccgtagtcaccgacgagaccagaagtggcatgataaacagtataagaaagctcatttgggcacagccctaaaggccaacccttttggaggtgcttctcatgcaaaaggaatcgtgctggaaaaagtaggagttgaagccaaacagccaaattctgccattaggaagtgtgtaagggtccagctgatcaagaatggcaagaaaatcacagcctttgtacccaatgacggttgcttgaactttattgaggaaaatgatgaagttctggttgctggatttggtcgcaaaggtcatgctgttggtgatattcctggagtccgctttaaggttgtcaaagtagccaatgtttctcttttggccctatacaaaggcaagaaggaaagaccaagatcataaatattaatggg

SEQ ID NO: 19037 - DNA, 532 bp, Homo sapiens
  misc_feature (1)...(532): n = a,t,c or g
tttngnancagctatgacatgattacgaatttaatacgactcactatagggaatttggccctcgaggccaagaattcggcacgagtgggagtgttggcccttcaaagacagtttgatgtgttcaaaattgtagtgcatttaaaagggttagacttctgtgatatttgtccaacgtcaatcagtactcattgcatttttttacttaggctcttgatgttagtggatactggtattatatgcaacttctgaataagttttaaagaatttgaataatcagttgaataaaaacctgaaaagtggtgaatgaaaatttgagagataaggaaaggctagagttggcattcaggggacacaaatagtttgaagactctggtagtagaattatgcaagttttcttaaaattaggcaatatataatattgatactacgaaattcagtacttttccgtaagnagggggcaggtctcattgcctttccgtaccccaaaatatgaaagtggctacaaatttgtggggcattgnnncgcagttgc

SEQ ID NO: 19038 - DNA, 436 bp, Homo sapiens
ggcagacggggtgggtaggacgctccctatcaggcaacacttccgcctcccggggcccgcgcagctcacctccctcacctcccgccctaccccagtcacgagttgttttagggggaccgcccctccacttgctgattgggtagctcctgaaccattgttgtcctctgattggttgttcccttttcggctctgcaacaccgcctagaccgaccggatacacggatgctgttgatggagtaatgaatggtgaatactaccaggaaagtaatggtccaacagacagttatgcagctatttcacaagtggatcgattgcagtcagaacctgaaagtatccgtaaatggagagaagaactaatggaacgcttggaagcccttgatgccaattctcggaagcaagaagcagagtggaaagaaaaggccattaaggactagaa

SEQ ID NO: 19039 - DNA, 380 bp, Homo sapiens
gatttccaagtgacattttcagtctttcaaatagctgccttttgtgatgtggtgatttaaatgatttaagttcatttgttctcaaccttggggtaaactgaggtattttgcttcctgggaagatcttcgcaattttgagtgctcctgtggggagcggggatgagctaaagatacaatgtttccctgccccgcaccgcttccacaaaatagcaatgtggttttgcagctctgacttctgctcccagtaacccatcgttagggcactctagcactatggaggtacccaaggctcagccagtctctatttaagaaaatttaacaaatacgagtaaccctgtcccaatcactgaatctctagttactactcttagaaacacctg

SEQ ID NO: 19040 - DNA, 381 bp, Homo sapiens
atacctctctcctttcataatgctgtgaagtagctcatataattcatcttccacgtttatatacgtatgtctcttttgtgcccagagcatcattttgagattcttttttcattatcaaaatacattggatctatgttattcataactaatctgaggctgtatttgttacatttgagtattttaaatcattaatgccatatgtattgtataccaaaatttaccatctaaaacacctggctattcttttgtagggtttttcttttcattagcttttttgagctaaagcttaaagaaaatcagggaccaaaggaaggttagaaagtggctggaggtatcataaacaccaactaagttctttgagaagcagaaaggtgcatcatg

SEQ ID NO: 19041 - DNA, 103 bp, Homo sapiens
tctggcttgtaattctcttaacaacagtggcttcagttatgccagtggtggcattcagatttttgaaggtggatttatacccaaccctgagtgatcagatccg

SEQ ID NO: 19042 - DNA, 518 bp, Homo sapiens
  misc_feature (1)...(518): n = a,t,c or g
ggaaatatgaccatgcagcgcaccatgaagctctaccgactgccagagactcccaagacagctgggctgcgaccaatggaaacaaaggacattccagtagtgcaccagctcctcaccaggtacttgaagcaatttcaccttacgcccgtcatgagccaggaggaggtggagcactggttctacccccaggagaatatcatcgacactttcgtggtggagaacgcaaacggagaggtgacagatttcctgagcttttatacgctgccctccaccatcatgaaccatccaacccacaagagtctcaaagctgcttattctttctacaacgttcacacccagacccctcttctagacctcatgagcgacgcccttgtcctcgccaaaatgaaagggttgatgtgttcaatgcactggatctcatggngaacaaaaccttcctggagaaactcaagtttggcatangggacggnaacctgcagtattacctttanaattgggaatgcccacatggggggaga

SEQ ID NO: 19043 - DNA, 564 bp, Homo sapiens
accccctttacctaccgcttgactgattacgaatttaatacgactcactatagggaatttggccctcgaggccaagaattcggcacgagaaaagaacatctttgcgttttctaccggctccccatcatcgtactagggaggaagaagcgggtgagaaacaaaacttctttccattgtcctgcccgtttctgcggacttgttctgaggccgaggagcctgtgttggaagagatggtgatgggcctgggcgttttgttgttggtcttcgtgctgggtctgggtctgaccccaccgaccctggctcaggataactccaggcacctctaagatactgatggctctgcagaggacccattcattgcttctgcttttgctgctgaccctgctggggctggggctggtccagccctcctatggccaggatggcatgtaccagcgattcctgcggcaacacgtgcaccctgaggagacaggtggcagtgatcgctactgcaacttgatgatgcaaagacggaagatgactttgtatcactgcaagcgcttcaacaccttcatccatgaagat

SEQ ID NO: 19044 - DNA, 652 bp, Homo sapiens
  misc_feature (1)...(652): n = a,t,c or g
tgactatcacagggaacccggttctgaggttaagaacctggtatgagggtagtggtatgtgtagtctcgttggtgtacgtctatgtttgagacttagcattcgacggattctggtgttaattcgcgggctattaagtctcggaagcctacctgtgacccttcgtggcggcgatgctttattgtttagtggtccgttcgttcgtctgtctttcgtagaggggtcgagtaggatgttgtcggcgtcggttgtttttagtttttcttcggcgttattctagattttggggcgagggggggtctttcggggggaggtagttagttaagatcgggtttacgaatatagagagggttcaattgagactagcacccaatcaaccacattagcccccaccaaattttccctttcttttgacaaagaacgcctcaccctcgttcttttccaaaggggagattctagaagcaaaggaacccgacgccgggccccggcaaaaaaannanaacacggggntacantcggncnnngacntnaanntcanaangaanaaaaaaaancccccccnccgngnnggaaggccncccccccccgggggggaananacccccngattggggggnccncaaaanngnnnngnggnanaaancnngnnnatcc

SEQ ID NO: 19045 - DNA, 352 bp, Homo sapiens
  misc_feature (1)...(352): n = a,t,c or g
ccggcctatttttgtttttggtgttcctgagtgagctccaaatcttgtcttcttcgaagctttcctatcagcttctatctttgtcctcctccatcacgactctgaagatgcccctttttagggcatgacatgagagggacattcaggagtggagggaagaagcaaggagagagagagagggaaggtagaagagtcagagggaagtggggttgaaagagtagttttcaaactactgatgtctaaagtcaacaagttaaaaattgttgtgttttgtggaatagtagtaacccatttatatgcccatcattgattcangaagttattcattcagtcagcatgaatgagaacttcg

SEQ ID NO: 19046 - DNA, 435 bp, Homo sapiens
ggtcagtggaaaccccaaactcaacttagctttcgtggctaacctgtttaataaatacccagcactaactaagccagagaaccaggatattgactggactctattagaaggagaaactcgtgaagaaagaaccttccgtaactggatgaactctcttggtgtcaatccccacgtaaaccatctctatgctgacctgcaagatgccctggtaatcttacagctatatgaacgaattaaagttcctgttgactggagtaaggttaataaacctccatacccgaaactgggagccaacatgaaaaagctagaaaactgcaactatgctgttgaattagggaagcatcctgctaaattctccctggttggcattggagggcaagacctgaatgatgggaaccaaaccctgactttagctttagtctggcagctgatgaa

SEQ ID NO: 19047 - DNA, 505 bp, Homo sapiens
  misc_feature (1)...(505): n = a,t,c or g
gtgactggggtcattgtgtaagacttattattttatcctgaaaccttaaatatcaaacctctgcatctctgatcccttccttgttaaaagttaccacggttggccaggcgcggtggttcatgcctgtaatcccagcactatgggaggccgagacgggcggatcacgaggtcaggagactgagaccatcctggctaacacggtgaaaccccatctctactaaaaatacaaaaaccaaaaaaaattagccaggcgcattggctcgtgtctgtaatcccagcactttgggaggtcggggggggtgggggaggatcacggggtcaggagatcgagaccatcctggccaacatgatgaaaccctatctctactaaaaatacaaaaattagccgggcatggtggtgcacgcctatagtcccaagctactcgggaangctgaggtangagaatcgtttgaactcangagggaagaggntgcaatgagccaagatccgcgccaatgnactcca

SEQ ID NO: 19048 - DNA, 441 bp, Homo sapiens
  misc_feature (1)...(441): n = a,t,c or g
gggagacaattcttcatgagtatatcacattattttatgtctngcaagcaagacactggctactactttttccaaactatccttttaaggacatttatatatttaagaaatataaataatatttccagcaggattttattgtacatatagacaagctgattcttaaaccttatggaaaggcaaaggaactacactagacaaaaatcattttgaataagaacagagaagaattacattacccaatttaaaacttactataaagctatagtaaacaaaatagtatggtattgatgaaaggatagatataatagatcaatagaacagaattgggactctagaaataaacccatacacatcagttgaattgagttttgtcagaggtcgaagacaatttaataaagaatggatagtattttcaacaaatgtgctgtaacaatttta

SEQ ID NO: 19049 - DNA, 313 bp, Homo sapiens
ggcgaggggagcaggggtgttggggggggagcctgagagcctgggggggctgcaaaaagagagaaagaaaacagcatgaaccacaacaaaacgcctgctgctgcgcgccgagccctaccccacgtcgcgctacggcagccagtgcatgcagcccaacaacattatgggcatcgagaacatctgcgagctggccgcgcgcctgctcttcagcgccgtcgagtgtgcccgcaacatccccttcttcccggatctgcagatcaccgaccaggtgtccctgctacgcctcacctggagcgagctgttcttgctcaac

SEQ ID NO: 19050 - DNA, 471 bp, Homo sapiens
  misc_feature (1)...(471): n = a,t,c or g
tttggaaacccctatgacatgattactttgataacccnactcactatagggaatttggccctcgaggccaagaattcggcacgaggacatcctatgtgctcctcgcttatctcacggcccagccagccccaacctcggaggacctgacctctgcaaccaacatcgtgaagtggatcacgaagcagcagaatgcccagggcggtttctcctccacccaggacacagtggtggctctccatgctctgtccaaatatggagcagccacatttaccaggactgggaaggctgcacaggtgactatccagtcttcagggacattttccagcaaattccaagtggacaacaacaaccgcctgttactgcagcaggtctcattgccagagctgcctggggaatacagcatgaaagtgacaggagaaggatgtgtctacctccagacatccttgaaatacaatattctcccagaaaagg

SEQ ID NO: 19051 - DNA, 572 bp, Homo sapiens
gcggtggaagagacgctgcatgcctgccagcggctgcaccaggagggcaagttcgtggagcttggcctctccaactatgctagctgggaagtggccgagatctgtaccctctgcaagagcaatggctggatcctgcccactgtgtaccagggcatgtacaacgccaccacccggcaggtggaaacggagctcttcccctgcctcaggcactttggactgaggttctatgcctacaaccctctggctgggggcctgctgactggcaagtacaagtatgaggacaaggacgggaaacagcctgtgggccgcttctttgggaatagctgggctgagacctacaggaatcgcttctggaaggagcaccacttcgaggccattgcgttggtggagaaggccctgcaggccgcatatggcgccagcgcccccagtgtgacctcggctgccctccggtggatgtaccaccactcacagctgcagggtgcccacggggacgcggtcatcctgggcatgtccagcctggagcagctggagcagaacttggcagcaacagaggaagggcccctggagccggt

SEQ ID NO: 19052 - DNA, 333 bp, Homo sapiens
gcagcactctgagattgtaaaatagttgtaaaaagttggacacaacaggggcatctaccttttggtgtttacctctagtatctaatactgtgcacataaagctaatgttgaggcccccagattttccattcgttctctgtatttttcataccactgactttgtgagggattattttaaaggttgatctggtcttcaaaggtagataaggacattcctgtggccttaggaatgtcttctgcactgaaggagacaactgcagaatgaggctgatgcaatcatttctcctgtgatagtgatagaagcggcagtaaggccagctcactgacatgctt

SEQ ID NO: 19053 - DNA, 409 bp, Homo sapiens
ggagcctcaggtttgttttcactgtgtccaccgccttgtctccagttctctctcaaacccactggtcaaggattcacccctattgcttaaagtcaatgatgacattcctatggccaaatccagaggtcgagtctgtcttcatctccttcagcagcacgtggcacagttgctggtcttcctcctgaaacagtcttcccttagcttccgggatgccacatcctcctggttttgttcccctgccctggttgacagcactttctcctgcccttggctagttcctcctcccctaacctgcaaggtgtcccagggtcttctctatctgccctcactcatctccctccatggctttagaaaacatttctctgtggctgagaaatgtgtatatagggctccaacctccactgaactc

SEQ ID NO: 19054 - DNA, 354 bp, Homo sapiens
gggtgcctggctggtttgcccagagccaagctggggcaaggggcagccagccctggcttccaaggctcccgtactgtctgtgtccttgtataaggagctttgctcttggaattactgaaagtctgtggcccaagagagagacacaagtggccttaagtctttttgaagtgttatttcatccagggaaatgcctcgagccatagagcctgaaatcatctttgttggctcagaaaataccttagcttcactcagctggactgcattgaaggcgaggctgccccttggatcaagcagaaaacaagagaaagaaagaacgttccctttggggatagtctggaaagttggaattgcaaa

SEQ ID NO: 19055 - DNA, 497 bp, Homo sapiens
  misc_feature (1)...(497): n = a,t,c or g
gnnnnnnnnnnngnnnntnnnnnnnnntnnatttgaanccttgganaaccgttatgacatgattacgaatttaatacgactcactatagggaatttggccctcgaggccaagaattcggcacgagggctataagaacataaatgcaaaaatttcttcttatggccagactgtcagatttctctctgttcttgaattttctcaacctaccaacaataaattgtctacttatcttttaaactcaggagccaaacaagcagagtcctcattctgcttcatgtgacatcagcaagactgaactctcctctgcttgctgtgctctgttcttgctggtttgtaagtggcagcaatcataagaggcaggaacacagcttcccatttgtttttcaggtttaagctgtggttttggaaatgacaggaagtaggaaaatgaagcttttggctggcctttgaagaaactggaagtagaggtgacagaatacatgcggattgctctgga

SEQ ID NO: 19056 - DNA, 466 bp, Homo sapiens
  misc_feature (1)...(466): n = a,t,c or g
cagctatgacatgattacgaatttaatacgactcactatagggaatttggccctcgaggccaagaattcggcacgagttttttagtagagacagggtttcaccatgctagccaggatggtcttgatctcctgacctcatgatctgcccgcctcggcctcccaaagtgctgggattacaggtgtgtgccaccgcgccctagcctgttttttcttcttaaagcaagcattctacttctctccaaacgtaattagttgacttcaggtatggctataagaacataaatgcaaaaatttcttcttatggccagactgtcagatttctctctgttcttgaattttctcaacctaccaacaataaattgctacttatcttttaaactcaggagccaaacaagcagagtcctcattctgcttcatgtgacatcagcaagactgaactctcctctgcttgctgtgctctgntctt

SEQ ID NO: 19057 - DNA, 334 bp, Homo sapiens
  misc_feature (1)...(334): n = a,t,c or g
gactgaactcgccacaagttacaccactggcagggctgggaactgaactcgccacaagttacaccactggcagggctgggaactgaactcgccacaagttacaccactggcagggctgggaactgaactcgccacaagttacaccactggcnaggntgngaactggactcgcccanagcgtngcctctgggcagggntgggangatnggcnggccntggggcnggggnngntggcntncnnnnggcacggttgtnntnacncnngtcgngctnnggngnngnnagntnagngnggtgngcgcgngnggngngcnggnnnggngcngctgcgtcg

SEQ ID NO: 19058 - DNA, 354 bp, Homo sapiens
gctgcattcttagtaacccactgtcactctgctgtgttatcttgcctatatgaaaaaatgaaatatttttagagtgtgaatttcccaaacgtcctcaactattctgggactgaagtcacaacatcacgaagggagtgcgacggtgggaggcccagcctcctctgtggctgtggctgtggctgagtcccacccaagggcttccgttgccactgaggctgggttgggacgtgccctatcctgccctgtcccagtggcaagtggctgtctctgcacagggctttccactgtcagcagtggactccgcagcctatgaatactcttcattgattttcttgactcctgttgttactttgg

SEQ ID NO: 19059 - DNA, 501 bp, Homo sapiens
gcctgaatcatgcttcttcacttggaggggattatatgggagtccaccccatgggtctcttctggtctctgaaacctgaaaagctattaacaagactgttgaaaagagatgtgatgaataggcctttccaggtccaagtaaaactttatgacttagagttaatagtgaacaataaagttgccagtgctccaaaggccagcctgactttggagaggtggtatgtggcacctggtgtcacacgaattaaggttcgagaaggccgccttcgaggagctctctttctccctccaggagagggtctcttcccaggggtaattgatttgtttggtggtttgggtgggctgcttgaatttcgggccagcctcctagccagtcgtggcttcgcctccttggccttggcttaccataactatgaagacctgccccgcaaaccagaagtaacagatttggaatattttgaggaggctgccaactttctcctgagacattcaaaggtctttg

SEQ ID NO: 19060 - DNA, 338 bp, Homo sapiens
  misc_feature (1)...(338): n = a,t,c or g
gctggaagaattaattaagcggccgcaagcttattccctttagtgagggttaattttagcttggcactggccgtcgttttacaacgtcgtgactgggagaacaccggcctcccaagccctggggacccacagtagctccagctgcgccaaaggcactcaccggcttgcacaggtcccggtcagttttcgcttccatctcccagacatggtggccatctggaagaaaggagcaggaaacgtctgtgactctgtgtggtggggagccccctccccagacacccccacgtgatccagacccagggcctganccnngaggccnccttgtcccangaaaccca

SEQ ID NO: 19061 - DNA, 344 bp, Homo sapiens
  misc_feature (1)...(344): n = a,t,c or g
gccaggacttcacatacaattgaggtcttagctccaatatcacctccttagaaaagtcttccctggattacaggcgtgagccactgcgcccgacccagaattttttaaagatagcatatgatgtggtctgtgtgtggattcttgcttatttagtcataaacaggaattacaaatttattttggcctatgtagaattattatagctaaattgagctttgtagaaaaattgctggagaagaactctgttgtgcaccatatcaaagcagacctttcaaagccccaaatccaaattatagcttccttaantgggataaaggtctagtctagtctagtcagatagatat

SEQ ID NO: 19062 - DNA, 431 bp, Homo sapiens
ggcccagaagggttaagtgaactgttccaggtcacacaacttgttaatatgtaatgatggcttattgtgaattatagtcaatatcttctcttccatgagtccccttttcattataacattccatcttatagaataatagatttttgccaggcacggtggctcacacctgtaatcccagcactttgggaggcttaggcaggaagatcacttgagcccaggagttcaagaccagcctaggcaacatagcaagaccccatatctatcaaaaatttaaaagattagctaggcatggcttccttaatcctacctattcagaaggctgaggcaggaggattgcttgagcccaggagttcaatgctgtggtgaactatgttcacaccactgtactccagcctggatggcagagggagaccctgctcttaaaaaaaaaa

SEQ ID NO: 19063 - DNA, 805 bp, Homo sapiens
accgtttgactgattacgaatttaatacgactcactatagggaatttggccctcgaggccaagaattcggcacgagggcaagaccaaccaagatgagtgccctgggagctgtcattgccctcctgctctggggacagctttttgcagtggactcaggcaatgatgtcacggatatcgcagatgacggctgcccgaagccccccgagattgcacatggctatgtggagcactcggttcgctaccagtgtaagaactactacaaactgcgcacagaaggagatggagtatacaccttaaatgataagaagcagtggataaataaggctgttggagataaacttcctgaatgtgaagcagtatgtgggaagcccaagaatccggcaaacccagtgcagcggatcctgggtggacacctggatgccaaaggcagctttccctggcaggctaagatggtttcccaccataatctcaccacaggggccacgctgatcaatgaacaatggctgctgaccacggctaaaaatctcttcctgaaccattcagaaaatgcaacagcgaaagacattgcccctactttaacactctatgtggggaaaaagcagcttgtagagattgagaaggtggttctacaccctaactaccaccaggtagatattgggctcatcaaactcaaacagaaggtgcttgttaatgagagagtgatgcccatctgcctaccttcaaagaattatgcagaagtagggcgtgtgggttacgtgtctggctggggacaaagtgacaactttaaacttactgaccatctgaa

SEQ ID NO: 19064 - DNA, 550 bp, Homo sapiens
  misc_feature (1)...(550): n = a,t,c or g
aattaaatttgaanacctntggatacncttatgacatgattacgaatttaataccgactcactatagggaatttggccctcgaggccaagaattcggcacgaggaaatatatctttagaagacaaatgacataatttcactttcatagaggaattttaaaaattaatttgatctaaaagaaactgaagtttgtcaatctatacaagtaagaatgtgactaaaataaaataaatatattttagtaaaatttctggtaaatcagattatgtagtgttaatttcttttcctatcttagtctttgcagctgcataattacttttccaaatagnnnnnnnntgtttgtttaaagtgatgtcccttattcnggcctaancnggccgattttatgnanccctngtctggctnntanaccntgactagccagnggntanggtnggntnnaaggngncccnntgcttntgcagcttcncgcnnnnctgntnntnangtncnnttnncntcantttngntgnnnntnccntannnnttnnntnnnctctnntnntcaccc

SEQ ID NO: 19065 - DNA, 345 bp, Homo sapiens
gttgataacagtgcttggcacctggaagtaggtggcagatgttaacgcccttcctcccttgcactgcgccccctgtgcctacctctagcattgtaacgaccacatagtattgaaatggccagtttacttgtctgccttcctttccaagaccgttggtgcctagaggactagaatcgtgtcctatttaactttgtgttcccaggtcctagctcaggagttggcaaataagaattaaatgtctggtcgacgcggccgcgaattccagatctatgaatcgtagatactgaaaaaccccgcaagttcacttcaactgtgcatcgtgcaccatctcaatttctttcattt

SEQ ID NO: 19066 - DNA, 506 bp, Homo sapiens
  misc_feature (1)...(506): n = a,t,c or g
aacngntatgacatgattacgaatttaataccgactcactatagggaatttggccctcgaggccaagaattcggcacgaggtgacttctgcccacctggacacaacaccaaaaaggcttcttattcgggtgtgagtcttttcagcaacccggtccagtactgggagatacagccatccaccttcagatgtgtctacgtgcgctctgccattcaactcggaaactataagtaattctcaagaaagccctcatttttataacctggcaaaatcttgttaatgtcattgctaaaaaataaataaaagctagatactggaaacctaactgcaatgtggatgttttacccacatgacttattatgcataaagccaaatttccagtttaagtaattgtctacaataaaaagaaattttgcctgccattttcagaatcatcttttgaagctttctgttgatgttaactgagctactagagatattcttatttcactaaatggaaaaatttggg

SEQ ID NO: 19067 - DNA, 470 bp, Homo sapiens
  misc_feature (1)...(470): n = a,t,c or g
catagnaangngtgannngcctcnnncnannnncnagggaggctcgcccttgannctnncnttggcccngngagtnataactatctatcnatgatgaagataccccaccaaacccaaaaaaagagatctctcgaggatccgattttttaatacgaaatgccataatttattccattctataaaaaagtcatccttatgtaacaaaatgtcttcttagaagaagaaatatattatttcaggtcataaataatcagcaaacatacaactgttggcaactaaaaaaaaacccaacactggtattttccatnagtgctgaaaacaaacctgcttaagatatatttacaggatagtacagtactcataaacaaaaattgaggtatttggttcttctaggagtagacaatgacatttgtgaaggcagacacntacacanaaataaataaggtatatgcctcatatgtatatgtgtc

SEQ ID NO: 19068 - DNA, 347 bp, Homo sapiens
  misc_feature (1)...(347): n = a,t,c or g
caccactccactacacaaagacacaaaccaccgacaatgcaaaatcctggctaaatctctagatgactatggagagtggaaggagtcaggtgaaaaggggcatatgctggagcccagcttgtctaaggctacagaagagacaaaacaaaacgctgcaaatatgnntangactgtgtggggaagctgcggtgagggatcggaagccacccttggatctgcgctcgaagcttctgtgagagctgctcgtgtagcaagggctctgccaagtgctggtggctgaggacgancaggaaaggacatcccctctcgagggactaccagaaccanggaaccaaacagggacccga

SEQ ID NO: 19069 - DNA, 436 bp, Homo sapiens
gcggcacgagtttttttctatttgtcacaatgctcaaatgtgacggggctcaaaaagccctttacacactagcccttgccccatatacttctcacaactaatgcaattctggaatcctgaaactacagcaagtattcagtactttattagggcataaaatatctattcaagtctcttattgaaaaagtgtaacatttaaaaacttgactaaaattaaatccatgacacagagtttcattacttcatcacaacaactgtgaaacaccagcaaaccaacctaaaacacaaagatatttcttgggattctgctgacttctaggcacagctgtaacatctatacagactacttgaagatggataatatacaattttcctacagcataaattttcttttactaacacaatatgtcaaggaaaggtggtatatctcacaata

SEQ ID NO: 19070 - DNA, 342 bp, Homo sapiens
ctctcttctccatgttttcttgttccagcttcattaattccctctgtatcttctgacgcttcatttccaatgacaattcatgaacataatcataattaatatctccattgtcagaatcatctctattagtttcccattctacattttcttcttcactttctggagttctttccttagtgatttttatgtcttccttttccctatgtctccctcttgaagattctttcctaacaggtgaggatgactcctctgtatttcgtttctggggctcagtgtccacgtcttggcgcttggtcttcattctttctctaagatcccctgtaggtctttctggtgaccttc

SEQ ID NO: 19071 - DNA, 1043 bp, Homo sapiens
caggaattgaaaatggggctttccagggaatgaagaagctctcctacatccgcattgctgataccaatatcaccagcattcctcaaggtcttcctccttcccttacggaattacatcttgatggcaacaaaatcagcagagttgatgcagctagcctgaaaggactgaataatttggctaagttgggattgagtttcaacagcatctctgctgttgacaatggctctctggccaacacgcctcatctgagggagcttcacttggacaacaacaagcttaccagagtacctggtgggctggcagagcataagtacatccaggttgtctaccttcataacaacaatatctctgtagttggatcaagtgacttctgcccacctggacacaacaccaaaaaggcttcttattcgggtgtgagtcttttcagcaacccggtccagtactgggagatacagccatccaccttcagatgtgtctacgtgcgctctgccattcaactcggaaactataagtaattctcaagaaagccctcatttttataacctggcaaaatcttgttaatgtcattgctaaaaaataaataaaagctagatactggaaacctaactgcaatgtggatgttttacccacatgacttattatgcataaagccaaatttccagtttaagtaattgtctacaataaaaagaaattttgcctgccattttcagaatcatcttttgaagctttctgttgatgttaactgagctactagagatattcttatttcactaaatgtaaaatttggagtaaatatatatgtcaatatttagtaaagcttttcttttttaatttccaggaaaaaataaaaagagtatgagtcttctgtaattcattgagcagttagctcatttgagataaagtcaaatgccaaacactagctctgtattaatccccatcattactggtaaagcctcatttgaatgtgtgaattcaatacaggctatgtaaaatttttactaatgtcattattttgaaaaaataaatttaaaaatacattcaaa

SEQ ID NO: 19072 - DNA, 342 bp, Homo sapiens
atgacattctggagtctgtgctattgaagatatgcttgaaaatatattagtgttgagattaatctaggtaagaaaaatacctagagatttctaataggaaaaattcactcaaccaagaaccagattacaattcaggataaataggaatttcccaaataccatatatactgttctaagtcaaaccattgttgaaccaactctaccgcctcttcataccagaacaaataggatgattattttgataatttatgcttaaaatttcttactcctttttctttttttcgacatcataaaatgtcaaacaatcttactcctttttaatctctcaattcattttttaaa

SEQ ID NO: 19073 - DNA, 389 bp, Homo sapiens
gcggcccagagctccggtgagcctgcagcccagtaggtactgctagacatggcttcaccgcagtagtgcttttattattaaaatcactggcgtagtatgttttcaaactactcaaacgcgccaccccacactccagcactttgtgtttgtgctgcaaatgtcacaagattgacagcttctgctgtgggtgacaggagttacaggttctaagccagggacagcaggaccagatctgctatctcagaaagaatggtagtgtggttgctcacgcaagtaatcccagcactttgggaggccgaggcaggcagatcagttgaggtcaggagttcaagaccagcctggccaacatgacgaaaccctgtctctacaaaaaataggaaaattagccc

SEQ ID NO: 19074 - DNA, 343 bp, Homo sapiens
gggaaagaggtagctttacagactggacatggttgatattggacctcttggctaccatgatgggtagagactggggccagatttaaggcactttagaagaataaagaatgtgaatgatgtgggggaatcctctgtttgtttggcctttagataagagttcttttggaggaaaggtgactacacgtttgcaacccaccgtactgactgacctctaaggttctttctggaatagatacttgatgacatggtagctttaatggtgacttgagggtggtaatgtcccaaactaggggaattcctcttgcatctcccctccccagaactgctgtgcaccagggggcac

SEQ ID NO: 19075 - DNA, 333 bp, Homo sapiens
gttttctatagcaatgacaaggagaagcagatggaagagttagagtattgtctttcctccccaaagaaatagatcaagaaagcaaaagaatcacccatttttatggaaatgagggcccctgttccagaattagtacagttatacagaataacatcactttcatttaggaattttccatctttcaggatgcagaagcattgtttctaacatactatggggagaaatttaatgacagatccaaaaatcttaaactatgcaaaatatgtccatattatcttcattaatggtaaaccaatcagatacataaaaagatacttctcaggttggcaagca

SEQ ID NO: 19076 - DNA, 282 bp, Homo sapiens
gctcgtgccggaagaaactcgacagatactagaaaaagcaggaggtttaaaaccttttctcttgggatgccctcgttttgttgtgattgacaactgtattgcactgaagaaggttgcatcacggctcaagaaaaaaaggaagaagaaaaacattaaaacaaaagtagaagaaatttcaaaagcaggggagtatgtacgagttaaactacaactgaatccagctgctagggaatttaaaccagatgtaaagtctaaaccagtgtcagattcatcttcagcccc

SEQ ID NO: 19077 - DNA, 812 bp, Homo sapiens
gacgctacaacatcaaactgtggaaaaccttcactgactgcttcaactgcctgcccatcgcggccatagtggacgaaaagatcttctgctgccacggaggcctgtccccggacctgcagtctatggagcagattcggcggatcatgcggcccacagatgtgcctgaccagggcctgctgtgtgacctgctgtggtctgaccctgacaaggacgtgcagggctggggcgagaacgaccgtggcgtctcttttacctttggagccgaggtggtggccaagttcctccacaagcacgacttggacctcatctgccgagcacaccaggtggtagaagacggctacgagttctttgccaagcggcagctggtgacacttttctcagctcccaactactgtggcgagtttgacaatgctggcgccatgatgagtgtggacgagaccctcatgtgctctttccagatcctcaagcccgccgacaagaacaaggggaagtacgggcagttcagtggcctgaaccctggaggccgacccatcaccccaccccgcaattccgccaaagccaagaaatagcccccgcacaccaccctgtgccccagatgatggattgattgtacagaaatcatgctgccatgctgggggggggtcaccccgacccctcaggcccacctgtcacggggaacatggagccttggtgtatttttcttttctttttttaatgaatcaatagcagcgtccagtcccccagggctgcttcctgcctgcacctgcggtgactgtgagcaggatcctggggccgaggctgcagctcaggga

SEQ ID NO: 19078 - DNA, 369 bp, Homo sapiens
gccgacgggcacaagaggaatccctgaaacacagggagcaacttattcgaaatcttgaggaggtgaaaaagttggctcgtcgcgagaaagaggagagtgaaaagctgaaatcggccaggaagcaggagctggaagcccaggttgcagagcgccggctgcaggcatgggaagcagaccagcaggaggaggaggaagaggaggaggcccggcgggtcgagcagctctcagatgccctgctgcagcaggaggcggagactatggctgagcagggctaccggcctaagccttacggacatccaaaaattgcttggaactgacttcatgggtaccataagtacagagaacaagggatgctgaggcttctgatcc

SEQ ID NO: 19079 - DNA, 398 bp, Homo sapiens
ctcttttctcgggacgggagaggccgtgtagcgtcgccgttactccgaggagataccagtcggtagaggagaagtcgaggttagagggaactgggaggcactttgctgtctgcaatcgaagttgagggtgcaaaaatgcagagtaataaaacttttaacttggagaagcaaaaccatactccaagaaagcatcatcaacatcaccaccagcagcagcaccaccagcagcaacagcagcagccgccaccaccgccaatacctgcaaatgggcaacaggccagcagccaaaatgaaggcttgactattgacctgaagaattttagaaaaccaggagagaagaccttcagtcgacgcggccgcgaattcagatctatgaatcgtagatactgaaaaacccc

SEQ ID NO: 19080 - DNA, 336 bp, Homo sapiens
gaaaaagttaaaaatcagctgggtacggtggcacgtgcctgtgatcccagctacttgggaggctgaggcaggaggatcgcctgagcccaggaggtggaggttgcagtgagccatgatcgagccactgcactccagcctgggcaacagatgaagaccctatttcagaaatacaactataaaaaaataaataaatcctccagtctggatcgtttgacgggacttcaggttctttctgaaatcgccgtgttactgttgcactgatgtccggagagacagtgacagcctccgtcagactcccgcgtgaagatgtcacaagggattggcaattgtccccag

SEQ ID NO: 19081 - DNA, 527 bp, Homo sapiens
  misc_feature (1)...(527): n = a,t,c or g
ttggaancccanagctatgacatgattacgaatttaatacgactcactatagggaatttggccctcgaggccaagaattcggcacgagtttcctccttcttcctcgtgagcctgtccaagctcagaattccgaaggctgttagaaatgcgttgggattgcagagagaaaggagcttgtctttccttctgctgtgctggtctgttttggatgtcagtcttcaggactatgaaaacttcctgccagtttagcatggacactgagggctggcatttctagtcttcttcagacactgaacatactgactccaggtataggaagcagctagcaaattgattcttttttaaatgcataggactctgcttccggcggttcctcttgtagtccaactctttttgccatctatttatgttgggaggtaggggcacaattgtcactcacaacacaggctagttagagtttgctaccttcttagcagaaaatgcatgtgtgtcttgttggaccttcactggggaaaggctgggagcct

SEQ ID NO: 19082 - DNA, 470 bp, Homo sapiens
  misc_feature (1)...(470): n = a,t,c or g
gtgaatctcagccccagagcatgaggttggtggctaatgataataataataacaatggtaatctaccatttattaagtagctactaagtgcaaaagaagagactctgcaaagggagattagatacagagataatacacctccctccaacaaaacccagggtctcatgcataccagcctcttgcattgagtcatgttttaagaaacaaattctaacaaccaaaagtaattaagcagaaatttcagtctttactgccatctctcaaagaacattaaaatgattgaattcaagccttgcagtagatctctctacattgcctttccttctttggtctcccacactctgcagcctacttcagaacctcttacttggcaattactccacagtgctccctggcatttagctttagtgtttttgctgctggtttcttttcttccttgcatctcctgccctgaganctttaccaggcgg

SEQ ID NO: 19083 - DNA, 303 bp, Homo sapiens
ggccactctctttgtcagcagcccaggatcatcccctccggcaaggctgtgagcccccctgctccagcttctggggggaaactttgtccgggagaagggattaggttggaggctgccagagaggagaggggcttagcggcctggtcaggtcccctccttgtgtgctgtttctgtagaacccagcatggtcaggtccccaccttgcgtgctgtttctgtagaacccagcatggatcacagcacagcgggctgcttctgttgggcttcactgcctgccggagggaagtaggtgccatcccagagc

SEQ ID NO: 19084 - DNA, 338 bp, Homo sapiens
ttccatttgaaaatgcctaatttagaatagctagcatgatgtgcacatagttaacattcagtgtcaaaatatgagcgcccttactaacctgaacctgtcttctcagtctcccctacgctccctacaaaatctgtgtttcagcccttattctctaaacattctccctcctctttcattcttgtgctttcatcacaatgcttgatacaagataagcatgcaataaatatttactcagagaatgaataagtgcccaatgttggctattaaattttaccaatccttcaagaagtgaagattttgtatatttctataaaagctttcttgatcctgctagtgaa

SEQ ID NO: 19085 - DNA, 323 bp, Homo sapiens
gagcaagttttttatttttagtagagacagggttttaccatgttgcccaggctggtctcgagctcctgagctcaagtgatctgcccacttcggcctcccgaagtgctggcattataggcatgagccacctcagctgacctgattatgatttttcaactttacgatggtgtgaaagtgatattcattcagtagaaattatacttcagtacagtattcatgaaatattcagcactttattgcaaaataggccttgtgttagaattcaagctgtctaaaccaccttgttttgttttggtttgttttaggcttttagcagtgtgaag

SEQ ID NO: 19086 - DNA, 338 bp, Homo sapiens
  misc_feature (1)...(338): n = a,t,c or g
gagtgnnnnnnnatttgaaacctttgngnacagctatgacatgattacgaatttaatacgactcactatagggaatttggccctcgaggccaagaattcggcacgaggattgttctgggccacctcggccgcccctcggccggggctgtcgtagctcattccacttcagggactatttcctctgccagtttccatcctcaacaattccagtatactctggataataatgttctaaccctggaacagagaaaattttatgaagaaaatgggtttctagtaatcaaaaatcttgtacctgatgccgatattcaacgctttcggaatgagtttgannaaat

SEQ ID NO: 19087 - DNA, 545 bp, Homo sapiens
  misc_feature (1)...(545): n = a,t,c or g
tttnnnnctttgnanancgntatgacatgattacgaatttaatacgactcactatagggaatttggccctcgaggccaagaattcggcacgagaaaggaaattatacgtgttaatccaaggtggattattttattaaattgagatgaggtcttgatattgttgcccaggctggtctggaactcctgagctcaagcagttctcctaccttggcctcccaaagcgctggcattacaggcgtgggccaccacacctggccttcaaggtggatttaaaaaagaaatttaagagtctctctcacccaggctggagtgcagtggcatgatcttggctcactgcaacctctgcctcctgagttccagcagtccttgagcctcagtattgagtagctgggactacatgcacgtgcacactgccacgcctggctagtttttgnatttttagcagagatgggattttgccatgtgacccaggctggcttgaactcctgcctcaaacgatcccctggttaactttnaaagggttggaataccggggngtgccatgc

SEQ ID NO: 19088 - DNA, 202 bp, Homo sapiens
gagaaaacttcttttgtcaactttacagatatctgtaaactattacatcgtcagcccaaacatctccttgcatttttgttggctgaattgggtacaagtggttctatagatggtaataaccaacttgtaatcaaaggaagattccaacagaaacagatagaaaatgtcttgagaagatatatcaaggaatatgtcacttgtc

SEQ ID NO: 19089 - DNA, 346 bp, Homo sapiens
  misc_feature (1)...(346): n = a,t,c or g
cttgactatctagaggaagtaaaagtcgatttctttccctttcctttccatctctttctctttctttcctcttatttcttccccttaagtttccttatttacatgtcattcctgctctgagacagggagcggactgtgtcttgtgactttatataccttatcactattacagttggttatgtgatagaaaccttataaatgtggttctagagatagattttaataattgcaacattagttttccctgtagaaaaaaagaccaatttatacatgagatacaatatttctaaaatagttatcctttgttacttggtcggntnagttctcagtaaggtgccagactggc

SEQ ID NO: 19090 - DNA, 360 bp, Homo sapiens
gagatattcagtgaagcaaccataggaggaaagtttaagcatatttagttggattaaaaataaggtgggggctgagcacgatggctcttgcctgtaatcccagcactttgggaggcagaggcgggcggatcacctgaggttaggagttcgagaccagcctgaccaacatagtgaaaccttgtctctaccaaaaatacaaaaattagctgggcatgctggtgggcgcctataatcccagctactggggaagctgaggtaagagaatcacttgaacctgggaggctgaggttgcagtgagccgagatgacaccactgcactccagccggggcgacagagtgagactccgtctcaaaaaaata

SEQ ID NO: 19091 - DNA, 296 bp, Homo sapiens
gttaggccagccacacttcttgttggagcttgtgtcctcagctgtactgggaatgagagctagctgtctgggtcagcggcactgaggctccaggggagcatgtggtctgtgcagcaggcttggggagtgctgagcagcacagattgggtttcatagcacagtgggagcccagacaggccagctagccataagcacctctgctggaggaagaggtggactctcttgggctggagggcccagttcaaggaaagaaacaaacagctacactgggctccttgatcacccagctgtggcag

SEQ ID NO: 19092 - DNA, 1168 bp, Homo sapiens
tatgacatgattacgaatttaatacgactcactatagggaatttggccctcgaggccaagaattcggcacgagggagcagcttcgcgccgccgcccgtctgcagattgttctgggccacctcggccgcccctcggccggggctgtcgtagctcatcccacttcagggactatttcctctgccagtttccatcctcaacaattccagtatactctggataataatgttctaaccctggaacagagaaaattttatgaagaaaatgggtttctagtaatcaaaaatcttgtacctgatgccgatattcaacgctttcggaatgagtttgaaaaaatctgcagaaaggaggtgaaaccattaggattaacagtaatgagagatgtgaccatttcgaaatccgaatatgctccaagtgagaagatgatcacgaaggtccaggatttccaggaagataaggagctcttcagatactgcactctccccgagattctgaaatatgtggagtgcttcactggacctaatattatggccatgcacacaatgttgataaacaaacctccagattctggcaagaagacgtcccgtcaccccctgcaccaggacctgcactatttccccttcaggcccagcgatctcatcgtttgcgcctggacggcgatggagcacatcagccggaacaacggctgtctggttgtgctcccaggcacacacaagggctccctgaagccccacgattaccccaagtgggaggggggagttaacaaaatgttccacgggatccaggactacgaggaaaacaaggcccgggtgcacctggtgatggagaagggcgacactgttttcttccatcctttgctcatccacggatctggtcagaataaaacccagggattccggaaggcaatttcctgccatttcgccagtgcccgattgccactacattgacgtgaagggcaccagtcaagaaaacatcgagaaggaagttgtaggaatagcacataaattctttggagctgaaaatagcgtgaacttgaaggatatttggatgtttcgagctcgacttgtgaaaggagaaagaaccaatctttgaaatagccatctgctataactctttcaacagaaaaccaaaaccaaacgaaatgtctaaggaaaatgttttcttaatgaga

SEQ ID NO: 19093 - DNA, 359 bp, Homo sapiens
gtgaggtgggaggatcattggagcccaggagtttgaggctgcagtgagctatgatcgcaccactgcattccagcctgggtgcattccagagtgtgaccctgtctataaataaatatagaacagcagacctggcaaagttgtttcgtagaacgtctcacattttggatttatctgaatgcttcctttttttatcccccaacattttcctggaatagtccttgattttacggaagaaagatgaaatgagtagcttgtgtgctgacagtgaagaggaagggagacactcctgttttatctgctggggccagatttgtgccagccctgccttttccttgggtgtggttgagaggactgtgcgc

SEQ ID NO: 19094 - DNA, 412 bp, Homo sapiens
gggctgctgtagctaacagctggagaaagcacccttaagtagggaccacctgaggtgagatccaatgaggaggagttaggggaagaatcagctgaagacagcgcctgacaggaggagcagagagcgagcttgatgttccaggagtaaaaaggccagtgggactccagcacaggaagccagagggagaatcgtgggagaccaggcaagggccaggcctggcagacccttattggcagaggttggcagttgggatttttttcctaagctgtgggactggaaggttctgggtcctgggagtgggagaggcctttctggggcacactgactagacttttctgacgggtgcagaagagggacgggttgattggaatgagtggggacagatgggaaagcctggctgccactgaacaaa

SEQ ID NO: 19095 - DNA, 378 bp, Homo sapiens
gaaaactaagacaccacagaaaaacactctaaacaacagcacatgatgggggctgggggagccctgggccagtctttcctgcctcctggcaggacctcctgaggcctctggggtgcatgacatgtggagctaaggaaccattcggcagccaacccttcccttctgggtcccactgtgatgcttgcgcattgccacttggctgaggaggaggatccttctccagctcttcctgccgcggcctgatctcagggagtccagcaggcctgtgaacggagcagtccatgactctgcgcttactccccaagctgctagtgtagacagctccagtgtcacctgcttgctccaaacagaagacgcatccagccacattttaggtgg

SEQ ID NO: 19096 - DNA, 516 bp, Homo sapiens
  misc_feature (1)...(516): n = a,t,c or g
catnntgactnnngancnnnnnctggnggactccctcccctttgaaacnctagactgatacgaatnaatacgactcactatagggaatttggccctcgaggccaagaattcggcacgaggagaaaatgaaagtaatccataaaattctacctgggattataggcatgagccactgtgctcacccagttttttatttttagatacagggtctcgctctgtggcttaaagctagatggtgcattggcaccatcatagctcactacaaccttgagcgcctgggcttaaggaatcttcctgtcagcctccccagtagctgggaccacaggcatgcaccactgcacctaattaaaaaaaattttttttatagagatggagggggtctcattttgttcctcaggctagtctcaaactcctggcctcaagcaatcctctgcttcagcctcccgaagtgctgggattacaggtgtgagccacggtgcccgaccccttattcttttggaangntgctataaaaag

SEQ ID NO: 19097 - DNA, 751 bp, Homo sapiens
gagcagacacaatggtaagaatggtgcctgtcctgctgtctctgctgctgcttctgggtcctgctgtcccccaggagaaccaagatggtcgttactctctgacctatatctacactgggctgtccaagcatgttgaagacgtccccgcgtttcaggcccttggctcactcaatgacctccagttctttagatacaacagtaaagacaggaagtctcagcccatgggactctggagacaggtggaaggaatggaggattggaagcaggacagccaacttcagaaggccagggaggacatctttatggagaccctgaaagacatcgtggagtattacaacgacagtaacgggtctcacgtattgcagggaaggtttggttgtgagatcgagaataacagaagcagcggagcattctggaaatattactatgatggaaaggactacattgaattcaacaaagaaatcccagcctgggtccccttcgacccagcagcccagataaccaagcagaagtgggaggcagaaccagtctacgtgcagcgggccaaggcttacctggaggaggagtgccctgcgactctgcggaaatacctgaaatacagcaaaaatatcctggaccggcaagatcctccctctgtggtggtcaccagccaccaggccccaggagaaaagaagaaactgaagtgcctggcctacgacttctacccagggaaaattgatgtgcactggactcgggccggcgaggtgcagga

SEQ ID NO: 19098 - DNA, 509 bp, Homo sapiens
  misc_feature (1)...(509): n = a,t,c or g
gagaaaacaaatattagtttattggaagccatactgcaatttgaattatttgaaaatgcaaacacaatttatacaactgtctattatgtttatggttccagataagatacggttctggttcaattagaatgtgcttcttgaaaagtattttcaactcctatttgaaaagtaatagtaagcagaaagtggtacagaattcaaagtaccaccaaataggtgataagataaccatttcttgtttctaggtaacccctaacctgaacttaaggcaacccaaaccaaaaagggaacatagacacagagagctccaggaggagacctctaattcttccaggaaaagattagctaatatttagagaaagagttggaaatcccctttcttcctccttctctcccccagctcctcctcttctttttttccctcctcctcctttctcctactcttctcctttaagtctctactccattctcttctgcaagtctttaggcaattgtnntgtgatagggga

SEQ ID NO: 19099 - DNA, 364 bp, Homo sapiens
gcactcatttctttttgcagacaaggaaatggatactcagcgaggttaagtaacttgcccaaagaggcagtgctaggaagtggttgggggaagaattcgaatatagaattctagaatcttgggcatcaaagctcttgtgatgccagactgcaagatgcgacacaaataggcattaacaccacactggaatgttgttgttagaaaacttattatcatgtagaatggtataatgaagattcctcttccagaaggttttaaccatagcagatttttaaatgacactctatacacttatttttcatggagacgatgcttatttgactcttaggcaaatacaagtcaggaggtattggcccatgtccac

SEQ ID NO: 19100 - DNA, 398 bp, Homo sapiens
  misc_feature (1)...(398): n = a,t,c or g
gttaaaaaaaaaattatttgtttagggtctgtccctcccagtaaactgtagcttctaagacagactttgtttttgttctctgctatattgctctattcccacgtcctaaaacagcgtctgaaccatagaagtcactcaataattttctttttttttttgncccgantcaanaaatttttttaaanaaangcatgaaaaatngncaaatngnancangtccaaaaaancaanancaggtnactgaantgccncatcaaatangganccnttgaaaaaagtaanangttnaatnngganaaaaaaaaattgntgggcncgggggttnacagcctgtaatcccagcactttgggatgctgnggaaggggganatgaggtaagagatcgagaccatcctggc

SEQ ID NO: 19101 - DNA, 412 bp, Homo sapiens
atttatatcagcttaacccaaatgctgagtgggttataaagtcaaagccattgtagaagacttaacaagctgcagataaccatgtggacttctgtcataattcttgctgagtcaagagtgtaaataaaagaaatggcaggactcatattattcagttgtacccaagtatttaaaaatgactctcttaagccttaaaaagtcatagatttgtgctgctgccagaattatattaattattattaatgttattattagaaaaaaaatttctggagtgagagtaaagaggcttaattagtttgtgggcagttttcatatgctctgtgaaatgtgtccagatgtgacataagtttttttttttaatatggggaaatgcttctcttcccattcttttctcctaaaatcatatatactg

SEQ ID NO: 19102 - DNA, 493 bp, Homo sapiens
  misc_feature (1)...(493): n = a,t,c or g
ggaacgcttcaatagtccatcgagccctgactttgtcttcatgctgagcagcaaagctgggggctgtggcctcaatctcattggggctaaccggctggtcatgtttgaccctgactggaacccagccaatgatgaacaagccatggcccgggtctggcgagatggtcaaaagaagacttgctatatctaccgcctgctgtctgcagggaccattgaggagaagatcttccagcgtcagagccacaagaaggcactgagcagctgtgtggtggatgaggagcaggatgtanagcgccacttctctctgggcgagttgaaggagctgtttatcctggatgaagctagcctcagtgacacacatgacaggttgcactgccgacgttgtgtcaacagccgtcagatccgggcacccctgatgggtctgactgcacttcanacctggcaaggtggaacactgcactgataaatgggggcnccggataaggtacccaag

SEQ ID NO: 19103 - DNA, 456 bp, Homo sapiens
cttttgacatgatcacgaatttaatacgactcactatagggaatttggccctcgaggccaagaattcggcacgagggtttcaaaggacattcaaaggaatatttatggccgtacacagctacttggatagtaaccagtgtaattaaatgagctgatacgtgtaaagcacttaggtgcctggtaacaaaaacaaaacccaaaaccacacactcataacaaatgttagaaaaaaacaaaccctgtgataagaattgcacattaaggcatactattccaagccagaggaaaacatttgcaggattaccagagttgttgttgttgttgttgttgttgtttttcctgcaaacattcatgcatgaaacagagaaaaaaaatcaggctctgcccagttctctggtttgcacagaattaattacaatttaagtagaaaagagtcattgtaggaattaaggaaac

SEQ ID NO: 19104 - DNA, 643 bp, Homo sapiens
cgtgtattaaattcatgtaagtggaataaaagttttatgaatggacttttcaactactttctctacagcttttcatgtaaattagtcttggttctgaaacttctctaaaggaaattgtacattttttgaaatttattccttattccctcttggcagctaatgggctcttaccaagtttaaacacaaaatttatcataacaaaaatactactaatataactactgtttccatgtcccatgatcccctctcttcctccccaccctgaaaaaaatgagttcctattttttctgggagagggggggattgattagaaaaaaatgtagtgtgttccatttaaaattttggcatatggcattttctaacttaggaagccacaatgttcttggcccatcatgacattgggtagcattaactgtaagttttgtgcttccaaatcactttttggtttttaagaatttcttgatactcttatagcctgccttcaattttgatcctttattctttctatttgtcaggtgcacaagattaccttcctgttttagccttctgtcttgtcaccaaccattcttacttggtggccatgtacttggaaaaaggccgcatgatctttctggctccactcagtgtctaaggcaccctgctt

SEQ ID NO: 19105 - DNA, 392 bp, Homo sapiens
caacaatatttaagtataatttatactgaccatgagaggtcaagaaactttctactttcttagcagaaattacaagcaattgcataaacagttagtaaaacaacttttgctaggttaaagagggtagcaaattcagcataattatcctgattaaagaaaagatttgacattttgatataataaattctgtacttttaagaaagcatttatatgcaaggacctaggtttagatgttataggagataaaagatacgggcaactagtgggatataaattagtaagataatatttaaatatcacttcaaaatgacagctgaaaagatgtcaaaaggcagtgtattaactaacaaattgttttgctttatttttatttttttgagacagggtctccc

SEQ ID NO: 19106 - DNA, 439 bp, Homo sapiens
  misc_feature (1)...(439): n = a,t,c or g
ggctaggcacaaaaatcacactattccatttttatgaaatgtccagaataggtgaatccccatctctactaaaagtacaaaaattagccaggcttggtggcacacgcctgtagtcccagctactcaggaggctgaggcaggagaatcacttgaaccgggaggtggaggttgtagtgagccgagttcacaccaccgcactccagcctaagcaacagagtgagactccatctcaaaacaaaaaacaaaaaaaaaaagcaaatntgtagnaggcagcaaattaccagtcgtntagggatatggncncacatggggaaatggcaagnggntgttaatgggatcctcagttntgngagcttgctaaaaaccattgaattacatattttaaattgngagttatgnggacatggactatnaagntgtacttaaaaaaacggactgg

SEQ ID NO: 19107 - DNA, 472 bp, Homo sapiens
  misc_feature (1)...(472): n = a,t,c or g
ggtgtnnnnctttgaaatccntatgacatgattacgaatttaatacgactcactatagggaatttggccctcgaggccaagaattcggcacgaggaagttgggtgaacacctgctgctcatggtacccagtgattcttgcccgagtgggcagctgagcagaggcccctctgggtcttgcagtccaaagaaccgcagagtagcccaagggctgtgggtccattttgagtggcagccaagtctgggagcccgtgtgcatcatgtttgggtcaggttggcgtggccaccactgaaataagcaataagtacgggctcctggtacctgcggatctcctgcaaacaggcccagagaacagccttgaagccacctttcccctcaaggggactgaccctgtctttaatgctgcagtggcatccagggatcagtggaacattgctttgagaaccctcctgctgttacggaggcagcacaaa

SEQ ID NO: 19108 - DNA, 340 bp, Homo sapiens
gaaaaattgattttttcccttcaagccattacaatgtaagaattagatttttttaaaagaaacatttatttttttacttagttttctttcctagtaaaagaaaaaaatcctattcctctgatctatttccaatgtgagaagatgtgaaattatgcatagctgggaattatatgagaatcttgaattcatttctttaaatctaatcatcagatacatgccctaacttttaaaatctcacttttggttcatcttgaattccacataccgagactcttgaaagccactgatcggggatgactgatgcagactgggagccacgtgggccccgggtctggttcag

SEQ ID NO: 19109 - DNA, 402 bp, Homo sapiens
atcagagtgaatctcagaactttggacagagctgtgagcagagactgactttcctgctgtctccaggtagctgcaaggctgaacagcagcacctactttattaccatcttactgtcattcaaagaaggcagagctgaatgctggagaaaaactgagtactagcaacagtttttgaaccctgaatactgtcataactgaagctagaattatccctggacttggttgccactaaaatttccttgttttgcttaccctggtttcagctggcaccctgatcacttgaaaggaacataactgatatactgtcctttgtttttctttccttcctcttctccgctttgatgattttaaattagaaatctacctgcctctaatctctttaattttctcatttatttactg

SEQ ID NO: 19110 - DNA, 332 bp, Homo sapiens
ctggaatccatcatcctcagcaaactaacacaggaacaggaaaccaaacactgcatgttctcacttataagtgggagctgaatgatgagaacacatggacacatgcgggatacagcacacactggggcctgttgatgtgggaagggagagcatcaagaatagctaaaggatgctgggcttaatacctaggtgatgggatgatctgtctaggaaaccaccatggcacacgtttacctatgcaacaaacctgtacatcctgaacatgtacccctgaacttaaaagttgaaaaaaaaaagttacttgaatcaacctgtgccaggctcttaaatta

SEQ ID NO: 19111 - DNA, 341 bp, Homo sapiens
tatttgtatttcttatgtacattctctctttagtgtcctttatcctttttcctattattagtttgatttgtaaacccttttaagggtatcaatcctttgtcagtcatagatgttgtaaatatttttctagcttgctgtcttttaactttatttatagtatcttttgttggttaaaattttaatatcaggaaatactaagtgaacaaagtgagaacatttctatctttttgtctgttctggaatcgtttaaatatgaaaataataaactgctcctgaggcttcagtaaatctcattaggtaaagctgttttggcccagtgccttttaagagggtaaatcttg

SEQ ID NO: 19112 - DNA, 408 bp, Homo sapiens
ctctgacctagcagtcaacatgaaggctctcattgttctggggcttgtcctcctttctgttacggtccagggcaaggtctttgaaaggtgtgagttggccagaactctgaaaagattgggaatggatggctacaggggaatcagcctagcaaactggatgtgtttggccaaatgggagagtggttacaacacacgagctacaaactacaatgctggagacagaagcactgattatgggatatttcagatcaatagccgctactggtgtaatgatggcaaaaccccaggagcagttaatgcctgtcatttatcctgcagtgctttgctgcaagataacatcgctgatgctgtagcttgtgcaaagagggttgtccgtgatccacaaggcattagagcatgggtggcatg

SEQ ID NO: 19113 - DNA, 424 bp, Homo sapiens
  misc_feature (1)...(424): n = a,t,c or g
gcccaattatatatttttgaaagttgtcattcccaaataccaagtactgtctctggttatcttaagccagaaaggatttaatactttggaagaagttaggacattgtacgagtattgggatggtagagggggcattacccctgcagttgggaatgaaatgtaaaggtcttttacctttgtgtcacttaatctaactttattaatatatggagtggacgcatccagtgagctggaattaggtcatgtgcctgggttggaaagtgggacaataggactcctttctctgaaaaacagggcagaagggtgttatctcacaccagaatactcaagctgtgggtccagttgtgtcctccaaaaagaaatgttgaagtcctaacctcaaatacctggaaagatgaccttatttnaaaatgggggccatata

SEQ ID NO: 19114 - DNA, 332 bp, Homo sapiens
gtcttttagaaactagattttagcattggaactagaaaactattttcggaaattaaatcttagctttgaaattaaatacccgcttttttctggagaataaagaattatgaataaatgaattattctgattaaaattattctgattaaaatgaattattctgaataaaaaatcctgatgtacattgaaaaggtttattagattgcaggcatgagccaccacacctggctgagttaaatatttctaaaggagtttgtcttcagtttaaaagcaaatctttgtgttgatctggggcagtactgtgaatgaaaatttgttcctggaagatcttgac

SEQ ID NO: 19115 - DNA, 456 bp, Homo sapiens
  misc_feature (1)...(456): n = a,t,c or g
gaaagttaaaatcaaaatgcagaaaatgaagtggacagcactaactttagtatctatggagagatgcttccctactgaaacacaggctcttacttttggttgagctctagtgagacaccaaggcctgcagaggttgaccctgcagacacccctttgtccctggggaagttggggttgaggggtgactgaggaggaagggcaggatccagcatccgagagctccatgcttttggggtcactggtcatgtgcattagtaatgggccctaccagtctcccgctggggggcctctgagtcagaagaagcagagaggagagaagagtctggaccctcacaggtgcttgtgtttcatcagcgtcagatgagccaaaaaaggtgctcactgatgaaccgncctgaattttacaagccatgtttnacntgggtttcatttgaaaaangggnccntggnnaaaaa

SEQ ID NO: 19116 - DNA, 352 bp, Homo sapiens
ggttctgagcaaacagaagttcaagtggagacgtactttgcgctatgtgcagctttgtcaagaacagtgtgaactgatgtgctagcatatctttcaaagagaagaatgaatgaataagctagaatttaaaagttttaaaattatttggtatgctttttttatttcattaaaaccacacagatatacacatcatcacttatttttattttatctccaagtttatgtttagcttattaagaataacattgttgaccagacacggtggctcatgcctgtaatcccagcactttgggatactgaggtgtgcagattgcttgaggtcacgagttcaagaccagctggccaacatagc

SEQ ID NO: 19117 - DNA, 356 bp, Homo sapiens
gcaatgctaatgtgtggggttccaagtggtgtatgctaaagagacagtagctaagaaggaacaaaggtggttagttaaggagagcacgtcatactttgtaaatcagattgtcaacattattttatctctttttgctttaccccaagtcattagaaagtcttgtttaattgtcttggctgtcttatgaaaattaagagggaggttaaattcaggcaagtgttttggacaggaagtagttccccttggcctaaagcactgtggtagtagcagtagcagcaataattagagagtagggaattcttaagagaaagataggggagaaatgaagaagggaataggggaattgtggctgccaa

SEQ ID NO: 19118 - DNA, 659 bp, Homo sapiens
gaaagctatgcgacaagtctctaggaagttccaagctttcccacattttcatcttcttctgagcacttcaagctgctccaatctctgcctgttacccagttccaaagtcacttccacattttcgggtatcttttcagccatgccccactctattcataccaatttactgtattgtttgttttcacgctgctgataaagacatacctgagactgggaagaaaaagaggtttaattggacttacagttccacatggctggggaggcctcagaatcatggcaggaggcaaaggcacttcttacatggcagcggcaagagaaaatgaggaagaagcaaaagcagaaacccctgataaacccatcagatctcgtgagacttattcactatcatgagaatagcacaggaaagactggcccccatgattcaattacctccccctgggtccctcccacaacatgtgggaattccagaagatacaattcaagttgagatttcagtggggacacagccaaaccatatcactggtgatgccacttcttcagtattagggattctcagtcagaagagaccccctgtgtggcctgagtcccctcaggaggaaggtggacaacagagaaatgagagttttgatattttctgaaagaggaacatgtgttagaga

SEQ ID NO: 19119 - DNA, 347 bp, Homo sapiens
gaagattccccagtatataccagtttttggaggtggaatattttcattgccaacttgtgttaaagtcagactctagattttcatagatagggtacagtggaaaatgttattcctactttacctagtgataaaatatctttagaagaattgtaatgggctttaaagacttaagtggatggcaaaatgaatctgtatttgctgatgttttggggatactctggttttcaggaggaaactgaggttttcaggcatggttattaggacaaggtagtgagacttagtggttgagtaacagtattgttttggaaatgaaaaagccctttcctccccttagcagtgtagaattc

SEQ ID NO: 19120 - DNA, 391 bp, Homo sapiens
gttgttgaagaagactacaatgaaaatgctaaaaatggagaagccaaaattacagaggcaccagcttctgaaaaagaaattgtggaagtaaaagaagaaaatattgaagatgccacagaaaagggaggagaaaagaaagaagcagtggcagcagaagtaaaaaatgaagaagaagatcagaaagaagatgaagaagatcaatacgaagagaaaggggaagctggaaaagaagacaaagatgaaaaaggggaagaagatggaaaagaggataaaaatggaaatgagaaaggagaagatgcataaagagaaagaagatggaaaaaaaggtgaagacggaaaaggaaatggagaagatggaaaagagaaaggagaagatgaaaaagaggaagaa

SEQ ID NO: 19121 - DNA, 348 bp, Homo sapiens
taacttttctatcaaatcaaacagaagttctgtaccattaagcactaattctccattccccttgccccagcctccatgccctggaaacatgcaatctgcattccctctgcatgaatttgactattcatgatctttcatataagtagaatcatatactgtttgtccttttggtcgacgcggccgcgaattccagatctatgaatcgtagatactgaaaaaccccgcaagttcacttcaactgtgcatcgtgcaccatctcaatttctttcatttatacatcgttttgccttcttttatgtaactatactcctctaagtttcaatcttggccatgtaacctctgatctat

SEQ ID NO: 19122 - DNA, 456 bp, Homo sapiens
gtgcttgtagctcatgagctagtgtttcctagatgctgtttccaggtgtcttgcatgtcacacactggcctaccagggctggagtgagatcatgagcgccagattgttggtgaaggaagttgacagagacatcgaatgtcggtgaacaggagtgaccttgggtctcaataaatactgtggtcaactgaatccagaacccacccttaccagcagggcccacttcttccccagcaggccgagctcttcccctcctgtcttccctggcccttgctttgtagctctgtgtggctgtgtcatgtctggttgtatctgtatatacttctgcctctcccgctatctagatggctcggggaggcacaccacacaccaggtcaccttcctctctgaacccccagcacctcatactgtttctgtgcagagataaggctgggtgaaagcttgtgtgaatgatctgaa

SEQ ID NO: 19123 - DNA, 431 bp, Homo sapiens
gggaaactgaggcccagagaggcgacggttgcccagggccaactcaagggcggaggcttcgaggaaacaggcactcaggccacgcactgtcccctgagcgggccctgccctgcacccaaggggggtcaccctggagacggagcccaccacgtcccccatacttggactctgcatgacaagagcccccgggctgcccatgtccctggggtgctgcagtctggggccacccaccgggccctcagggacgctgcctggctgggggacaaagcaccagggaggcctttgaccaacactacgagcctcgactcccccgggcttgtggcacaaaaacgctatctgggtaaacactgtctcaaaaaatagcttccgaagtaagatatctgaggataaacggcttcagtttatcctcctcactggactagctgtgaagc

SEQ ID NO: 19124 - DNA, 367 bp, Homo sapiens
ggagacagagtcttgctctgtcacccaggctgcagtgcagtggcatgaacacggctcactgcagcctcaacttcctgggttcaagggatcctcctgcctcagcctccagtgtagctgggaccacaggcacatgccaccatgcctggctaatttttaattctgttgtataggcagggtctcactttgttgcccaggctcaaactcctaggctgaagtgatcctcctgcgtcagcttcctaaagcgctgggattacaggcatgagtcattgtgcctggcctatatcactgtattttgaaaacatcattatttttaaagcaaatgtgattcattttaacaaaactaaatttagaatcaaaacaactagcc

SEQ ID NO: 19125 - DNA, 536 bp, Homo sapiens
  misc_feature (1)...(536): n = a,t,c or g
acagctatgacatgattacgaatttaatacgactcactatagggaatttggccctcgaggccaagaattcggcacgagcgtccgtgtgctatgccagggcctgaaggactccccctgccagctggaggcgctcaagctggagagctgcggtgtgacatcagacaactgccgggacctgtgcggcattgtggcctccaaggcctcgctgcgggagctggccctgggcagcaacaagctgggtgatgtgggcatggcggagctgtgcccagggctgctccaccccagctccaggctcaggaccctgtggatctgggagtgtggcatcactgccaagggctgcggggatctgtgccgtgtcctcagggccaaggagagcctgaaggagctcagcctggccggcaacgagctgggggatgagggtgcccgactgctgtgtgagaccctgctggaacctgcttgccagctggagtcgctgtgggtgaaatcctgcacttncagccgctgntgntncantttaacttaatgctggccaaaaa

SEQ ID NO: 19126 - DNA, 242 bp, Homo sapiens
caagtgaagagcatagtgaggtgggaattagagataatagaatttgaaaagcatattaatttttttcattatgctttgccttgcttgaaaaattattgctagcagcttttagagttctatgtagcacagctccctcaaacattaaggagaatcgcttgaacccgggaggtggaggttgtggtgggctgagatcgtgccattgcattccagtctgggcgacaagagtgaaactccatctgaaa

SEQ ID NO: 19127 - DNA, 308 bp, Homo sapiens
ttcaacaaaaaagtttggatgtagaagcagctgtaagaattcaactgtttattataacaagatactaaagagactgtaaaatgccacccttctccttggattgttttggaagttattcttcataaaaaatgttaacgtgggctgggcatggtggctcatgcctgtaatcccagcactctgggaggctgaggtgggcggatcacttgagctcaggaattcaaggtcagcctgggcaacatggctaaactctgtctctattaagaaaaaaaatgttaacattatgatttaaaagtgcattaaccttaatc

SEQ ID NO: 19128 - DNA, 385 bp, Homo sapiens
  misc_feature (1)...(385): n = a,t,c or g
ctccgtgccgggggcgccagcaccggcctcgcagctccctcgcccggccggggagctctcctccaagacactatggccaactgaagcccaaagccagctgagaggggagtctgggaactgcagggtgcatcatcaacccagtgaaatgcagaccagagcagaggaaggccaggatctgcacagctcattcgctttttatggacttactttccaaggaagaaggctggaaggtgagagtctaaatccacaagtgaaggaatgcaacatgggaagtgtctcaaagaacatctccagagggacaggatgctcagtggagtgggctgacctctccccgctggtgcccagggctctctcttcactgcggtcctaatgnggctgcttcatt

SEQ ID NO: 19129 - DNA, 388 bp, Homo sapiens
  misc_feature (1)...(388): n = a,t,c or g
gcaaaaatcccccaatttctgtgctttcttatttgaaaggccatttctagggggaaaacagttcccaaacacattatacatgttggaaaagtttatctctaaccttttgaattaaacaatttcagaattgaaaacagtaagttgaattttaggccaataactcttttctataatcttgactcttttaagattaggcagttcagatagtcttatactactgaaaacctagctagatatcagaagtaattattagtggcaagaataccaaagttaataccaaagtttttttgttttgttttgtttttagacagggtctcactcagtcacccaggctggagtgcagtggtgcaatcttggctcactggaacctttggcttccaagnttcaa

SEQ ID NO: 19130 - DNA, 414 bp, Homo sapiens
  misc_feature (1)...(414): n = a,t,c or g
gcggcacgaggagcaaaacctcaacaaagttgcatgtgggcaacatcagtcccacctgcaccaataaggagcttcgagccaagtttgaggagtatggtccggtcatcgaatgtgacatcgtgaaagattatgccttcgtacacatggagcgggcagaggatgcagtggaggccatcaggggccttgataacacagagtttcaaggcaaacgaatgcacgtgcagttgtccaccagccggcttangggagaccanagcggctgctatcgntgcgggaaanagggcacttggtccaagagtgtccgatagatcgttnaggccgngtggcanactttgncgagcaatatattggcatacggacaaatgcgacnccttanccatgactttggggatcattggattacacaacccgtcc

SEQ ID NO: 19131 - DNA, 280 bp, Homo sapiens
aactcatcattttctacttgttttcaatgtgttggaaactgtaaaatgatactgtagaacctgtctcctactttgaaaactgaatgtcagggctgagtgaatcaaagtgtctagacatatttgcatagaggccaaggtattctattctaataactgcttactcaacactaccaccttttccttatactgtatatgattatggcctacaatgttgtatttgttatttattcaattgtaggccataatcatatacagtataaggaaaaggcggacgcgtggg

SEQ ID NO: 19132 - DNA, 206 bp, Homo sapiens
  misc_feature (1)...(206): n = a,t,c or g
gcataacccgttgctatgcaacccagatgtcccttatctagcttagcctanggggggaacttatcccataaccttcactgtnntgcccaggcagctcaggcttctcatgaccttcgctgtacttcttanataatncanaatacttnannncatnanttanatatancnntantctataanctcattccataanacnaatgaaaatt

SEQ ID NO: 19133 - DNA, 330 bp, Homo sapiens
gaagaaagccattactctggagtgggaggtgccctcagcggcattcaagctttcaaatcctgaggggctgtcttctcggaagcacagagaattttgcttattgtgtgtgtaactgccaagtgtaggcaggtttcattggaaactggctacactaggctgtcatggcaacctgatcatcaaatgacactgtggccacagccgccaatgaggcttgagaaccttaagggtgggtggggctagaacggctggatgctggcaaagcttcctcatattaatatttctggctcagcctgagtcattgcagaggaggggagaggaactttctgacct

SEQ ID NO: 19134 - DNA, 497 bp, Homo sapiens
  misc_feature (1)...(497): n = a,t,c or g
tcanagctatgacatgattacgaatttaatacgactcactatagggaatttggccctcgaggccaagaattcggcacgagtccagacacactggtgctgcctctttcaggccagggcttgagggcaagtgctgtgccctaacaggtcttgcttgtcacccccacctctgaagtgggtatttcacagcctgaactcacagctgcagagaaggttgagcccatggtgtacttgaaagggcagttcatctggatatccaggctctgcaggaggtaccggagcaatgccaggtgccctttgctgaactgcctagagtggctggccctggggacaaagagcacagcatcctggtgacaatgaagtcacactttcctaaacagtcctggttttgatgctttaattctttggctgcctttgctttgcaaggccaggatctgggcctaaatttttanggcagaaccaaaccattttggtttctaagaaagtgggaaggnngggaa

SEQ ID NO: 19135 - DNA, 346 bp, Homo sapiens
gggtggtttggctcattcaagccccttgctctggaggaacaccgataaaccatcaggatgtcttttcgtcttgcgttaactgtggcaaggctgtgcattaaagaacataaccatcactaaaagggtgggaacaccccagcgaccagtggccagtggccaggtgctttatggtaacaccacagacatgcctggccaatcagatgtgatcttttgctggcacttgctcctttggcccccactgcagtaaacactttcccttggatgttggttttctgttgtgtctggcagccacacagggctgcttgaactttagccagaggcaaatatttatacatcagagtgtgca

SEQ ID NO: 19136 - DNA, 320 bp, Homo sapiens
caagtttcctgcctgcccaggcagcatgacccttggtgggatcaggcagagctctgcctctcccctccctacctcggaacatcctgtcgtcacacacgattgtccagtgtcatgaaagtttgtaagtgggaaggcaggcagatgatgaattcatcaaacattacagggatgcttttgctgtaagacttcgggatgtagcccgtgtggggctgtttctggggtcccgttcgcctctccaagctcctcctgccattggtaaagatgcagggcatctgaactcgctcttgggctgtgcgggcacttggacctggtcagctccc

SEQ ID NO: 19137 - DNA, 448 bp, Homo sapiens
  misc_feature (1)...(448): n = a,t,c or g
gtgttgactttagtaagtgcaagtagattatcaaggtgttcttccttggttgtcttcatattgagtaacctgagcaaaaaaggagggtttggtcttgctctcttagagatggcaagagctgatgaaaatgtgcatgagtgaactgtgcagttcaaaaccatgttggtcaaggttcaactgaactttggtgaataaatcagccatggccacagtgtcccatgaacatagaatctaataatttttctataattttgtaataacttatgatgacttttatgggtctgcattttaggaataaaatgtgaagaccagatcattgaagatcagtacaataattccaaaagaaatctaaggtcatttgcacttacaacctagagctatgtcccttaagatattgntagaatgacaacaaatgttaaaagcaagcaaagaaaatgaagcacccact

SEQ ID NO: 19138 - DNA, 409 bp, Homo sapiens
gcggcacgagagatcgatagaccttttcagaagtaattgttttcatcaggttattctagctaaacagggttttctcacctagttatgattatatacttttggaataaaaatgcttgtgaaaatatttgaagtttttcatttagatgaaacattctactttatcatattttgttagcaagtattttgtgttacgtaacctaagtcccattaataatctaaaatgtatgtagtcttttgagactttcaaattagtaggcaaaaatacatatatacatacatatatacatatatgtataatgtagatcaggctgggcgggatggctcacgcctgtaatcccagcattttgggaggccaagtgaggaggattgcttgaggcaggagttcaagaccagactgaacaacatagca

SEQ ID NO: 19139 - DNA, 547 bp, Homo sapiens
ggacaagacggcagctgaggatgccatacgcaacctgcaccattacaagcttcatggggtgaacatcaacgtggaagccagcaagaataagagcaaaacctcaacaaagttgcatgtgggcaacatcagtcccacctgcaccaataaggagcttcgagccaagtttgaggagtatggtccggtcatcgaatgtgacatcgtgaaagattatgccttcgtacacatggagcgggcagaggatgcagtggaggccatcaggggccttgataacacagagtttcaaggcaaacgaatgcacgtgcagttgtccaccagccggcttaggactgcgcccgggatgggagaccagagcggctgctatcggtgcgggaaagaggggcactggtccaaagagtgtccgatagatcgttcaggccgcgtggcagacttgaccgagcaatataatgagcaatacggagcagtgcgtacgccttacaccatgagctatggggattcattgtattacaacaacgcgtacggagccgctcgatgcctactacaagcgctg

SEQ ID NO: 19140 - DNA, 502 bp, Homo sapiens
  misc_feature (1)...(502): n = a,t,c or g
cttgnnncntaacagctatgacatgattacgaatttaatacgactcactatagggaatttggccctcgaggccaagaattcggcacgagctggagtgcaagatgataccccaaaacacagctatcagtgtgggagcccagatttttacagagcaacctaatttcagtaagagacaaatcatggtaacagattaatccacagataactttgtataaaataatttttttacattggttcagcaaagcagggatcctattaaacatccacagggataaacattcattttttggaagtaacagtctggtgtaatgagtctgttattataataaatgtactaataatgcaaaaaacaatcttaatttgttctcagtagagataaaaattactaactgaagacaaagacaacaactttgcaatacagagaactcttacctcaaccgtttcaactgccactcatctacctgctccttttcaccactggngaactgtgttctgcatgaac

SEQ ID NO: 19141 - DNA, 306 bp, Homo sapiens
gggtttcaccatgttggccaggctggtctcgaactcctgacctcaggcgatctgcctgccttggcctcccaaagtgctgggattacaggcgtgagccaccaggcccggcctgttttttttgttgttgttgttgtttttgtttttgtttttgtttttttttcagattaaaaatcttcacagccactccaactccccagtgctttggtcctgcccttgggattggaatttgagacattccttttcattgccttccccctttcttgttactcttgcatgcgtagtgcctgggctggacacagttgggaa

SEQ ID NO: 19142 - DNA, 281 bp, Homo sapiens
cttggaacgcctgcaggtaccggtccggaattcccgggtcgacgagctcactagtcggcggccgctctagaggatccaagcttacgtacgcgtgcatgcgacgtcatagctctctccctatagtgagtcgtattataagctagcttgggatctttgtgaaggaaccttacttctgtggtgtgacataattggacaaactacctacagagatttaaagctctaaggtaaatataaaatttttaagtgtataatgtgttaaactagctgcatatgcttgctgg

SEQ ID NO: 19143 - DNA, 312 bp, Homo sapiens
ctcggactacctaaccgccgcctccccatagggcttcgagtactcgtgggctcctgcagccctgaggaggttcttcccccccggcacaccccggggccagcgcctggattccttcatcacccccgtctctgccttcgctcgcattcccgggcttgtttgtgcgcttctcgtgggtatctcccactcgcctgcacaatccgtatccaagcggtgctcggttgaatggctccgtcgcggctgcccattgctcttttctgggtcccaagcacagaagataagactgtcgtacttttccctggcaatccaaggacc

SEQ ID NO: 19144 - DNA, 438 bp, Homo sapiens
ctatgacatgattacgaatttaatacgactcactatagggaatttggccctcgaggccaagaattcggcacgagaaaatgagactaaaaggagtagcactgtagatgggttaaggaaaagacccctcatcgtatttgatggaagttcaacaagtacaagcataaaagtgaaaaagacagagaatggagataatgatcgactgaagcctcccccgcaggcaagctttaccagtaatgcctttagaaaattatcaaattcctcttcgagtgtttcacccctaattttgtcttccaatttgcctgtgaacaataaaacggaacacaataataatgacgctaaacagaaccatgacttaacgcataggaaaagtccttcaggccctgtgaagtcgccaccattgtcccctgttggaactactccagtgaagttaaagagagc

SEQ ID NO: 19145 - DNA, 349 bp, Homo sapiens
catccacaagataccagctaggtcagggggtggggaaaacacatacaaaaaggcaagcccatgtcagggcgatcctggttcaaatgtgccatttcccgggttgatgctgccacactttgtagagagtttagcaacacagtgtgcttagtcagcgtaggaatcctcactaaagcaggagaagttccattcaaagtgccaatgatagagtcaacaggaaggttaatgttggaaacacaatcaggtgtggattggtgctactttgaacaaaaggtccccctgtggtcttttgttcaacattgtacaatgtagaactctgtccaacactaatttattttgtcttgagttttac

SEQ ID NO: 19146 - DNA, 463 bp, Homo sapiens
  misc_feature (1)...(463): n = a,t,c or g
gccaaagcactgggattataggcgtgagcctggccttgctttttttaatattaaaaatctggtcggatggtcccacatggaaatagtatgttgttttcatgcattcgccatcatccccgttaatagtcttcaaaggagagctggcaactccatcattgctttcttgctttgagatttttgtttcggtactctttgggagagaattcctaagaaggtttttagaataaaattgtcctcaaccagattgactaattacacattataactacaacttgaataacatttaaagagttggttatttctgtttgataggttggcgctgttatatgtcaaggctttttaaatcggttttaagaaataagcattattttggnggaggtagaaatttcacaacattcataagttctaaacatctagaaatggttggaggaaacattttcgtttnaagaaagtttcattaagt

SEQ ID NO: 19147 - DNA, 364 bp, Homo sapiens
  misc_feature (1)...(364): n = a,t,c or g
ggagagcagcgctgtccagcggggaggagtctcaccatcacccagtctcctcaccgtcacccagtctcctcgccagagggtccaggacctcagtgccggggtgcgaggagagcagtgctgtccagcggggaggaacctcaccatcactcagtctcctcaccagcacactttttctccatgtctcgttttgctcctcctctggtatttgtatttcttaaagaggattttgaaaagagatggtgaagttggtattttaggtanaagggncccnctggtncctcatnattaagtcggccancctccctganctagannanngtttnccnntgnccgnnnggacctgctnncntntttcnggnctcac

SEQ ID NO: 19148 - DNA, 278 bp, Homo sapiens
ctaaatgagttcctgaattctttgagaaaggaaataggaaagttagagagccagaattttaagaaccaaacaaagagccagggagttggcaatccgaggaaagatcaagggggctctgatctagataagggagtatcagggaaggtacttccagcattaagaagtcaagtagaattaagatggttaggccaggtacggtggctcacgcctgtcagcccagcactttggcaagccgaggagggtggatcacctgaggtcaggagttcaagaaccacctg

SEQ ID NO: 19149 - DNA, 385 bp, Homo sapiens
gctatatttacttcctcctcaggcaagtcatgttccattagtattcattctaaggaggcttcaattcaatttccaatacatatgaccaatattataaccttaccaacaatgccaatattataccatgtcacaggatggcagtaaatgaaacctgaaaaataagagccaaagatactggcacattcatagagtgccagtcagtcattaacaattatcccagttcatcatcatatatgaccaaaatatctcccagagagaagtcactcaagtttacagacttctgtttagccttattaagttctaaaagcaggagtggcctcacaaacacttgacttttactctttcaggcatctagtataattgagctaatagtatcatctcttgc

SEQ ID NO: 19150 - DNA, 523 bp, Homo sapiens
  misc_feature (1)...(523): n = a,t,c or g
gtatcaccatgctacagctgtaggtgggcacctgtccctacaaaacaaaatgagatcaacacccagactcatgggggcttagcagttctcaattacctgtttgtcttaaacattaacaaggataacttagctctgactgtgtcttaaagacataaataaagatgtcatcatttgatgtgacctcaaatatgctgagaccctaatgaggagggtttcataggctgacagcccaggccaccgctgaaggctcttaagaggggtcagtgaggagcacaaatgccagactagaacagagacgaaagtctaggacaggaccaaaggtatgaacaaaagggagatggcaagatgggcccaccacaagagacagacccaggtcagctagtttaccggattctgttctggggaatgggctttanggtaaaaaagnacttgcanctctgatttgctaaaatatttaccacaantatnatttcacntcagtaagcatttaagaanagaagtttttttaagaggctgggngtgg

SEQ ID NO: 19151 - DNA, 528 bp, Homo sapiens
tttgaaacccttttgacacgattacgaatttaatacgactcactatagggaatttggccctcgaggccaagaattcggcacgaggggatactgaagttctgaaggaggctgcctggggactctgtcacatagccagtggggtgggggactctcgggggattgtcccagctcctcacggttttcctggaggctccattctgtctgcctgccttgtagccagcactgagcagagggcaagggagccagagaaggtaggcccatgtggcctgggaccaaggacaccctggcaggcagacccgttggctgcccttcgaactcgtattcttttaagatttgttcagcatttatctggggtgggaaaatggatttgcaatgaatacaaatcatgagcctcttccagattccaaattccattctacaccggactattttccagaagcagaaggaacagaaattcacagacagagtcactttccaggggcagtgaagttaatgtcctggagaaacactgctgtccttgcttttctg

SEQ ID NO: 19152 - DNA, 358 bp, Homo sapiens
  misc_feature (1)...(358): n = a,t,c or g
ggcacaactgtattttcagaagaaactgaagttcataaatcgagggactttcccaaggtcacaatgaacctaagaccaaaactccagctccaggctttctgtattacccagtgaacttcccctgggttaaaggaaataatggatgtaaaagccccttgcactctaaaatgcactgtaaaaatgttaaggaatgtttnctntntaancnnngttnncannaacgtttgntcttatggggtcnataancttgntggnntactatnatttncnaantcttctagntacattcanatnatntngngaantcgtttntnnataaagtctatatnttanacnnatntganctatgantatcccg

SEQ ID NO: 19153 - DNA, 457 bp, Homo sapiens
  misc_feature (1)...(457): n = a,t,c or g
ggnagnnnnntatgananngtttgnctgattacgaatttaatacgactcactatagggaatttggccctcgaggccaagaattcggcacgaggcccaacgctgaggacatgacatccaaagattactactttgactcctacgcacactttggcatccacgaggagatgctgaaggacgaggtgcgcaccctcacttaccggaactccatgtttcataaccggcacctcttcaaggacaaggtggtgctggacgtcggctcgggcaccggcatcctctgcatgtttgctgccaaggccggggcccgcaaggtcatcgggatcgagtgttccagtatctctgattatgcggtgaaaatcgtcaaagccaacaagttagaccacgtggtgaccatcatcaaggggaaggcgtagaggnggagctcccngtggagaangttgacatcntnatcagcgagtg

SEQ ID NO: 19154 - DNA, 248 bp, Homo sapiens
gaactgaactgcttcttccctttcctgaaagaggctttgagatggaaggaagggcatttgggctttaagatgctttgtgggctgggcgcggtggctcatgcctgtaatctcagtactttgggaggccaaggcggggggattgcttgagcgcaggagtttgagatcagcctgggcaacatgatgaaaccccatctctaccaaaaaaaaacccaagatgctttgtgttaatggggctttttttttttttt

SEQ ID NO: 19155 - DNA, 437 bp, Homo sapiens
gaggagagagagtgggggagagtgggggagaggcagggtgaggaaaaacttttgattaagccaaaagcaagggcagatgtaaattccgaggaagggaggactcagaaagctgtttggtagtgcaggcataaaaaacaaggcagagaacagagcagagtctgtttttagcataggactagggtggaagtcactcaactgcagccaacagcagtggccagacaacctagcacctagagttgccttagatctttgaattccaagtcctgacatttactgattcaattttgtgtttccaagttgccattttggccatattgatattgcatccttatcgtaagccctattacttgaagacggtccccttgcaaatgaaggaaactgatgtacacactggaccttgtggatttcacgtaactaaaaagctgcaggaagatgaa

SEQ ID NO: 19156 - DNA, 332 bp, Homo sapiens
gagctcctccaactcgacttgatcctgggtgcagaaaatgctggaagcctgacacaatcacagcccaaagggagcaaatgaaaagaaatcctctgaatgaaatttggggtctcacttcgggcagcacccaccctctgcaaaagggagatgtttccacagctgctgatcctggatccagaggcagcactccctccacgagggacactcgggcattgtaaactcaagcatccctttgttttccattcttcactcagacattcctgatgactaactagggatcaatataaatcacgtcattgtgatctcgggtcttttcctgctaaagaaaagta

SEQ ID NO: 19157 - DNA, 215 bp, Homo sapiens
gtgctctgcggctaccctcctttttatgatgaaaatgactccaagctctttgagcagatcctcaaggcggaatatgagtttgactctccctactgggatgacatctccgactctgcaaaagacttcattcggaacctgatggagaaggacccgaataaaagatacacgtgtgagcaggcagctcggcacccatggatcgctggtgacacagccct

SEQ ID NO: 19158 - DNA, 364 bp, Homo sapiens
gattaaagacctcatggatcttgaagctgtccacgatgtcttggatctttacttgtggctaagctaccgatttatggatatgtttccagatgccagccttattcgagatctccagaaagaactagatggtattatccaagatggtgtgcacaatatcactaaattgattaaaatgtctgagacgcataagctgttgaatttggagggctttccatcagggagccagtcacgattgtcaggaaccttaaagagccaagctagaaggacacgcggcaccaaagctctagggagtaaagctactgagccacccagccccgatgcaggagagctgtcccttgcttccagattggtgcagcaaggactc

SEQ ID NO: 19159 - DNA, 427 bp, Homo sapiens
gggggggtcttggcggccggaggaggagtaggtgcgggtgaagatggcggcagcccgaggccgcgaactgcatcatggaggtgtcctgtggccaggcggaaagcagtgagaagcccaacgctgaggacatgacatccaaagattactactttgactcctacgcacactttggcatccacgaggagatgctgaaggacgaggtgcgcaccctcacttaccgcaactccatgtttcataaccggcacctcttcaaggacaaggtggtgctggacgtcgggctcgggcaccggcatcctctgcatgtttgctgccaaggccggggcccgcaaggtcatcgggatcgagtgttccagtatctctgattatgcggtgaagatcgtcaaagccaacaagttagaccacgtggtgaccatcatcaaggggaagg

SEQ ID NO: 19160 - DNA, 333 bp, Homo sapiens
gggtaataattcactgaatgcacctctatggaaactgacaaaaatcttacctagctttcagatttctaaccaccatcatactaaaatattattctcagagtcattgcagttaaattttaagtgcttctttggcaattcatgattcccagatgagatggtcatttgctgtaatggggctggatgtttatatatttaatgaattatcatagcttaatagtacattttctccatgcattttataaaaatgttttctgtttatttgctgccaaagcatcacccttcaatctgccattagcttcttcctcttgatgttgtacttattatcaccatgtc

SEQ ID NO: 19161 - DNA, 317 bp, Homo sapiens
  misc_feature (1)...(317): n = a,t,c or g
gatttcactggagccaggataagcattagggtaagtaactatttttcctgtctctattaaaaatacaaaaaattggctgggcgtggtggctcacgcctgtaatcccagcactctgggaggctgaggtgggcggatcacaaggttaggagatcgagaccatcctggctaacacagtgaaaccccatctctactaaaaaatacaaaaaattaactgggcatagtggcggacgcctgaagtcccagctacttgggaggctgaggcggacaatggcgtgaacctgggaggngnancttgcagngagctnanantgcccctg

SEQ ID NO: 19162 - DNA, 356 bp, Homo sapiens
gtcataattgagcacatggaaggctggcttaacacctgaaagcaatctgttacattgagatgcttctttttgctgatactaacacttgcattttcccccaaatccaataaaatactctaataatttcacagagatgcatcaatgtggtgatactgccaaaagtgaaatgttggtgagccagtaccaccttcactcagtagctcaaaagtttgtcagctggtgaacacaaaatataaaatccacattgaaaagcctcttaggtacataagtatataatatatgaaaatcagactgtgaaagttgaagaccatctgtgaataaaaatgcaaatattttaaatttttaactacctacag

SEQ ID NO: 19163 - DNA, 433 bp, Homo sapiens
gggaattttgatatctgcaaatttttgttgatatgtaatgctcagattgcattttacacttgatctaaacatatatcgaaagatatctgctaaacaggacttcaggtaagtgaggtgaaatggtagccagtgacccgttaggagctctcaccgtacatactccagtctaatttaaatctgaccacagttgcatggtcgctttaccatgttagctgtgtattgttttaaaagttttaacttcaaaatatgttatgcacagaatgtttattataaactaatataaaatgtgctctaccccattggctcagagctagggcaaacagcagatattcagactttattacttaactagcggacatccctggagtcccagcagcgagttggtctggcgagggcacctcggcagcccccacgggttggctcctacgtttgg

SEQ ID NO: 19164 - DNA, 355 bp, Homo sapiens
gatgctaaggaaagagaaagaagcagcagccagcgaaatagaagcagtttctgttgccatggagaaagaatttgagctacttgataaggcaaaacgaaaaacccagaagagaggcataacaaataccttagaagagtcatcaagcctgaaaagaaagaggctttcagattctaaacgaaagaatacatgcggtggatttttgggggagacctgcctctcagaatcatctgatggatcttcaagtgaagatgctgaaagttcatctttaatgaatgtacaaaggagaacagctgcgaaagagccaaaaaccagtgcttcagattcgcagaactcagtgaaggaagctcccgtgaag

SEQ ID NO: 19165 - DNA, 441 bp, Homo sapiens
gctattattgaatccactcaagtctataatacttagtcctggcaggggaagaaggctaatgcaccaggtgattttgaagcaaaccctagagttcagtttgtagatagaagtgcagtagtaactcatcaagacagaagagtaacaggccttgtgttgctggtcattctggcctcatctgctggctgccttagggtctctggggtgagttctgaggaccaagtctacactgtcaacatggccacggacgagctgctcagagtgacaggacaaccctcactgtgctgtatgtaaaccataaatcacagcacactctttgtggttgggagaacatgtatggtgttttgggagctggaacagtcagggatgtcattcatttcatctgggacaggctttgtgctctgggatctgtggcgggagcagtgagcccaccatgttctttgg

SEQ ID NO: 19166 - DNA, 556 bp, Homo sapiens
  misc_feature (1)...(556): n = a,t,c or g
ggctcttttcatctcttgggctcctccttccatcaatatgtgctgaggccctgccctttgaggcctccagttacgtgataaccattattttgctgatacttattcctgggaccagtaacctatgtgactcagggtttatcatcaacaccttagatatcgcccccagatatgcaagtttcctcatgggaatctcaaggggatttgggctcatcgcaggaatcatctcttccactgccactggattcctcatcagtcaggattttgagtctggttggaggaatgtctttttcctgtctgctgcagtcaacatgtttggcctggtcttttacctcacgtttggacaagcagaacttcaagactgggccaaagagaggacccttacccgctctgaggacataaagttacaaacttaaatgtggtactggcatgaactttttaaacattttttacttctctccatattcctgccatagactcagcagtcttactctgctgngtgaagncttccctggggagccttatagaccttgaacttgggaccattcagagatnttga

SEQ ID NO: 19167 - DNA, 408 bp, Homo sapiens
gtggagggtacatgcacggttttgttttggatatatgtgtaatggtgaagtaactgtaatttgaggaaacaaattacctcaagtctttgtggcataaaatgatgaagtattattatgctcacagattctgtgggtcaggaactcagcctgggcacggcacatgactctatgactcttcaccatcactttcattgatgtcaagaaatccttctcacctacttagctttgtaactgtagtaactctgatcatgagtatttctcttaggaatttcccgactttagctctgcctcttccctccctgattgcagtgccttatccctatgcactgcacttcggggttatttctccttccgtaagcttagttctgcccttgctctgactacgctctgtgccttcagctagccttc

SEQ ID NO: 19168 - DNA, 350 bp, Homo sapiens
gaaatttcttcacaattgttaaaaatggcatgaatattcttttatttaccagaatatatctatgtgtacatgtatgtccatgttcatgtctatgtccctcagatctttattcttcatgtctcttttttaattcttgatgtagcttcagcttatatccaggagggctagtgtacttgattagtgggaagtcaggagggctgtatcgcagtcattcaagaaggtccagtgttgtgaacactttttcctttcatgatgggtatttttgtcattcttaaagcctgttaaccaaagactgctcgttgatgtaaaaaaaatttgttaaaataatgctggactccaatttagtgaca

SEQ ID NO: 19169 - DNA, 356 bp, Homo sapiens
ggcccaggctggactcgaacttctgagcttaagtgatcctcccacctcaggttccctagtagctgggattacaggcaggtgtcactgtgcctggctgaaagtatatactgaatgtttcatacatagcactctcctagaaataggggcaggaagtaaatgtcatggttgccttgcctgaaaggaacttaattttgttgtggagcaagtgcaaacacttaagaaaacaaggaaggctggccgtggtggattacaggtgtgagccactgcgcccggccgagtttcactattctaagagctcccttttccatacatttcctttcagattttgtcctaaggcatagttactgaaaaataac

SEQ ID NO: 19170 - DNA, 422 bp, Homo sapiens
gaactgggaaggctgaggtgggaggatccctggggcctgggaggtggagttacagggagccatgattgtatcaccacactccagcctggacaacagagtgagactctgtctcaagaaaacccaaacaaaccacattgtcagtaatgacctgtagcatgcttctgccattcatagggaatttttgctcataatatgagtgaaagcaaaattttaaaatactgtaaaactaagtactacttttaagaatgctggtacatgggccaggtgcggtggctcacacctgtaatcccagcacttcgggaggtggaggcgggcggatcacgaggtcaggagatcgagaccacggtgaaaccccgtctctactaaaaatacaaaaaattatcccggcgcggtggtggacacctgtagtcccggctactcgg

SEQ ID NO: 19171 - DNA, 529 bp, Homo sapiens
  misc_feature (1)...(529): n = a,t,c or g
tganactttgatgcctttacgaacnaatacgactactatagggaattntggccctcgaggccaagaattcggcacgaggggacggtactgtcccaggtatattcgaaagtccataatggttcagaaatactgttttcctatttccaagacctagtgattacacttcctttcgagttaaggaaacataaactaatagatgtaatctcgatgtatagggaactgttgaaagatttatcaaaagaagcccaagaggtatttaaagccattcagtctctcaagaccacagaggtgctacgtaatcttcaggaccttttacaattcattttccaactnnnnnnngataacctttaacagctgaaagagatgaaatttacttatcttattaantatttcccnatgngatcnncccattttnagngggtatatcccntatggttttnaatggtggaanaaaaaccnntgccctnatntctaaannccatggnanttttctaacgaagcttctttaaagatnttngangtancgccc

SEQ ID NO: 19172 - DNA, 436 bp, Homo sapiens
  misc_feature (1)...(436): n = a,t,c or g
gcgtgggcactgatgggcgtgccctgcctggcacccctgtggccagctcccagccgcgcttccaggcctttgccaatggcagcctgcttatccccgactttggcaagctggaggaaggcacctacagctgcctggccaccaatgagctgggcagtgctgagagctcagtggacgtggcactggccacgcccggtgagggtggtgaggacacactggggcgcaggttccatggcaaagcggttgagggaaagggctgctatacggttgacaacgaggtgcagccatcagggccggaggacaatgtggtcatcatctacctcagccgtgctgggaaccctgaggctgcagtcgcagaaggggtccctgggcagctgcccccaggcctgatctgctggccaaagcctnctctcttcttcttcctaccttcttctagccc

SEQ ID NO: 19173 - DNA, 344 bp, Homo sapiens
gagccaacttgtatcattctaaactggaaactctaaatcgttgctttcttttcagaatctgagcactcaaccattctgggtttaatattcacacatgacaatttttctggatggacacaatctacccagcagaagcaagactaaatccaaggtccatataatgaagctgatgaaaaacagagcaatcgtataaaagaaatccctatctcaagactgctatataccctgagaagccaacttgtatcattctaaactggaaactctaaatcgttgctttcttttcagaatctgagcactcaaccattctgggtttaatattcacacatgacaatttttctggatgg

SEQ ID NO: 19174 - DNA, 525 bp, Homo sapiens
  misc_feature (1)...(525): n = a,t,c or g
ttgnnaacagcttgactgattacgaatttaatacgactcactatagggaatttggccctcgaggccaagaattcggcacgagcaaagttaatgtacatcagtgcctccactgaagcaggaagcgtagctaggactctggagtgcagtggctaaaaggtgcttccggagtgagaggtggtaaagatcctgaagctgggccaccattcccaggtgccaacacccacagaatatgacgtgaaagcaccctcttgaaattcccacattattcactacattgggttaaaacagtggttccaacctttcatagtttatattttttttagcaggtatttacttaatgcctgctatgtgttacacagtattgtaagcacttagaataagcagtgaagggccaggtgtggtagctcaggcctgtaatcccggcactttgggaggccaaggcagttggatcacctgaggtcaggagttccagaccagcctggccaacatggtgaaactccgctctctaaaatacnaaaacaaaca

SEQ ID NO: 19175 - DNA, 542 bp, Homo sapiens
  misc_feature (1)...(542): n = a,t,c or g
tttgnnacccnntntnacntgannnntttggnnaacngctatgacatgattacgaatttaatacgactcactatagggaatttggccctcgaggccaagaattcggcacgagaagccaaacgcataataagggcaacctggaaaccagtggagaattatcaactaattgttaatcagtcagaactgaagtgacaagagtagaaatgcacttcatcaagcaagcttcttcttatccctgtttctggatttgccttagttcctgagatgcaagacccatcccagcagagatggccttacccctgctcaaatgaataagtgcttggtgacaccagggggggaaaaacagtggtaggaaggtaggaataagtatgatgtgctttggagcttgtgagaaaaccagcgcagctgaaatagacttacttgctgttgtgtacagggaggtaaggttgggcagaattggacagtggaagctttaaaagtcaggccaaatacttgaccttcttttgccttgtaggcaatgacaaggcacagggtttttttat

SEQ ID NO: 19176 - DNA, 325 bp, Homo sapiens
gcctaatccatatgcacaatccctggaattaacccaagtctatgcttgtgtattccgattgtattttagatctttcactagaatattgaatcttagtatccaaaggaacctaaggtcatccatttcaacttcttatttaacacagaaattatttatagagcattcctgatggatggttattcttttgtgcttaagccgctaagctttcgaatactgggaaaaccttgacttcaagatgcctcctatgcccacatggggcaattgttgggtttcttttttttaataggaaaatacttttatgttagaaaattcctaacttacacag

SEQ ID NO: 19177 - DNA, 496 bp, Homo sapiens
  misc_feature (1)...(496): n = a,t,c or g
cgaggggatgcatatgggaaatagaagaactcaagaggaaagagcatttggggaatatcctcaaccttaaatccttatctgccgttactcagggatatactaggattatgtcatcaattatcttcaataatagcatttttggtcaaattaaatgagtggtaagcttcttcacaatgtgaccattgaaattgaatggtttgttctgtacctttttgcttcagcaatcaattttctccattaagatgggacttgtactttaattcagatatggtacctcccgaatagaaaataaattatgttaatatagttgtaataataagtgtgtgttaagatttggttactataaactactgatttgttaaaacttgaggaaattaccataaaatgtctactgaatcaatttttcctgcatttagtcttaatggcaattctgncatttcctctttcttaagaaaaatagcagtggccaagcatggngggcaacccctgtaatcta

SEQ ID NO: 19178 - DNA, 463 bp, Homo sapiens
gaggcaagagtgctggagggcggcagcggcgaccggagcggtaggagcagcaatttatccgtgtgcagccccaaactggaaagaagatgctaattaaagtgaagacgctgaccggaaaggagattgagattgacattgaacctacagacaaggtggagcgaatcaaggagcgtgtggaggagaaagagggaatccccccacaacagcagaggctcatctacagtggcaagcagatgaatgatgagaagactggctctgagaggaggaggtggtcttaggcagtgatggaccctccattttacctctttaccctgtcgctcataatgaggcatcatatatcctctcactctctgggacaccatagccactgcccctcccctggatgcccagtaatgtatgtctactggtgggaaactgtgaggatcccaggattcagtattcctggcccaaaggcccttgctgg

SEQ ID NO: 19179 - DNA, 325 bp, Homo sapiens
cttaccatgaactttaaaactgggtaggactagagacactgatctgcccaacctctgggtattcacaactgcacaggtaaccagatcctgtacgcgaggcatcaccatttttaggcttctctttcttatcttttgacttctttctttccttgtccccttctttgtctttcctagaactcatttgtttctccttgttctccttgttctctttcttcttctgtttttttttcattggacttttttccaagccatcatctttcacttctccctcttctgatggattatctgaatgcctaggagatgaaagctcaattccatgctcctc

SEQ ID NO: 19180 - DNA, 337 bp, Homo sapiens
  misc_feature (1)...(337): n = a,t,c or g
gctatgttggccatgttggtcttgaactcctgacctcaggcgatctgcccgccttggactcccaaagtgctcggattacaggcgtgagccaccgtgcctggctgaggtcttttttttttnactctgagggaggnganaagctttggnaaggttttgancaaaaaaggggcnnantcggannaaancnggntnactttgacctnngnnttgaaaannanggacggttttgnaggtagggaaaaanggttttaanggatccnggatannttttgnggaangacccangggaatttttggnanaaantgtggtnngtcaangcgaccgngaatgncgaat

SEQ ID NO: 19181 - DNA, 348 bp, Homo sapiens
gcaaaaacaactagaacacagcttaaaaatcaagccatttaatgggatctttgaaggtaaacaatatatggagctggatcacaacccctgaggatgccagagctatgggtccagaacatggtgtggtattatcaacagagttcagaagggtctgaactctacgtgttaccagagaacataatgcaattcatgcattccacttagcaattttgtaaaataccagaaacagaccccaagagtctttcaagatgaggaaaattcaactcctggttttagagataaatgaatgaagagtaccaaaatatttgttgacttctcttcatttttctcatacaatctgaagcctga

SEQ ID NO: 19182 - DNA, 356 bp, Homo sapiens
gggaaaacgctgcctctgtctgccgcctcgggacgtaaacagccttgtgaaggacacggaggcagttgctctccccaggctgtttctgtagtatgaagatttataatggtgtcagcgctctccagggtatcctcattgtaaactctgaagtgacctgatcctctctccccactgtttgattgtcagacactctcaacccagcaaccccagtgacccacggtcccagctgggaagtagttcagtagctggtggagacagggttcagacaagtgtttatggaaggaggaggatcctttgcaaatacaaagctgtaatgactccatagctacagggctcggctcacctgagccaaatgt

SEQ ID NO: 19183 - DNA, 419 bp, Homo sapiens
ggtattgtctgctaactctaacatctgtgccatttctgggttgactgccattagttgattcattttcctcattatggattgtattttcctactcttttgcacgcctggtaatttttttttcttttcctttctttttttgagagaggttctcactgtgttgcccaggctggtcttgaacttctgggctcaagcaatcatcctgcctcagcttcccaaagtgctgggattacaggtgtgagccatcaggcctgtccagtgcctggtaattttttattgaatgctaggctttgtgaaatttaccttgttgggtccaagatatttttgtattcctgtacattttcttcagctcattcgggaatatagttatatggagatagtttgatcctttcaggtcttgttttggggttcttgaggcaggg

SEQ ID NO: 19184 - DNA, 424 bp, Homo sapiens
gggctcttggttatgtttgtgctggaatgcattcacgattagaaacaggagcacaggggctttctgaagggatgggcccagagagcagcagggacaagaagaggtgtcattcaaaattagatggaactatgcaaaaagaacatcagctcttttctccagttatgtaattgcttgacaaatatgttttcagttgaattggttgttagagggcataaatttagactttctgatgccaactagctaacaatatgcttatagaaagatttaagtcctagctaagtattctccttatggaaaaaaagaatgtagttatgtaaaagacaaatgagttgagcctccaacttacagattgttgaatgttcctattgtccaggcgggttggggctgttggtcgatggtgccaagcctgaacaagcccccctgg

SEQ ID NO: 19185 - DNA, 346 bp, Homo sapiens
  misc_feature (1)...(346): n = a,t,c or g
gcaggacttcaatcagagattgcttcagtacttatataaacagatctatcaaacatatggcttcgtgccctctaggaaagaggaaatccacagattgagacaagctgtggaaatggtcaaattaaatctgactcttcatcaatctgctcagttgtcagtattactaacggtggaggagcaggacaggaaggaacctcacagtagtgacactgaactgccaaaagacaaactttcctcagcagatgaccatcgcgtgaacagtgggtttggacgtggcctttctgataagaaaagtgggagaaagtcagggtttattttgaacagaaattttcncggaaccttttgg

SEQ ID NO: 19186 - DNA, 440 bp, Homo sapiens
  misc_feature (1)...(440): n = a,t,c or g
acggaattacttggatttgtcaccaaaaacacaggtaaaaaagaaaaaatagataaactggtctccatcaaaatttaaaacttttgggagagatttgttaaaggatacaaaattacagctagataggaggaataagttctataccattgtaagatgactataattaaccgataatatatagtttcaaatagctagaagatactgacggttcccaacacaaagaaatgataaatgtttaagctgatggaaatgctaattaccctgatctgatcactatacattatatgtattgaaacaccactatgtaccccatgaatatgtaaaattactattagtccgattaaaaattaaataataataaattttaaanattaagaatttctgctcatcanaggacactatcaagagtcanangacaacccagagaattatttttgaag

SEQ ID NO: 19187 - DNA, 531 bp, Homo sapiens
  misc_feature (1)...(531): n = a,t,c or g
tgatacccttnatgaccngantacgaatttaatacgacgcactatagggaatttggccctcgaggccaagaattcggcacgagggctttttgatattgtctgttaacttgctattacaggggtgagtatctcttatccaaaatgcctggggcaagaagtgtttggattttggaatttttcaggttttggaatatttgcattatatactgactggttgagcatccctaatccaaaaatctgaaatactccaatgagaatgtcctttgtgtgtcatgttggtgctcacaacgtttcagattttggagcatttcagattttggattttcagattagggagactcagcttgtaccagtcaatttttgttagtcacgttttgacataagggacaccaaaaggatgcttagcttcagaaaacagttaaccatggtagttatagtaaggaagaaaaccctcattttatttagcttataggttatattacatgagcaanngaagagtttattttgctttgagcctantttaaaaccgac

SEQ ID NO: 19188 - DNA, 486 bp, Homo sapiens
  misc_feature (1)...(486): n = a,t,c or g
ggttggtcaggctgatcttgaattcctgacctcaggtgatccacccgccttggccttccatagtgctgggatcacaggcgtgagccaccatgcccggcccatattttctaaattttctaccgtaaacctttgtacctaataagaggcactttgctaggtactgagagtgcagtgttgagcacatattaattatcttgtttcttcaatagtgcattcgtttttgtattttattatttctgtcctacttcatttanggttttattcttttccttccttccttccttccncnctccctccctctttcngtcngtctgtctgtctttctttctttctttttactgtnatntnatggtttttttttganacgggtttcgctcttantgccnaggctggctacaanggtgcantctcgggtcacctcaaaccttcgcctcccggggttaagagattcnctgcntnagngnccanttggctgggatcnnggca

SEQ ID NO: 19189 - DNA, 342 bp, Homo sapiens
gggaaagaacagttctcaattcattttgatgaatacggcatgaaacaacaattccagtagtgcctgtcgggaactggcatatttcttcactactggaattgttgtttctgcctttggatttcctgtttattcttgctcgtgtggctgtgatcaaatggggagcctgcggccttgtgttggcaggcaatgcagtcattttccttacaattcaagggtttttccttatatttggaagaggagatgattttagctgggagcagtggtagcactttattctgattacagtgcattgaatttcttagaactcatactatctgtatacatgtgcacatgcggcatttt

SEQ ID NO: 19190 - DNA, 382 bp, Homo sapiens
gagacttcagtttctttaagggttttctgtaattttcctgatgaaaggaccttgttagaagacttcaggttaccaccttacagggcttttatacacatctgcacatcccctacccgcttttgcatactgtgtaagcaagtgagttaactgtacttgccattgatttatttccattccgcaaacattagagcagtacaaggctctgggaaagtggagaatagtccccggaaggatggatccagggatgagacccagctctgctctcgtgcatgaacagttaatcaattgttaagatgtgtaggcagcaatgaaaggatgtggagaagatagtgcacttgtaaataaaaatgcaaggataaacattagttgtatgcacaaagat

SEQ ID NO: 19191 - DNA, 406 bp, Homo sapiens
  misc_feature (1)...(406): n = a,t,c or g
cactatagggaatttggccctcgaggcctagaattcggcacgagagttggggcaaagtagaacccaggagggattaaatttgggccatcaccttaatcctagttttgacatctgcaggtaacatggtattggttcagaatagtaaatctatccattaaaaaagaaacacttataaaccacagaggtattgtaaaaggaatttttaattatgttgatgaaaaccatatcaaaagagataatggttgcagnnnnnnnntacagcataaagtcttagagtcaaagagtcacagaaatccagtgcattaaattaattgacagtaacttccctcctttgacagatgaaaaaatagaggcccanagagatggagtgctatgaagctatacagttagtaaatantacngaacc

SEQ ID NO: 19192 - DNA, 1003 bp, Homo sapiens
ggacagcttcaaggctttcgccaaggctctgggtgtcatggatgaccttaagtcgggggttccgagagctggctaccggggtattgtcaccttccagttccggggccgccgtgtccacctggcgcccccaccgacgtgggagggctatgatcctagctggaattagcacctgcctgtccttcctgggcccctccttgccacatcatgagctgaggtgggaccacagtccccaggctgcatcggcctgcctgtgtttccctcttaggtgcatttatctttttgatttttccgagtggcatttaagtgcacaaatgataacaagaggattattctcccgttctcaagggagtcagatcaggggaactattctagggtatgttgcggggtattaagcaggaaaccactgtgtggtggggggcactgggcttgttggggccagaaatgtccacgtcctgagctttctcctggagcatgtgcagagagtttggcaacgttcgctctcttgaccagaccccttctccctgacctggctcttccagccagggcacgagccctccttctatacctgctccccttcccccagtggggactgagttatgggagaaggggacatatttgtggccaaaatgatactaaccaaaggggcttccttgtcagggcctggtggagttggtgggtcatcggggctcactgcctcctgcccttctctcctgtctgacccccacttagcccttctctccttgcagcctagcagtttatagttctgagatggaaagttgaagggggcaagcaagacctctcctcagcccatgcccagctgtcaggagagaggtgcagggaggaaggccttgtgctgggacaacctctctcttgccttacctcagagagggactatgccctgacccctcctttctgaaaatcagtgccctccctgttgctctaggaggctcctgctggcttggtagaagacagaattcgatctgcctgtccctttttcccctgg

SEQ ID NO: 19193 - DNA, 345 bp, Homo sapiens
gaactggagaaatatgtacatcaaaatggtaacaacagttatatctaaatggtggcattaaaggtaattttaaaattctttgtaagattaaaaatttttaaactttttcttaagattaatttatatactataaatttcacctttcatctgttttaactgcatattaaatgaattttaatatgcctgcgagtccgacctctgggggataggagactgaatagctaatttcagtcacagctgacacctcaataaaacctggttaccaaggcttggtgggcttccccagatggcaagacttagcatgtattgccacatatcacatcagtactgaagaattaaatgcac

SEQ ID NO: 19194 - DNA, 320 bp, Homo sapiens
ggaaacatttctgattcttctggaaacaggaaagcaaacagcccatgaactaaattctcaaaagacactaaatcggaaagtgttataagcactaatgatgccagacagaaaaatgcaaaacagttggaggagtcagaaattcacctgaaagtccgggagcggtggctcacgcctgtaatcccagcactttgggaggccaaggcaggcagatcacttgaggtcaggagttcgagaccaacctggcccaatatggtgaaaccccatctctactgaaaaaacacaaaaaaattggccgggcgtggtggtgcgtgcctgtagtc

SEQ ID NO: 19195 - DNA, 400 bp, Homo sapiens
ggcgggatctcggctcactgcagcctcggcctcctggattcaagttattcttccacctcagcctcctgaggagctgggattacaggcatgcaccaccacccccggctaatttttatatttttagtagagacagcgtttcgccgtgtttgccagactggtctcgagctcctgataataggtgatccactggcctcggcctcccaaagtgccgggattacaggcatgagccacctcttcaggcccaagacaaaaatatagttagagtagatggggaatagtagtgtcatcatttgataaacagtagtgcatgctaaggtaaatgaataaacacaatttatcttatatgcctggagcctattcccaggtaactggccttttttttttttaaaaaaaaagcttt

SEQ ID NO: 19196 - DNA, 376 bp, Homo sapiens
cctcatcaagtcagaaaatggaagcaatcttgaaccgatctgagcatagataaattgctataaagacttttatttatgaaagcattattcacttgctattacataagaggcattcaaccagtacagctttgtgaactttgatacctctcaaccatctcataagaaaacacatccatgacagagtcagtgttgcaactctaaatgactgcaaagtcaatttactttcctaagtggctgtatttgcatcaacctattgaaaccatgatggcttggattatgacaagttttatgttcaaacgcattttgaaatatgaagggattaacagtaaaagaattattgaaaatactgtttgaatgagcttaagatctagaatag

SEQ ID NO: 19197 - DNA, 740 bp, Homo sapiens
  misc_feature (1)...(740): n = a,t,c or g
agctcatcctttctggggctgacattatcaaagtgggaattgggccaggctctgtgtgtactactcggaagaaaactggagtggggtatccacagctcagcgcagtgatggantgtgcanatgctgctcatggcctcaaaggccacatcatttcagatggaggttgcagctgtcctggggatgtggccaaggcttttggggcaggagctgacttcgtgatgctgggtggcatgctggctgggcacagtgagtcaagtggtgatctcatcgacagggatggcaanaagtacaagctcttctatggaatgagttctgaaatggccatgaagaatatgctgggggcgtggctgagtacagagcctcanagggaaagacantggnagttcctttaaagagatgtggaacataccatccgagacatcctaggagggatccgctctacgtgtacctatgtgggagcagctaagctcaaagagttgagcaggagaactaccttcatccgagtcacccagcaggtgaatccaatcttcagtgaggcgtgctagacctgagcagttctaccctcccaaggcaccagtactctaccatggggcatcccaagtggggtcctcacccatcccagctactgcagctctgtattactttgtcatttcctgttgtctcactcctgagggctcctgcagtaactctgtacttctctatctgcacacacaaaatgcccaaggcactcactggggagg

SEQ ID NO: 19198 - DNA, 315 bp, Homo sapiens
  misc_feature (1)...(315): n = a,t,c or g
gtcaaattcaaagagacagacagcagaatgggggttcccaggggctgtggggagggggaatggggagttcgtattttttgcagaccagagtttcagttctgcaaatgaaaaagttctgtgcctgatgctgcccccagaggcctggcctggccacaagcaggcccagtgcacacctgcagcccacacaagacccacccagtcaggcctcaaggaggcctccacagaggcccgagggtgggccaaagagtcaggtaccacccccagcaggaagacaagctcctaatggaagagactttcatttttaaattnnntatt

SEQ ID NO: 19199 - DNA, 354 bp, Homo sapiens
gaatgcttacaataaactctcctccagggtcttcctggatcacaacgccctccccgacaccctgaaagtcacctacgactccttctgcagcaatggagtgacgcacaggaaccagcccagaggtgactgtgatggcgtgcagatcaatgtcccgatcaccttccaggtgaaggtcacggccacagagtgcatccaggagcagtcgtttgtcatccgggcgctgggcttcacggacatagtgaccgtgcaggtccttccccagtgtgagtgccggtgccgggaccagagcagagaccgcagcctctgccatggcaagggcttcttggagtgcggcatctgcaggtgtgacactgg

SEQ ID NO: 19200 - DNA, 404 bp, Homo sapiens
gctatgacatgattacgaatttaatacgactcactatagggaatttggccctcgaggccaaggaattcggcacgagctgggggtaatatcttatttaaattctattagttttaaaagttgtttaaggaaacacattccttgccataacgtcttcctacctgattatcagttcatttatgccatcctggctaacatttattcttaagacactgtaatctttgtgtaaccttgattgttatctactttgcttaccaactgacaattaatccctgatatattgcccctggctcaaaactcccactgcttaatgaagcattcagccacagtcaccttgtaactatctacacaagaatccattggcaaagcagaggcttcaaaattagctctggcttaaacacgctgta

SEQ ID NO: 19201 - DNA, 345 bp, Homo sapiens
ggtgatagttgataagctttatgcatatgtcaatctgaggccatttaattatgggctaaggacttgttctattatagcacagtaatcattttactaaatagtgactatttgtcattaaaaacaatatatttagttttaatacagttgaatactcacaaatttctgggggaacttggtcaggacatttcaactgagaattgtcaggcaccttctcactgataggcatgctgctcggaggtgcagctcataagcagacaacccccttcacgtaatttagtaggaaaatgacagaaatacttgtgtaactataaagtaaagcagaattctggttattgaatcacagcc

SEQ ID NO: 19202 - DNA, 352 bp, Homo sapiens
ggtagaaaatgactgagacagggattattatagatggggttgtcagtgaagctctttctcaggaagtgatgcttgagctgagtcctgaacaacagaaagaagccaggcatggaaaggccattttgtcagtgtccctgtgctgtgtgtgggcaccattgatctaggagcagaggacaagttgaagtggctgaagcctggcacgtaagtgcagacaggtgggagatgaggttgaaagggcagacaagagccacatggtttggatcctttaaggagtttgggttttattctgagtgtggaaggctagagtacaggagtgacgtgatctgattcttgttatcagaaagtgtctctg

SEQ ID NO: 19203 - DNA, 506 bp, Homo sapiens
taatttgaaatccgtttgactgattacgaatttaatacgactcactatagggaatttggccctcgaggccaagaattcggcacgagtaggaatgtcaaagatgaattggatgcatgttaatccaatttattaagagtacaagaagaaaattttgaagatagataatgaatttatttggttttgaacatgaaaaatttgaggtgccaatggtgcttggtgatagacatctaatagactgaaaacttgcatctagagctcagaaatagatctaaggaggaaatagaacatttaggaaataaagccatgaaagtacgtgaggttgcctgggtagaaggagctagagaacaagaggcccaggaaaaagccttggaaatgttaccattgatgaattagacagaagtagagaacccatcaggagttaagagaggtaagagaaaaaaacaatcaagaggcaagggaaacaggagaaatatgttttacgaatcccaagagtagtgagagtttta

SEQ ID NO: 19204 - DNA, 320 bp, Homo sapiens
tcacgctgcccatttattttacataaaatactgtctaatcacagaccaatcatagttatctttctaacttttataaaaagtagtcaacactctggtgtttacttcctcgtttcctatttgctgaacccatcatgaaaagaagctgtcatagacggcactccagtaaaacatatccatgattaatttgctggtggcccatcattaaacattttcaatatatatgaaattcagacacatccttgaccgaatcctaaatgatattaacatgcttatgttcatcagtgttcacagaagggtttttttcttggaagtcaagagag

SEQ ID NO: 19205 - DNA, 487 bp, Homo sapiens
gcatcaaagtgggagttggaccaggttctgtgtgcaccacccgcaccaagacgggagtggggtacccccagctgagtgccatcattgagtgtgccgactctgcccacggcctgaagggccacatcatctctgatggaggctgtacgtgtccaggggatgtcgccaaagcctttggagctggagcagattttgtcatgctgggaggaatgttttcgggtcatacagagtgtgctggagaagtgattgagaggaacggacggaagctcaagctcttctacgggatgagctctgacaccgccatgaacaagcacgcaggaggagttgctgagtacagagcctctgagggtaagactgtggaagttccttacaaaggagatgtggaaaacactatcctggatattctcgggggactgaggtccacgtgcacctacgtgggggccgccaaactcaaggagctcagcaggagggcaacattcatccgggtgac

SEQ ID NO: 19206 - DNA, 340 bp, Homo sapiens
gccagcccctaaacacaagtcctgtggtgacccatggccagtaaatgacacctgaggctttcatagcttcttcaacactccttacaacaacttcatgagctatgcagatgacgactgtacggactccttcacgcccaatcaagtcgccagaatgcactgttacctggacctggtctaccagggctggcagccctccaggaaaccagcgcctgttgccctcgccccccaagttctgggccacacaacggactctgtgacactggagtggttcccacctatagatggccatttctttgaaagagaattgggatcagcatgtcatctttgctggaagggagaa

SEQ ID NO: 19207 - DNA, 312 bp, Homo sapiens
cctggctttatatctgagtttgtctcttactattaaaccttgaataagtgacttaacctgttgtaagactgtaatcgtcatccttaaatgatggtattaacagtatttgccttagaggatcattgtgaacactgtaaatgtcatggaaaaagcactcacagttataccctggcacaagtaagcactgactaagttagctatttaccattgcctgagactacatagcacataactagcagataggattccatactttcctaattctaaactgaacttctgcatcatacctggttacttctgtaggctcctgag

SEQ ID NO: 19208 - DNA, 313 bp, Homo sapiens
atactgtgtacctaattatgtatagcagtgtagtctcaattatatctgaaagtaattgtgactaacaagtatgctttgccttatttccacatttaaactacctgttaatataagggatttgtagtatcagcttgttgagcaatgactttgaatctagttttcagtgatcagaagcagcagttatttgagtgtatgaatggaatgatgatcactgtgctataatgtactgaaaccaccatattacagaaatatttactacatattttccatctgtagtttctcagaagggctatggattagtttgaactgtcaa

SEQ ID NO: 19209 - DNA, 341 bp, Homo sapiens
ataagatgcatgtcaggtaaaaaatgaaacttattttgcaatctatagatgtatcaatttcatgactctgggattttgaagttgagtcactggtatttataatctactgaaatggagtgaaatacgttactgtggatgcctggcgtcgccccatgccaaacgcctcctcatgaaacagaatgctgttccagatcgttagcgaggagaggaaatcagtttggggctgaacaaggaagacttgctggagaaggagaaatgaaagaaatctggattcttctctacaaccttcagtaacaacatggtcactagtatttattgattccttactacaggaatcaaga

SEQ ID NO: 19210 - DNA, 469 bp, Homo sapiens
  misc_feature (1)...(469): n = a,t,c or g
tttgnaancctttggacatcattacgaatttaatacgactcctatagggaatttggccctcgaggccaagaattcggcacgaggaaaaggataggatagaaaggggcatagaattcctaggaaatgaccactgattctggttcagaggcctagcagttgaaagctagagctggaaatctggaagctttattaatggtatttagtaggtatctggcagcacatctggtagcctgcatgtgcattatttacacaggtattcaggtagatgaagtgactaaatgaagaaatatctttatcacacacaatgaatcatgttctaacgtaagggcaaagaaggaaggtgaagtggtggaggaataagtttctgagttactggaaaatatgaatgtagacattattaataaagattaataataaaccttttctggtttagagcctaattcacatgcttttaaacagttgacatgaa

SEQ ID NO: 19211 - DNA, 455 bp, Homo sapiens
  misc_feature (1)...(455): n = a,t,c or g
ntatgacatgnctacgaattncatacgactcactatngggaatttggccctcgaggccaagaattcggcacgagcttgattgtgagtgcttcagactcccagctcttacctttacctacctaggtccaatctaaagtttccgactttgaggaggtatgactaggtactgtatgggaaaaggataggatagaaaggggcatagaattcctaggaaatgaccactgattctggttcagaggcctagcagttgaaagctagagctggaaatctggaagctttattaatggtatttagtaggtatctggcagcacatctggtagcctgcatgtgcattatttacacaggtattcaggtagatgaagtgactaaatgaagaaatatctttatcacacacaatgaatcatgttctaacgtaagggcaaagaaggaaggtgaagatggtggaggaatagttn

SEQ ID NO: 19212 - DNA, 467 bp, Homo sapiens
  misc_feature (1)...(467): n = a,t,c or g
ttatgacatgattacgaatttaatacgactcactatagggaatttggccctcgaggccaagaattcggcacgagacttccactaggcttggaacccttccaagaaccatatttctctccttcccaccaattttcccttgatgaggctttagcagtttgctcccaccacccccagcccatttcacaactctgatcttagtccaaagcaggggacacgcccccccaccaccactttttctctctcccacctcagcctcctgtgcagttccttgcctgcccgtgcatttcctagagtctactgcctcccccctggctgggagggtgtctgggggggacctttcaggggccctggcacccagggcctgtgctggcctaggagtgctgaccanaaggctgctctgttcccccccacccccgttgctttctggccccctctttggagccagccgcccacagggctttggtgcc

SEQ ID NO: 19213 - DNA, 467 bp, Homo sapiens
  misc_feature (1)...(467): n = a,t,c or g
cccttgactgattcgaattcaatacgactcactatagggaatttggccctcgaggccaagaattcggcacgaggcggctgtgtcggtgtatgctccaccagttggaggcttctcttttgataactgccgcaggaatgccgtcttggaagccgattttgcaaagaggggatacaagcttccaaaggcccggaaaactggcacgaccatcgctggggtggtctataaggatggcatagttcttggagcagatacaagagcaactgaagggatggttgttgctgacaagaactgttcaaaaatacacttcatatctcctaatatttattgttgtggtgctgggacagctgcagacacagacatgacaacccagctcatttcttccaacctggagctccactccctctccactggccgtcttcccagagttgtgacagccaatcggatgctgaancagatgcttttcaggt

SEQ ID NO: 19214 - DNA, 375 bp, Homo sapiens
ggtacttagtaattttagatgtattataatctagtatcatcccacttggttcaaattactcccatgaatttacattacaaaccattttgagagcccagggaatctcaggtgtaattctaatctggtattgattccatatatctttgggggtaaatatttgctgtattaaaattttttttccatttattcatttatttgagactaggccttgccctgtcacctaggctggagttcagtggtgttctcatagctcactgcagccatgaagtcctgggctcacgcaatcctcttgcctcagcctcccaagtagctagaactatatatccagctaatttttaaattggtttttaatagagacaaggacttgctatgttg

SEQ ID NO: 19215 - DNA, 502 bp, Homo sapiens
tttgaattcaatagctatgacatgattacgaatttaatacgactcactatagggaatttggccctcgaggccaagaattcggcacgaggacccagattagaagccctgaggatcctaggtccagaagaaagggccttgtcggaggccacacaggccaccaggagccaggcccctgaagatccttggcccaggagaaagggccttgccagaggccacacaggccaccaggagtgaggcccccagaggggtcagcagggcctaccctacaccaccccacccttcaacacgcccaggcgtgcacgctgcaggccagacaaccctccagctggtgtccccagcacccaacccaagtttttctcctgctcaggcaccagcagtcttcctggttgcactctaagctccagatcacaaagtcgagtccttttgttgtgcactgttcactcccccgtagaccaccctgttcctctggggagcttgctataactagacccactcctggtag

SEQ ID NO: 19216 - DNA, 510 bp, Homo sapiens
  misc_feature (1)...(510): n = a,t,c or g
aatccttacgaatntantacgactactatagggaatttggccctcgaggccaagaattcggcacgagacagtttattagagaaatattgcttagtagatttataaagttaacaacttgagcatcaaatgaagcattcttctccatccacaaaaccatgtttgagtgtgcgtctcgcttggcttgagccctttgaagaggttgtctacattcatatagagcgagctgtgggcatgcaatgtatgaaatgagggtaaccatgtcgtcctggttttcaaaggacacggtcacacaatactcggagctgtaccatgacttcaccaccacgcaggtgggaatgcacgacattgtccgcagcttccggcagaccatggaccaatacagcacggagcccggcagatatctgcagtgtatccctcacaaccaagtgtatttngaggntcaagnantaatgnacaagcctgntaactctaatgatacagnttggntgancnnggcctgcntnntncttt

SEQ ID NO: 19217 - DNA, 354 bp, Homo sapiens
gggcacactctcccaggctgttgctgttttgttagacttcttcaggaccttcatctaaaatggtcttccacacgtagctatactgcataagttcacatcatctgtttcttgcatgtgggttgtgtctcaactcaagtttaagttagatttggaagggcggaaactataggagttgcagcttcagtggagaaaagagcatttcctactagttatcgcttcccaaggaaggttagattcctcagagtaggagtgattccccaatgctagaacctttggtcaaatataattctaatccagtcaaaataaatacaggtattctgtaaaacccgatttcattttgtaaatcctactttg

SEQ ID NO: 19218 - DNA, 434 bp, Homo sapiens
gcctcggttttccttcactctgagcattgcctgcactttcactggaggccttgctcaaagtgtggtgtggtataaagagaggaagcaaaacaagactgacagttcactttggtaatagctggtaaaggacttgcttgggcaggaagatctgttttctctgagatgggtgttttcgcattgatgtcttgctttagtttccaaggaccaaatgtattggcttaagtcaagagtcatcacctccaaggttcctggaccaatctcatctctacggtttgctacgctgcaggttcctttcaactgtgtgtatatgtgccatacacacagctcagtggccattcaggccaacattcatcatctgcgtttgctcacctaatacatttgttgtctccatacaaaaaccatctgagatttattgaatgtttttgatgaacctg

SEQ ID NO: 19219 - DNA, 402 bp, Homo sapiens
gcagatgcaaagcagccatactctggaagcctggtgcaccattttctattgaagaggtagaagtggccccaccaaaggcaaaggaagttcgcataaaggttgtggccaccggactgtgtggtacagagatgaaagtgttggggagtaaacacttggacctcttgtatcccaccatcttgggccatgaaggggctggaatcgttgagagtattggagaaggagtaagcacagtgaaaccaggtgacaaagttatcacactctttctgccacagtgtggagaatgtacctcttgcctgaattctgagggcaatttttgtatacaattcaaacagtcaaaaacccaactgatgtctgatggtaccaagcaggtttacctgcaagggaaaatcaatatatcacttt

SEQ ID NO: 19220 - DNA, 347 bp, Homo sapiens
ctgataagagggacaccactcaccacaaagagccacatgggggtggattgtggataaaagagagcaaccacggccatggcatgcaagctttgtaagatgaagagagtgtaatggcctgattccctcaggaggatgccattgacttatttgaataactctggagataaaaatggaattgaaactcactacaaactataacaggaactctgcctggtcccattcattgatcgaaaggcttcagaggctaggatacattccgtcgacgcggccgcgaattccagatctatgaatcgtagatactgaaaaaccccgcaagttcacttcaactgtgcatcgtgcaccatctc

SEQ ID NO: 19221 - DNA, 357 bp, Homo sapiens
gagttgattgaattccaaatattatacgtggaaaatttcaggatgttctggatgatgtcagcttactccaaagaagactcatctcatcctctggctgatgattagtgtagaggcagttggttttaatacaattagaaataaagctttctctatgtttgttttcagacctctgtttgccttttctcacagactgtaactctccagggctctttacagagggttagaagagagtattaaagctttttctccttgactgtctctgatattactgggagactgccaaatgcccactgtaactttttatttactttctgcttggcttctcatcctatgcctctatacaagtcaaggataagc

SEQ ID NO: 19222 - DNA, 523 bp, Homo sapiens
  misc_feature (1)...(523): n = a,t,c or g
tatttgaanaccattgtgacccgattacgaattcaatacgactcactatagggaatttggccctcgaggccaagaattcggcacgaggcctccttatgcccatcaggtaatgctggggtaaaagtacccaaggaaagggcttagaaagacaaatggccttttctgccaccaaatggaaccaactggcattgagaatcaagtaacatccagtatgatcctaaggtcttctgtcctaaacagactagctctgtaattctttgaccataatactattaggatgatggaacaaattgattttaccaatgctgaggtccctcaggctcccacgaaacctggctcaagaggagctgcttctactttacaagctctgttggctcactgcttgccactccaggctggccctgtggccttgtgctgggcccgagtgacatttgaactctggtcagtgagaacactgtgggcctcacactctttttaagttgcaaaataaatagatctttaagacattgagcagattttgtgg

SEQ ID NO: 19223 - DNA, 341 bp, Homo sapiens
ggagaccagcctggccaacatgacaaaaccccgtctctactaaaaacacaaaagttagcggggcatggtggtatgtgcctgtaatcctcagcctcccaagtagctgggactacagacgcctgccactacgcccagctaatttttgtattttttagaagaggtgaggttttgccatgttggccaggctgatcttgaactcctgacctcaagtgatctgcctgcctcggcctcccaaagtgctgggactacaagtgtgactcactacacctgacctgaattatttactcaagatagtattgctagatgaaggatttttattaatttggtattattacattttt

SEQ ID NO: 19224 - DNA, 473 bp, Homo sapiens
  misc_feature (1)...(473): n = a,t,c or g
atttgggaaccncntgacccgattacgaatttaatacgactcactatagggaatttggccctcgaggccaagaattcggcacgagtgaatattaggcaagaaactgattcactgcaaaactggaaaccagggaaatacagttctggattgtaattctgatggggagctttaaaggtatatctgtgtcttctgatctcaacaaaaaccaaggcgaaatcagtccttccccaaaagggtgggatgcaaaaaggaggatttcccacctgagatgctttagtgaaatacagaattcatgggagactgaggagagtatattttattcatttcttttagtgtaaaagctcttggactacttaaaataacagatatttagtccccattttcaaacataggtatctgggactgttgtttgtgaaaaggttctggaaagttctgacttagttgtggagaatctaataacttaaacttctatt

SEQ ID NO: 19225 - DNA, 311 bp, Homo sapiens
gtcatgtgaattcacagagggcagttaatccatctgtgtagaaatataagcaatcccttttctcctgcctctgaagaaaaggaagaggagtacaaaaaggcaggaataaaagatactgatctacttttagctctaattacaaaaccgagaactatttcataccttgtcttagaacagttaattcatgattggtgatgagaccacagaggtaataaatctgaaagtgctcaagacttgttagtagctcattgaagctttgaagctacaagtcattctcatcttttgcattctcataatttaacataaggtga

SEQ ID NO: 19226 - DNA, 270 bp, Homo sapiens
ttaaaatcagcaccttcaacaagattgtgatgtaccatccagagaattaagggatctcaaattgaaccagaatatggatctacatattgaggaaattctcaaagatttctcagaaagtgagttccctagcataaagactgaatttcaacaagtactaagtaataggaaagaaatgacacagtttttggaagagtggttaaatactcgttttgatatagaaaagcttaaaaatggcatccagaaagaaaatgataggatttgtcaagtgaa

SEQ ID NO: 19227 - DNA, 590 bp, Homo sapiens
ccagaatccgtgaacatggctgaacgaggttatcaagtgcaaggctgcagttgcttgggaggctggaaagcctctctccatagaggagatagaggtggcacccccaaaggctcatgaagttcgaatcaagatcattgccactgcggtttgccacaccgatgcctataccctgagtggagctgatcctgagggttgttttccagtgatcttgggacatgaaggtgctggaattgtggaaagtgttggtgagggagttactaagctgaaggcgggtgacactgtcatcccactttacatcccacagtgtggagaatgcaaattttgtctaaatcctaaaactaacctttgccagaagataagatgagagaagactcagaaattaagaggttttgacacagagagggtacctgggcacagcaacagccttctctaccatttgcggttttctgcctaattgtgcaactgaagaaacatttatttttcacatgaggaaatgtgtagcttgtagaggtggctgatttaagtaacttgtgcagctctcaaggggtgtctgccttctgtctcctttctaccccatgaaagaagcgggg

SEQ ID NO: 19228 - DNA, 397 bp, Homo sapiens
  misc_feature (1)...(397): n = a,t,c or g
ggcctccagagtagctaggactataggtgcatgccactgagcctggctaaaaattaggtaaaaaattttaaatgcaaacatcagccaaacttcaaatataaatattattttcaactaacaagttttaaagatctccccttatttatttatttgtgagacggagtttcgctcttgttgcccaggctggggtgcaatgacgcaatctcggctcaccacaacctctgcctcccaggttcaagtgattctcctgcctcagcctcctaagtagctgagattacaggcatgcgccaccacgcccagctaattttgtatttttaagtagagacggggtttntccgtgttggcagactggtcttgaactccctactcaggtgatcccgctgcttggncttccaaa

SEQ ID NO: 19229 - DNA, 456 bp, Homo sapiens
  misc_feature (1)...(456): n = a,t,c or g
tgganacccttntgacacnattacgaatttaatacgactcactatagggaatttggccctcgaggccaagaattcggcacgagcccccgcctaggcctcccaaagtgctgggattacaggcatgagccaccgcgcccggccttgctactgaatatgaaccttggttttttttggttgattgttttggaatgtctacatagatgatcatgttatctgtgaacaaagacagtgtgagttcttccctcccagtgtgtgtaccttttatttcctttttttttgtcttatttcattaggtaggacttccagtacaatattggaaaggagcggtgagaggagacatgcttgccttgttcttgatcttaatggaaaggtgttcagtttcttaccttttttttttttcntttttttnnaaagggngncnnnntttngtnnnccnggnngnaggncanggnccca

SEQ ID NO: 19230 - DNA, 385 bp, Homo sapiens
  misc_feature (1)...(385): n = a,t,c or g
ggaaacatgaagatttctgaggtgctagaaatgttctatttctttatctgggtggtggttacagaaatgcattgtatacatatgttaaaagtcatcaaattgcagactttatgtaaagttattcctgaatttatcaaaaatgaggaagaagtgaggaataaaaaccatttcaaacatacaatgaccaagagcgtttactacttgtagacactcattataagatgcattggatggtgttctttagcaagaaggaaagttttactcaaagggaagtcaagaaatatananctanctggtganaaacaanttggtagatgtangccggtggcttgncctgtaatcccnacantttggnaggccaaggtngtcaggnacttnactcagg

SEQ ID NO: 19231 - DNA, 330 bp, Homo sapiens
ggcaatgccctgatcattgttgccatgagatagctgcaattcgaacctgtgcctcatctcttcccgtgctcctgaatctccttttccccttatcttgtggctatgcaattctgctcttggtaaatgtttgaagggaaaagtatgttgtgaggtctcattggcttgggacgagcttcacattgtctgagacctttaccacggctggagaggacagaggatacatgttgaaagccatgcctgctgagtgactgcagacagggcaggttggcaacacaagtcatccagcaggtatggccacgtctctgaaatgactgctgcgtagcagtctca

SEQ ID NO: 19232 - DNA, 399 bp, Homo sapiens
gggcaaaaaaagctatgatatggccaggcatggtggctcacgcccgtaatcccagcactttgggaggccaaggtgggtggatcacctgaagtcaggagttcgagatgagcctgggcaacatggtgaaaccccatctgtactaaaaatacaaaattagctgggcgtggcggcgtatgcctgtgatcccagctacttgggaggctgaggcaggagaatcacatgaacctgggagatggaggtggcggtgagccaagatcacaccactgcacttcaacctgggcaatagagtgagaagaaaatctatgatatatattgaaaacaccaataccattaggaaataagtggtatgaggttgttatttatttaagttagggatgttatagacagtggtaaataata

SEQ ID NO: 19233 - DNA, 351 bp, Homo sapiens
ggtggtagctctagcaatctaatacaggtcttaactcacctgtttccagattgcattgcaaagcagaacccacttctgctctgccttgtattcagaggcaggccaaacacaaagtgattcaggaaggtcagaatgaaacattaagtaaagggatgctgaacttgacttgtgctaactcacaagagtagattgatacattatcaggaattttatgaggtgagtgttagacacagccattgaaaaaactataatcctgggtaaaaactcgtaattaaattaaaatacccagtacttgctaattattcaactacattttatccttcttcccatggaataattatgtagaatggg

SEQ ID NO: 19234 - DNA, 466 bp, Homo sapiens
  misc_feature (1)...(466): n = a,t,c or g
gagattgaaacctttgacangattacgaatttaatacgactcactatagggaatttggccctcgaggccaagaattcggcacgagctgtccactcctgatgctgttatgggcaaccctaaggtgaaggctcatggcaagaaagtgctcggtgcctttagtgatggcctggctcacctggacaacctcaagggcacctttgccacactgagtgagctgcactgtgacaagctgcacgtggatcctgagaacttcaggctcctgggcaacgtgctggtctgtgtgctggcccatcactttggcaaagaattcaccccaccagtgcaggctgcctatcagaaagtggtggctggtgtggctaatgccctggcccacaagtatcactaagctcgctttcttgctgtccaatttctattaaaggttcctttgttccctaagtccaactactaaactgggggatattatgaa

SEQ ID NO: 19235 - DNA, 461 bp, Homo sapiens
  misc_feature (1)...(461): n = a,t,c or g
ttggancccttgtgacctgattacnaatttaatacgactcactatagggaatttggccctcgaggccaagaattcggcacgaggttactcaagaattccatatgaaagtcaagcatctgattgactcactcattgattttctgaacttccccagattccagtttccggggaaacctgggatatacactagggaggaactttgcactatgttcataagggaggtagggacggtactgtcccaggtatattcgaaagtccataatggttcagaaatactgttttcctatttccaagacctagtgattacacttcctttcgagttaaggaaacataaactaatagatgtaatctcgatgtatagggaactgttgaaagatttatcaaaagaagcccaagaggtatttaaagccattcagtctctcaagaccacagaggtgctaccgtaatcttcaggacctttt

SEQ ID NO: 19236 - DNA, 357 bp, Homo sapiens
gcggcgaggagagacatgaggctgagctggttccgggtcctgacagtactgtccatctgcctgagcgccgtggccacggccacgggggccgagggcaaaaggaagctgcagatcggggtcaagaagcgggtggaccactgtcccatcaaatcgcgcaaaggggatgtcctgcacatgcactacacggggaagctggaagatgggacagagtttgacagcagcctgccccagaaccagccctttgtcttctcccttggcacaggccaggtcatcaagggctgggaccaggggctgctggggatgtgtgagggggaaaagcgcaagctggtgatcccatccgagctagggtatggagag

SEQ ID NO: 19237 - DNA, 227 bp, Homo sapiens
ggatggcaaagatgataaagaattatgccatgtatgctgtatgaagaaaatggacccatcaacttgtgccagtacagggtctgtgcagtggagtaggcacttcagtggtcgaaccatcaccctgcaacctggatccccttgcaacgattttagaggttactgtgatgttttcatgcggtgcagattagtagatgctgatggtcctctagctaggcttaaaaaagcaa

SEQ ID NO: 19238 - DNA, 574 bp, Homo sapiens
  misc_feature (1)...(574): n = a,t,c or g
atctctctttatgacctgattacgaatttaatacgactcactatagggaatttggccctcgaggccaagaattcggcacgagcatggcgccgctgctggagtacgagcgacagctggtgctggaactgctcgacactgacgggctagtagtgtgcgcccgcgggctcggcgcggaccggctcctctaccactttctccagctgcactgccacccagcctgcctggtgctggtgctcaacacgcagccggccgaggaggagtattttatcaatcagctgaagatagaaggagttgaacacctccctcgccgtgtaacaaatgaaatcacaagcaacagtcgctatgaagtttacacacaaggtggtgttatatttgcgacaagtaggatacttgtggttgacttcttgactgatagaataccttcagatttaattactggcatcttggggatagagcccacagaataatcgagtcttgcaagaagcattcatcttgcgcctctttngccagaaaaccaacgtggtttattaaagctttcacagacaatgctggtgnctttganactgggttttgg

SEQ ID NO: 19239 - DNA, 370 bp, Homo sapiens
tgatccggagggacgctccgaccgcggccgggaggctcctgggggccggggctccgaggttataatataacttatcctctcatgcttttttcctgccccttctccccaaatcatcaacaatagaagaagaagaaaacatgtcaggacacaaatgttatccctgggacttacaggatcgatatgctcaagataagtcagttgtaaataagatgcaacagaaatattgggagaccgaagcaggcctttattaaagccacagggaagaaggaagatgaacatgttgttgcctctgacgcggacctggatgccaagctagagctgtttcattcaattcagagaacctgtctggacttatcgaaagcaattgtac

SEQ ID NO: 19240 - DNA, 462 bp, Homo sapiens
acagcttgacatgattacgaatttaatacgactcactatagggaatttggccctcgaggccaagaattcggcacgaggatcttaaatgcggacctggagaagagcatcaggatgtgggaaaggaaagtggagatagcagagatgtccttaaaaggccatcgtaaggcttggaatcgaatgaaaataaccaatgagcagttgcaggcagattaccttgctgggaagtagccagaggcaggccacggcttacagaccactacatgacctataaaagtaatcagctcctttctagtcacgggctcctctcactgttccctgtctgcctggtgttcccaaccccccacccaggctgagtatcatctcctgggccacatctgcccatggggagtgttttcacagcctggcccctggaactgttaccactgaaagaaccacagggcactctaatggtttgacacttgg

SEQ ID NO: 19241 - DNA, 521 bp, Homo sapiens
  misc_feature (1)...(521): n = a,t,c or g
ggaaaaattcattcatcctatgccattggagttttggatacaagtgtgctaaccaggggctcccagattaattgacatgttctttatcctacttattcaaaatgtggatattttacatgttactgtggctgatggcatctctgtacatacttaggtgcttgcctaatggtgatttctattttcctctctcctacagtgtttattgattggaattctgctgtaagaagagctgttccttcgccgatgattgatggatgggtttctgtatggacttacagctccacggggcacatggcatctccctctgctcatcatagtgtttggatcaaacaaatgaaaaacagaaacatgacggcctctaccagcaaaagctcgagggttggaaagagtcccctggcagggaattggcaccccgtcgtgcctatcctctctctctgactgctgctggaaatgcccccatctcctttgagcctcttccggcgantcctgggacctgtaacctctgtcctgaaatcataaaa

SEQ ID NO: 19242 - DNA, 415 bp, Homo sapiens
  misc_feature (1)...(415): n = a,t,c or g
accctttgtgaaacngctatgacatgattacgaatttaatacgactcactatagggaatttggccctcgaggccaagaattcggcacgagcggcacgaggccaaagaaatagaattgcagttcagtagttgagagggaggttttgctgggctctgatattttcagaggcaaatgcttttctttgtgcttgtatcaggtcatcagtgaagggagattaatatgatcacatttttctcttagtgtcagatagcagatatttagtagacaaggattagactccaagttgtatcacagaccaggtatttactatttttctttttagtattcttttaggcatctgataaatttttttatatgtaagtttgtctttcttgggctgtttccctttcntacccctgtctagnccctgatattt

SEQ ID NO: 19243 - DNA, 888 bp, Homo sapiens
gggagtgcaatggcgctatctcggctcactacaacctcagcctcctgggttcaagtgattctcctgcctcagcctcccgagtagctgggattacaggcatgcaccaccacacccggctaattttgtatttttagtagagacagggtttctccatgttggtcatgctggtctcgaactcctgacctcaggtgatccgcccaccttggcctcccaaagtgctgggattacagggataagccactgcgaccggccgacaaattcttaaaactggacacaagaacacaaaacgcttgggctgctgagagattagaccaacaaccctccacagctacacaccttttccacgttatatggcacgttataagtgggtgttcctagtgatggttctgattttttttaaaaaaagtctaaatatgtttaatgttgtctcagaagacaaaatatattttagacagatattcctcagtgatgagtaagcctcagctatctggaaaattcatgcaggcgccagagatcgttactgagtaattcaagctaactgcgtcatgctggttgtaccctgcatgccaatatcagctaaaagcagcaccacgaaagggaaatacgaatctcactaagcactcgcccattcttgttaacgacactggaactgatcatccttaataatacacagataaatctatcaggagcatttccttgcttcctgtgaaaggaagcactcattccatgtgtcctgtgaaattcatccaacttcaggaagctggaggaatacatatggccaagctatctgggcagagagtagacagggaatggaggttgggcacagtggctcacacctgtaatcgcagccatttagaaggcaaaggcgggcagatcacttgagctcag

SEQ ID NO: 19244 - DNA, 286 bp, Homo sapiens
caatttttaaacatgtattttgtagtatataagtactacaaaatagtaatacaattttgtatataaatactacaaaatagtaatacaaaattcactataaatagtgaattcaagccgattaacttggtaatcaggaaacctagtttctagtcttggtcttcttactaaccagttttataactttgagcaaataacttagccttatgtcactttccttatttattaaataaaagaattagtctaggtaagtttttctcagtcactggttaagtggattttcaaggca

SEQ ID NO: 19245 - DNA, 352 bp, Homo sapiens
gcattgtactaggaactgagaccacttccccagaaaaatccacatgtacagacttttttcctactaattatcagttttgaatgagggctgaggatctccaaaggggagagcattccaggcagaagaaacaagtttaaatgccttaaacatggaataatcaagaaacaaatagaagggcagtatggccttctatactgggatgagtgcacaggagagtgatagagaatgaaatcagagaggtgtctaaggaccacaagttaagaatactcccttagtaaagtgggaggtattgtcacgatattacctcacctgtgccttaagctggggctatgctaaatagccaatgataatc

SEQ ID NO: 19246 - DNA, 364 bp, Homo sapiens
gagagcttgagaaggatttgtgtgaacttacaggttatgaccaggtctgtttccagccaaacagcggagcccagggagaatatgctggactggccactatccgagcctacttaaaccagaaaggagaggggcacagaacggtttgcctcattccgaaatcagcacatgggaccaacccagcaagtgcccacatggcaggcatgaagattcagcctgtggaggtggataaatatgggaatatcgatgcagttcacctcaaggccatggtggataagcacaaggagaacctagcagctatcatgattacatacccatccaccaatggggtgtttgaagagaacatcagtgacgtgtgtgacctcat

SEQ ID NO: 19247 - DNA, 326 bp, Homo sapiens
gcggcacgagttttctgttcctggaaataactggatccgcacaagcctagagggcctgatggagccatgtccctcatgggctcaaattcatccagagctgttgcctttgccagggaagagcacatattttgatgtgagctgcttgccttttcctggtttatgtgttaaaaggagtactttgcaaactcttgtactagatgatccccaaagaggatttcaattggtttaaattctacatggctaaagtgtcacttgcagggcttcaccccaggtataggcttgcagggcctgtctcccagtgtttcctcctttcaaggcaaaaccat

SEQ ID NO: 19248 - DNA, 518 bp, Homo sapiens
  misc_feature (1)...(518): n = a,t,c or g
tttgannctntgantccatnagctatgacatgattacgaatttaatacgactcactatagggaatttggccctcgaggccaagaattcggcacgagatctcatccttgtcaaacttgaaattatctaaaaaccacaagtctcttcataggaactgtttgcaagtcagcagttccccattttgtactgcatgaaatgcacccttgagcctaaatatctggcttgcatttgccctggtacatttaactggcgtggtgaagtaggaggagcaaaggcgtcggaatctaacagtgctgtatgattcttgcttctttaagcttcggtttccttgggtttaaaacagggttcctaggaagctgagatggaaaaaggtggctgccgcctggctccattccaagttgctgctctcgttctgtagctagcccaggtttccgggttccgtattaaccctgtgaccatctcaacccttgacactgtcgataggaagctggtcgttctctcagctgggcctttacttaag

SEQ ID NO: 19249 - DNA, 369 bp, Homo sapiens
gaactggagaccatccggaagatccacgagcaggggctgattgcaatactggacgtggagcctcaggcactgaaggtcctgagaactgcagagtttgctccttttgttgttttcattgctgcaccaactattactccaggtttaaatgaggatgaatctcttcagcgtctgcagaaggagtctgacatcttacagagaacatatgcacactacttcgatctcacaattatcaacaatgaaattgatgagacaatcagacatctggaggaagctgttgagctcgtgtgcacagccccacagtgggtccctgtctcctgggtctattaggcctctccccagatatctgagcataactgggagcacctcatt

SEQ ID NO: 19250 - DNA, 756 bp, Homo sapiens; identical to SEQ ID NO: 16014

SEQ ID NO: 19251 - DNA, 353 bp, Homo sapiens
ggcctggaggcctgaaaacactcacttaacttagtgttttcagggttcatctaggtcatagtgtatcagaacttcacggatttatagctgaataatattccattgtatgcgtataccacattttatccatccttattggcatgttttgtatttaaaaagctttcttcccctcaacataaaaatatattgccggatgagtgcagtggttcacacttgtaatcctagcactttgggaggctgaggtggtcgcatcacgaggtcaggagttcataaccagcctggccaacatggtgaaaccccatctctgcaaaaatacaaaaattagccacgtgtggtggcgtgcgcctgtaatc

SEQ ID NO: 19252 - DNA, 379 bp, Homo sapiens
gaatgtttacatatagcaaccctcaccgattgatgctatacctgagaatcagaaagtcagcaaagaagacttctactagaaaaacatgttgttacaaactttgtgttcttctagccttccttatttactggatatttattcaggaacagtatagcattatactgtccactttttcttagcattaagcatgttatagcattaagaccacttgtttttgtgtcagacttcctggattcacattccactgccaccactgactagctgcttgacattattcaagttaaccactttgatactcaatttctgcatctgtaaaatggggataatactatctgccttataggtatcatcttagataatgtgtgtacgggacttacca

SEQ ID NO: 19253 - DNA, 353 bp, Homo sapiens
cttccctcattgtggcatgccctgccaatcctttcattctactggaaatttactctttgttttaaaaccttagcagccattgcttctctcagggtttctctggtccccaagatagttaattgatgctttcttatgccaccttggtacccttgcctgttttgcaatttgtctatacacctcctatgctcatgaacttcttgagggcaggaactatgcctatcctcatgcctggcccttgacccaagctcaatgcatgtttttggaatgcatgaggaatgaaccaactgacaggttcatctatcaatagaaagtgggcccatggcataaattcccagaataatgctgcagcaagg

SEQ ID NO: 19254 - DNA, 419 bp, Homo sapiens
gcggcacgagtggacatccatggatgagaaatgcggatatgaaacttctctctgtcctgtgtctgtccctacccctgcccatatgcgcaagcgtttccatccttacaaaggcaccttctcttgccctgcgtgccttccagctgccacccgtaccctcctacagtcttcacccacaccctggactgtttctccctactgcagcagggacctgtgtctaccatggtgtgaaactgtagagaaagagcacgggaaccccaaggctacagccgtgcttatttccatctctcttcagctggggagagaacatcacttcttcctgaaaattctcccaccccttgctgccctggctcctggtgcaccacctcctgccgcatcttcccattgcctatgcatccttctcatcagccttagacacttca

SEQ ID NO: 19255 - DNA, 532 bp, Homo sapiens
  misc_feature (1)...(532): n = a,t,c or g
ttggnnntttgannccaacagctatgacatgattacgaatttaatacgactcactatagggaatttggccctcgaggccaagaattcggcacgaggatcttcgttttcaatcctttttcctcaagcacataaagaagccagactatgtgacgacaggcattgtaccagactggggagacagcatagaagttaagaatgaagatcagattcaagggcttcatcaggcttgtcagctggcccgccacgtcctcctcttggctgggaagagtttaaaggtggcgtctcaccaagcctcagaacgacttacataaggggcaacaaacactcctctttttttccttctccttaactcttcttttaggttgacatctaatttgttttaaaaatttatttgttttaaattaatttgtttttaaaaattaagtaaagccttgggatggggaaaaggaattttattattttatgtgtttattcaagaagtaatttaaaatccaaattcaattttaactagcagaattctagagatctttgg

SEQ ID NO: 19256 - DNA, 412 bp, Homo sapiens
gctggggaagcttaaaaaggaaaagtataagggaggggaggttttcttccctcatgagggagtcaaccaagggacatcatggtattggctgatgaacactcagagacaaggatcacagtgacctatactaacggagcacccatggtgcgcgcagggctgattcggatgatgggtgtcccccgcaggacactccttgccaggtctgtctggggtatggcagcctgcacagagcctggcactgtgccactcacagttgcatgggctgggtgatctcacctctctgtgtctctgtttccagatgtgccagtccccacctgaggggcagttgtaaggattacatgagtcacagcatgacggatgagaaaaccaaggtccagagaggttgctttgccttctagggcgccccgctagt

SEQ ID NO: 19257 - DNA, 357 bp, Homo sapiens
gaaagatctttcaggactctacctcatatcagtttgctagcagaaatctagaagactgtcagcttccaaacattaatgcaatggttaacatcttctgtctttataatctactccttgtaaagactgtagaagaaagcgcaacaatccatctctcaagtagtgtatcacagtagtagcctccaggtttccttaagggacaacatccttaagtcaaaagagagaagaggcaccactaaaagatcgcagtttgcctggtgcagtggctcacacctgtaatcccaacattttgggaacccaaggtgggtagatcacgagatcaagagatcaagaccaatatatttacaaagactgtagaag

SEQ ID NO: 19258 - DNA, 319 bp, Homo sapiens
agaatatctcattctttatttgaatagccctaatgggtaaaagactaaggcacccaataagaaatttgaagaaattttcttttctagaaaatgtgtatagtacagctggccagttacatgctatttgtaaataacaagtcatactagacaaatggtaaaaaacaattatttctttaactgcaaaggtaaattctataagaaaaattgggtaaatttgaacttgccaatttagatttgattgtttataaaggtaatttattcagatacatcatagtccattatagcaaaagcttttaggtgctattatgcccatagtgcg

SEQ ID NO: 19259 - DNA, 417 bp, Homo sapiens
ctgattacgaatttaatacgactcactatagggaatttggccctcgaggccaagaattcggcacgagcggcacgagattttgtaaagtaagtataaatatatatgtatgtgtgtagaaaatgccttgaaaaatattcatactcaaaatgtagctgtgtcctagcggggcatggtggtgtgtgcctgtggtcccagctacttgggaggctgtggcatgagaattgcttgaacctaggaggagaaggttgcagactgtctcaaaaaaagatgtagctgtgtccaagtcatgttactaatgattgtgcatatatatggttcttgtgacaagtacacattagcttagtgacgaagctgtcacatgatttttgaggtcaaaagtttccaggccaggtgcggtggttcatgcctataatccca

SEQ ID NO: 19260 - DNA, 369 bp, Homo sapiens
ggaactatttcggctcagttgtactaatgccaggcagctatttcctttttctggtttctcctactggttggagtggccttaccaaaaataatgtgaccaagtctaaaatcttctagaatgaagtagaaatcatactttagaaaatatattcagcttaagtgtagaattgaagtgcccagaaaaaaatctatgccaaactgttttgcagaataagaaaatagctcattctgcttctctctcagttgtattatcaggcttgtgtttccaaattttgagcttacataacactggtgctgatctggacctcattctttagccccatcatcactgcagggagaagatatagtaatgatggccagcctggtaaac

SEQ ID NO: 19261 - DNA, 338 bp, Homo sapiens
ggctttctagaagaagcacagtctaacctttggcaggactggacttttgggagggcacggtcttgccagagccttgtcactcctggtccaggactgaggtacttcggagccacccttgggattctactcattatccctcctgcctcctagtgaggcatcagagatcctgatcttgttccaccaccactaccctccctcctttgctgacatccagctcatcaagtctggccctggggtcttccctgcaggagtcccagctctcactgggtggccagagctgtgcaggagagccagatgaggaactggttggtgccttccctatttttgtccggaatgcc

SEQ ID NO: 19262 - DNA, 303 bp, Homo sapiens
cacagaccccgccaggggcaggggagagccgggggttagcaccattggatgaagggttttagagtcagtctccgtgtgggggcaagtgggatgtacaaccacagaggctagcagcagctggtgggaaggggtgggggtggcgccagggccctgggcgagccctttgtgtccagtctacttgggtctagtgcttaccccagcccaatatgctccccactctccgaggcaccatgagggagtcagggcttgcacaggccagggggctacgttggacacactccctgatcacaaaaaaaaaaaaaa

SEQ ID NO: 19263 - DNA, 478 bp, Homo sapiens
gcgggaaagttacttggcttccttgtgcttcagttttccaacatctccgaaatgggaagaatcatagcccccactaggttagtagtgagtactatgagaaactcacatctgaagtgctattaagtgctttctgtgcatttctcagcatatagtaaacattcagcaaatgttacctgttgcttacccacccccatctctataaatatatagttaatatttaatattcatttgccttttcatcataacttttttgtggctaaataaaatattagcactgatagtgtggagtgtgtggggggaatcagccaaacatgaacagatgcaggggacattaaagaacaagaccaactattttatggcctgtcagaaatcgggaggtcaaggagaacaaagtggttaaacatcctagagtagatacgttgagaaagagttgcagtatgaagctctaccttggttacattaaaggacctgggcgggc

SEQ ID NO: 19264 - DNA, 415 bp, Homo sapiens
gacatgattacgaatttaatatcgactcactatagggaatttggccctcgaggccaagaattcggcacgaggataatataaaataatatttgtactagaaacatgcatgtataaagttatttgccgatttgcaaacaacacaatgcacctttcctacactgttattcacaaggaccctggaaaaggtagaggcatcattagcccaaatttattttattttatttgttttgagatggagttttgctcttgatgcccaggctggagtgcaatggcacgcgcgatcttggctcaccgcaacctccacctcccgggttcaagcaattctcctgcctcagcctcctgagtagctgagattacaggcatgtgccaccacacctggctaattttgtatttttagtagagacggggcttcttc

SEQ ID NO: 19265 - DNA, 415 bp, Homo sapiens
gagatgggtagttaaaagaacctcagaccaataatgtttttcctagacattaggtaaacattttctaatgatgattcattttaaaaatccatactttgtaaaaaatgaataaaatttgacctgagttaatattaatgccttagaaataaaaagaaacctcttttggctcagatctgtgaagatgagcagcgtatgttgcttagaatatagactccatgaaggcagcgttttttgtctgtatggccacagacattacattcatgatttaataaaaaatgattttttaaaccaacaacttgatttatgaagaatggtgtacacatctgctgaaatatcaaagtaaacatttcctttacattggtgaagaaactaaaaggctaatatgtctaggacatataaaagcctagaccttctg

SEQ ID NO: 19266 - DNA, 325 bp, Homo sapiens
gcggccacggcatcctgtgctgtgggggctacgaggaaagatctaattatcatggacctgcaacagtttcttatgtgcctgtccctgtgcacagcctttgccttgagcaaacccacagaaaagaaggaccgtgtacatcatgagcctcagctcagtgacaaggttcacaatgatgctcagagttttgattatgaccatgatgccttcttgggtgctgaagaagcaaagacctttgatcagctgacaccagaagagagcaaggaaaggcttggaaagattgtaagtaaaatagatggcgacaaggacgggtttgtcactgtggatg

SEQ ID NO: 19267 - DNA, 366 bp, Homo sapiens
ggggtcaggggatttccctttcctagccaagggcagctgtgacagtatgtaccaggaaaattgggacactgccacccaactactgagcttttccaacggtcttagcaaatgcacaccaggagattatatcccatgcctggctcagcaggtcccatgcccatggagccttgctcactgctagcacagcagtccgagatcgaactgtgaggcagcagcctggctggggaaggggcgtctgccgttgctgagtcttgagtaggtaaacaaagcagccaggaagctcgaactgggtggagcccaccacagctcaaggaggcctgtctgcctctgtagactccaactctgggggcagggcagagccgaaca

SEQ ID NO: 19268 - DNA, 1034 bp, Homo sapiens
gggccttcaagcagatggagcagatctctcagttcctgcaagcagctgagcgctatggcattaacaccactgacatcttccaaactgtggacctctgggaaggaaagaacatggcctgtgtgcagcggacgctgatgaatctgggtgggctggcagtagcccgagatgatgggctcttctctggggatcccaactggttccctaagaaatccaaggagaatcctcggaacttctcggataaccagctgcaagagggcaagaacgtgatcgggttacagatgggcaccaaccgcggggcgtctcaggcaggcatgactggctacgggatgccacgccagatcctctgatcccaccccaggccttgcccctgccctcccacgaatggttaatatatatgtagatatatattttagcagtgacattcccagagagccccagagctctcaagctcctttctgtcagggtggggggttcagcctgtcctgtcacctctgaggtgcctgctggcatcctctcccccatgcttactaatacattcccttccccatagccatcaaaactgggccaactggcctcttcctttcccctgggaccaaaatttaggggcctcagtccctcaccgccatgccctggcctattctgctctccttcttccccctggcctgttctgtctctgagctctgtgtcctccgttcattccatggctgggagtcactgatgctgcctctgccttctgatgctggactgggcttgcttctacaggtatgcttctcccacagctgtggctgcaggaacttaatttatagggaggagcctgtggcagctgctgccccagccacagctgcactgactgtgctcaccacacatctggggcagccttccctggcaggggccctcgtggcttctcattttccattcccttcactgtggctaaggggtggggtgaggggatggagagggagggctgcctaccatggtctggggcttgaggaagatgagtttgttgatttaaataaagaatttgtcatttttaa

SEQ ID NO: 19269 - DNA, 352 bp, Homo sapiens
gcataatcttaaactcttgaatatgtgccttctagaatacatattacaagaaaactacagggtccacacggcaatcagaagaaaggagctgagatgaggttttggaaaaccctgacacctttaaaaagcagtttttgaaagacaaaatttagatttaatttacgtcttgagaaatactatatatacaatatatattttgtgggcttaattgaaacaacattattttaaaatcaaaggggatatatgtttgtggaatggattttcctgaagctgcttaacagttgctttggattctctaagatgaatccaaatgtgaaagatgcatgttactgccaaaaccaaattgagctca

SEQ ID NO: 19270 - DNA, 439 bp, Homo sapiens
ggattttcctagcatctacactcttttagatgcattcaagctcactttgttttctctttaggttcctgctacccgtgaagtccttggctccctcccaaatgtattcagtgcactctgtttgaatgcccgaggtcttcagtcttttgttcagtgtcagccttttgaacgcctcttcaaagttcttctgtctccagattacctcccagccatgcggaggaggagaagttctgatccccttggtaagttgttaagatttattttatagtagaaaattgatttagtttgcaaggaaactcttccttgatcatctctctcatcgttttactggttaggtgtgctaagtttaatgggaattatcatcatacattctattatacttcagaaggaatacttcagcttctctgctcataatatttccatgcttctcaacaggtcaccc

SEQ ID NO: 19271 - DNA, 361 bp, Homo sapiens
gcggcacgaggttttgtgcgaggggaggtctctgaggatggcggacagttccaggggtgataaacgcggacacctggcagagaaccacgccctgcagctcgcgaggctctttcacgcacagcactgagcggccctccttgcaggcggacgccgctgccctgacaggccgggcgaacctctgctttcaggaaggtgggccaggggacttctcccgcttcctcccactggggacaactgagaccctggacatcacaggtgagactctcacgggtgacagagggcggctgtgggacagtgcagggggagcccggggctttcttttctgcttgccctagacctagccctgcagaagctggaactg

SEQ ID NO: 19272 - DNA, 203 bp, Homo sapiens
ggcgagaacaacgaataaatattcctccccaaaggggacccagaccaatccgtgaggctggtgagcaaggtgacattgaaccccgaagaatggtgagacaccctgacagtcaccaactcttcattggcaacctgcctcatgaagtggacaaatcagagcttaaagatttctttcaaagttatggaaacgtggtggaggtgccc

SEQ ID NO: 19273 - DNA, 354 bp, Homo sapiens
gtctacttttatcacctctccatctctgaaggacaggattcactgtgtggcttatgtcttagacatcaactctattgacaatctctactctaaaatgttggcaaaagtgaagcaagttcacaaagaagtattaaactgtggtatagcatatgtggccttgcttactaaagtggatgattgcagtgaggttcttcaagacaactttttaaacatgagtagatctatgacttctcaaagccgggtcatgaatgtccataaaatgctaggcattcctatttccaatattttgatggttggaaattatgcttcagatttggaactggaccccatgaaggatattctcatcctctctgc

SEQ ID NO: 19274 - DNA, 427 bp, Homo sapiens
gggatcaggatatgagagaggttaatgacttctaagacagtcccatgtgacttcagcatatcatgtggtagatgacaatgaggctgcacatttctttttatgatcagaaacattattttcccaatattttgcactgctgatcagaacacatgtaaaatattgacttcattttaacaagggtgaccagactaataaagggattcataaaccaggtcagatgaggaatgatcaaaataaattttaccttaaaaagagatgatgtgacaagtagagttttagtggaacatcgctgtggaagcgaaaatgttgctgccactacacagaagtaagtatgctgtaactggaggatgtggtatataccttcggttttgcattattatagctatagtcctggcattatgcctgccacataacaaatgctcaacaa

SEQ ID NO: 19275 - DNA, 529 bp, Homo sapiens
ggagcctgcgaccgagtgggagtggagtggagcggctgtggttgccgactctttcctcttccccacggtccagtcagcgggttaattaggccatcggccctcgagccgagacttgtctcttatttagttctggggagcgcctcgtcgacatgagtgatgtggaggaaaacaacttcgagggcagagagtctcgctctcagtcaaaatctccaacgggaactcctgctcgtgtaaaatcggagagcaggtcaggatctcgtagtccatcaagggtttccaaacactctgaatcccattctcgatcaagatcaaaatccaggtcgaggtcaaggagacattctcatagacgttacactcgatccagatcccactctcactctcataggagacgatctcgaagtagatcatatacaccagaataccggcggcgaaggagccgaagccattctccaatgtctaaccggagaagacatactggcagcagggcaaatccagatcccaacacttgccttggagtgtttggcctcag

SEQ ID NO: 19276 - DNA, 328 bp, Homo sapiens
gatttattgcatctgcaagtcatcgttttaagtgactgaatgatttaacccaacatcaccaatagacaacctgacactatgagcctcctgacgagatgccatataaaggctatagtgccatttgtgaaatattgttgctagaatgtctaacctgaatctaataaaacctggttagatttaacttccagtttatagaaaaattcagagaaaggaccagttaaactaaaccatgaggaaataatgagacaaatgcataaggtgaggtattccacattgaagatacataccagccctgtggcctagacttgtaaaatgtcagtgccactgt

SEQ ID NO: 19277 - DNA, 413 bp, Homo sapiens
ggtgttcccacaggcttaacaccacatgaaaggtgccaaggcttacagcagcttgcactctccaaagcagcagcctaagaggtacctggacccctttgagccatggctggacctggagtggccagaatacagggagtagagtcctgaggctgtgtagggcaccaggccctggtcttggtccatgaaaccattcagtcctcctaggcctctcagagtgtgatgggagaggctgcctcaaagatctctgaaatgcctccatggccttttccccattgtcttggctacaagcactggcttttattttcagccatgcaactatctctagcaattggttgctccacaccctgcttcaattctccttcctaaaaagcttttactttctttgccacatggttagcctgaaaattttccaa

SEQ ID NO: 19278 - DNA, 327 bp, Homo sapiens
  misc_feature (1)...(327): n = a,t,c or g
aaaaaatttttttttgtagagttgtgggtctcactttgttgcccaggctggcctcgaactcctggcctctagtgattctcctgccttgcctcacaaagtgctggtattatagatgtgagctactgcacccagtcttgattttgttaatcttaaaaaaaaaaaaanttaacttttgcctttgttnattttctctatngttttngtttgccctgatgttngcttttatttttntttctttccttctatgtagggttnaattnggnctttttctanngtcttgagccaaaatcttggganaattgcttnacccggtaggtggaggtttgc

SEQ ID NO: 19279 - DNA, 475 bp, Homo sapiens
  misc_feature (1)...(475): n = a,t,c or g
gaactggaagaagaaggggggggtatctaactcgaagagggggttcttggtggtagtattccccaccctaactctgcttcctctgtcctggcctggtcatcacaagatacagatcctcagctgtgccctaacttgtgggaccttagaaaaggttttatcggctgtgaaattagaaagcagtacaggagcaatagagcccacgactagctgcacatctgaatcacgaaacagtaacaggttcctccgtgcctgcagcaacttgcgttcaggagggcgggaggtcgaagcctctgtgtttttgatatgcatttgggaaccgctgggtgaagctgcatatcctgtccctgttctagctttgcaatgtatgctcgagcattgctctgatcttaagggacaatgngaacccattctttgctttganggcatggggggctnaatctgnaatttcttttaaanccccagggntttgctgttc

SEQ ID NO: 19280 - DNA, 286 bp, Homo sapiens
aagacaaagggtgagagttagcgtcctgtagatacacacagagactaggcccgtatattaactagaagcagctttatgtctagcttgggtctttttgtttgtttgcttgtttgtttttagattcctgagagatgtctctggaagggaaagttttgagaactaatggctatttttgaggacaaaaattacatcttaagctaattccttaaatacttacagtaggtgaattttcaggacaatattgcctcacaaccctgcttacattgaaagctttttcccttaactc

SEQ ID NO: 19281 - DNA, 387 bp, Homo sapiens
caagatttagggcttagcttaataaagcatttatactctctctcttattagtccctaataaaatgaggaactgagctataagccaaaacctagtacaaagagacagcatttcatttgttaaccgttaatatatccatttgcagaagaggtgtaaaattctttaaaattttcctaaatatgttcaatttaatgttaaatacaaattaacaagaattcaacaaatctgctgtatagattttaagtgggtcacttaggaggagaggacatcttcgaatttctgatataaacacgttgagtaagctataggtgtatataagtatccaagtgtgtatataatgattctccactgattttatagagaagaactatatttccagtaatcttccg

SEQ ID NO: 19282 - DNA, 374 bp, Homo sapiens
  misc_feature (1)...(374): n = a,t,c or g
tctattcgatgatgaagataccccaccaaacccaaaaaaagagatctctcgaggatccgaattccagatctatgaatcgtagatactgaaaaaccccgcaagttcacttcaactgtgcatcgtgcaccatctcaatttctttcatttatacatcgttttgccttcttttatgtaactatactcctctaagtttcaatcttggccatgtaacctctgatctatagaattttttaaatgactagaattaatgcccatcttttttttggacctaaattcttcatgaaaatatattacgagggcttattcagaagctttggacttcttcgccagaggttatacctcnngcctgnntgnngntcnnccnncncnngggc

SEQ ID NO: 19283 - DNA, 522 bp, Homo sapiens
  misc_feature (1)...(522): n = a,t,c or g
agctatgacatgattacgaatttaatacgactcactatagggaatttggccctcgaggccaagaattcggcacgagcctggcttctgttcccacagctctaaaatataaaggcttctggcatgacatcctgatttagcactattgttcctaggatttgctactgaaaggactattcatgtggaaacctcctctcccaggccaggcttctgttggccactgtttatttacatactggtttaacatgcagcctaccttggaagtttggacaaaccaggccaggtgtgccattgcaccatctctccctattcttactttgcctgcttactgcatggaggtagagagtagaagaaggttaccagaggttgggaaatggtgggctngggtgtgaggggtgaacagaaggtggttaatgcgaacaaacactgtctgatagcaagaaaaagtctagcattcaacagcacagtagggtgactatagttaacaacagtgaattgnatacttcaaaatanctaaaagaggct

SEQ ID NO: 19284 - DNA, 374 bp, Homo sapiens
gattgtggattggtaagaatcaccaggaaaccattaagccccaatagctacaaggagggtggttaatctgctatatcaaactccttccctgaaaccagcaaacaccgggaaacattttggctcattataatccggtgaacaatgcagtcaggcctgttataaccgctgagcagccacactcgcacctcctgggtgctgtagtctgtgttggtacaggcttctgcatgcctggtaaagtccagccaaggctggtcaaggcaacatctccacacagaaaatctgcaccagttatgtaagctaaaaagctgtgtgaacccaggtgtcccggaaaggggctgcaggacacagcaaaatgccagcagcatgccggaccc

SEQ ID NO: 19285 - DNA, 449 bp, Homo sapiens
  misc_feature (1)...(449): n = a,t,c or g
gagactgcatagggctcggcgtggcggctcacacctataatcccagcactttgggaggttgaggcaggaaaaagacttgagcccaggagttcgaggctgtagtgagttctgatcatgccactgcacttcagcctgagagacagagcgagaccctgtctccaaaaaaatttgaaaacagatttttaaaaactgttttggaacctcctcatacttgcacaaaaaaattcctcttgtacaaaggcttttctctagatttaatgttgactcttttatctttcttcataagatctacttttaatcctttgttcttttttgaaaagacagtatttcttttctatttgcatccagccatttttttatcctatatttgtgaatttgcaaaataaaatataagttgnttaattctgcccttcttttcttcagacagggcttgctctgtgcctangaag

SEQ ID NO: 19286 - DNA, 199 bp, Homo sapiens
gtctgtcaccacacccagctaactttttgtatttttggtagagacggggtttcgccatattgactgggctggtctcaaactcctgacctcaagtgatccacccaccttggtctcccaaagtgctgggattacatgcgtgagccaccacacttggcctacattttttttttatataccagaacatctataacaggcacct

SEQ ID NO: 19287 - DNA, 400 bp, Homo sapiens
gaggcaatggcccggcaaccagctgtaagcgaggcacggaagacatatgcttgtgagacaaaggtgtctctgaaactatggatggtacaagaacttcacttgacattgaagagtactcggatactgaggtacagaaaaaccaagtactaactctggaagaatggcaagacaagtgggtgaacggcaagactgcttttcatcaggaacaaggacatcagctattaaagaagcatttagatactttccttaaaggcaagagtggactgagggtattttttcctctttgcggaaaagcggttgagatgaaatggtttgcagaccggggacacagtgtagttggtgtggaaatcagtgaacttgggatacaagaattttttacagagcagaatctttcttactc

SEQ ID NO: 19288 - DNA, 354 bp, Homo sapiens
tttttttttaaaaaaaaatctttttttatttcaaagattgcttcttatattgaagctcatattaaagcaacagtacaatgttcataaaatataagtgtgatgccgtaacattttcttacatgtcagaatactgatatttatatgtatactaaaataagaactttaaaattgtacaaatagatacattaaaaatgacatagaaatagggcgtctctcactgaaacaagacagttatatctggcacgtattagtttaagatgaaagtagaagcaaaaagatttacaagaatcagcagtaacaagattgatgctcaagagacataattgtacattgtattgtacatacattgtatgg

SEQ ID NO: 19289 - DNA, 363 bp, Homo sapiens
gtaatactgaaaaactgagagtgctattttaacttgtcaataactaaaaggtaccattttctcatagtgcacaggtgttgtacaaaaagtacatgacctccctgctgtttgtgagtgaaaaaggaaaacccaaatatttgtgaaagtgtaagacggatgcatttaaaattctggggtctagcaagggaaagattctctgtgaagacccaaaattgaggactggttttataactctaaaattatcttgaggaatggaatcaaaatatggtatttcattgattctaagatgtatttttttcatactttagcatcttaaattcagatgggcttggccatcaatagtctgtcccaagtttattggca

SEQ ID NO: 19290 - DNA, 687 bp, Homo sapiens
  misc_feature (1)...(687): n = a,t,c or g
gggctgctgaggacgagttacagctgccgcggctccccgagctgttcgaaactggtagacagttactggacgaagtagaagtggcgactgaacccgccggttcccggatagtccaggagaaggtgttcaagggcttggacctccttgagaaggctgccgaaatgttatcgcagctcgacttgttcagccgaaatgaagatttggaagagattgcttccaccgacctgaagtaccttttggtgccagcgtttcaaggagccctcaccatgaaacaagtcaaccccagcaagcgtctagatcatttgcagcgggctcgagaacactttataaactacttaactcagtgccattgctatcatgtggcagagtttgagctgcccaaaaccatgaacaactctgctgaaaatcacactgccaattcctccatggcttatcctagtctcgttgctatggcatctcaaaaganaggctaaaatacagagatacaagcanaagaaggagttggagcataggttgtcngcaatgaaatctgctgtgganagtggtcaagcagatgatgagcgtgttcgtgaatattatcttctcacttcagaggggnttganatcagcttacaagnattgnancattgccaaggaatnaagtcctgnnaaaagagnccttcaganaggacaacttcaantactccg

SEQ ID NO: 19291 - DNA, 394 bp, Homo sapiens
ggcgtgagcaaccatggccgggcagcacctcccggtaccccggctggagggcgtttctcgggagcagttcatgcagcacctctacccacagagaaaacctcttgtgttggaagggattgatttggggccatgtacaagcaaatggacagtggattacctaagccaagttggagggaagaaagaagtaaagattcatgttgctgcagttgcacagatggacttcattagtaagaactttgtatatagaactttaccttttgaccagttggtccagagggcagctgaagagaaacataaagaattctttgtttcagaggatgagaaatactacttacggtcacttggagaagaccctagaaaggatgttgcagatatcagaaagcagtttcttttg

SEQ ID NO: 19292 - DNA, 96 bp, Homo sapiens
ggagtttagcacaggacctgtggaaaaagctgccaaacctttgccatttaaggatcccaactttgtgcactctggccacggtggcgcagtagctgg

SEQ ID NO: 19293 - DNA, 368 bp, Homo sapiens
  misc_feature (1)...(368): n = a,t,c or g
gaaaatttcttgaagctggtatctatgaagttcccatcataatcacagattcgggtaatcctcccaaatcaaatatttccatcctgcgcgtgaaggtttgccagtgtgactccaacggggactgcacagatgtggacaggattgtgggtgcggggcttggcaccggtgccatcattgccatcctgctctgcatcatcatcctgcttatccttgtgctgatgtttgtggtatggatgaaacgccgggataaagaacgccaggccaaacaacttttaattgatccagaagatgatgtaagagataatattttaaaatatgatgaagaangtggagganaagaagaccangactatgacttgaccagctgc

SEQ ID NO: 19294 - DNA, 370 bp, Homo sapiens
  misc_feature (1)...(370): n = a,t,c or g
gctttagaaaataaagaggaaggatcactctcagatactgaagccgatgcagtctctggacaacttccagatcccacaacgaatcccagtgctggaaaggacgggccctcccttctggtggtggagcaggtccgggtggtggatctggaagggagcctgaaggtggtgtacccgtccaaggccgacctggccactgcccctccccacgtgactgtcgtgcgctgacgccagggccgcctgtccgcgtttgtttggccggttttgcggaggtttctatgcggcaatgctgaattatccgttagattttcaccccagtttttttgttggtttttttttttgaaatggagtctcgctctgtcgcnaggctgga

SEQ ID NO: 19295 - DNA, 362 bp, Homo sapiens
  misc_feature (1)...(362): n = a,t,c or g
ggcagagccaggcaccctcaagaccagtctggtggctactccaggcattgacaagctgaccgagaagtcccaggtgtcagaggatggcaccttgcggtccctggaacctgagccccagcagagcttggaggatggcagcccggctaagggggagcccagccaggcatggagggagcagcggtgaccgaccacctcatcagccagtgggcagtggagcccaacgccnnagngggtcctctcctggaagtcnaagctgccgntncctaccatcatgaggntnctgcncntgctggttngnaaggnnagaacantggatcaacaagtncnnngngnatgacatttgtctnnncnnnatnntcctc

SEQ ID NO: 19296 - DNA, 1254 bp, Homo sapiens
caaaaagggaattgaggaaagccttaggaaagtggcaaagaagaagtttgcagaaaaccctaaggccggcgatgaatttgtggagaagaccctgagcaccatagcgaccagcacggatgcagcctccgttgtccacagcacagacttggtggtggaagccatcgtggagaatctgaaggtgaaaaacgagctcttcaaaaggctggacaagtttgctgctgaacatacaatctttgccagcaacacttcctccttgcagattacaagcatagctaatgccaccaccagacaagaccgattcgctggcctccatttcttcaacccagtgcctgtcatgaaacttgtggaggtcattaaaacaccaatgaccagccagaagacatttgaatctttggtagactttagcaaagccctaggaaagcatcctgtttcttgcaaggacactcctgggtttattgtgaaccgcctcctggttccatacctcatggaagcaatcaggctgtatgaacgaggtgacgcatccaaagaagacattgacactgctatgaaattaggagccggttaccccatgggcccatttgagcttctagattatgtcggactggatactacgaagttcatcgtggatgggtggcatgaaatggacgcagagaacccattacatcagcccagcccatccttaaataagctggtagcagagaacaagttcggcaagaagactggagaaggattttacaaatacaagtgatgtgcagcttctccggctctgagaagaacacctgagagcgctttccagccagtgccccgagtgcctgtgggaatgctctttggtcagacattccctcacacagtacagtttaataaatgtgcattttgattgtaatctatcgaagtgattattacaccagttacagcagtaatagattctccattaagaaataattcccttttttagtctgttcatttctgtgtattttctaaacagctttacacccttggtgccttggagcaaacatgttttttgaaccttgtcatttttgtgaagaattgcctagattccttctctcatcaacgggaaagtacttcctctgagagtgcgagtgcaccatgctcactgttgctgcgtgggagagtcacaagccactggcaagcaagtggtatagtctgtgaagcactgcagcgagcagcacctggatcttgcctttataagaacattttactacctgcagctttgagtcttgccctacattttgg

SEQ ID NO: 19297 - DNA, 445 bp, Homo sapiens
  misc_feature (1)...(445): n = a,t,c or g
gtaaagataatcctttcttgggaattattttaattgccaccntnctattgnnnttcaggttttgtaaagtggacacttttgttgaaacatgaagccccttaaaagtcttttattgctgtttaaagaaaatattgaatatctgaggactctattcaaggagctttgtctttttttaatctgaggaaatggcttttagtgattcttcttttcgctttaagttacatgtgttaattataaatttgttaatgagaactttccaaagatgctggcttttcagccagtgccagctccaagtgctgtgctccttctcctgccactcagcctggtgctttgttagacccagggactctgattcccaaatatcagaatttgcagatttttaacataaaattgactgngctaaactaagcattttaaggtaaactgaattttatcttaaaaactt

SEQ ID NO: 19298 - DNA, 333 bp, Homo sapiens
gctcttctgttttgtcaccatcgtttcagctccaaagtcacaaaaactatgaaggaacttgtgagattcctgaatctaaatatagcccattaggtggtcccaaaccctttgagtgcccaagtattcaaattacatctatctctcctaactgtcatcaagaattagatgcacatgaagatgacctacagataaatgacccagaatgggaatttttggaaaggccttctagagatcatctctatcttcctcttgagccatcctaccgggagtcttctcttagtcctagtcctgccagcagcatctcttctaggagttggttctctgatgcatctt

SEQ ID NO: 19299 - DNA, 347 bp, Homo sapiens
gggcacaggatggatggcgggacatgggctacacatacctcaacattgatgactgctggatcggtggtcgcgatgccagtggccgcctgatgccagatcccaagcgcttccctcatggcattcctttcctggctgactacgttcactccctgggcctgaagttgggtatctacgcggacatgggcaacttcacctgcatgggttacccaggcaccacactggacaaggtggtccaggatgctcagaccttcgccgagtggaaggtagacatgctcaagctggatggctgcttctccacccccgaggagcgggcccaggggtaccccaagatggctgctgcctgaatg

SEQ ID NO: 19300 - DNA, 316 bp, Homo sapiens
ggacagcagccacaatgaggaactcctatagatttctggcatcctctctctcagttgtcgtttctctcctgctaattcctgaagatgtctgtgaaaaaattattggaggaaatgaagtaactcctcattcaagaccctacatggtcctacttagtcttgacagaaaaaccatctgtgctggggctttgattgcaaaagactgggtgttgactgcagctcactgtaacttgaacaaaaggtcccaggtcattcttggggctcactcaataaccagggaagagccaacaaaacagataatgcttgttaagaaagagtt

SEQ ID NO: 19301 - DNA, 367 bp, Homo sapiens
ggcttactgaatatttgttagatggtaagttagaaatacttgaagttaactcaggataaaacagaaaagggcttcatagcccattgtatggatggagggcttggttgtgtttattttttcccccaattttaaaactgtttctgattacaaaattaagacatgaccaaatacaatatttaagtcatatagaaatattaatagttcttaagctcaccactgagaatggtgtctgtatatattattccagtagcaaatatttgagagccttgttctaggcatgtgcagcagggcaggagagctcaaggctctgttgtgtagcacctgttgtgtaaagcttgtatttcagtgggaagacaaacagtggcct

SEQ ID NO: 19302 - DNA, 338 bp, Homo sapiens
gaaatgccagaaatcaacgccaaggtggctgaatccacagaggagcctgctggttctaatcggggacagtatcctgaggattcctcaagtgatggtttaaggcaaagggaagttcttcggaacctttcttcccctggatgggaaaacatctcaaggcctgaagctgcccagcaggcattccaaggcctgggtcctggtttctccggttacacaccctatgggtggcttcagctttcctggttccagcagatatatgcacgacagtactacatgcaatatttagcagccactgctgcatcaggggcttttgttccaccaccaagtgcacaagagatacc

SEQ ID NO: 19303 - DNA, 320 bp, Homo sapiens
atttattgaacatttactttgtgtcaggcagtttttcacagaatattatcttaagcctcacatcacccaggtgaagtagacattactacccttgtattacagataggaagcaagttcagcaatattaagcgacctgctcaagatcacacagctattaaggggcaaactctggtctactacaccatgctggcacagggaaaaggaggagagggtggatttgagacattatgaggcagattcatccaatgttggtgaccaactaagcatggacttaaggtgtggcaactatcaaaatgatgccacatttccagcttggcacc

SEQ ID NO: 19304 - DNA, 530 bp, Homo sapiens
  misc_feature (1)...(530): n = a,t,c or g
ttgnnnccccttgactaccgctatgacatgattacgaatttaatacgactcactatagggaatttggccctcgaggccaagaattcggcacgagctaggaagaggattccatgtcatccgcctttaagtctcggaagtaagcatgaagaatcccagtggtgaggaggaaaggctgaggagtcagaaaaagctcctacaagaagatggaacagctcctacaaagaggtggctgtgggtagaagcagccgcctggggcagttttcaggctttggagaaggaaagcagcttctctgttgaggaatattctgcaagtaggtgatccactttgaaagctggttactattccttccttctaggcctgtcggaggggaangagggcagccgngnnngctctgctcccatgaggcaaattcggtcaccaaaacaaaaaaacagcttcttatgtagaaagcaggggaattagcctagttttcggatattcacccagtattctagctttttaaagaacagcctgaanaggctgggtgcag

SEQ ID NO: 19305 - DNA, 585 bp, Homo sapiens
  misc_feature (1)...(585): n = a,t,c or g
ccccncnnnnnnnangnnnnnnnnnnnnntnngggnntnngnnnnnntntttgaanaccntttgaanccanttatgacatgattacgaatttaatacgactcactatagggaatttggccctcgaggccaagaattcggcacgagccacagcctagctgagattctccccagcgactaggaagatgggtctgcgtcacctctcaggtactgaggagaccagctgggcaagatcttcaaaagctaatgatggggaccagagcaaaggtaggagtgtggtgagaatacagtggcctagccatgcagtgggatggctgggtacacaaatgctagctattggaattggattttctcagccaatgagaatatctacttggggctatttgcttttttggctaattaagaatggtcccaggtcaaattctgnctggaaagttggccactgagtaccaaaattatactttaagtaaatgtagcaagctctgaagggagctaacatccctgaaactgactcttaccatatgctggctctgcttcaagggtctcagaagttgctgaggntttatttgcattttaggaaagggaaa

SEQ ID NO: 19306 - DNA, 330 bp, Homo sapiens
agaatttaggttttttagagacgagatgtaatctgtctcaaagacaaaaagaaatttttgttaatctggacaattctgagttaatttttagttagggttaggagttcttaaatttaggaagaaattttgctagaacctaaaagctggaaggacgcccagctctctaggctttgcctaaaagttgaattctgggactaaattctgtaacatcttcgtggatcgttctgctactgtgggaaagacagcattttgttacagcagagaccagaattgagaaaaccagaataaaaaaactgttccctctgacctcagtgttgtgatctttgacag

SEQ ID NO: 19307 - DNA, 427 bp, Homo sapiens
cgagcggaatacgactcactatagggaatttggccctcgaggccaagaattcggcacgagccagggcttgcgcttgcctttgcctcttccacgtaagtacctttcaaaggtctgccttttatgcagaggaatgagtttgtgcaggaactagaccaaaatgctatcgttaccgtatttgctcatctgttggaaaacggtagaggtgaaagggagaataggaatgacaagcttacccccaagcagaagctaggaaatgctgctgggtgtaagacatcagtcccttacaaacaaaactgcatggggtcgaggggaatttggaggaaggggagttggtgttggtcttttggccaagcaggtgagatgtttttcttactcgcttctattttggaaagataactttgaaaccagcatttgtcagatgcctatg

SEQ ID NO: 19308 - DNA, 399 bp, Homo sapiens
gctcttctgcaagccatgccatgtgaagcggagtgctgcggggtgctgctgagagtgcccgctgggcagtgaacagaccactagccccggctggggcccttccctgacttggtttcccttcctaacctgctcttgcacactttccttctgagcctccatggagaccagcctgcaagccggcccagcctgtccaggatacagtggggctgagcacccccaggccttccactcctctaccctctgggcaccagaaggctcctggaccatgagcttcacccccagaattccctgctgaccctgccccacttccagggaaaagctgggggaggttggacccctctcactgactagctgtctggtaggggtgctaggaccagcctcgcctgtggggttgagctg

SEQ ID NO: 19309 - DNA, 339 bp, Homo sapiens
gggccagggagagccggctgctcagcaggacccaggacgttaggtttgtccctttgttctgtcaccacctcctccctctgctggagctccaaggcaggccgacagatccctgtctcagcctggctttatattgaaagcctgggcacgtgggcagagagagattgggggcaccagccctccgtcccctcctctcttcacctcattcctctgccacctcactgctctctctgcttaccccatttccactggtgtacggagaaaaggcaaacatccaaatgcaatttggagctttcttctaagatgctagagttgcaaattgccatccatccatcatccacc

SEQ ID NO: 19310 - DNA, 392 bp, Homo sapiens
  misc_feature (1)...(392): n = a,t,c or g
ccgaacagagatggccatgtctccttgcaagaatacatggctttcatgatcagccgcgaaactgagaacgtcaagtccagcgaggagattgagagcgccttccgggccctcagctcagagggaaagccttacgtgaccaaggaggagctctaccagaacctgacccgggaacaagccgactactgcgtctcccacatgaagccctacgtggacggcaagggccgcgagctccccaccgcgttcgactacgtggagttcacccgctcgcttttcgtgaactgagccactccctgggtcacccacccctcgctgcttgccctgcgtcgccttgctgcatgtccgctcctctgtgtgctctcactttccactgnaaccttaagcctgttagcttg

SEQ ID NO: 19311 - DNA, 384 bp, Homo sapiens
ggatttatggacactgaaatttgaatatcgtatacttttcaagtggcatgaaacatgattttgattgtgtaaaaccatttaaaagtgtaaaaaccattcttagcttgtgagctgtatgaaagaggcagtgggccagatttagcctgggggcagtagtttgctaaaccttgctctgggaggtaattgctggtcaccccctgtcctgtgggcaggctacattaagggcctttcatcagggtttccacatcacagcactgacaacagaacatcctaattacctgttaactcctctgtggaccaccagctccttgagggaaacactgggttttattcatcacaaaaccctcagcaccaacacatagtaggtaagtcgacaactacata

SEQ ID NO: 19312 - DNA, 402 bp, Homo sapiens
cgagaagctggaacttgactgctgggcaggaaaacctattcctggagacctctacagagcctgcttgtatgaacgggttttgttagccctacatgatcgagctccccagttaaagatctcagatgaccggctgactgtggttggagagaagggctactctatggtgagggcctctcatggagtacggaagggtgcctggtattttgaaatcactgtggatgagatgccaccagataccgctgccagactgggttggtcccagcccctaggaaaactttcaagctccttaaggtaatgataaatttagctattcttggcggagcaaaaaggggaaccaagttccaccagtccattggcaaacactactcttctggctatggacagggagacgtcctgggattt

SEQ ID NO: 19313 - DNA, 342 bp, Homo sapiens
gcccataggtagaggaaagaatataaaataatgaataccaacagctatctctttggctctagatcttttggaaatcatcattctcagcaaagtaacacaagaagggaaaacccaacaccgcatgttctcactcataagtgggagtcgaacaacgagaacacatggacacaggaaggggaacatcacacactggggcctgtcagggggtggggggctaggggagggatagcattaggagaaatacctgacgtaaatgatgagttaatgggtgtagcaaaccaacatggcacatgtatacctatgtaacaaatctgcacgttgtgcacatgtaccccagaactt

SEQ ID NO: 19314 - DNA, 1419 bp, Homo sapiens
  misc_feature (1)...(1419): n = a,t,c or g
gcagaggaggacttaacagaccccgtgcgctgcaactccttggaagaaatcaaagctttgcgcgaggcccacgacgccttccgctcctccctcagctctgcccaggctgacttcaaccagctggccgagctggaccgccagatcaagagcttccgcgtagcctccaacccctacacctggtttaccatggaggccctggaggagacctggaggaacctacagaaaatcatcaaggagagggagctggagctgcagaaggaacagcggcggcaggaggagaacgacaagctgcgccaggagtttgcccagcacgccaacgccttccaccagtggatccaagagaccaggacatacctcctcgatgggtcctgtatggtggaagagtcggggaccctcgaatcccagcttgaagctaccaaacgcaagcaccaggaaatccgagccatgagaagtcagctcaaaaagatcgaggacctgggggccgccatggaggaggccctcatcctggacaacaagtacacggagcacagcaccgtgggcctcgcccagcagtgggaccagctggaccagctgggcatgcgcatgcagcacaacctggagcagcagatccaggccaggaacacaacaggtgtgactgaggaggccctcaaagaattcagcatgatgtttaaacactttgacaaggacaagtctggcaggctgaaccatcaggagttcaaatcttgcctgcgctccctgggctatgacctgcccatggtggaggaaggggaacctgaccctgagttcgaggcaatcctggacacggtggatccgaacagagatggccatgtctccttgcaagaatacatggctttcatgatcagccgcgaaactgagaacgtcaagtccagcgaggagattgagagcgccttccgggccctcagctcacagggaaagccttacntgaccaaagaggatctctaccangtatnggcctcangaggtgggtgaagaggtgtcctttggaaaactacagccaaatttgtggcagagctgantctggggtaacangccctgcnctgggtattctccccatttacaaatcaaactcantatggacagaantcccggatctgcttgtanaagcagctccgagcccccagcatcctgagacctgggaggtcnggtttgaagtgggtgcagctggctcangcaccangtgccatctcttaccccacagaacctgacncgggaacaagccnnctactgcgtctcccacatgaagccctacgtggacngcangggcngcgagctcncancggngttcgacacgtggagttcancgctcgcttttcgtgaantgagccantcnctnggtcanccaancctcgctggnnccctgcgtcccttgctgnangtccggnccncaggtgcccaatt

SEQ ID NO: 19315 - DNA, 389 bp, Homo sapiens
gaaacattcatatccttttttatctgcttgatgtatcagttacttagatgtattaaaaatctcccattaggattataagttttcccatttatacccatactcttcaggttttgctttatatattttgatactgtgtttttatggttatagagcttcatgattgttaaattatctttttggatggtttcttcttacagagctttatgataaagtatctttttggatggtttcttctgttagtaataacatctcctttgtcccttattaatgatgtttgtttatttattttgagacagtcttgctgctctgttgcccaggctggagtacagtggcaggatctcagctcactgcaatctccgtctctcaggtttaagcagttctcctgcctc

SEQ ID NO: 19316 - DNA, 414 bp, Homo sapiens
agaagatcaagttttttgacctgcccagcaagtctgtcatctctctggtatttgacctggatgcaccagggcccggaactatgcccctggctgactggcaggagcccctggccccacctattcgccggtggcgttccttgcctggttcgcctgagttcttgcatcaagaggcttgtccatttgtgggccgggaagaatcgctatctgatgggcccccaccacgcctaagtagtctcaagtacagagttaaagagatcccaccattccgggcatctgccctaccagctgctcaagcccatgaggctatggactgctccattctccaggaagaaaatggttttgggtccaggccccaggggaccagtccatgccctgcgggtgcttctgaggagatggaggtagaataaaggccac

SEQ ID NO: 19317 - DNA, 340 bp, Homo sapiens
gtcagattatatgaagctctccaatatgttctttcagaacagccagtgcctagaatactgcctgactcgtagtagcactccttatgtgttgaatgagtaaatgaagagtccctggaatttcttcttcataacattgaacacaactgcagtttgaaaacataatttctgtagttttttttttttctttttttttgaaacggagtgtctttccgttgcccggattggagtgtaggggcacaatcccggctcactgcaacctccgggcctccccagttcaagcaattctcctgcctcagcctcccaagtagctgggattacaagcactggccaccaaacccag

SEQ ID NO: 19318 - DNA, 443 bp, Homo sapiens
ggctatttgttatgaaatccccagagccctaaacactgttctaggactctttcatgttgccagaaaatgatttaatatatgagtagatagtgaaatgtaatatttaaataaaatactctgaatttttttcttatttattgctctaaggtaggaaatgtagaaaatcaggtcccaactctcatgttgaaaaaatctctttgagaatcttagactttcttatctttgtagctggaatagttctgacttttcaattatgtagtggccagaagaccctcagcacccaaaccatagctgcatgagtgatgcatttttctttatgtcacaatcttgattattagtgtgaagttcctaaactatgcccaagagcagcaaagggggcagttcttattgaggccttttgtcaataagggcacagtaaaaagaatcattctcatgattttatc

SEQ ID NO: 19319 - DNA, 433 bp, Homo sapiens
aaccgttatgacatgattacgaatttaataccgactcactatagggaatttggccctcgaggccaagaattcggcacgagtctgcatataagaccctaaaaatgggttaagttctcttgtctcaatactttcccctaccagtgacttatcttgtatccttggactctgttggttttcatgtggtatcaggcaatgctctattacattaaacaggaatgttagctaaagttgatgaaactacattggactaattagtccttcaagaaaaatttaattgttttaaaataaagctttcaaatatttagccattttgaataacaaaagaatgaagtgtcctgttcagcaactgtttgggtgactacttcatacaaggctatgcaggggataggaagataattactgccctcttgtagattaaaatctagtaggaaag

SEQ ID NO: 19320 - DNA, 344 bp, Homo sapiens
ggaaaccagttgatggtgtgaacaccactacagagcaacctgcacaccacagcaatttgacagctcaggttctgtgtctcatgtggcaccgtgcttgtccttggaaagaaggcctacaaaattcttcatatctccattccttgacatctgctggcaaactcccactcatattttaagactcagcctctcctgtgacacctgtgtcttctctccaaacagggagggacgcttgcctcttcagagctccccacactggagtataactgctcctgtgtctgatgcccttagtctcagtgccaggaggtattcatgcttatgtccccatggcctgtaacagagcctgc

SEQ ID NO: 19321 - DNA, 423 bp, Homo sapiens
ggtatgtgattacactcagtcggatactgtgagttcgtggacagtcagagctgttgttcaagtgagaaccattgtgggagacactaaactcaaaccagatattctggatcctgtcgaggacacactggaagtagaacttggaaagcctttaactattagctgcaaagcacgatttggctttgaaagggtctttaaccctgtcataaaatggtacatcaaagattctgacctagagtgggaagtctcagtacctgaggcgaaaagtattaaatccactttaaaggatgaaatcattgagcgtaatatcatcttggaaaaagtcactcagcgtgatcttcgcaggaagtttgtttgctttgtccagaactccattggaaacacaacccagtccgtccaactgaaagaaaagagaggagtggtgct

SEQ ID NO: 19322 - DNA, 412 bp, Homo sapiens
gattaatgctctggttaatgtccttaatttgtaacacataaacaagaagtcaagcatcaaagaaataggatatagaataaaagggttgtaatataaagaacgttactataacttaaaaatattctgagtagactcactttattgtttccctccagagaaattaatcttaaatgtatatctttttttccctaattatgaggtggcaaaagcacatgccagctgttgctttgttttttattctatccttctcctgtgctttttctgaatactttttgaattaatagccaaattttggtcactttttggacccatcttccattggaaataaaaacccttatacttaaatatatacacttgaacacaaagtgaagaaaaaaagcacttagtaggcaatgcccgatgctgttattgt

SEQ ID NO: 19323 - DNA, 357 bp, Homo sapiens
cgctttaggggccactggagtcgagctcagcgttcacaccaggcgggctgggtcccctgcccacctgcctccctgccccctgtgacggagggggcaagcaagcccccagaggccgtgtctctggacagacggatagacatacggaagcgaggtctggaccaagagaggcccaggctactggaggagtagaaggatgggccccgtggggtccccactgccccggtacgagggggcccaagaccctggcaggtcaggggccctggccaagccagatctggagctgctgctccctgctgcggagaccgcggaggcttcgcgttgaccaagttccttaaagaactggctgatggggcagga

SEQ ID NO: 19324 - DNA, 363 bp, Homo sapiens
  misc_feature (1)...(363): n = a,t,c or g
ccgggcgcggggaagtcatgctcgcttcacggaggcaatagctagccggtgtctgtgggaggttatgtttatttgagacttctccatcgggatcgcctggtgtcaccaagtgtccactggtactgaggtttgctgcctgccttcttgccatgtctaacgaagtggaaacaagtgcaaccaatggtcagcccgaccaacaggccgcaccaaaagcaccctcaaagaaggaaaaaaagaaaggccctgaaaagacagatgaatatctcttancaaggttcaaaggcgatggtgtaaaatataaggccaagccgattggcattgatgatgtgccagatgcaagaggggataaaatgagccaagact

SEQ ID NO: 19325 - DNA, 514 bp, Homo sapiens
  misc_feature (1)...(514): n = a,t,c or g
tttggaaatccgtttnttatgattacgaatttaataccgactcactatagggaatttggccctcgaggccaagaattcggcacgagggcctgaagacacccaagcagccccatggagaggcccatatggagaggaactgaggcatcccacccccaaccggcagctcggggctttgaaaacagatccttccgccccaggcaagccttccaatggattgcagccccagccaatgccttgaactgccaagttcagccacacctaaattcctaacccataggaactgtgagagataataaaagtttgttgttgtttcaagccactaagatctggggtaatttgttatgtagcaacagataaggaatgaaatgaccctgccatttatcattgagatgggaataaactttttttagaatagcaggaagtactttaaataattactagattggccaagcacagtggctcacgcctgtaatcccagcacgcctgtaatcccagcacttcaggctgatcgctt

SEQ ID NO: 19326 - DNA, 408 bp, Homo sapiens
  misc_feature (1)...(408): n = a,t,c or g
atttgagtaccatctatgacatgattacgaatttaatagcgactcactatagggaatttggccctcgaggccaagaattcggcacgagcatttttggtaactcagattcctatagctgtgcatggggtcattaccttggacaatctgatgcctgagaagactctgttttgtgtttccaaatggaccatcttatggaccatctttgcttggaaaaggcactgtccagaatgtgtggctaatggattgttgaaggagctggacatggcccaggcagtccggtgaatcagtgactgatggttgtttgtagtagctaatgctgttccctccccccaaagataaaagaaccataaaaccatcaagtggcttgattttgactattgncancattttgngacanaactgggaacc

SEQ ID NO: 19327 - DNA, 569 bp, Homo sapiens
  misc_feature (1)...(569): n = a,t,c or g
taantttgaaacccttatgacnngattacgaatttaatacgactcactatagggaatttggccctcgaggccaagaattcggcacgagggtaaagagttaacaaaaccgcttctctttctgtacgagaatttgctccttggttaacgctggctctcatcccttggaaacctgataaggaaagatgtcatcagtattactaggcaacattgcttatagtaaaaatgatctcaaattggtaaaatgcatctgaaccaggagaaattttaaataaatgatgggaatgcctttggattttcctggatggtggtgacttttaaaactgggcttggcttgtggaaaccatgcctatggagttgttacagaagcttatggctcctgttagggcagggcccacatatacccattggatctcatctccttgcancanaggtattctgctgctatataagacagntgcatggtctgctggcaagctgtggtcgcttcaaatgcttctgggtanactggtactcatgtggctatggtattctggggtgagtctgttagttgacctaatagaccctgcatc

SEQ ID NO: 19328 - DNA, 341 bp, Homo sapiens
  misc_feature (1)...(341): n = a,t,c or g
ggacgtgcatcccccagccttgtgtggctctcagtgtcatgacaggttgcatttcttcctgtgcccaccataatggcagccccgctggctcaaaactccactacatgtgcattatctcagcacctttaaccaggcatttctgctgcatttttttttggaattttgcctccaccagttattgtttttattagagctctggttacaaagtctcacaggttttcagtttgccctaaccctgttattgtcagtatgagatttgataaatgtgaggttttccaggaagtaatttgcatatagaaaaangcttataattctttataagggtataagatgaccnttat

SEQ ID NO: 19329 - DNA, 521 bp, Homo sapiens
  misc_feature (1)...(521): n = a,t,c or g
ttntgttnganccatnagatctnnntctccatncattacgaatttaatacgactcactatagggaatttggccctcgaggccaagaattcggcacgagcagtcccctcattagactgtagcattaggatgtgtggagagaggagaaatgatttagcacccagattcacactcctatgcctggaagggggacatctttgaagaagaggaattagggctgtggacactgtcttgaggatgtggacttccttagtgagctccacattacttgatggtaaccacttcaaaaggatcagaatccacgtaatgaaaaaggtccctctagaggatggagctgatgtgaagctgccaatggatgaaaagcctcagaaagcaactcaaaggactcaaagcaacggacaacacaagagttgtcttcagcccagtgacacctctgatgtcccctggaagctttgtgctacctgggactgcctgacttnctttacctggcccttgctactaccttgaactggttatcnacccc

SEQ ID NO: 19330 - DNA, 471 bp, Homo sapiens
  misc_feature (1)...(471): n = a,t,c or g
gcctcnnnatactctggatgacccgattacgaatttaatacgactcactatagggaatttggccctcgaggccaagaattcggcacgaggctgggagagaaaaaaacaaaaagcaccagccacaggcaattaaattgccagaaagtcagtgtctgggctcccggcatcaagttagctagctactctatggataagtactgaagctttaattgcatttgggctcaaaaacaacaactgtaactttagggtaactagaaaagcctctgtagagaatcgctgccatcagttaagaatggaatgatttaaaatgtctctgggcacaatgaagtgctcctagagcttaaagtgccagaaaagtgtacagggtttccctccatgtcctgcctctctcctttactgctctagcccagcatacaccgcctgagtttctagggccatgttcctgcacctggtactgnctcctttaagctg

SEQ ID NO: 19331 - DNA, 376 bp, Homo sapiens
cagaaataaacccaaatgtatagaactatctagttgatgaaaatgatgtcattgcaatgtagtaaggaaatgatcgtcttttcaataagtggtatggaagcagttggatatccatattaaaggagaacatagaatattggtcccatcatgccatgcacacaaatcaattccagatgatcctagacctaaaaataaaaggtgaaagaaagcttctagaagatagcatatcttcctgtccttggtaggcaaagacagggtacaaaaaacaggatacaaaaaagcactgaccctaaagaaagactgacaaattgggctgcattaataggtttgcatcaaaatacaccgttaagagagaagggcgtcgacgcggccgcga

SEQ ID NO: 19332 - DNA, 355 bp, Homo sapiens
  misc_feature (1)...(355): n = a,t,c or g
atttgcgaagaggggcaatgatttagatgtgtcatgtgtgcatcaaggtgtagaaattaatgatgcattatacctttgtaattctactcttttgtgaatatatatttcaattaaatgtttaaaaaattcagatgtcatttccaggtgtttgaaagagattagcaaaatgagtataaagaaaacataacactaaaagcaacatttaatgggaaaaaaagtaaaactgatgagtaaacccaagagataggttttttagaagtataaaattggctggtcatggccaggcggcgtggctcatgcctgtaatcctancgctttgggaggctgaggccggcggatcacgaggtcaggaggc

SEQ ID NO: 19333 - DNA, 584 bp, Homo sapiens
  misc_feature (1)...(584): n = a,t,c or g
tgcattggcacaatctcagctcactgcaacctccgcctcccaggttcgagcgattctcctgcctcagcctccttagtanctganattacaggcgcctgccaccacacctgactaattttttgtgtttttattaaaggcggggtttcaccatgttggtcanactggtcttgaactcctgacctcaantgatctgccctcctcagccttccaaagtgctgggattaccggtgttagtcaccacaaccagccttgttttaacttttttatttcttaaagtaagattttgcactaccacataatgaaatgaaatgttggagttttctgttgggttttttgtttttctttccctaacgttccattaaatagctcttcctcccctcatcngtctccatcaggtgccaatgtaaaattancnagacaatttacnacantaaactttgggnggataaaactantaataattgttttcattcctaacatnnttaaaaaaaggttangancaggnccattaagntacnttgccaaanagttttctttttaaaaaatattgncgggattccctttttttccgnccaanatnaaaa

SEQ ID NO: 19334 - DNA, 85 bp, Homo sapiens
gccccggcctctggctgcgcagcggcgggggtgaggcaggcaggctctggcacggtctcactgccactcacgttagccttctgtc

SEQ ID NO: 19335 - DNA, 750 bp, Homo sapiens
ggtgctctctcagatggactcttgcatgttaagactatgtcttcacatcatggtgcaaatcacatgtacccaatgactccggctttgacacaacaccttaccatcatcatgccatgatggcttccacaaagcattaaacctggtaaccagagattactggtggctccagcgttgttagatgttcatgaaatgtgaccacctctcaatcacctttgagggctaaagagtagcacatcaaaaggactccaaaatcccatacccaactcttaagagatttgtcctggtacttcagaaagaattttcatgagtgttcttaattggctggaaaagcaccagctgacgttttggaagaatctatccatgtgtctgcctccatatgcatctgggcatttcatcttcagtcccctcattagactgtagcattaggatgtgtggagagaggagaaatgatttagcacccagattcacactcctatgcctggaagggggacatctttgaagaagaggaattagggctgtggacactgtcttgaggatgtggacttccttagtgagctccacattacttgatggtaaccacttcaaaaggatcagaatccacgtaatgaaaaaggtccctctagaggatggagctgatgtgaagctgccaatggatgaaaagcctcagaaagcaactcagaggactcaaagcaacggacaacacaagagttgtcttcagcccagtgacacctctgatgtcccctggaagct

SEQ ID NO: 19336 - DNA, 405 bp, Homo sapiens
cccacgcgtccgggaatcagtcttccatgtgacagctttttaaatattttaagacaaaaactgagtcttctaatcttaattgtgttctagcagtagtcattgtaattatagttatttttataatttatttgtttagtgtatatctgtcactctagaatgtaggctccctgagataaaaactataattcttttgatggcagttacattcccaactcttagcacaagatctaggacatagtatgaactcaataaatttttgttgaatgaaagaaaaatgcaaatttataagccttttcagagacctactgaatcaaactctgagagtggagcccagcaatctgttgtaaaagctgtttgagtaatactgttgcactctaagcttgagaaccactgcaatagaactaa

SEQ ID NO: 19337 - DNA, 337 bp, Homo sapiens
ccccaattgagtaaccatattaagcgtatggtaaagtttagagtgtgttttatttactaattacatatgcttcctttatgattcctgccacactatttagtgcagctatttcaatagctaattatttattaagactgctcaagagaaagtttcactcttgaatggaaagagaataaggatgtggtccctaaggaaatgatgccattttaaatttcacaggattaggctgatacattattattattaatctgtaacagataataacatcatatcatcatttttgggacattccaaatctaattcatataattcatattaattattaacaacatccaac

SEQ ID NO: 19338 - DNA, 412 bp, Homo sapiens
  misc_feature (1)...(412): n = a,t,c or g
gtagcattgctgcgcatgtgctgcattgcacagatagtggatttggggcccggttgctggagttgtgtaaccaaggcctgtttgaatgcctggccctaaacctgcactgcttggggggacagcagatggagcttgctgctgttatcaatggccgaattcgtcgtatgtctcgtggggtgaatccctccttggtgagctggctgaccactatgatgggactgaggcttcaggtggtactggagcacatgcctgtaggccctgatgccattctcagatacgttcccagggttggtgatcccccccagccacttcctgaggagccaatggaanttcagggagcagaaagancttcccctgacctctcgggaaaatnctttcccagnnccttggaaacncctnaaaaaaagncttt

SEQ ID NO: 19339 - DNA, 465 bp, Homo sapiens
  misc_feature (1)...(465): n = a,t,c or g
tttgaanncnttgaataccgttatgacatgantacnaatttaatacgactcactatagggaatttggccctcgaggccaagaattcggcacgagcttcaggcaactgtgtattttacactagtcaagtaatcctagatatccgtggtttttcttaagaaagttggctcgtaatatgatttaatattcaaagtagagtcatctacctattagcttgctggcgtggtcctagtttatgcctgtttcagcatgattgttgagtaccctgtttcatccttagcattttcttgattttgttgttaaatgatgtatacccttatttccattgaatctgtgcttccacccccccaactgaagttgtcttccctttgcttggccacccttacagcctcttggatggtgtatcctacagtgtaagcactaaactgaagaggcagtgacctgagcactttggattttgttcattg

SEQ ID NO: 19340 - DNA, 682 bp, Homo sapiens
  misc_feature (1)...(682): n = a,t,c or g
ctagacctttttatcattcgagagcagacagaaggggagtacagctctctggaacatgagagtgcaaggggtgtgattgagtgtttgaagattgtcacacgagccaagtctcagcggattgcaaagttcgcctttgactatgccaccaagaaggggcggggcaaggtcactgctgtccacaaggccaacatcatgaaacttggggatgggttgttcctgcagtgctgtgaggaagttgctgaactgtaccccaaaatcaaatttgagacaatgatcatagacaactgctgcatgcagctggtgcagaatccttaccagtttgatgtgcttgtgatgcccaatctctatgggaacattattgacaatctggctgctggcctggttgggggagctggtgtggtccctgggtgcccggcacccatttgcccaggcagtgggcaggaatatagccaatcccacggccatgctgctgtcggcttccaacatgctgcggcatcttaatcctgagtatcactccagcatgatcgcagatgcggtgaagaaggtgacaaccgacttaatnaagnnggcatcngncacctgcagactaaagggagctagagccctttattcttcaanccttgcanggccacacttcccantaccttcagtgcaaggnaccanggaaaanacctttgggcct

SEQ ID NO: 19341 - DNA, 337 bp, Homo sapiens
gagtggttccaagaaaaccttgagaagtagccttgaggggcccaccatattggacatagaaaaatttcatcgagagtcattcttctacactcacttgataaatttcagtggtaagagatactgctgagcagcatccggcctggcatgtcctaacaccactaacaccgtctagaatgcttccgcccgcctgaccaccccctaccccgtcccttggtgcacccagacggtgactcgtcctgccctctgtggcggtggctgtacgtccctggcctgagctcgctccacagggcgtggtccctacaagggtataaactgaggagcccgggctggccctgag

SEQ ID NO: 19342 - DNA, 264 bp, Homo sapiens
cattttttgaaaggactgccctttgctctatcacctttgcatttttgttaaaaagtagttgtcaatgtatatgtgggtttatttcaggactctgttttgttccattgacctgtttttctctcctgaatgccaataccatatttgtatgtagtgtatgtaattttctaataattcttgaaacagatagtattaatgcgtctctacaaaaaatagaaaaaattagccaggtgtggtggtgcatgcctgtagtcacagttacaccgg

SEQ ID NO: 19343 - DNA, 521 bp, Homo sapiens
ggtgttttggaggtgtgaaaaaagataaaaacccaaaccttcacaatgattgctatgtaggttgatgacattatcactttgtttcaagattattttctttagtgattcataataattgtaagtagttgacccagtcttaaaactgttgtttacattgaataactttactttgaaattcagcaaaaagttttagtaagccctttgaaaatggtatgtccatttatattgtactctctgccattgaacatcatagttccttctcttcagaagcctttcagagaagctaaaatagcagaaggtaaaactgaaaaatagacagtgctacaaagggcacagcctgctaagaaaaatgaatagtttgtgctaacagtaagccagtataattaagataaaacaaaaggttcttgtaattatagtcattaaaattgctattgcatgcatttagaaaccaagacacaaataaaatatacaacagtttgtctttgagcagctgaaacttcagagcttcaaagattgtccct

SEQ ID NO: 19344 - DNA, 515 bp, Homo sapiens
  misc_feature (1)...(515): n = a,t,c or g
aacagctatgacatgattacgaatttaatacgactcactatagggaatttggccctcgaggccaagaattcggcacgaggcaacaattatggtgaacaatgactttattctagcaatagagagagagtcgtttgtggatcaagtgcgagaaattattgaaaaagctgatgaaatgctcagtgaggatgtcagtgtggaaccagagggtgatcagggattggagagtctacaaggaaaggatgactatggcttttcaggttctcagaaattggaaggagagttcaaacaaccaattcctgcgtcttccatgccacagcaaataggcattcctaccagttctttaactcaagtgttcattctgcgggaaagnnnnntatangagtcctgtgccagaaagccgattacgagaatcaaaagttttccccagtgaaataacagatacagntgctgctctacactcanaccctggaatgacttgctcactctgcatnatnccttanctacaacagcctttt

SEQ ID NO: 19345 - DNA, 381 bp, Homo sapiens
  misc_feature (1)...(381): n = a,t,c or g
gggcggagtctccaactgggagagctgcagctgccgagaggaggagaacgctgaggtcggtcggaccaacggacgcgctgaccgctgccaactgcagctcgcgctgcctcctgctcgcgccgtgccactaaggtcactcccgcctccgagagcccagagccgagatggaaacggtccaggagctgatccccctggccaaggagatgatggcccataagcgcaaggggaagatggtgaagctgtacgttctgggcagcgtgctggccctcttcggcgtggtgctcggcctgatggagactgtgtgcagccccttacggccgcagacgtctgcgggaccaggaggcagccgtggcggacttgcagccgncctggancgacaag

SEQ ID NO: 19346 - DNA, 521 bp, Homo sapiens
  misc_feature (1)...(521): n = a,t,c or g
tttgaannncatgagnnnagtaaatcccnttngaatttnctacgactcactatagggaatttggccctcgaggccaagaattcggcacgagattcagtggccagatgtttgcctctttcctcctccccactctacccccacaattcagtgtactgttctttgaatgacatcccctcttgtttttgcctctctttctcctgatgcaatggccaaaatgctggaaatggctgccttaaatgtagggaccattaggatctcgctcaacacagaacccaggccacctgtaataacacagctggctcccagtcctgaaaccctgcctttctgccctgaatggggtgcagagaaccagtccagacacctgaaactgccacccttcttcatctgtaggtgcaggggccctctgtatcaggaagagagcctctctgaaatccactgtcattctgggcttttcctggaccagctctccttacctacccccttctctagcctgcagtttcactcattcattggacatttat

SEQ ID NO: 19347 - DNA, 353 bp, Homo sapiens
ccagacttcgctcgtactcgtgcgcctcgctttgcttttcctccgcaaccatgtctgacaaacccgatatggctgagatcgagaaattcgataagtcgaaactgaagaagacagagacgcaagagaaaaatccactgccttccaaagaaacgattgaacaggagaagcaagcaggcgaatcgtaatgaggcgtgcgccgccaatatgcactgtacattccacaagcattgccttcttattttacttcttttagctgtttaactttgtaagatgcaaagtcgacgcggccgcgaattccagatctatgaatcgtagatactgaaaaaccccgcaagttcacttcaactgtgcat

SEQ ID NO: 19348 - DNA, 522 bp, Homo sapiens
  misc_feature (1)...(522): n = a,t,c or g
ttggaaantcganancgcttgactgattacgaatttaatacgactcactatagggaatttggccctcgaggccaagaattcggcacgaggacaagaaatcctatgagcccctggaagaccctggggtaaagagtgtcactaaaatctacaactactacaagaagtttagctacaaaaccattgtcatgggcgcctccttccgcaacacgggcgagatcaaagcactggccggctgtgacttcctcaccatctcacccaagctcctgggagagctgctgcaggacaacgccaagctggtgcctgtgctctcagccaaggcggcccaagccagtgacctggaaaaaatccacctggatgaagaagtctttccgttggttgcacaacgaggaccagatggctgtggagaagctctctgacgggatccgcaagtttgccgctgatgcnntgaagctggagcggatgctgacagaacgnatgnttaatgcaganaatgggaaagancgnattcctgaggctggactc

SEQ ID NO: 19349 - DNA, 545 bp, Homo sapiens
  misc_feature (1)...(545): n = a,t,c or g
gggagagaaaggtaatgaacaggatacaggttgtggacaaggtttcatgttccaggacagaggcaggagtggggtgcacggcaggtacaggccagatagaagatgcccttgtgcttggtgggacagcctcaggcaggggatatgtgtcactcagtgaccgatcgcccaggttctgtatctgatctatgacacaggtgtacccagtttggcaaatatgtctacaccaatgtttggtgtgcttttctatttgcatctcatacttcaatacacagatttaaaaagtggcagctggatgcaatcacaaggtcaggagttcgggaccaggcctggccaacatgattaaaccctgtctctactaaaaatacaaaaattntccncgggtattggnacncacccgtnnaccccnaanaaannggggaaggcttnggncagggaaanttnnttaacccgggnaaggngnnggntcnatttncccaaaatntggnnaanggnanccaancttgggnnanaaaaccaaaaccctttcttgggaaaaaaaaaaaaaa

SEQ ID NO: 19350 - DNA, 191 bp, Homo sapiens
aattcggcacgagccggcctaggttagatttagagttttcagagttggcttaggcggtagaggctggcctttgaatggaaccctgtctcgctgtcgctctcagcgtttatatttggctcagagccacatctgccaaacttctgcccgatttgaatgaaagtgctgaaattataggcccctcggctgctgaa

SEQ ID NO: 19351 - DNA, 333 bp, Homo sapiens
gctaggttcttttttaataatttctatctcattgatgtttggtggcacattattctcatacttgtgtttaattacatgtgtttttctttactgttttcaggatatttattatggttgatttaaagtgtatttcagataagtctaacatctggatttcctcagatacacgatctattgcttcttttttgtctgtgtatgagctatactaatttcctattttttacatgcgtcataattttgtgttaaaaactagacattcaaatatggatatctagtggcaaattcagaatagttttccaccaaaccaagatgtgctgtttttatttgttgttg

SEQ ID NO: 19352 - DNA, 348 bp, Homo sapiens
gctgagtttaacaaaaaagcacaaaggttttgaggccaggctaatctgagtgtgaatccatgtgacttgagacaaggcatttactctctgagagcgtcaatttccccacgtgtaaaatgatgaggacaacctatcctgcaaagtggttgagaagattaaacagaagattaaagcattactggcattcagtaggaacttaaatggcagttaaattaagtttcttagaatgcttcaggtttcaaaagttattcttgcaaaaatgtaaataggacttgtttttcaccccccttgaacgatgtacaacagaatttaaacaactttttgagatagggtcttactcttttgccc

SEQ ID NO: 19353 - DNA, 319 bp, Homo sapiens
  misc_feature (1)...(319): n = a,t,c or g
gtgtgtgcatgcttgctgaggcatagaaaatatctggaaggatttacaaaaactccttagctttggggaacagaatggacagacagagagaaaacctctttttttcttgttttatgttctttactgtgcattgtttacaatcagcatgttgttgtttttttttttaaaactagtcaanancagcagtgaaaaagggggaaggaaanaacaaggagttcaatctgtaactgtgaacaatcaattganataactcantaccctcaaactanccnccatgttgctttttaaangtttcaaatcncaaaatgaaaaagttact

SEQ ID NO: 19354 - DNA, 413 bp, Homo sapiens
  misc_feature (1)...(413): n = a,t,c or g
ggcaagttcttgggcttgcagggtatagaatttctccccagctgggctctcagctctgggttaacagattcagtgaaactaaaaatttgagtagcacaagaaaataatgatcaatgttattttagtctactccagatatgggagtagaggaaccatttttcatcaatttgcagctagagaagagccagcccgcactgagaccatcaactacatgttcttataataggcattgatagtgagggtggtcagaaggatgtatgagccaaaatgtcagtcagaagaaagatttctctggtgttttgaggtgagaaataatccctgcatgggtgttaggaaggattggaagttggaaattagatttcttattangaatctctttacatttgtgttgcacctcttgccatngtactgtg

SEQ ID NO: 19355 - DNA, 408 bp, Homo sapiens
aatgtccttgtgccaagtacgagatctattgttggaagtctttggtatatgcaaatgaaaggagaggtgcaacaacttagtttaattataaaagttccaaagtttgttttttaaaaacattattcgaggtttctctttaatgcattttgcgtgtttgctgacttgagcatttttgattagttcgtgcatggagatttgtttgagatgagaaaccttaagtttgcacacctgttctgtagaagcttggaaacagtaaaatatataggagcttaaattgtttatttttatgtactactttaaaactaaactgaacattgcagtaatgttaaggacaggtatactttttgcaaacaaatgcataaatgcaaatgtaaagtaaagctgaaattgatctcaaaaaaaaaaaaa

SEQ ID NO: 19356 - DNA, 299 bp, Homo sapiens
gctccaatttgtaaaaaacgcaagattcatcagaagccacgtgcagtcagatcccagctggccggcggtgcagatctggagtccagcctcagggatgcgctactttccattctctgcattgaacattcgttctgtcagcatccgctccagcttcactgcatcagcggcaaacttgcggatcccgtcagagagcttctccacagccatctggtcctcgttgtgcaaccaacggaaagacttctcatccaggtggattttttccaggtcactggcttgggccgccttggctgagagcacag

SEQ ID NO: 19357 - DNA, 519 bp, Homo sapiens
  misc_feature (1)...(519): n = a,t,c or g
tttgaanncccttttatgacatgattacgaatttaatacgactcactatagggaatttggccctcgaggccaagaattcggcacgagcaggagggaccactggaacatgtggtgcttgggaatgcctctcctgttgcattggtccctgaaggcctcagggcaggtatgtggtgtgtgggcgactccacaagacctgcctcccatcctggcagcccagcctgagaccgttgcattgaggcaggcaggagcggcagggtggctgctctccaggagcccaactgccttgagttcctgccccactgggccccctcccctgctgggcaatcctgggaaggtctggaggttcctgtggacctcagggaagccaggggcagctgtcaggcctgaggaagacctgtggagctcctctccagcctcctctttccctcccctctggtctccattctcttcagctccctacatggctggggangaaacacctggtggcanactaagcnnaaggttggatttaactccctc

SEQ ID NO: 19358 - DNA, 513 bp, Homo sapiens
  misc_feature (1)...(513): n = a,t,c or g
attggtgtcanacagatctcttggtatgacatgattacgaatttaatacgactcactatagggaatttggccctcgaggccaagaattcggcacgagatttcttcttcttcttaatacagcctgctgttgaactcctccagtgaactttttagttcggttattttatttttcagcttcagaacttctgttttttatagtttctgtctctttattgatatgattctattcatgcatagttttgctgattttgtttagctgtctttctgagtattctcttgtagtgcactgaactttaatttttttgtcttttctggccatagatttccatttattgttatttctctctagatgtttattttgttcctttaattgggccatgtttccctgtttcttcatgtaccttgttattttttaatgtaatttgtgcatttgacaaaatagccacctcttccagcctttacggactggcttcttacagtgtaataacatgtcagtcagctcagctagagatc

SEQ ID NO: 19359 - DNA, 344 bp, Homo sapiens
ctgagacacagccgggtggtgaagctcctgggcgtcatcatagaggaagggaagtactccctggtgatggagtacatggagaagggcaacctgatgcacgtgctgaaagccgagatgagtactccgctttctgtaaaaggaaggataattttggaaatcattgaaggaatgtgctacttacatggaaaaggcgtgatacacaaggacctgaagcctgaaaatatccttgttgataatgacttccacattaagatcgcagacctcggccttgcctcctttaagatgtggagcaaactgaataatgaagagcacaatgagctgagggaagtggacggcaccgctaa

SEQ ID NO: 19360 - DNA, 412 bp, Homo sapiens
gaaacagtacatcctgcctatgaattctactgaccttaatctataattttttgttactactaggtttgaactgaggtatgattgaaagagatgggagtcagtgagctactgctgcttttgaaaatgatagcttctgtaatatttctttattcatttatttcaatgtttaaaacccaactactttgtagttcgtcaacttcacatggaattcttgagagcaggatcaaatgtcatgcagacttttaccttttctgccagtgaggacaatatggaaagcaaggtaaacggcaatggctgggtgtgggggagggagtcatctattaaaaaataacctcttcatgggaagctatggaattgattatgtgttactatactttattacaaagtccatataaatatgtattaattttca

SEQ ID NO: 19361 - DNA, 384 bp, Homo sapiens
ggaacaattactttgtattcactattgtatcaagcattctggtatctcattttaatactcatagaaactgtaggaaatgtatatattcctcctttttccttaaatatgaagaaaacaagattgaagaataatgagtaacttgtcaaaaattgcacaactaaaagaaatacagctaggatttgtacttgaatctcttttgattacaaagctctctcccactggcttctccaggaagacacagaatgaccagctgcagctctggttatatggtaattgaggaaagaaatggaaaaacaaagtttcattactcttctattcataggcagaagtatcctgcaagtgacattaagacaactagattatctggaagaaacaaaaagctgg

SEQ ID NO: 19362 - DNA, 434 bp, Homo sapiens
ggaaatttgttcatttcctctaaattgtagaatatattggcataaaattatttctaatatttccttattgcttttttaatgtctgtggaatctgggggtaactctgttctttcattcctgaaatcagtaatttgtatattctctcttttttgatgattaatcatcctaatggtttattcgattttattatgtcagaggaacaacttttggctttgttaattttctctattcttattctattgtttattttttccttctacttatttttatttaacgtattccttttttagtttcatgagacggaagcttaaaacactgattttagatctttctttgttaatagaagcatttaaagttgtaaattttcctcttggcacacaaactgtttttcctctgtgctcacaacacaatcaacacagaagatttctgtgacc

SEQ ID NO: 19363 - DNA, 673 bp, Homo sapiens
cccgcagcacagatgcccgcttaccaggagctggtggaggaggcgattgcctatggccggaagctgggcgggtcacaagaggaccagattaaaaatgctattgataaactttttgtgttgtttggagcagaaatactaaagaagattccgggccgagtatccacagaagtagacgcaaggctctcctttgataaagatgcgatggtggccagagccaggcggctcatcgagctctacaaggaagctgggatcagcaaggaccgaattcttataaagctgtcatcaacctgggaaggaattcaggctggaaaggagctcgaggagcagcacggcatccactgcaacatgacgttactcttctccttcgcccaggctgtggcctgtgccgaggcgggtgtgaccctcatctccccatttgttgggcgcatccttgattggcatgtggcaaacaccgacaagaaatcctatgagcccctggaagaccctggggtaaagagtgtcactaaaatctacaactactacaagaagtttagctacaaaaccattgtcatgggcgcctccttccgcaacacgggcgagatcaaagcactggccggctgtgacttcctcaccatctcacccaagctcctgggagagctgctgcaggacaacgccaagctggtgcctgtgctct

SEQ ID NO: 19364 - DNA, 352 bp, Homo sapiens
attaactattactttttttaagtatcactgaattattgttaaagaaaaacatttatatagtacggaggctataaaagagaaaggactaggatacaaggatgtaaggtagaaagtatcttccatcatccaatctttttcttccaaaagtaaccactatcaagtttcttaagcatctttccagaaattttctacacatacacatttatcgatttaacgactcttaaaaactatttctaaaattaatcattgtgattgttctaaaattatctaaaatgtcagctctataggtataaaaataaaatttctaaaatatgggtctcattcacaattatgaaaacatatgatgaagact

SEQ ID NO: 19365 - DNA, 378 bp, Homo sapiens
  misc_feature (1)...(378): n = a,t,c or g
ggtagaatggataaatcgtagcatgtttatacaaggacagtgaatctgaagtacaactacatgggcatggattctcacaagagtaagtttgagtaaaagagggcagacccaaaaagatactacatgatttgttatttaatgttcaaaaatgaaacaaaaactaactttggtgtttggggatacctgtctatagtgttaaaggttgcatgttttctttgtgaaacaaaagcaaggctggncgcagtggctcacagctgtaattccagcactttgggaggccagggcaggcggattacctgaggtcaggagttcaaggccagcctggccaacatggngaaaccccatctctactannaatacnnnaattanctgggcatg

SEQ ID NO: 19366 - DNA, 422 bp, Homo sapiens
gaagtgagtagcttgtgacacaacatatgccagagcctgcagagtagcttgacttcttgaagcgttttcccatttctgcttagtctgtcccatcaacaccactctgctctcttctcccagttcccaggctgtccacatttccagataactccttgaccgggaaactcaaccaaagggggtacttctgcgtgtctctaggccaaaggacaggagtggtgataggtagaaggtaggaactggcatgtaggcagtgagatggtgtaaaggtcacagaggtcgggttggcttggttccgtttttgaaagtttatctctgtggatcacaggtttggatcagagcttctttagctcaaaacaccaaaaagttaggaaaatatcctttgtaggtcagattcttctggcccaagccagtagggagaaaac

SEQ ID NO: 19367 - DNA, 432 bp, Homo sapiens
gcgaggcgcaggggctggaggtggtgctgggggaaaacagaaaagaagacaaagagaggaaatggaacttaactgaagtgaaagagcttcatgagaccttacagagtgtgccagacgttcctgtaaaagaggacaccaacagtgtggtggagaaagcaatggatgaaatcaaatcccaagaattaaacctggaggggcagcgaaaaatttcacctggttcaataaaggactctaaaactgaagcctcaggtaatattgcaattagaaaatctgcaaaagtgatttttgctttagatgaaactgaactgaaatcaaagccagagcacacatggaagaaaaacctttttgaaagaatggaggcaagagcccaagcaatgcagcagaaaataatagataaggaaaatctgaagaaggaactagaaaaaaaggctg

SEQ ID NO: 19368 - DNA, 331 bp, Homo sapiens
gcgagatggacattctgaaatcagagatccttcggaagcggcagctggtggaggacaggaacctgctggtggaaaataaaaaatatttcaagcgtagtgagctcgccaaaaaagaagaggaagcatattttgaaagatgtggctacaagatacagccaaaagaggaggaccagaaaccattaacttcatcgaatccagtgttagaacttgaactggcagaggaaaaattacctatgacgctttctaggcaagaggtcatcagaagattgagagaaagaggagaaccaatcagactatttggagagactgattatgatgcttttcaacgttt

SEQ ID NO: 19369 - DNA, 380 bp, Homo sapiens
  misc_feature (1)...(380): n = a,t,c or g
tttgnatcccttcctatgacatgattacgaatttaatacgactcactatagggaatttggccctcgaggccaagaattcggcacgaggacttactatgttgcccaggctggtcttgaactccttggctcaagcaatcctctcaactgtacttccaaaagtgctgggattacaggtgttagccaccatgcccagccatgtctctgattattattggaaatagtgatgcctacatttcataggattgaaaagggaattgaaggaaaaatgcaaataaagtgatctcatggtttgaatgtttgttccctttgaaattcatgtttaaacttaatccccaatgtgacagtattgacagcacccagtctaactttttttttttttt

SEQ ID NO: 19370 - DNA, 244 bp, Homo sapiens
ttcagagcgtgtggttgagggtggagagtcgatagggggccaaaacccagtcagaccctgactggtggctacatccaccccagaggaaggggtatatttttctaatttccacaaagatgctgtgtggtccagaagtggccctatcaggaccaaaaaggactctaaaaaggcttggtgggactcggccttcctttcctctcacttcacagaggagacatttaagtccagccatggaaggggttga

SEQ ID NO: 19371 - DNA, 353 bp, Homo sapiens
agaaaatcatatggctggcttagagatatgttatatcttgcttcttatgtaggtcttgtattttgatctacataagaagatttgactcagtcattagacttcagcctagaaagtgccttacaaatacttgttaattatgttgtaataagggtaattggagacaaacaatttgtttgtttcttttgaggttaaaaagatagttttagaaagttttagtgtatgatcagttattgacttctttggttcatatgtattcattaacgtgctttgttagtagtcagtaaatgcttggtaatgctgtcaccattttagtctcctgtgttgataaaggggtggttttactatacacttgg

SEQ ID NO: 19372 - DNA, 672 bp, Homo sapiens
cggcctttctgtgttcctggcccgcggccgtcgggtgtgagctgcgccgaccgctctgagggttcgtggcccaccgctccttcgcggtccctgccgccaccgtccacgctcagcgttgtagagaagatggtgggtcggaacagcgccatcgccgccggtgtatgcggggcccttttcattgggtactgcatctacttcgaccgcaaaagacgaagtgaccccaacttcaagaacaggcttcgagaacgaagaaagaaacagaagcttgccaaggagagagctgggctttccaagttacctgaccttaaagatgctgaagctgttcagaagttcttccttgaagaaatacagcttggtgaagagttactagctcaagtatttataggaaggaatggctaatgtaaggtcccagagaaggttaatttacctaatcaaggtcacacggtgaatatgagaagggcgtagaccatctgacaaatgcaattgctgtgtgtggacagccacagcagttactgcaggtcttacagcaaactcttccaccaccagtgttccagatgcttctgactaagctcccaacaattagtcagagaattgtaagtgctcagagcttggctgaagatgatgtggaatgagaaacaaatgtcaacataataaaatctcagttaaaaatat

SEQ ID NO: 19373 - DNA, 533 bp, Homo sapiens
  misc_feature (1)...(533): n = a,t,c or g
gtgntnnattggaacctttgactgattacgaatttaatacgactcctatagggaatttggccctcgaggccaagaattcggcacgagaaatgaaaatgtatgacaacgtatctggttcaagcaaggctatgaggaaacagacattctaatacattgctggtgggaatgcaaactgatacaacctttctgaggagcagtttggcaacatttaacaaaactattggtgcctcgacctgttcacctaacacttcaaggaaacctgccttaaaagatagacttctaggcctgtaatcctagcgcttcggggggccgaggcgggtggatcacctgagatcaggagttcgagaccagcctcggcaacatggtgaaagcctgtctctactaaaaatacagaaatcagctgggcgcagtgatgcatggccgtaatccaaactacttgggaggctgaggcgggagaatcgcttgaaccccaaaggcggaaggtggaaggcngangttgcaatgagccaagatggcaccactgnacttcagct

SEQ ID NO: 19374 - DNA, 463 bp, Homo sapiens
  misc_feature (1)...(463): n = a,t,c or g
ggtaaaaaaaatactcttgacgcatgaaaattaactggtgaggggcctcattgctatttttaaattgtagttttatttttaaatagtctttttttaatcagaggatcagatgcatgactttttttttttaaanggntgcanaccttttacnaggngncccaaaaaaantncaanaggnttttantttnccaaaaagnttgcaaanncacaaatttgnttaaaangttnanacggaaaaaacccccttganacaaactttngcangcaaaattaccccaaaacctttgnaggttngtaaaaatngangnatnanggcccaanancaaaangaccttcccccccttccccccaannaccctnggnaccaaantntgncganagcnctganacacccangatannagnncggggtnntaaaaatngtttnatnaccggaagtcccagtaaagggggaaggaccatt

SEQ ID NO: 19375 - DNA, 365 bp, Homo sapiens
attctttgttaatatacagtctgcctttaagaaataattatagatatgggttttcaactctgcaggtttaaatcatcctcttccaattagaaaatgttattttatatgcttacacataagcacacaactataaactcaggctattttgtcacgtaaatctcactgtctatccatcctgtaatacaacatggtaaagtgcacctccaaaaacctagacaaggcaacaaaactcaaatcccaaaaagctgctgttctagattataaatggggtcagtggtgaaaaagatagacaaggcttcgacttcccagaactacaatctattgcatgtataatgttccctagatataggaagcgtaaatacttt

SEQ ID NO: 19376 - DNA, 458 bp, Homo sapiens
gaccagcttagcaatagcaacggcccaagaggccatttctgagtgttttaaaagcgtgtttttctgtatttgctgtttctatgtatagtgactgtttctaattttattttgtactttgctaaatggcctggtagggagctatgggaatcgtcaagaacagcagttgcctctgcccttctgtgttagttgagagtcatttggttgtatgaacaaatagaaattcaggtcaaaaggaagtctaaaaggaagtggatggacacagggcctgggagattcggcttggaatggtttcaggcaaggctggatccagggcctggtgaggttgtcaggacatgtttccttttacctcctggctcagcattcttctgtgctgattttattctcaggtaggctctgaagcacccctacagctccactagtagattcaaccaacttagcagctccaagggaaataaacc

SEQ ID NO: 19377 - DNA, 951 bp, Homo sapiens
  misc_feature (1)...(951): n = a,t,c or g
ggtctattttaacatttgctaccataaaatatatacaaatctgttataaaaagttaaaactttatcaaaacttatgcacacaaaccgtacatggcaccattcactgttgagagaaatgtagacaaatataaaggtgcagtattaaatcataactgcataaaattaactgttacatactgggtgtactaccgtaatatttcatagccaactaactccctgttactattgtggtgagctcaagtgttgcaagtatccgcttaaaatgttgtgtgacgctagtcatcaccatgtgagtgtttatctctccagctaattgtgttatcacaataaaaattgatctctcatggggcngtgtatagntttcantgtgtatagtgnggaatacngtaagccttgaagtaattantatgggganccactaatgcgcctagngttgctggaagtccccctaacaaggcataataccagtttngaacattncccnnaaaaaatgctccttttggttcaatantntgaatgtcaagngntgtgngttgttcacnaatttcaagaaananttgaaatncagccnncnaggaaagttntctnaaaagaanacnaggtgggaaaccngtggctcaaaccggataacccccngcnccttgggacggccaagaaagggcggaatcncatcgaangtcgggaaattccgaaaaagcaancntgaacccnngttgnnaagaaanccccncnccccaaccntngggttnntgttattttaaaacccncttntnggttgngcccatanccctattgagcccnaantcnngccaaggaaaggcnggaaggcaaggaaaaanccaanngaacnnnggaagnnaaaaggttgtnggtnaacccncnaatnntgccttngntnccccaacctgngggnnnttaagcggaaaccctntnccccnaaaaaatgagaaa

SEQ ID NO: 19378 - DNA, 465 bp, Homo sapiens
gcaagagtcacctttactccagttaccaacaagttcttcatcttcatctgagaccacctcagcctggatttcattttccatatcattatcagcatttcagtcaaagccattcaacaagtctctaggaagttccaaactttccaacattttcctgtcttcttctgagccctccaaatattgcccagttccaaagttgcttccacatttgtgggtatctttacagaagcacttcactctatcagtaccaatttactatattagtccatttctcatgctgctgataaggacatacctgagactgggtaagttataaagaaaggaggtttggtgtactcacagttccacctggctggggaagcctcacaatcacggcagaaggtgaaaggcacaacttacatggcagcagggaaaagagaatttctgcagggaaactcccccttataaaaccctcagatctcatgaaac

SEQ ID NO: 19379 - DNA, 553 bp, Homo sapiens
  misc_feature (1)...(553): n = a,t,c or g
ccctttgangccatcanctatgacatgattacgaatttaatacgactcactatagggaatttggccctcgaggccaagaattcggcacgaggaggttgagaggatctgttgaggccaggagtttgagactagcctgggcaacataatgaaaacccaactctgccaaatttttttttaattagtggagcatggtgttccaggcctgtagtcctagctactcaggagattgaggcaagagcatcgtttgaaccccggagtttgaggctacagtgagctatgggcacgccactgcactccagcctggggcaacagagcaagactgtctcaaaaaaaataaataaataaaataaattcttaagaaggatattttggaaaactccttacatacctaaattctttgnttatcaaatacttggacttagcacattcttctttgaaatggaccaataaacaacaggagcccataagcaaaaagaactcattattttaaaaacagtaactatccttacaggcttttcaaggntctttctggtggaactttctntcacaaggc

SEQ ID NO: 19380 - DNA, 507 bp, Homo sapiens
  misc_feature (1)...(507): n = a,t,c or g
cccnaacagctatgacatgattacgaatttaatacgactcactatagggaatttggccctcgaggccaagaattcggcacgaggcttaggaacttccgctttcagtgtttagcaggttagcggggaaatattagtcccattatttaagctgagatttgcgaggcctacacgttttttttttctcatgtgctgtctctactgtcacactctcatcctgagcagaaaggaggactcaggggtcagatgccaaatgtggttcgttgggctctccttctccccacccccttatgaaagtgtttctttccatctgagccttgtgacagtggccaggtggctagccctctggcctgaggtcgacggcttttcattcttctttgttgacaggaaagccgggcttcctgtgaggccatgaactgattcatcgctggtttctcccactgcctactcacggccagtggggaaccatgactttcanacacgaactcttattgccaacagggctggggg

SEQ ID NO: 19381 - DNA, 252 bp, Homo sapiens
cacattctcacactgtggctggagacccattttttccatcccatgtggaatgagaatcttgagttgcccacagacagacttgacctttgtgccagaactgtccagagctgtgagttttgttactgaattgcctgtccctgagcttggcctgctggagcatgatgctggaggctgtgtgcgggcaggcttgtgctccccttggagaagggctgctacttaacaaggaagtcctggccacaggagtcccctact

SEQ ID NO: 19382 - DNA, 337 bp, Homo sapiens
ggttttcttatacagaatacagcaataacctccaagaggacatttattcagagacctcaggacacttcagagatactctcatgaacttggtccaggggaccagagaggaaggatatacagaccctgcgatggctgctcaggatgcaatggtcctatgggaagcctgtcagcagaagacgggggagcacaaaaccatgctgcaaatgatcctgtgcaacaagagctaccagcagctgcggctggttttccaggaatttcaaaatatttctgggcaagatatggtagatgccattaatgaatgttatgatggatactttcaggagctgctggttgcaat

SEQ ID NO: 19383 - DNA, 531 bp, Homo sapiens
  misc_feature (1)...(531): n = a,t,c or g
tccctttgnnccccnntngaanaccnttngctatgacatgattacgaatttaatacgactcactatagggaatttggccctcgaggccaagaattcggcacgagccgagcggtcgctgaaggacatggaggagtccatcaggaacctggagcaagagatttcttttgactttggccccaacggggagtttgcttacctgtacagccagtgctacgagctcaccaccaacgaatacgtctaccgcctctgccccttcaagcttgtctcgcagaaacccaaactcgggggctctcccaccagccttggcacctggggctcatggattggccccgaccacgacaagttcagtgccatgaagtatgagcaaggcacgggctgctggcagggccccaaccgctccaccaccgtgcgcctcctgtgcgggaaagagaccatggtgaccagcaccacagagcccagtcgctgcgagtacctcatggagctgatgacgccagccgctgcccggagccaccgctgaagcacccaccgaaa

SEQ ID NO: 19384 - DNA, 572 bp, Homo sapiens
  misc_feature (1)...(572): n = a,t,c or g
gcatctttcaaggcttcatttctttcttgtatgtagaaaataggggtaattaatggcatctctttcagaggactatcatcagctcttagtacaatttcagacactaagtgctttaaaaatgtagtggtattggtgaagaaagaccatgagattttttccttgtgagaactgctttctgtgggccattttattataacctcagcttgtgagcatgcccatcagaatgctgttgggcaaggcgtcctgcaggctgggtcagtgttaagtaatagtgaatgccaaggacttgagataggggagagttcagaggggcatccactccccaaaaaaggttctcggactattgccaacccacaaacaacctgctgaattctgggcaagaataaaaatgagtcctctctccgtgctttttccctgcaccttttctggtgaattctctgtgtgagcccacagaaatgggggtctgacaggcctgnttngatctgtttgacccctcagcaaattaccnnnttangtactttgntaaanggggagattcagggacattanctggangcnanggccaacnacaa

SEQ ID NO: 19385 - DNA, 351 bp, Homo sapiens
ggacactagtcgagccaaacagacgctccctgtgatttatgtcaagttgtatatgtatcagctgttccgaagtttagcctatatccattcctttggaatctgccatcgggatattaaaccgcagaacctcttgttggatcctgatactgctgtattaaaactctgtgactttggaagtgcaaagcagctggtccgaggagaacccaatgtttcgtatatctgttctcggtactatagggcaccagagttgatctttggagccactgattatacctctagtatagatgtatggtctgctggctgtgtgttggctgagctgttactaggacaaccaatatttccaggggatag

SEQ ID NO: 19386 - DNA, 377 bp, Homo sapiens
gtgaggtcacgatgtgcctggacaaaaacccttggagcaggaccaggactaggaccgtgcgctgtcctggagccagtgaaaccagacgaaattaagggaacagcagacgaaggaactgccaccgtgccccagaccctggtttgcaaatacagttcgacaaagatcttgccaggaattggcctgggagagtccaaaggactgggctgggggtggggaaatgattttagccagaagacaaatatagaggttgtacccagaaggttaagaggcttaggaaggttaagaactacgttgacatttggctcccaggaccccaggtaaagtgcccttggattgaatagatttctgaactccagaaacatttagaggaatcaata

SEQ ID NO: 19387 - DNA, 483 bp, Homo sapiens
  misc_feature (1)...(483): n = a,t,c or g
ttgganacccntatgacatgattacgaatttaatacgactcactatagggaatttggccctcgaggccaagaattcggcacgagagcgggactttcaacgttgatcagattgtgaagaaaaaagataatgtcaacaagcgtttcctgaatgtccaagaattggcagctgcacaccacgaaaaattgaaagaggcctatgccttgttccagttcttccaggatctagatgatgaggaatcctggatagaggagaagttgatacgagtgagctcccaggactatgggagagatcttcagggggttcagaacttgctgaagaagcacaaacgcctagagggggagctggtggcacatgagcctgccatccagaatgtgctggatatggcaagaagctgaaagacaaggctgctgtggggcaagaggagatccagttgccggctggctcagtttgttgaacactgggaaaaactcaaagagtttggc

SEQ ID NO: 19388 - DNA, 685 bp, Homo sapiens
ggggggagcagcccaagccggccagccctgctgaggaagacaaaatgccgccctacgacgagcagacgcaggccttcatcgatgctgcccaggaggcccgcaacaagttcgaggaggccgagcggtcgctgaaggacatggaggagtccatcaggaacctggagcaagagatttcttttgactttggccccaacggggagtttgcttacctgtacagccagtgctacgagctcaccaccaacgaatacgtctaccgcctctgccccttcaagcttgtctcgcagaaacccaaactcgggggctctcccaccagccttggcacctggggctcatggattggccccgaccacgacaagttcagtgccatgaagtatgagcaaggcacgggctgctggcagggccccaaccgtccacaccgtgcgccttctgtgcgggaaagagaccatggtgaccagcaccacagagcccagtcgctgcgagtacctcatggagctgatgacgccagccgcctgcccggagccaccggctgaagcacccaccgaagacgaccatgacgaagctctagctggatgggcgcagagaacctcaagaaggcatgaagccagcccctgcagtgccgtccacccgcccctctgggcctgcctgtggctctgttgccctcctctgtggcggcaggacctttgtg

SEQ ID NO: 19389 - DNA, 502 bp, Homo sapiens
aacagctatgacatgattacgaatttaatacgactcactatagggaatttggccctcgaggccaagaattcggcacgaggtaaagacaggcttaagaaattataaaagtattaatttggggaactaacaaatgtccatgaaatcttcacaatttatgttcttctgccgtggcttcagccggtccctccgttcaggttccctgacttcccgcaacagttccaggtggttatattcatttaaaagggctaattaaatctcatgcataaattaactgagtgaaaatagactcttgaaggggctgacttctccaaaaactaatttacttactaaactgtatgctgaagtccgaagcccatagaggggatgataagctaaggaaagtataacttgattgaattctcatttgcctatgcctgctaagaaaggtggctatgggtggccttttaatccagagatctgaaatcacaagttaaatcaaggtgattatcactaatacacaaac

SEQ ID NO: 19390 - DNA, 334 bp, Homo sapiens
attttaataaaataactataataaaattttgaaagtgataagtacaaaaatgatatatatcattttttatatatattcctatagcatatagtatatatttctatatatattcttatatatatgctacaggaatgggggggcatacgaaattcgttatgctttaaaaacatttcccgtcagattattttgtttgtttttgagtcagactattttgaaaatgtataggaagccttgaactcaagaagttactgccattagagaaatgtcaaaatatctaaataatctttaatggaaaatactctgggaactcttaacttttaaaataccaggtttc

SEQ ID NO: 19391 - DNA, 509 bp, Homo sapiens
  misc_feature (1)...(509): n = a,t,c or g
gaaaattgtaagtggaaacatgcaaaactttaaagctagttctggctcttgcaccaacaggtaattttctgcatttgttttttaatagattacatcgttatcttaagtcatctgaacctatagagatacatacagggaacacctgctaggagtaaggttaggcaaagaaattcagttgtgtctttctcatgttgatccatctgataaaagaatagctagaatagatagataaagaatagcaatttttgcactataaatctaataatgtgggccaggcatggtggctcacgcctgtaatcccagctgtttgggaggcggaggcgggtggatcacctgaggtcgggagtttgagaacagcctgatcaacatggaaaaaccccatttctactaaaaatacaaaattagccaggcttggtggtgcatgcctgtaatcccagatactggggaggctgagtaagagaatcgcttgaacccgggaggngagtttatggtgancaagatcacccatt

SEQ ID NO: 19392 - DNA, 446 bp, Homo sapiens
  misc_feature (1)...(446): n = a,t,c or g
ctcttgacntgattacgaatttaatacgactcactatagggaatttggccctcgaggccaagaattcggcacgagagctactatgaatacagtttaagattttaaggtttatattgagatactgtggtagtagaacaaaggtaggtacatgtcataatccagattcctatttttccacgtccagggttttatattaaaagaagagaaatttttcatttttgatttttaaaccattagagcagtagctgagcctttcaagtttctcagtcaagaattaggctatgagtannnnnnnttttcttctctgnngtatttttatttttggtcccttagtgacattgcaggaatgctgctgaaatctacaggaagttttttagaatttggcttacaggagagctgtgctgaattttggactagtgcggatgacagcagtgcttccgacgaaa

SEQ ID NO: 19393 - DNA, 341 bp, Homo sapiens
gatgaagatgcacattttacagaagcacacagaaaatgtggccaaatttcactgtccccactgtgacacagtcatagcccgaaaaagtgatttgggtgtccacttgcgaaagcagcattcctatattgagcaaggcaagaaatgccgttactgtgatgctgtgtttcatgagcgctatgccctcatccagcatcagaagtcacacaagaatgagaagcgctttaagtgtgaccagtgtgattacgcttgtagacaggagaggcacatgatcatgcacaagcgcacccacaccggggagaagccttacgcctgcagccactgcgataagaccttccgccaga

SEQ ID NO: 19394 - DNA, 402 bp, Homo sapiens
tgacctgattacgaatttaatacgactcactatagggaatttggccctcgaggccaagaattcggcacgagaggcctggtggtacatgtctgtaatcccagctccttgggagcctgaggcaggagaatcacttgaatccagaaggcggaggttgtggtgagccgagatcgcaccattgcactccagcctgggcaacaagagcgaaactctgtctcaaaaagaaaaaaaaggaaatagttttataattttacattctcaccagaagtttatgagagttccaattcctccacattaatgctaacagttggtgtgttcggttttgtgaattttagccattctcagggacgtgtagccattcttacaggtatctccttgttttagttagcgtttctctgttgagta

SEQ ID NO: 19395 - DNA, 348 bp, Homo sapiens
  misc_feature (1)...(348): n = a,t,c or g
caaacatcacttgtggatgacctacgaagcgattatcactggattctttcctttctttctcattgccacagtaatccagctcttctaccggggtaaaatttggaacattctcctcttcttgttaactgaccagctagtaggtctcataaaatcatcttttgccagctgccttagaggaaatatcgtcatggtcttcatgtctctctactcagtgttatacatgtcgagtttacttcccgccaagatgtttgcaattgcaacaataaacaaagctgggtggggcacatcaggaaggaaaaccattgctgcaatttcataggactcattccagaatcagnttggctacan

SEQ ID NO: 19396 - DNA, 392 bp, Homo sapiens
ggaatttgttgtgagagaagatttaatgggcctggcaataggaacacatggtagtaacatccagcaagctaggaaggttcctggagttaccgccattgagctagatgaagatactggaacattcagaatctacggagagagtgctgatgctgtaaaaaaggctagaggtttcttggaatttgtggaggattttattcaggttcctaggaatctcgttggaaaagtaattggaaaaaatggcaaagttattcaagaaatatgtggacaaatctggtgtgggtcgagtgagaattgaaggggacaatgaaaataaattacccagagaagacggtatggttccatttgtatttgttggcactaaagaaagcattggaaatgtgcaggttcttcta

SEQ ID NO: 19397 - DNA, 453 bp, Homo sapiens
tatgacatgattacgaatttaataccgactcactatagggaatttggccctcgaggccaagaattcggcacgagccggccttaatcggctcctaatgcaagatgggggctgtcagatgatgacaccttcaagttacagaggtgttttggtttgtggtttgtgtgttttttcggagatgggggggatctcactgtgttggcaggctggggtgtaatggctgttcacaggcacagtcgtaccatgctgcagccctgaactcctgggctcaagggatcctcccgcctcagcctcctgagtagctgggaccacaggcgcatgcctggcagcaaattgcagaggtttttgatggactgcaagtcttagcttagagtccctgatctgggaggtcaggctgagtcataacttttcttaacagaacagccctgccccactcctgtgccccatgcttctttt

SEQ ID NO: 19398 - DNA, 315 bp, Homo sapiens
gattgcttgaggccaggagttcaaggctgcagtgagctatatgatcaagccactgcactccagcctgagtgagagagcaagaccctgtctccaaaaataaggtagtccaaatgtttaaaatcagtgagtttctctcagtaccaggcttcatctagttcatttctgtgacaaggataggatttataagcaattgcaatgtttaacgtaaaacgtattcttgaaattgaattaagtttaaggctgggtgcagtggctcatgcctgtaatcccagcactttgggaggccaaggtgggtggatcacctgaggtcaggag

SEQ ID NO: 19399 - DNA, 422 bp, Homo sapiens
gctttatctttgctgctcattctcctctgttctcttcaagatccagttgaaaagtcacggcctcagctgctttacactcctgcagaagcagctcccctgccccaccttatccacacttctcttgcagcacctcttccattgcatcttaacaatttgtgtagatctcagttccctctatgcccgggccctgcccacccccaaccaccagcacaccaaatgtgagcaggcaacctaatgattggcccaggacctagacttttatccagcttcatcactgagtgggcttccaatatcactttgcatgaggaacggagaaatggaagagaaatcgtctgcatgtctaataagatgttctctacaagtggagaaaattccccttcagcattacaggaagtttattttctgattttcaattctagctc

SEQ ID NO: 19400 - DNA, 321 bp, Homo sapiens
gcagaccaggcatagtggctcacacctgtaatcctagcacttttggaggctgagatgggagtttagcttgaacccaggagtttgagaccagcctgggcaacattgtgagaccctgtctctaagaaaaatgaaaacataaaaattagcagggtgtgattgtgcgtgcttgtagtctcagttacttgtgaattgaggtgggagggttgcttgagcccaggaggtcaagactgcagtgagcaatgattgcaccactgcacttccagcctgggcgacagagtgaaccctgagtcatcatcctataattctttatttagaggctgc

SEQ ID NO: 19401 - DNA, 585 bp, Homo sapiens
  misc_feature (1)...(585): n = a,t,c or g
gggctggatggacttagtctccttcccttggcactggcagcggacatccctgtacggtatgaaagcagtgacactgacaatgcaaaggtggagcctgttggaagaaaagagaccaggtaagtgagggactcagtctagggcttgagcagaggagaaaaagttgctgttttatgggtgcctctggggtcacttggaagtttagatccagctctctgtttatcacagggattagcccaactccacacaaagctagtgtgaggctactttcctcttcctttttctctgcaaaataaacccagtggtgttagtcttaatccccatagagaaatacagaaattaatgaaaatcagaagtcagctatgaggcagccaaagctttagaataacagcttgacttttcagtttccaggtttttttcttaaatgatgtcagaagtctccttaattatttttctataattcattcataatcactgaacattgcctgggctacngtgagttgattccctggatgtgggtcttnccncaaggaaccccggggaatgtctgtccganngncccccncatntcnaatggntanacagccc

SEQ ID NO: 19402 - DNA, 512 bp, Homo sapiens
  misc_feature (1)...(512): n = a,t,c or g
tttgaatcccttntctgaatccatcagctatgacatgattacgaatttaatacgactcactatagggaatttggccctcgaggccaagaattcggcacgagttagtaaatgagtatctacagattgaactaaaaattaaaaactgaagtctatactgagctgaagaaattgtattcagtaattttcacaattcttgtgggttttcactgtaacttaaggataaaagaattggctactttggctgcgtgtggtggctcacacctgtaattccagcactttgagaggccaacgtgggaggattgcttgagcccaggagtttgagaccagcctgggcaacatggtgagactccatctctactaaaaatacaaaaattagctgggtgtgatggtacgcttgtagtcccagctaagctactgggggtggcagtggtggggttctgacgtcgggggtcgcttaagcttgggaggtggaggttgtagtgagccagatcatgccactgcactccagcctg

SEQ ID NO: 19403 - DNA, 309 bp, Homo sapiens
acataatagccaggtactagtttctcactcccctttttctcttcggtaaagtctgttttcatttttaaacactcaacaaagatgtcttctttcttcagttcctctgagataagttcttccttctctaagcttcctcagcactttctgaaatctattgtaaaatgtgtcatttgcattatactttgcactgagttaccagaaattgaaggtagggatcttgccttattttggtctctccactgtataatacacagcagattctcagtatttgattttgcctaacatcctccttgggtgattaacagagaa

SEQ ID NO: 19404 - DNA, 413 bp, Homo sapiens
cgctgctcacgtaccttcatcacttttagtgatgatgcaactttcgaggaatggttcccccaagggcggcccccaaaagtccctgttcgtgaggtctgtccagtgacccatcgtccagccctataccgggaccctgttacagacataccctatgccactgctcgagccttcaagatcattcgtgaggcttacaagaagtacattactgcccatggactgccgcccactgcctcagccctgggccccggcccgccacctcctgagcccctccctggctctgggccccgagccttgcgccagaaaattgtcattaaatgaagagatgtctagtcctcagaaacttctttcctgcctgattggggctcttgctgttccgtttcttctccctgcttctcccctttgtcatctctgat

SEQ ID NO: 19405 - DNA, 354 bp, Homo sapiens
  misc_feature (1)...(354): n = a,t,c or g
ggaagggaagagcaccgacgaggtagacagcaagcgcctcaccgtgcagaccaagttcatggagttgctggagcccttgaacgagaggaagcataacctgctggcctccaaagagatccatcagttcaacagggatgtggaggacgagatcttgtgggttggagagaggatgcctttggcaacttncacggatcatggccacaacctncagactgtgcagctgttnatatngaattatcagaccctncngattgaantncaggggcacnagcttcgcattgacgacatctttgttagtaccaagacatngtcacttgacagtancngncttcantgttgatgncnttngngata

SEQ ID NO: 19406 - DNA, 527 bp, Homo sapiens
  misc_feature (1)...(527): n = a,t,c or g
aaaatttgaanccttgatatcactgattacgaatttaatacgactcactatagggaatttggccctcgaggccaagaattcggcacgagaaacacttgcaccgttcctatttacctaaaaacatgttttttaaatgaatctgtttctttaataagtattcacttaagtaggtcatactgtaacgttcttggtgataaaaaatcttttatcaggataaaagaaatcttatttttattcccacttttagccatgtttgagttggtccttgtaattgttggtttcaacaaaacactaagtcaaaaaatcaatgtttgtgtttatttttgtttaatacatgagaaaaaagtccattgatctttttgcagttatgatacataaatactgtatttttcacttatgcgaaacttaatttttgagggtttcctttttgnttcatttctctgnttcacatttttcaaacatctgtaccatggttagtggttagagtagcagtggctgcacttttcttcacaatgtgagaaaaagaa

SEQ ID NO: 19407 - DNA, 343 bp, Homo sapiens
gggctggcctcgatttaaagagacagaagctgtcggggtcctggaagacggtccccaataccctccccccaagtccttgggaccacttgggtccccagagctggggagatggtttgtggcggctttgcctgctccaagaatgcgctttgcgctctcaacgtggtctacatgctggtgagcttgttgctcattggagtggctgcttggggcaagggcctgggtctggtgtccagcatccacatcatcggcggagtcattgctgtgggagtcttccttctccttattgcagtggctggactggtgggtgctgtcaaccaccaccaagtcctgctgttcttttaca

SEQ ID NO: 19408 - DNA, 78 bp, Homo sapiens
gcactatgtcaatgctgatgttgttggctataaccagctcttccatttgaaaaagaatgtatactacctgaaggaaat

SEQ ID NO: 19409 - DNA, 464 bp, Homo sapiens
gagcaagatggccaccaccaagcgcgtcttgtacgtgggtggactggcagaggaagtggacgacaaagttcttcatgctgcgttcattccttttggagacatcacagatattcagattcctctggattatgaaacagaaaagcaccgaggatttgcttttgttgaatttgagttggcagaggatgctgcagcagctatcgacaacatgaatgaatctgagctttttggacgtacaattcgtgtcaatttggccaaaccaatgagaattaaggaaggctcttccaggccagtttggtcagatgatgactggttgaagaagttttctgggaagacgcttgaagagaataaagaggaagaagggtcagagcctcccaaagcagagacccaggagggagagcccattgctaaaaaggcccgctcaaatcctcaggtgtacatggacatcaagattgggaacaagccgg

SEQ ID NO: 19410 - DNA, 330 bp, Homo sapiens
  misc_feature (1)...(330): n = a,t,c or g
gatcttccagccatcattagggctgtaggatttcagtttgctatggcaatacagagataacttctgcagtaccaggaaggaaattcatgctaatttacagatttcatgttgcccaatcaagaagttgagttatcccatttcttttgaccaatgtatatgcaaatgacactaaagtattaccacaaaaaaaacaaagtacttactttgtcatagagactagactaacatatgaaatagactgaggtgagcgttgtttttttgtttgtttgtttgtttgtttgatggagtttcaatcttgtttccccgggctggagtgcaatgacncgatct

SEQ ID NO: 19411 - DNA, 458 bp, Homo sapiens
cgcctgcaggtaccggtccggaattcccgggcggagcgggtgtgaggcggctggaccgcgctgcaggcatccgcagggcgcggcaagatggaggtgacgggggtgtcggcacccacggtgaccgttttcatcagcagctccctcaacaccttccgctccgagaagcgatacagccgcagcctcaccatcgctgagttcaagtgtaaactggagttgctggtgggcagccctgcttcctgcatggaactggagctgtatggagttgacgacaagttctacagcaagctggatcaagaggatgcgctcctgggctcctaccctgtagatgacggctgccgcatccacgtcattgaccacagtggcgcccgccttggtgagtatgaggacgtgtcccgggtggagaagtacacgatctcacaagaagcctacgaccagaggcaagacacggtccgctcttt

SEQ ID NO: 19412 - DNA, 521 bp, Homo sapiens
  misc_feature (1)...(521): n = a,t,c or g
aatncctttnaaaaatttgaatccntaacagctatgacatgattacgaatttaatacgactcactatagggaatttggccctcgaggccaagaattcggcacgagcggcacgagtaagagtcaaacgctgtggcaaactcaatgccccagagaatggttacatgaagtgctccagcgacggtgataattatggagccacctgagttctcctgcatcggcggctatgagctccagggtagccctgcccgagtatgtcaatccaacctggcttggtctggcacggagcccacctgtgcagccatgaacgtcaatgtgggtgtcagaacggcagctgcacttctggatcagttttatgagaaaaggagactcctcattgtgtccacacccacagcccgaaacctcctttaccggctccagctaggaatgctgcagcaagcacagtgtggccttgatcttcgacacatcaccgtggtggagctggtgggtgtgttcccgactctcattgcaggataggagcaaaa

SEQ ID NO: 19413 - DNA, 346 bp, Homo sapiens
aaacgcaggcgatcccccacctctagctgtctgacaccagcccttctccagcccaaagtggctttcactgcagccaggcttttcctctcagggtaaaattgaactgcagataatcgatggctgacgcatctgtggctagcagctgcttcacggagggctgaccaggagagacccagaggctttctgatctgtcgggagccaagagctgagccagggcccccgcctgcagccacagggacctcgagtgcactcagcggtcttggtgcaccatagccacctggacatcgatacgttaatgactggtaaacatgaacaaaagccgagtcccacactccaggacattcaa

SEQ ID NO: 19414 - DNA, 445 bp, Homo sapiens
  misc_feature (1)...(445): n = a,t,c or g
gagtaggtcccctgcagctggaggatgtagatgctgctttcacagatacagactgtgtggtgcggtttgcaggtggtcagcagtggggtggtgtcttctatgctgagataaaaagctcttgtgctaaagtgcaaacccgcaagggcagtctcctgcacctgacactgcccaaaaaggtgcctatgctcacgtggccctccctcctgaagaaacctctagggacccaggagctggtgccggggctgcggtgccaggagaatgggcaggaactgtctcccattgccctggagccaggccctgagccccaccgggctaagcaggaggcccggaaccagaagcgggcccagggccgtggtgaggtaggcgcaggggctggccccggggccnaggcagggcccagcgccaanaaggcttgtgcattttgcaaagggccanaagggacggg

SEQ ID NO: 19415 - DNA, 325 bp, Homo sapiens
gccccatatgtctggcatatggactttcaataaatatctgttgaatgaattaactaaaatgattaaaatacaacttaaatgtagttcaaaagataaggcttcctgacagaatagcaaaatttgacagtcaccccaaaccctgggctttgtgaaatcccaaattgctgtggaacctggctgaagaaggaggacttcgtaaggagagatggagaaagaagtttaactggagcttaaaaataaaatggctcaggagccctcatatacaaccaaaacagactcagtttttcagccccactttctgcctcatcaccaaagcaagatggga

SEQ ID NO: 19416 - DNA, 512 bp, Homo sapiens
  misc_feature (1)...(512): n = a,t,c or g
gtgntnnnnatntgataccgttatgactgantacgaatttaatacgactcactatagggaatttggccctcgaggccaagaattcggcacgaggcaactgattctagtggaacaaatgaaaaagaaacagtcaagcacacaatagtgcaaagaacgttcctttgtagatccgcaacttaaggattttgttcctcataaatggcatagttgaaagagcttatacactgcttacccagccaaatgctttgctttgaagtattgggttctgtgaaaatattgagcattgtacttaccttatctaggctgtgaaactgtcctacataccagagaatcataaaaacaaaaacctcactggcagcaagctgccgaataacaacagagtctagaggacatatttgtgggctgcacagatattttaggaatttcagaaattagaacaggagccaaaatgatttacattggcgttggcactgattcctttaaatggnctgggaaaggggggtgggaaaaag

SEQ ID NO: 19417 - DNA, 353 bp, Homo sapiens
  misc_feature (1)...(353): n = a,t,c or g
ggtagtttttcctacttaaatttctaatagatgacttctaagagaatgattaggtaataaatgttttttgtagcctacctgtaaaacatactgaaagcatttggggaacagaaagtgtctctctcttagaaagattctttctaagcattttgatagttgtatgaaccccttagcatggaagagcttttgtggtcctttggcttggtttagtattccctgttgccctgcaaaacattaagtgtgtattatatacattaagtatgtgtatatatatgacttgtcctaagttatattagtattagagtgtgtgtgtgtgtatatatttatatatatgacttgcctaagntatatta

SEQ ID NO: 19418 - DNA, 331 bp, Homo sapiens
gcatagtaggtagtctctaggcctataatcccaaacactgtaagcctataaccctatacctataacccagaaaaatagcaagcagagagtaggtaaaatcaagtagtaattatagtatcctctaacatggggcttatatatacaaaatatgtccaaactctacccacttaaataggcattcatgggaattacatagcatagcattttccaaatggtattcattaggaatattagcaggtcctactaacattacctattaatatcccagaagaccacattttgagaaacaaagagcactcttggttccatacagcatgaaatatgcattccc

SEQ ID NO: 19419 - DNA, 688 bp, Homo sapiens
gacgaatctaatacgactcactatagggaatttggccctcgaggccaagaattcggcacgagccactgcgcagaccagacttcgctcgtactcgtgcgcctcgcttcgcttttcctccgcaaccatgtctgacaaacccgatatggctgagatcgagaaattcgataagtcgaaactgaagaagacagagacgcaagagaaaaatccactgccttccaaagaaacgattgaacaggagaagcaagcaggcgaatcgtaatgaggcgtgcgccgccaatatgcactgtacattccacaagcattgccttcttattttacttcttttagctgtttaactttgtaagatgcaaagaggttggatcaagtttaaatgactgtgctgcccctttcacatcaaagaactactgacaacgaaggccgcgcctgcctttcccatctgtctatctatctggctggcagggaaggaaagaacttgcatgttggtgaaggaagaagtggggtggaagaagtggggtgggacgacagtgaaatctagagtaaaaccaagctggcccaaggtgtcctgcaggctgtaatgcagtttaatcagagtgccatttttttttttgttcaaatgattttaattattggaatgcacaatttttttaatatgcaaataaaaagtttaaaaacttaaaaaaaaaaaaaa

SEQ ID NO: 19420 - DNA, 413 bp, Homo sapiens
gaggaggactaggaggaggaggacggcgacgaccagaaggggcccaagagagggggcgagcgaccgagcgccgcgacgcggaagtgagtgtggtgtaaaggaattcattagccatggatgtattcatgaaaggactttcaaaggccaaggagggagttgtggctgctgctgagaaaaccaaacagggtgtggcagaagcagcaggaaagacaaaagagggtgttctctatgtaggctccaaaaccaaggagggagtggtgcatggtgtggcaacagtggctgagaagaccaaagagcaagtgacaaatgttggaggagcagtggtgacgggtgtgacagcagtagcccagaagacagtggagggagcagggagcattgcagcagccactggctttgtcaaaaaggaccagttg

SEQ ID NO: 19421 - DNA, 391 bp, Homo sapiens
gggttaaagctcatagctgtcagctctgaatgaggaggggagaagcccctgggtctttctttgaaaggaatccgctgcttgagggctgcctccctcatggtgtgcgtgtcgtttctcttcctgacgcatcttgtgatatcagaggtaactatgcaaagcatccaggcggttctgaatgtgaagcactacacgcagcagagtcccggtgccctctgtccccactgccggcccatgttctctctccggaggtcaccaaggaatgcacaggtttcgactaccagaaaggggagtccttgggttctttcaaaaaattcgtgaggagagctgtctacagtggaataaggggtctccctggggaatgcaggccaagtccttttattttaacatgatg

SEQ ID NO: 19422 - DNA, 319 bp, Homo sapiens
gaaaatcaaatgatgacctaaatttcccttaatttgcaaatacagtagtaattaaggtacatctctaaagtggagcacttacaccaggctctaagattcactttgaggtggaacttaaaaccagtgtactgtatgtatgcattggtaatagctacttttgcttcatagcttcataccaacaaaatatatttattagaatagtatgaaagtactggaggagctgaaagaaaaacacccaaggctgggcgtggtggcacacgcctgtaatcccagcactttgggaggccgaggcaggtggatcacctgaggttgggagttg

SEQ ID NO: 19423 - DNA, 202 bp, Homo sapiens
  misc_feature (1)...(202): n = a,t,c or g
cagaatgctgccacagatgtgagacgggtgtggctttcttcagtggtggatcactttcattcatctttaggcgacaaaggttggtcgacgcggccgcgaattccagatctatgaatcgtagatactgaaaaaccccgcaagttcacttcaactgtgcatcgtgcaccatctcaatttctttcatttatacatcgntttgcct

SEQ ID NO: 19424 - DNA, 414 bp, Homo sapiens
  misc_feature (1)...(414): n = a,t,c or g
ggtttttgaatgagatttacatttaagttggtggactttgagtgaagccagctgccccataggatgtgagtgggccttgtcaatcagttgaaggtctgactagaacaaaatgctggacccccaggcaagagaggattctccagcactctgctttcaaactccagctgcagctccttcctgagtctccagcttgctggccaccccaggcagtttgtggactcatgaagcctttgcagccagttccttggagtgaatctctttctctacttttacacatcccgttggtctacttctttggagacccctggcaatcccccatccagccactccacagtgattcccaccgttccgcacccctccggtgcactgaggacagcgaggagctgngcttatgcgtgagccanaccaataccg

SEQ ID NO: 19425 - DNA, 387 bp, Homo sapiens
ggacgcgccgagcttcgccgctcttccagcggctccgctgccagagctagcccgagcccggttctggggcgaaaatgcctgcccttcacatcgaagatttgccagagaaggaaaaactgaaaatggaagttgagcagcttcgcaaagaagtgaagttgcagagacaacaagtgtctaaatgttctgaagaaataaagaactatattgaagaacgttctggagaggatcctctagtaaagggaattccagaagacaagaacccctttaaagaaaaaggcagctgtgttatttcataaataacttgggagaaactgcatcctaagtggaagaactagtttgttttagttttcccagataaaaccaacatgctttttaaggaaggaagaa

SEQ ID NO: 19426 - DNA, 289 bp, Homo sapiens
gattttcagcctcatttatgatttaagtacatactaataagccaatagcattcttaataaccattttctttggttattcaattcaggctatgttttgtgaatccctctcacatacacagagagacacacagacacacacacacataccactgttacataacacagtgggtatttctcttctcaaattatacagggttttctcatactgactcttattgttctggccaagtagacttagtgtttgaaataccatctttggatacctgaagcctgaggtaattgattcttg

SEQ ID NO: 19427 - DNA, 470 bp, Homo sapiens
  misc_feature (1)...(470): n = a,t,c or g
acnnctatnactgattacgaatttaatacgactcactatagggaatttggccctcgaggccaagaattcggcacgagcatgaaaggactttcaaaggccaaggagggagttgtggctgctgctgagaaaaccaaacagggtgtggcagaagcagcaggaaagacaaaagagggtgttctctatgtaggctccaaaaccaaggagggagtggtgcatggtgtggcaacagtggctgagaagaccaaagagcaagtgacaaatgttggaggagcagtggtgacgggtgtgacagcagtagcccagaagacagtggagggagcagggagcattgcagcagccactggctttgtcaaaaaggaccagttgggcaagaatgaagaaggagccccacaggaaggaattctggaagatatgcctgtggatcctgcaatgaggcttatgaaatgccttctgaggaagggtatcaagac

SEQ ID NO: 19428 - DNA, 337 bp, Homo sapiens
gcaaaggacctttacaaaagttatgcagagaaactttctatccatcgaaggaatcccttctacagcatcctgggcaggcagcgtctgcctctttcctcaggtggaggtgacttgtttaattggcaaaagcccctgtactggagttcaaagggaagatagttttatgtggattccccattttaaagctatacattgtttttctctcatcataaaagagcaattgtacactgggcatggtggctcacgcctgtaatcccagcactttgggaggccgaggtggatcacctgaggtcaggagtttgacaccggcctggccaacatggtgaaacccgtctct

SEQ ID NO: 19429 - DNA, 506 bp, Homo sapiens
ccacagctatgacatgattacgaatttaatacgactcactatagggaatttggccctcgaggccaagaattcggcacgagggaggatcaagagacagaacagcggcagaagcaggaagcagtgcaggcacacatggcagtgcccaggacatagagtccccttcaggggcccaggagtcttgtccacatgtattaatgtgtactcctgggccaggactctgtctcagtgagcatcaacgactatttgctagccagagaactggtggctatgcacatgttctgtccttttctaacagctctgggaataaaatcattgatggcagagctattggggttctctgctcatgaggacagttaagtttagacactatctcttctgtaagtctggaaagcaacttcggtcttctgtatgctttggtcttccgcatgggttagggaaagggaaatggctttgaaacattaaaaagcacaggccgggggccggtggctcatgcctgtaatcccaca

SEQ ID NO: 19430 - DNA, 393 bp, Homo sapiens
gctggaagagaaaggctatgccactggactcattggaaaatggcatctgggtctcaactgtgagtcagccagtgatcattgccaccaccctctccatcatggctttgaccatttctacggaatgcctttctccttgatgggtgattgcgcccgctgggaactctcagagaagcgtgtcaacctggaacaaaaactcaacttcctcttccaagtcctggccttggttgccctcacactggtagcagggaagctcacacacctgatacccgtctcgtggatgccggtcatctggtcagccctttcggccgtcctcctcctcgcaagctcctattttgtgggtgctctgattgtccatgccgattgctttctgatgagaaaccacaccatcacgga

SEQ ID NO: 19431 - DNA, 342 bp, Homo sapiens
ggccatgtccccaccctaagccagcaaaatgcgaaatctctgttctggcccagaatggcacaagggaggagtctttgcagagttccacgccaccccccagcttactgcggccttcacctgctctgtctaggattgccagctgtggttccaagtgaggagcaaacccattttatgagccatgttcctgcggagacctgatgggccaggccttctgtggctttgaaaacccctaagctcttcacctcctgggcctaggccttcttgtctgactcaacagcaagaaaaatgaacttgccaaaattggcagtaggtgtccttgacacaggggcttctgatggcatc

SEQ ID NO: 19432 - DNA, 338 bp, Homo sapiens
gcggcacgagaaaaaagaaaagaaaagaaagaaacgagatctcactatgttgcccaggctggtctcaaagtcctggcctcaagcagtcctcccgcctcagcccccaaaagtgctgagattacaggtgtgagccaccatgccgggctgacccccatcttgtaaatgcaagtttctaccctttgaccgacatctgtctgtttttctcccctcctagcccccagcaaccacggttctaattctactttgtttccatgagttttgtggcaggagaataggggattagaggaacaggggttcagcaggtgcagccagttcctacaggcaggagagcagcaggt

SEQ ID NO: 19433 - DNA, 321 bp, Homo sapiens
cgtctttgtcttttctgtagtgcttatcataataggtgaacctattgctgctctgatagtgagggggatttggggggagcctgtgtcactctagcactatgtctccccacagtcattgactcacataccctttgcttgccccttcgtgcacctaggacctgagactatgtatgtataagaaggaaggaggagaacttggctctgagagactatgaacagagtcattgctgaaatgtaaatatcaaagattgaagggaaagatgtgagagtgaagccagctgtctagcttccagccgtagaatgatcataagagctactacc

SEQ ID NO: 19434 - DNA, 384 bp, Homo sapiens
gtcgcgggggccctgagaaagtccggagactacagcttcgctgggtggatgtggcccatcttgtcctgtatcacctcagtgtttgctgtaagaagaaatactttgattttgatcgtgagatcctccccttcacttctgagaattgggacagtttgctcctgggggagggagagagattaagaagaggaaatgtttgtttggtctccatgctcggatgcctccccctgtggagccccctactggagatggagcactcaccagcttcccttcagggcagggccctgggggaggggtctcacgtcccctggggaagcgccggaggccggagccagagccccaaagtggagtgaggatagggggagtggaagcagtgtttggttctta

SEQ ID NO: 19435 - DNA, 695 bp, Homo sapiens
tcagctatgacatgattacgaatttaatacgactcactatagggaatttggccctcgaggccaagaattcggcacgaggagagggggcgagcgaccgagcgccgcgacgcggaagtgaggtgcgtgcgggctgcagcgcagaccccggcccggcccctccgagagcgtcctgggcgctccctcacgccttgccttcaagccttctgcctttccaccctcgtgagcggagaactgggagtggccattcgacgacagtgtggtgtaaaggaattcattagccatggatgtattcatgaaaggactttcaaaggccaaggagggagttgtggctgctgctgagaaaaccaaacagggtgtggcagaagcagcaggaaagacaaaagagggtgttctctatgtaggctccaaaaccaaggagggagtggtgcatggtgtggcaacagtggctgagaagaccaaagagcaagtgacaaatgttggaggagcagtggtgacgggtgtgacagcagtagcccagaagacagtggagggagcagggagcattgcagcagccactggctttgtcaaaaaggaccagttgggcaagaatgaagaaggagccccacaggaaggaattctggaagatatgcctgtggatcctgacaatgaggcttatgaaatgccttctgaaggaaaggtatcaagactacgaacct

SEQ ID NO: 19436 - DNA, 386 bp, Homo sapiens
  misc_feature (1)...(386): n = a,t,c or g
aattcggcacgagagactgcatagggctcggcgtggggtagagagggccagtgtggtgcgattttgtgggaggagttgagattggatgcgttgggaagtgtcagttttgagagtcctgaatgccacgccagttttttgaactcttgtcaataagaaatggagagagtggggtcacaggatgtaacactgtagaggaggaagtgactgtcggcaagtgtggagagaggagccccagcttctgacccagggcccatagagagtccgtaaggggccgtagaagcctggttagaacatgtctaggaagaggctggagatgggctttcttgggcaaggaggcaaaaacaaaacaaaataaaaaacaaccaanaataaaaccagggctgatt

SEQ ID NO: 19437 - DNA, 405 bp, Homo sapiens
agctatgacatgattacgaatttaatacgactcactatagggaatttggccctcgaggccaagaattcggcacgaggtcaaaatttgggttcttgaaaaaaacaagatgaacacatagattgtcttagaaaacaaagctcttacattattagttaaatacattttttttcactgggatcatgtttgaaaactaaagttgtgggataacttgtatcttttgaggagcttaacattcctaggccagggaaataacaagcaaagaaataatttgattttatattttaaagttcatgcctgtaattccagcactttgggaggccaaagctgggggatcacttgagcccaggagttctagaccagcctgggcaacatagtgagactccatctctccaaaaaaaaaaaaaa

SEQ ID NO: 19438 - DNA, 503 bp, Homo sapiens
  misc_feature (1)...(503): n = a,t,c or g
ggatggggacaagaggactctgctcctgaatggcagggatgaggagcagttcaccacaagctgagcaggacagccagcagcaggatgggctgagctagcctccagctttggggacttccgctccctggatatgtccagtcatcctgccctgcagcacgcggccttgtctgggagcagctgggcttggcctggagaggaaggccctgcctgcctcttggcctcacgggaccgtcagcatgggctttgtcttggactctagtccttggctggactgtagaaggtgaaaggcgagtcaccctcctcacagacctctgcttggagtattaaggatgactgctgtgaaaatgganaacagtttcatcaggaccaaaaacctnactgggccttttcaaanaacctgnngacctnactgncagggccttttttgatgaccccnngnntgggngcntcangnttcttgaaaccacancttaactnaaggnggccctggcggcttntttcct

SEQ ID NO: 19439 - DNA, 515 bp, Homo sapiens
  misc_feature (1)...(515): n = a,t,c or g
cccctttganaccctttatgactgattacgaatttaatacgactcactatagggaatttggccctcgaggccaagaattcggcacgaggccatatcttgggatttctgcctttgcttttccctggtagtgttgactttcagttcttggctataatctttgtcttttccaacttctgacaatcttttcagttcttctaaagtattaatcatgttaccacttctttgtactacttattgtattatcatttttcttttatttaaaagaaaaaagtaatctaatttggttttcccattttttgcttctgtttctagttatatttcttatccctgtgattatataaattcatataaaatacatgtgaaatatattttaatttaacttgagtatttttttcttgtattatccaagttggttttattaactcttggtatttntattctgtcatcttgtggnttggccaagattgatcangagggaaatatccatttggcactttccagggtgttgggtggca

SEQ ID NO: 19440 - DNA, 427 bp, Homo sapiens
ggatctttttttttctttttttttacatctccttttcttctttcaagagtctcacactcagctcaggtccagctcaaactggagtacagtgccatgatcacagctcactgcagcctccaactcctgggctccagcaatcctgccacctcagcctcctgaatagctaggaccacaggcacgagcaaccatgcccagcgaattgtttttaatttttaattttttatagagacagaggtctcactctgtcacccaaactacagtgcagtggtataggtcacggcttactgtaccctcaaacttttgggctcaagcaatcctcctgcctcaatctccctagtaggtaggactacaagcccatgccacatgttcagctcatttttttattttttaattaagcggccgcaagcttattccctttagtgagggg

SEQ ID NO: 19441 - DNA, 643 bp, Homo sapiens
gcggcacgagtctcagcctccagttagctcagttgtgcagcctcctgatggctctgtgagcccttggctgtcttcaattcctataggcttaagttggccaagcttggcttccctgaccatcataggcagccagtgtcatttccctgactcccagattccaggaacagaaggaaatgcaaggggcaaagggcctgtcctagcccctcgaagctggctctgccctccttctcctttgacggtaataaaaattgtcataacacacctatgagcacctcctaggtcagacacactacccaacatggcggggagtatgcaggtcaccatcctcaagggactcagaacatggtgggggcccagatacagaacagactaggggtgatgacacacagggtgaatacaacagttggtgtgttttggggtgacaaggccttactagtgagccacagaaacccacatctgtgcaaataaattgtccccaacctgacattttgggcagaaacaagtgcctgtgccagtacaggtgggctcccatgaccttgctgctgagtaaccaggcatctcactgtgccaccaactgatgggcaggaagaagtggcagttctgctttatctcgttttccagagggatatctgctgcctgcacc

SEQ ID NO: 19442 - DNA, 543 bp, Homo sapiens
  misc_feature (1)...(543): n = a,t,c or g
tgaattggaaacctntganacctttgactgattacgaatttaatacgactcactatagggaatttggccctcgaggccaagaattcggcacgaggccatctatcacatgctgaacatgtgcagctttgacgtgaccaacaagtgcctcattgctgaggtctggtgtcccgaggcggatctgcaggacctgcgccgggcactggaggagggctcgagagagagtggtgctacaatcccctcattcatgaatataatccccacaaaagaaacaccccccactcggatccgcaccaacaaattcaccgagggatttcagaacatcgtggatgcttatggagtcggaagctacagagaagtcaatccagctctctttaccatcatcaccttcccgtttttatttgctgtgatgtttggagacttcggacatggctttgtgatgtttttatttgccctcttggtggtgttaaatgaaaatcatcccagactaaatcagtcacaagagatcatgaggatgtttttaatggccggtacatcctctggtgg

SEQ ID NO: 19443 - DNA, 523 bp, Homo sapiens
  misc_feature (1)...(523): n = a,t,c or g
ttganncccnaacagctatgacatgattacgaatttaatacgactcactatagggaatttggccctcgaggccaagaattcggcacgagtgccgtgcttggatggcacctggcacctggcactgcccaggcctcattatccagctgttctgagagcagcatacttactgcccaagaggaaatgactggcatgaatgaccttggagagaggcagtctgagaactaccctaacaaggaggatgtggggaataaatcagcctgagtgaccaaattttggtctggtgggaacagatgggaaccagctcaattgggtgtccactcaaagtgctctctccaggggcctcagtgactgtgttgctaaacccagtggtcaagttntcaattctcagccatcagagcatttgctcgcccgccttcttctccattttcttnacttgcttccaggataccacgctttctttctgaattgntacaatctttcttccttccttccttggttccttccttccttccttcctctctcc

SEQ ID NO: 19444 - DNA, 354 bp, Homo sapiens
gcttgagcccaggagtttgagaccagcctgggcaacatggtgaaaccctgtctctactaaaaatacaaaaaaattagctgggcgtgtgcctgtaatcccaaagtgctgggattactggtgtgagccaccacacccagccattgaatgttacagctttaacagtgaaggaaaggaagcaggtctggtctcatcataagagagtgatgatgaaaattgaaaacagtagggagtgcaggtgttaagttggaaggcatgttgggaatctcaaggaaactacatgctttgaaatagcaactgaattcaatctgagggccttccaggttgagacaatgctcctaatactgccattatccc

SEQ ID NO: 19445 - DNA, 519 bp, Homo sapiens
  misc_feature (1)...(519): n = a,t,c or g
gactggaacctcaaaaaattaacttgcaaaaatggcctgcaaactcttttcttttttatttttattttatttttttgagatggagtctcattctgtcacccaagctggagtggactggcacaatcttggctcactacagcctccgcctcctgggttcaagtgattctcatgcctcaccctccaagtagctgggattacaaggcacatgccattacgcccagataatttttgtgtttttaagtacagacaagatttcaccatgttgcctaggcggtggcctcgaactcctgacctcaagtgatccgccctcctcggcctcccaaagtgctaggattccaggcgtgagccaccacatccagcctgcaatctcttttctaaggtaaaaaggtctcatctatttctcttggctcagattgctgcaaaaagaaagctcactacatangaacanagaagataatttattagcnnaggnantcaancnaagttttangcctatcncatgaagccgcttagcaaaat

SEQ ID NO: 19446 - DNA, 456 bp, Homo sapiens
  misc_feature (1)...(456): n = a,t,c or g
gattacgaatttaatacgactcactatagggaatttggccctcgaggccaagaattcggcacgagactgtgtgggtactctgctccagacatgcgtggcctcagactcatcatgataccagttgagctgctactttgctacctcctgctgcaccctgtggatgccacttcatatggaaagcagacaaatgtcttgatgcactttcccttgtccttggaatcccagacaccctcctcagaccccttgtcctgccaatttctgcacccaaagtcactgcctggtttcagccacatggcccctctacccaagttcttggtaagcctggctctaaggaatgccctggaggaagctggttgtcaggctgatgtttgggctctacagctacagctctaccgccagggtggtgtgaatgctacacaggtctcatccagcatcttcgagggctccaganaggcg

SEQ ID NO: 19447 - DNA, 351 bp, Homo sapiens
tcttaaaacaactttagaaatctaccattgcacatcatattggtcagaaaattgataactttgaagtttaggagaagggaagaggaactggaaggcatgagatgatataaagcagcaaacaagaaccaaatcgtgtgtgcagtgcttctaatgtgtcattgctgcaggcagatgtttaggggtcgacgcggccgcgaattccagatctatgaatcgtagatactgaaaaaccccgcaagttcacttcaactgtgcatcgtgcaccatctcaatttctttcatttatacatcgttttgccttcttttatgtaactatactcctctaagtttcaatcttggccatgtaacctc

SEQ ID NO: 19448 - DNA, 359 bp, Homo sapiens
  misc_feature (1)...(359): n = a,t,c or g
gtgtaatcccagcattttgggagcctaggcaagacgattacttgaggccaaaagttcaaggtcagcctaggcgacatagagagaccttgtctctacaaaaaataaaaatgttatctggcatggaggcatgtgcttgtagtcccggcttagggagctggtgtagaaggattgcttgagcccaggagtttgagattacaggtagctatgattatgccactgtactgcctggagaagagcaagatggtctaaaaaaanagatgtaaatatgcactaatattgtttgttaacattttgtattattgttgttggagaacctagcattaaaattccaggctgggcgcagtggctcaccctgtaat

SEQ ID NO: 19449 - DNA, 513 bp, Homo sapiens
  misc_feature (1)...(513): n = a,t,c or g
gaaaagaaactactactgtactcaacgatgtggatgaatgtcacagatgttatgttgagtgaagttcaagaaaaggcaaacctaatatatggtgatagaaatcagaatagtggctacctgtgtggggcatattgactgggaaagggcatgagggaaccctctggggttatggttctgtggttatagtcacttccttgatctgggtggtggttgcatggctacgctcatgtgtgcattcattgagttttacacgtcagatatatgaccttaccgtatgaaaactatgccttgaaaagaagaaaacagatatatagtatttcatacagtacttgtccgaaagaagacactcagaaagccctctttcctgccctgatatccttgtgaacatgactttttgtgagatgagagccatttcagcatgagaaggttgacagctgccatttttttcctggtagttaagttccaagagtanggagcatgcttgagaaacatttcctctgatgatgttttttt

SEQ ID NO: 19450 - DNA, 425 bp, Homo sapiens
gggccgtggcactcatactctgaaaaggggtctgtacagactaacacagctctggttcaaggtggccctaaatcttctgcttcattttacttcagtgacacttcctggttaccagtcataagctccagggaggtcaatgttcccctttgccacccagttgaaatgacagtgaggcagtaagtaaaatgcaaaaaatataggttttagaatcagaggctgagtttgaatcctgtcttactagcagcagttaagacataaggcaagttgcttaactcttctgaatctcatagaagaataagatgtctacttacaaacataaagtttccacaaagaataaattaatataaatagattaaatacacagcacagtgggccaggcaccgtggctcacacctctaatcctggcacttcttggaggcccaagg

SEQ ID NO: 19451 - DNA, 452 bp, Homo sapiens
  misc_feature (1)...(452): n = a,t,c or g
ggtgtntnnntttgaaaccttatgactgacacgaatttaatacgactcactatagggaatttggccctcgaggccaagaattcggcacgagatcggatctccatgcaagaaagacgcaaagagatcatgcttggattgaaacggctgcctgatttgattaaggaagtactgagcatggatgacgaaattcagaaactagcaacagaactttatcatcagaagtcagttctgataatgggacgaggctatcattatgctacttgtcttgaaggggcactgaaaatcaaagaaattacttatatgcactctgaaggcatccttgctggtgaattgaaacatggccctctggctttggtggataaattgatgcctgtgatcatgatcatcatgagagatcacacttatgccaagtgtcagaatgctcttcagcaagtggttgctcggcaggggcg

SEQ ID NO: 19452 - DNA, 337 bp, Homo sapiens
gatacactcaagatctgcccggttgacacccgccgttcactgtctggcttcattacaggaaacacaaagaattttgataattctttcgagggcgcccagctgtctgtgggagccatcagcctggcgttttacaatggactctgggcctatgatggatggtgaggtgtcctgagatgtcccgagtctgggggtgggtgggggttctccaggtgactttaactccacctgtcatggaaaacaatgagttctcctttctggggtttggtgtgactctgacattcaccctcacatttcctttttgtgaaggatgcgacaacctctcccctttattccctga

SEQ ID NO: 19453 - DNA, 342 bp, Homo sapiens
gcttaacctagtagcccaggaatgtagtgctggtgagtacctgaacttgccttaccaccctgttttattgaattttctcagcacatttgcaatttgataatggtatgttaagtgtcttcatacacacacatcaaaacagccgagctgtaaggacaacacctgtcacaactcacgtgcatcacagacctagaaatgtaaataaaaagcttttaatctacaccagttaggaaatcagcatttttcaattaactttaggaccatgtcagagtgttttcttttcttcattcctattgatttgttgcctttatttacctattagaactataatatttaggagctgtc

SEQ ID NO: 19454 - DNA, 385 bp, Homo sapiens
  misc_feature (1)...(385): n = a,t,c or g
gcaaatatttacatgttggttatattgtgccaccagctccagaaaagagtatagtagggatgaccaaggtcaaagtgggtaaagaagactcatcatccactgagtttgtagaaaaacggagagcagctcttgaaaggtatcttcaaagaacagtaaaacatccaactttactacaggatcctgatttaaggcagttcttggaaagttcagagctgcctagagcagttaatacacaggctctgagtggagcaggaatattgaggatggtgaacaaggctgccgacgctgcaacaaaatgacaatcaagatgaatgaatcggatgcatggtttgaagaanagcagcagcaatttganaatctggatcancnncttangaancttctg

SEQ ID NO: 19455 - DNA, 499 bp, Homo sapiens
aacagctatgacatgattacgaatttaatacgactcactatagggaatttggccctcgaggccaagaattcggcacgagaaggtcgtgaaaaaaaaggtcttggtgaggtgccgccatttcatctgtcctcattctctgcgcctttcgcagagcttccagcagcggtatgttgggccagagcatccggaggttcacaacctctgtggtccgtaggagccactatgaggagggccctgggaagaatttgccattttcagtggaaaacaagtggtcgttactagctaagatgtgtttgtactttggatctgcatttgctacacccttccttgtagtaagacaccaactgcttaaaacataaggatgtttcagttcctccatttaacagatatgaagagcattttaagaggtgcagcctctggaagtggatcaaactaagaactcatatgccatactagatatgtttggcaataaaacttatgacgtgaaaaaaaaaaaaaa

SEQ ID NO: 19456 - DNA, 372 bp, Homo sapiens
ggggaaaaaaaaggcatacgccctatgtgtacaactcaattaatttccacaaaattttccaccgtggaaccagcacccaccatgaagaagcaacacaactgagcactcagatctacttgtagtttctttcggtggtttgtcttgagcttacaacttaataattccacgtgaagcatgagctagtgaatgtaacagctctaattttgtagccttcagtggaacatatttcccaaatatatttctagatccttcttcccaagtggcaggcccttccagaagccttcccaatgatcaggtgttgcccgtggtcgatctcattggcagggacaggagggggttagtggtgcgattatagaagcaaatttaagtagc

SEQ ID NO: 19457 - DNA, 440 bp, Homo sapiens
gggaaactgaggctcatcagataagtaacttgcccaaaatcacacatctacaagtagcagaaagatacatagagaactgggagcatactgcacatatttttatctgccatttttaactcagttgttttatcatggacatttcccatatcactgaaaatcaaagtatgtcagtttaggtttgcttatctcaactttgaataagctgcctaggaaatctatgtaacagaggaacatcttgaaaactaacattggaaaaaataaaaatgaaacataacttgttaaaaccagcaaggaatttagtgatcacccaagaaggccaaacactatgacaggtgacaacaagtctatggcacatcctgggtcctagaaaggctgtcctagttcatgtgaatattctgggaaggactttctcatcctccttgaccccaagaactatggag

SEQ ID NO: 19458 - DNA, 376 bp, Homo sapiens
ggcgtggtaagtgctgtgcttcgggaaccaggaggtggtaacccaggctcccggggggtggggtggggcgggcggtgcttggacaggtgagaagaatgaaggcctcgaggtctggccagatggcaggtttcagggtcccatgagccacggtgaggcgctcaggcctcatcactcgggcaacaggtacctgagtcacagtctgccaccccgacccagggagcgcccatttcgtgctccctctccaggaatacatccagaagctgatgcccccactgatccagaagtggaatgagctcaaggacgaagacaaggacctcttcccctgctgaaggtgagtggctcctgccctacccgaaacccatctgccaccctgctg

SEQ ID NO: 19459 - DNA, 344 bp, Homo sapiens
  misc_feature (1)...(344): n = a,t,c or g
gtctttagtgagtgccaaaaacagatggtgagtgactccgtgcatttgtaatgtttctctgtggagagacagaaattgggaccaggaggctggagcggcaggtggcgagtggcgccgggagtctgggactggctctctggctgcggctgtgggggctggatagaccgtgttaaagaaatcctggatttatgcttgaggaacccctcagcctgtgtcacggtgtctggaaggccatgtggccacattgtaacatcactgttggctggtcatgaacacacagagagtccagaggatancccaaacccctgctcacccccgcctctcctttggagctgncttgtggc

SEQ ID NO: 19460 - DNA, 331 bp, Homo sapiens
gcaaaagatagtggtggcttggatgagggtagaagcagtggaggtagggattgctttagattctgccatattttaaaggtagagccagtggcattagctaatagatttgatatggggtaagaaaaaaaagaggctgggcacggtggctcatgcctataatcccagcactttgggaggctgaggtgggcagatcatgaggtcaggagattgagaccatcctggctaacacagtgaaacaccatctctactaaaaatacaaaaaattagccgggtgtggtggcatgtgcctgtagtcccagctacttgggaggctgaggcaggagaatcactt

SEQ ID NO: 19461 - DNA, 683 bp, Homo sapiens
  misc_feature (1)...(683): n = a,t,c or g
cgatacgaccatgaaccaacatgatctatcacagggaacccggtttctgaggttaagaacctggtatgagtggactctcctcataccaaagcattcgttacataggcaatagcggtccggaggaaatacggctcccttctcaacgggataccccagagctccgcggccgttatcggtcgagggagtacctctcgtttatcgaatgtccgagcaactgatgtttcggaacggctctagtaaacgggtcgagtaggaccccgtcatcagcaggggccccttcgcacgcgccttcagtaggacgcgcccttccctacacgaattacagaagcatactcgtcggaactcccaaatagacagtcccctaacaaataggaaaaacgctaaaaccgctaccccccacgagacggaagcagaacagagaaaacgcaatccccatctaggcgccccgagcgcaccccacccggcgtcggcgtaacacaaacatttcgtccgtcgtaccccccttcttcaatatttcatacgcccttcacgcagtccacaagacaagcccccccccccccccgaaatggaacccttccccgtntccaaatcggaangtacgatttnanncnggccaacggaattcccgtctttangcnaataaccccttaatccaattcttttaaaaatngggananaggtcc

SEQ ID NO: 19462 - DNA, 334 bp, Homo sapiens
gcagaacccctgtctcttcctcaggctggaagaatccatcactacctctctaggagactgtcgggctcccagaggggagggttagtgagtaaactgaaagaataataaaggtgtcccagcctagaagacgtattcagggcaacaaagaaagtattgccctgcagtgttcagattctgagccttttatctgtgcatcttatcaaacatgtgcctgtagcatcctggcacacactgttctgtcctgcagggttaggcagggggattctttgttttgaaggatgaaccaagataacacatacagtaactcagatgccctgtgtgtgtgcacgcatta

SEQ ID NO: 19463 - DNA, 436 bp, Homo sapiens
gggaattgtgttctttaaagtaactttgggggttcatatgagaatataaccctgctcagaagaaattacttttaaaataatatccacaaaggaactggttagattttctcatgtgttctgcagatatttaccaatgtaacctacattttttcttgatgccagatagattgtaaggaatttgcattattccatctcaagtgtataatgaaataatacactgaagcaattcaccaccaagagttttgtttaaaaaaggaagttccagctccaacttaggttcaacaattgcttctgacacttgccagtggctcattgtaagaaacaaacaatagacattaccagtggagagagaaatgtaataccattttagattttctgacaagaagtagtgccaaggacccctgcaaaaatggtttgtttttaaaatctccagttc

SEQ ID NO: 19464 - DNA, 330 bp, Homo sapiens
ggtgtctatttgatgaatttgaggaaatctggaactttgggccacccaggctctctagatgagaccacctatgaaagactagcagaggaaacgctggactctttagcagagttttttgaagaccttgcagacaagccatacacgtttgaggactatgatgtctcctttgggagtggtgtcttaactgtcaaactgggtggagatctaggaacctatgtgatcaacaagcagacgccaaacaagcaaatctggctatcttctccatccagtggacctaagcgttatgactggactgggaaaaactgggtgtactcccacgacgggcgtgtc

SEQ ID NO: 19465 - DNA, 531 bp, Homo sapiens
  misc_feature (1)...(531): n = a,t,c or g
ggaaggatttgtagtgaccgaagctggctttggtgctgacatcggaatggagaaattcttcaacatcaagtgccgagcttccggcttggggcccaacgtggttgtgttagtggcaacggtgcgagctctgaagatgcatggaggcgggccaagtgtaacggctggtgttcctcttaagaaagaatatacagaggagaacatccagctggtggcagacggctgctgtaacctccagaagcaaattcagatcactcagctctttggggttcccgttgtggtggctctgaatgtcttcaagaccgacacccgcgctgagattgacttggtgtgtgagcttgcaaagcgggctggtgcctttgatgcagtcccctgctatcactggtcggttggtggaaaaggatcggtggacttggctcgggctgtganaangctgcnagtaaaanaagccgattccaattcctgtatgangttcaagntccaaatgtggncaaaataagggcaattgccaaggggtnnnagggncaaaaattg

SEQ ID NO: 19466 - DNA, 357 bp, Homo sapiens
ggaataaagtatgcctatacactctctaattccaccaggacaaggacattctacctctagagagatcccgtaaccccctctgcccattcaggtaacaggtaatgcctctggttccttcgatcccagaagtactggggccagagaaggtcagggactgtgctgtttttgttgaaccaaggctagaattatggctattgtaggctgactctgcatttgcattaatggccagcaatatatacagcagatgctgagaaatgagaaggaaatcatgggcaggaaagtcacactaaaaggagaattctgataagagaaatggagacccagcagtactccatgtagagcccagggcctttcctg

SEQ ID NO: 19467 - DNA, 342 bp, Homo sapiens
gatttggggtaggtctttttgagtcgtgttaatgtaagaatgactcctatcattaggagtgctgctcggaggttactcacctttgggagtaatactgaagagaggggtctgcagaaaggatgtgtatgaagcttagataataatggctgtttcgtaaactgtttgagacctattaatgaaaatgactatttcttgctgtttttatccaaccgtctgcattttccccctttaaagctgcggtctcctgtttgataaaagaatattggccagtattgcagattttaactgatttggctgatcctccagggaccagtttctgtgggcgtgtattggagcaagttt

SEQ ID NO: 19468 - DNA, 363 bp, Homo sapiens
gataaactcaacgttgaaaatgtcctttgtgggggagaactcaggagtgaaaatgggctctgaggactgggaaaaagatgaaccccagtgctgcttagaagagatcttctttgcattagcctcatccttgagctcagcctctgcggagaaaggaagtcccgattctcctgggggtctctaaaggggagttttgtctctactgtgacaaggataaaggacaaagtcatccatcccttcagctgaagaaggagaaactgatgaagctggctgcccaaaaggaatcagcacgccggcccttcatcttttatagggctcaggtgggctcctggaacatgctggagtcggcggctcaccccggatggt

SEQ ID NO: 19469 - DNA, 526 bp, Homo sapiens
  misc_feature (1)...(526): n = a,t,c or g
attgaanccantgctatgacatgattacgaatttaatacgactcactatagggaatttggccctcgaggccaagaattcggcacgagttttttagctgtacctacgcttttctaacaagtcacaagggagcgtcaggagggcagagggccgggagcagggctgccagggatattcctgtgatgagggacgtggcgacatcagcggtgatggcagccactggccatgtgtcactctgcacacttgaaacgtggccaatgcaatggaggaactcagttaatttgattttaatttaaacagccccacgtgggccgggcatggtggctcatgcctgtaatcccagcactttgggaggctgagaagggtggatcacttgaggtcaggaatttgagaccaacctggctaacacagcaaaactccatttctacttaagatacaaaaattagctgggcatggtggcgcacgtctgaaatcccagctgctcgggaggctgangcaggagaattgcttgaactcgggaggnggaag

SEQ ID NO: 19470 - DNA, 399 bp, Homo sapiens
ctccattctgggctctttcctgtgaaatctttctttgctttccccatcttttcctcgcattttttcaccatctttccctcaatctccaggagccaatgcgagactttggctccgattaagcgacggcccgagacttggggtgatggagagcaccccttcaaggggactgaaccgagtacacctacaatgcaggaatctgcaggaattcttagggggcctgagccctggggtattggaccgattgtatgggcaccctgccacatgtctggctgtcttcagggagctcccatccttggctaagaactgggtgatgcggatgctctttctggagcagcctttgccacaggctgctgtagctctgtgggtaaagaaggaattcagcaaggctcaggaggaaag

SEQ ID NO: 19471 - DNA, 402 bp, Homo sapiens
  misc_feature (1)...(402): n = a,t,c or g
aatacgactcactatagggaatttggccctcgaggccaagaattcggcacgagctggaagatcccagaaagagtttggagagaaacgtgaccaggagggcaaaacaggagaaagacagcagaaaaaccctgaggagaaaaccaggaaagagaaaagagattcagggccagctataggaaaggacaaaaaaaccatcacaggagagagaggtccaagggagaaggggaaaggattggggaagaagcttcagtctgagctccaacttcaccacccctgaagaagttcccacgggaacaaagtctcacagatgtgatgaatgtggtaaatgcttcacgagaagttcaagccttatccgccataaaataatcccactggagaaaagccctatgaatgtagngagtg

SEQ ID NO: 19472 - DNA, 478 bp, Homo sapiens
  misc_feature (1)...(478): n = a,t,c or g
ggngnntttgnanttntatgactgattacgaatttaatacgactcactatagggaatttggccctcgaggccaagaattcggcacgaggaccaggccagcaggagatggaaccttccagaagtgggcagctgtggtggtgccttctggacaagagcagagatacacgtgccatatgcagcacgaggggctgcaagagcccctcaccctgagctgggagccatcttcccagcccaccatccccatcatgggcatcgttgctggcctggctgtcctggttgtcctagctgtccttggagctgtggtcaccgctatgatgtgtaggaggaagagctcaggtggaaaaggagggagctgctctcaggctgcgtgcagcaacagtgcccagggctctgatgagtctctcatcacttgtaaagcctgagacagctgcctgtgtggactgagatgcaggatttcttccacctctnctttgngact

SEQ ID NO: 19473 - DNA, 522 bp, Homo sapiens
  misc_feature (1)...(522): n = a,t,c or g
aaatggtggtggcatccagtaagaaaggagagcccgtcagtgccgaagatctgggggtgagtggtgcactgacagtgcttatgaaggacgcaatcaagcccaatctcatgcagacactggagggcactccagtgtttgtccatgctggcccgtttgccaacatcgcacatggcaattcctccatcattgcagaccggatcgcactcaagcttgttggcccagaagggtttgtagtgacggaagcaggatttggagcagacattggaatggaaaagttttttaacatcaaatgccggtattccggcctctgcccccacgtggaggtgcttgttgccactgtcagggctctcaagatgcacgggggcggccccacggtcactgctggactgcctcttcccaaggcttacatacaggagaacctggagctggttgaaaaaggcttcagtaacttgaagaaacaaattgaaaatgccagaatgtttgaattcngtnntantggccgnaatgcattcnagacggatc

SEQ ID NO: 19474 - DNA, 344 bp, Homo sapiens
gccattgaggtcttcacacaagctatccagtggtatcaaaaccatcagccaaaatctcctgctcatttgtccttgataagagaagctgcaaacttcaaactcaaatatgggcggaagaaggaggcaattagtgacctacaacagctgtggaaacaaaatccaaaagatattcacaccctggcacagcttatttctgcttactcacttgtagatccagagaaagccaaagctcttagtaaacacttgccatcgtcagatagtatgtctctaaaagtagatgttgaggctcttgaaaattctgctggtgctacatacattcggaagaagggtggaaaagttactgg

SEQ ID NO: 19475 - DNA, 537 bp, Homo sapiens
  misc_feature (1)...(537): n = a,t,c or g
aatctgaancctttgactganacgaatttaatacgactcactatagggaatttggccctcgaggccaagaattcggcacgaggcaataaaggagcaagcagcgatgctgccacccctttcttctcctcctcactatttgagagagcctgaattccttcatttacttcctttatatttttaaaatgtcttatatatggaatccgaaaaataatagaatgattctatgtgaagtggagccctgtctggactgctgctcccacgtcctttgcaatgatccaagaggcctctgtgataccctaaagctctcaaagaaaaagtgaagtgggccagctgcagtggctcatgcctgtaatctcagcacgttgggaggctgaggcaggtagatcacctgaggtcaggagtttgagaccagcctgaccaacatggtgaaaccctgctctaataaaaatacaaaaattagccaggcatggtggcaggtgcctgtaatgccagctactcagaaggctgaggcaggagaatcacttcttgacctgggag

SEQ ID NO: 19476 - DNA, 586 bp, Homo sapiens
acctttgaacaccattacgaatttaatacgactcactatagggaatttggccctcgaggccaagaattcggcacgaggctagggtccaggacagcaggaccaagccagcagaaacagcctgagcccaccgcagactggcctggctatactggacaatgccactcctcctgtacacctgtcttctctggctgcccaccagcggcctctggaccgtccaggccatggatcctaacgctgcttatgtgaacatgagtaaccatcaccggggcctggcttcagccaacgttgactttgccttcagcctgtataagcacctagtggccttgagtcccaaaaagaacattttcatctcccctgtgagcatctccatggccttagctatgctgtccctgggcacctgtggccacacacgggcccagcttctccagggcctgggtttcaacctcactgagaggtctgagactgagatccaccagggtttccagcacctgcaccaactctttgcaaagtcagacaccaaccttacaaatgacaatggggaatgccttgtttcttgatggcaacctggagttgctggagtcattct

SEQ ID NO: 19477 - DNA, 433 bp, Homo sapiens
  misc_feature (1)...(433): n = a,t,c or g
ngctatgacatgattacgaatttaatacgactcactatagggaatttggccctcgaggccaagaattcggcacgagaattcttttaatatgagcaccattattttgaatggtccctttggcacccagtgttttgtactttaagacagtgcaccactgtgctttttttaagtagaaggacaaaaaggatataaaaacttttatgactgcttgactgaaggtatgatctcaagcagatcaattttaggaagcagtacttaagattagaaaatctagaaagaggccaggcatggtggctcacgcctgtaatcccagcactttgggaggccaaggccggcggatgacaaggtcgagagatcaagaccatccagccaacatggtgaaaccccacctctgctacaagttcaaaaattagctgggtgtggtggtgcacgc

SEQ ID NO: 19478 - DNA, 257 bp, Homo sapiens
gggcaagaacacctttgagttcctgaaggagaataacttccagccttaccccctaccacatgtccggcacatggcctaccagctctgccacgcccttagatttctgcatgagaatcagctgacccatacagacttgaaaccagagaacatcctgtttgtgaattctgagtttgaaaccctctacaatgagcacaagagctgtgaggagaagtcagtgaagaacaccagcatccgagtggctgactttggcagtgcca

SEQ ID NO: 19479 - DNA, 517 bp, Homo sapiens
  misc_feature (1)...(517): n = a,t,c or g
ttaaaattaaaaaaanngtngaatnccttagcagntaccgacatggattacggaatttaatacgactcactatagggaatttggccctcgaggccaagaattcggcacgagaaaatatatataaaatgaaattgtgaccatattaaaaatctgtaatctatttcagtgtatattgaaatcccatcttatttgttataataaatcctggactcccattatgccataaagctgtattttatgcaaaagtgagacctggcaatatattggtattaatttataaataaaactttactgnatttaataagggaaaattaaacattctaattttcaccattggtaaccaattggacactcaaactggaaaaaatttctatgtttcttttaaaattattaaatataaagataaattatctactttattaaacaattaaacagtcatttgttagatgtatctaatttgctaggtacttgtgctgtatcataaaaatatcaacaatagtgaaaatagttatcacca

SEQ ID NO: 19480 - DNA, 404 bp, Homo sapiens
ctcaatgctatgacatgattacgaatttaatacgactcactatagggaatttggccctcgaggccaagaattcggcacgagagttagacctgcctgttggggagaattctatagacagaaggtcaatgttgtccccatccataggggttgaattaccttgctgttaagtggtcttcccccattgggatcctacagtcccacagatgaaagcacagtagtagctgacagctggcttatttggtccctcggcatctctcgtatgtggcatattgcttttgccactttcctatccagcagacatcaaagcaaaactaataggtagatatctggaatgaatgtatatgttgtaattgaggcagatatttgccttaattggaaggatctaactgctttacaaatattaa

SEQ ID NO: 19481 - DNA, 285 bp, Homo sapiens
tgtaatttaacttaccacatctttatatattgtctttttaactcttctacagttatctcaaaaagaaagttttagtataatatcttataagtagtagaagtcattaataattttttgattgatttagccaggaatcctgagttctggcttctggctcccaatcaatagtaaatcatgtagactttatctgcctccgtttccttacctgtcacataatactctttcctctccaccttctacactgctaggagagagaaattaggtcttaattataatgctactttg

SEQ ID NO: 19482 - DNA, 314 bp, Homo sapiens
ccaaaggcaatgtctcgattggtagttgtccaggaaatccgtaaatctactaagtgcagctgatgtgtatgaaaggtaggatccccatcacgagcagagagctcctcctcagctgtgcgattgctatgccgttggtaggtgagggaggacaagctcagcaggtgggtctttgttaccaagggatcaagacagtgatcagcattctcttcagtgggtgaggccatcaggtgaacggtcacctgacttaggtcactcaccatctgggtaacactccaatcagagataaggcgccgcatcactgtgcctgcttgagg

SEQ ID NO: 19483 - DNA, 297 bp, Homo sapiens
cccacgcgtccggacaatttcatctatagtgtcacaatacaaaatgtcacaaaatattagaactgttatataactataaaaagtatcagcttaaaagctaaaagcctttgaaaaaagaagacagaggaaggaagaaaaaagaaaactggcatagcaaccagaacaattttataccttctcaagaatgttctgtcatgaaaataaattgataatttttttctgttacattacagtttggtttctagccatccagttgatttagcaggagaatgcaggtttttttagcagcttttgaat

SEQ ID NO: 19484 - DNA, 401 bp, Homo sapiens
gggaagtagccatcttctatccctcagtctggggacccaagggaagagcctggggatctcagaacccagctgccctgatgagggcttggacggagctaggacccagtcctctgtggaaggcccttggccagtaggtgctggtgtctctctcgggggttgtgcacggttgctagctctgggggtacgagacaaagctgaaaattggaaccaactgctactgctgacagtaagtgcaaggtcctaagtcccttgtttctccttcagttttccagttctcctgcagcaccccctattggcaaccctagagagggcgggctgccaaaggaaagattctgcagtgccagccccagaatcacaaagccaactacaaagagtgcatgtgggctgggcacggtgactcc

SEQ ID NO: 19485 - DNA, 344 bp, Homo sapiens
gaattttaattgtaaatagttacaaatgcactgaataaattgccattattcaaaagacagcagagccctggtgagatgttaaatacaaaacatgacaaaatacaataagcttaaataaaaatcagtagaaaaaatgtgagaaaagaataattgaaaaaagtcttagctttgttgatatatttcttcaggatcttctcccttatggtctttggacagatgcagtactgtaaagggccgatactgttttttcccctttaatcttgactgttatagaacagtcttcactgtatatagaacctttaattttatctcttgaaaatgaggatcttggccaggcgcagtgg

SEQ ID NO: 19486 - DNA, 353 bp, Homo sapiens
ggaaacggtcccacccccaagctcccatacacttgcagtggtcggcaaagtcactcccaccccgaggcccacagacggtgtggatatttactttggcatgcctggggaaatcagtgagcacgaggggttcctgagggccaagatggacctggaggagcgtaggatgcgccagattaatgaggtgatgcgtgaatgggccatggcagacaaccagtccaagaacctgcctaaagccgacagacaggccctgaatgagcacttccagtccattctgcagactctggaggagcaggtgtctggtgagcgacagcgcctggtggaaacccacgccacccgcgtcatcgccttatcac

SEQ ID NO: 19487 - DNA, 361 bp, Homo sapiens
ccagtatggtagttctgtttttagttctttgagaaatctccatactgtcttcataggagttgaactaattgacattcccaccagtggtgtgtatgcattcccttttctgtgcatccttgccgatatctccttttttttgattttttaataattgccattctgacagatttgagataatatctaattgtggttttaatttgtgtttctctgatgattagtgatggtgagccttttttttcatatatttattggttacttatatatcctctttgagaagtgtctgttcatgtccttttaaccccccttttaatgggattatttttttcttgttgatttgctccttacagattatgggtatttg

SEQ ID NO: 19488 - DNA, 468 bp, Homo sapiens
  misc_feature (1)...(468): n = a,t,c or g
gtctggagctgctggctggagaggagggtggacgaagctctctccagaaagacatcctgagaggacttggcaggcctgaacatgcattggctgcgaaaagttcagggactttgcaccctgtggggtactcagatgtccagccgcactctctacattaatagtaggcaactggtgtccctgcagtggggccaccaggaagtgccggccaagtttaactttgctagtgatgtgttggatcactgggctgacatggagaaggctggcaagcgactcccaagcccaacccctgtggtggggtgaattgggaaaggggaaagggaattaanttggatttcaagaacctgagtgaaaacagccagcaggnagccaacgtcctctccgggancctgtggcctgnaccnttgggaacctnttggnaattatnctgcccccaaatgcctnaattggnggctgggggancccggggtt

SEQ ID NO: 19489 - DNA, 472 bp, Homo sapiens
  misc_feature (1)...(472): n = a,t,c or g
gccaagatgcaaataatatttttggctgttacctgctctttcactactgctgagtctgcagtggcaagatagctacacagtacctcagccctcctgctcagtttttaacatctattgataatactaattacaagaaaatttaaaatgtctttttgcaaaaaaataccataagcagtcaaaacacaattaaaaaaaaaagagagagatgtaaacaattactttccggccgggtgcggtggctcacacctgtaatcccagcattttgggagaccaaggcgggaggattgcctgaggtcaggagttcaagaccagcctggctaacatggtgaaaccccatctctactaaaaatacaaaaaaatagccaggcgtggtgacgcatgcctgtagtcccaggtactcgggaggctgagcaggagaatcgctgacccaggagatggangttgcggngagccagatcacncctggctcagc

SEQ ID NO: 19490 - DNA, 528 bp, Homo sapiens
  misc_feature (1)...(528): n = a,t,c or g
ccttattgganaccntttgactgactacgaatttaatacgactcactatagggaatttggccctcgaggccaagaattcggcacgaggaattaacataacctagcacaatatctgacatagagaattttttaaataaggtagctattgatagctgtctcttttattattactattttttatatagagaaagggtctcactatgttgcccaggctcatcttgaactcctgccctcaagtgatcctccggatatcatcctgtacttcaaaagcatcaaattatggaaaagtttcagcatacataaaaggaaacccgtataaattgttccagtttctattggtgtaaaacagaccacaccaaaatttagtgtcttacagcaatactcattttattgtgtctcacagtttctgtggatcaagaatttagaaaggcctcagctagatggttctgccttgcggtctcacgtggctgcagtagctggagctagacaagggnaactttcccttcttttggggttctaacagaagaa

SEQ ID NO: 19491 - DNA, 414 bp, Homo sapiens
aggggaggccgaggcacgagaatagcttgaacttaggaggcagaggttgtagtgagccaagattgcaccactaaactccggcctgggcgacagagcaagactccatctcaaaaataaataaataaataaataaataaatgtcaagtatctgagtagacatttcttcaaaggaaatatacaaagccccaataaacacagaaaagccatcagggaaatccaaatctctctagacagataataacaagtgttgttgaggatgtggagaagtacaatacttcatacattgctgcatgtgtgaaatggtacattcactttggaaaatagtctggtagctcctaacagggttaatatagagttgtcagatgacccagcaattctactaggaggtatacccccagaagaaatgaaaacatg

SEQ ID NO: 19492 - DNA, 541 bp, Homo sapiens
  misc_feature (1)...(541): n = a,t,c or g
ttggnnnncnnttggnnancagctatgacatgattacgaatttaatacgactcactatagggaatttggccctcgaggccaagaattcggcacgagctttttcacatgtatatgagttagcaaaaatcatacacctctgatggtaaccaggaaggaaaacagcaatcggaactgtttatctgtgtagtcacttgaacacagctttgatttaagatcctcctctcgttttcatacgtagcctgttttgggccaaaatgttcagaataagctatcatttgctaagtgaatttgagttctgctggagatttattttaaatgcggtccaagattcaaagagtctgcttcctcagggaacaagcagaacccttggtacaaaagcctgtatttaattgccctggaaagtatgctctctggcttcagctgcacggcactactgctgggcgatgggaagtggntgggagtggncctntccaccctntgagacagcctnctagatctatcatcaagtcagctgaggnctgggaagatganagcnctatgg

SEQ ID NO: 19493 - DNA, 346 bp, Homo sapiens
gccctgtctctactaaaaatacaaaacttagctgggagaggaggcacgcgcatgtgtgtacacacacacacccccctgtaatcccagctactcggaaggctggggcacaagaatcgcgtgaaaccaggaggcggaggttgaagagagccaccgagccagctgagaatcctttttacttctccaacttctgtaggccacctgcattccttggcttgaggcccttcctccaacttcggcagagcatcttcaaacgttgccctggctcccttatcacgtcacctcctgctggctttgactctcagctccctcttatgaggatccctgtgattgctggacctacccaaaa

SEQ ID NO: 19494 - DNA, 363 bp, Homo sapiens
gtgggaattaagttcttaacacttgcctattggggatcatgttcaaaccatagcaaacccttagtatacataaatatctatgagcaagtactatataaataaataattgaataagtaaataaattgggggagaagagataaatctccggtatagaaagcttccaaataatttatatagatactctttcctcaaggaggtggaacataaatccctaccccttaagtgtggactacacttagcaacttatttccaaaaagtacaatatggaaaagggtagggagtaactttttaatgggaaacctggcaaatggtaccttatctaggtgacgaaatttaacataatcagtgataagtcatgttgg

SEQ ID NO: 19495 - DNA, 337 bp, Homo sapiens
cgaagcaggagttgttgttgctgaggggctgccgcagccgccgcgagcctccggacagacgccagagcgaggagggcgctacgcgacttggcaagatgacccagttcctgccgcccaaccttctggccctctttgccccccgtgaccctattccatacctgccacccctggagaaactgccacatgaaaaacaccacaatcaaccttattgtggcattgcgccgtacattcgagagtttgaggaccctcgagatgcccctcctccaactcgtgctgaaacccgagaggagcgcatggagaggaaaagacgggaaaagattgagcggcgacagcaagt

SEQ ID NO: 19496 - DNA, 452 bp, Homo sapiens
accgttatgacatgattacgaatttaatacgactcactatagggaatttggccctcgaggccaagaattcggcacgagctcctcgtttctgcagcaggctccttccaccgtccaccattcatgtggcagccaaaatggtcgtcctaaaaggcacatgcaaccctctccctcacatattggaaatccttcccagatgctctgtggtcttcaggatgaagttcgaattcctcagcgtggaataaaaggccttcatgttctggcctttgcttctctactggcctcgtccctaaccctcccttctttgtcagtgtgcagttacactgaggaatttgtgggatgcgtcatgatctctgtaacttctagtctgttgatatcctgcttctcttgcctggagtcctcctccttaagtctccctttcccattctttacctgctaatttttctggactcaac

SEQ ID NO: 19497 - DNA, 360 bp, Homo sapiens
gcgcatgccaccatacccggctaattttttatatctttagtagagacggggtttcaccatgttgaccaggctggtcttgaactgaccttgtgatccacccacctcagcctcccaaagtgctgggactataggcgtgagccactgcattcggcctaggtggggttttgtccccgttctgcaggagggagactgaggctcggaggttcagggcctgcttggctgtacccagccccagtatgtgccttggccacactagtcagatccttcccctcccactcctgccacccctgctcctgccctgtcccataattccaggttgaatgggggtggggatttggggagcaaaggagggctcaaaaa

SEQ ID NO: 19498 - DNA, 938 bp, Homo sapiens
ccaacaccttcctcaccaggctcctcgtgcacatgggtctgctcaagagtgaagacaaggtcaaggccattgccaacctgtacggccccctgatggcgctgaaccacatggtgcagcaggactatttccccaaggcccttgcacccctgctgctggcgttcgtgaccaagcccaacagcgccctggaatcctgctccttcgcccgccacagtctgctgcagacgctgtacaaggtctagactcaaagcctctcccatcccttggcctggaccagtgagctggggagggactcggatgaactgaggcgcagcctacgccattgccttggacaggactctggccacaggcagggcgggtctgtgtcccatgtgtcctgtcagtcccctgagtatgtgtgtgggtgtggcgcatgtgcaggtctgtgcctcctgtcgggatttgggttttaacgtcttctgctggcccagccctgctctgttgtggggagttggcccccaggggaaagggctgtgagctgctccgccattaaactcacctccacctgagggcgctctgctgatctccgcctgggccctgatggccgtccccacccacctgccttccggcccggctccctggcggagccagaacccaaggagttgcccgcgtgctgtccttcccctctgtgttgtgattgggttgtttcctgccctgcctggggctgcttctcgtcaccaagccctggtcctgcggcagctgtcacccctaccatccataccactgtgctgaccgctcagcctgaagagcagagaatgccatgggtgggactgtgggggtcggatcgtggggttgttggcagagggcaaccctgggccccacaccgtgtggacaggcagacaccagattgtccaagagcaggagctgctgggactgcgctggccccggacctaatgggcctt

SEQ ID NO: 19499 - DNA, 330 bp, Homo sapiens
ggaccatgagaggcagagtgccctggaagaggcccagcagaatccccgtgagggtattgtcatccctgaatgtgcccctgggggactctataagccagtgcaatgccaccagtccactggctactgctggtgtgtgctggtggacacagggcgcccgctgcctgggacctccacacgctacgtgatgcccagttgtgagagcgacgccagggccaagactacagaggcggatgaccccttcaaggacagggagctaccaggctgtccagaagggaagaaaatggagtttatcaccagcctactggatgctctaccactgcatgggtcaag

SEQ ID NO: 19500 - DNA, 566 bp, Homo sapiens
  misc_feature (1)...(566): n = a,t,c or g
gactgcatagggctcggcgtgggaggatcacctgagccaggaggcagaggcatgcagtaagccaagatcacaccactgcactccagcctgggaaacagagcaaagaccttgtttcaaaaaaaaaaaatttaangtntaaaattcattggtagagagcagacncacaaatgagaaagagaagaggactcaaatgtaaccactacagaaaactaccaaatggccanacgtgatggctcacacctgtaatcccagcactttgggaggccaaggcaggtggatcacctgaggccaggagttcaagaccagcccggntaacatggtgaaaccccgtntccactaaaaacacaaaattanccgggcntggtggcgtgcacctgtaatcccagctacttggaaggttgaggcagganaattgttaaaacccgggagggcaaaggttgcattgagttgaatcacttattgcctcaacctgggtacananagagctcctntaaaaaaaaaggcnggcccagggttaaacctgaatcccaaactttggaggccaaggnggcaatacttnggtaagg

SEQ ID NO: 19501 - DNA, 321 bp, Homo sapiens
aggacagctgagctgtgggttctgtgatcaactgccctctgctggtgagtagaaataatgagtggaaagaggaccaaaggctcatttcaggttgaaggtgtcaagaagatctttttcagccttttattagagaaaaattcaaacttaaataacagacagaagagtataaaacagccccatgcatctttacctagctttgacaatatatcagctcatggccaatcttgtgtcatctacccattacccactgccctctgccatgttttattttgaagcaaatcccagacaacatatcattgcatctggaattattttagtatg

SEQ ID NO: 19502 - DNA, 380 bp, Homo sapiens
gggcatgtacctcactcgcaacgggaacctgcagaggcgacacacgatgaaggaagccaaggacatgaagaacaagctggggatcttcagacggcggaatgagtcccctggagcccctcccgcgggcaaggcagacaaaatgatgaagtcattcaagcccacctcagaggaagccctcaagtggggcgagtccttggagaagctgctggttcacaaatacgggttagcagtgttccaagccttccttcgcactgagttcagtgaggagaatctggagttctggttggcttgtgaggacttcaagaaggtcaagtcacagtccaagatggcatccaaggccaagaagatctttgctgaatacatcgcgatccaggcatgcg

SEQ ID NO: 19503 - DNA, 346 bp, Homo sapiens
gagagcaaggttgaagaaagtcaggaattgattccccattaaagattgcaaactgatggcccgcaggctagatactgttttgtttatgcacacaacatttaacctttttttggttcgaactttttgaaggctttctttttctttgcaaagatttaaaaaatctggagatttcccatgagaatctcattttctgtcatctcctaaaaaagaagaacatcacaagttcaagcaatatacatagcaccagttatctggagcagagaaatgctgcccattcccactttgccatggacttcaactcatttcagtagcctgcctgtctgctgtctatccctcttctaagtgg

SEQ ID NO: 19504 - DNA, 506 bp, Homo sapiens
  misc_feature (1)...(506): n = a,t,c or g
tgaanncgttttccacntgattacgaatttaatacgactcactatagggaatttggccctcgaggccaagaattcggcacgagcccagatggtggatttatcacacaaaaactttaaattggctttggtaactgtgatccaagagataaaagtgaaaacacttgcaatgaatggaaagatagaagttctcaacagaaaaacacgtactttaataaaggactcaaatggaaaatggattgatttaatggcagagagagatgaaaaaagtgagtgaacttaagacagataaatataagtaattcaaacaatagaaattacctaaaataagagggaaaatggaaaaaaaatgaaccaactcttaaggacttgtaggacaatatttggatttctaacatttgtgtcagcataatgccagaagaggaaaaacaaatatctgaagaaaaaatatttaaagatacaaggcctgaaaactctccaaacttggtgaaagacataaacttacagat

SEQ ID NO: 19505 - DNA, 362 bp, Homo sapiens
gcctgcccacatccagtcaccccatcctcatctggggcgactatcccttctctccctctccgtggcagtggaaagaaactggatttggaatcaggacaagcccggcttccagtcccagccttgccactggagtggctatttcatctcactgagcctatttctccttctgcaaattaagaatgatgatcaaacgtatcccatgttggtgtcctggggatgtgaaggagtattcttcctatcggtgtgtctagcaccaagactggcacaaagaaccaactcctgaaaagacactagccttattaacactattacgattccttccttcccttgaccaatgagcatgctcaggaggagaaaattat

SEQ ID NO: 19506 - DNA, 429 bp, Homo sapiens
tatgacatgattacgaatttaatacgactcactatagggaatttggccctcgaggccaagaattcggcacgagcaggcacggtggctcacacctgtaatcctaacacttggaaggctgaggtaggaggactgcttgatcctaggaggcagaggttgcaaggagcagaaattgtgccactgtactccagcctgggcaacatagcaagaccctgtcattcataggtaggtggatggatggatggacggacggacagatagataggtagaaatgtaaattacagggctacgctcagtggctcacacctgtaatcctagcattttgggaggcgaaggcgggcggatcaccagaggtcagcagtttaagaccagcctggccaacatggcaaaaccccatctctactaaaaatacaaaaattagccaagcatgct

SEQ ID NO: 19507 - DNA, 388 bp, Homo sapiens
  misc_feature (1)...(388): n = a,t,c or g
ggaagataaaagaaattaaagcttaaaatgagattccctagaatgtcaagtctctgtcaaattaatgaattgggtgctgcattatcataaaagggaattccttttcatctgcataaaggtagcttggaaacttctatggtacatttgatctttcctttcctatataatatgcatttagtcctctctcaacatatatatctctatatgtgtgtatatgtgtgtgtgtacatatacatatatatatattgcagatacataaacttttactgtgtatcccataatgtagtacattttagggcaccctttactaggcaactatatccttgaatgctttggcacattcatactttctctctactaccattcctgtatcagctgnggttcctct

SEQ ID NO: 19508 - DNA, 340 bp, Homo sapiens
  misc_feature (1)...(340): n = a,t,c or g
gggaagtaatgatccttgtgagcaaaaacaggtcagtatcctcttgttttgactggatcagagtgttcaggcaaagcagtaatcaaactcctttttccatttactgctgttgtatagatctggtcccttggccagtcacagtggctcaagcctgtaatctcaacacttggggaggccgagacaggtgaattacctgaggtcaggagtttgagaccagcctggccaacgtgctgaaaccctgtctctactaaaaaatacaaaaaattagctgggtgtggtggtggntgccgtgtaataaaagctgctcgggaggctgaancagganaatccttgaacccag

SEQ ID NO: 19509 - DNA, 474 bp, Homo sapiens
  misc_feature (1)...(474): n = a,t,c or g
ggagagctttcccatcattgagttaccagcacccatttgtatgttgctgatagtatttaccgtacatttaccatactctggtatatgttattgtcattcacttactagcctaaccctgttagactagattataaactatttgcagttaggaattatttataccagagcactcagcccagaatctagtcaaaatccttcattttatagatgagttttacatatgaataaggcctgggctagtctagggttataggctctgactttctcttacttttcttattttggaaggaaaattctatttttatccatgaaaaacagataaggagctactctacagctgagaagtaacttaggccaaatactcaaaagaagctgatctttattcctagaactatgaccattantacttattttcaaattgantaaaccaataaactaaaactagtggtgataccacatcatatatgncttgga

SEQ ID NO: 19510 - DNA, 343 bp, Homo sapiens
gtgggatgctcactaccacttcttcaaatccagctaaaagcatcacggcctcaatgaagcctactccagccagaactgttcacgtgcctcctctctgctcgtgtcctacatattacctaagcagagctcaccaacaatatttttcatcaacagcttagagcagcgctgccaaataaaaataccatgtcggtcatgtaagtaatttaaaattttcttagtagccacttttaaaataggaaaaaggtgaaatcagtcaattttatttaacccgatacatccaaaatattatcactgcagtatacaatcaatataaaaaattacggagattttcttttccatgctc

SEQ ID NO: 19511 - DNA, 380 bp, Homo sapiens
gcggcacgagaactggatagatcttgagatgagcattccaacaccctaagcatacagaataacaggagctaccttttgttatgaaacagatgccagttcccctgctataaattttacatgctggtcgggctcagtggcttatgtctgtaatcccagcacttcgggaggctgaggtgggaggattattgaactcaggagctcaagatgagcctgggcaacaaggcgaaacgtcgtctctacaaaaaatacaaaaattagccaggtgtggtggcgcgtgcctgcagtcccagctacttgaggggctgaggctggaggattgcttgagcctgggaggttgaagctgcagtgagctatgtttgtgccatcacactccagcctgg

SEQ ID NO: 19512 - DNA, 330 bp, Homo sapiens
gcaattatacaaaattcaatttattattatttttattttttgagaccgagcctcactgtattgcccaggctggagtgcagtggcgtaatctcggctcactgcaacctctgcctctcaggttcaagtgattctcttgcctcagcctctcaagtagccaggattacaggcgtgcaccactacacccagctaatttttttgaatttttagtagagacagggttttgctatgttggccaggctggtctcaaactcctggcctcaagtgatctgccatatctacctcccaaagtgctgggattacaggcctgagctagcacacctggcctaatat

SEQ ID NO: 19513 - DNA, 383 bp, Homo sapiens
gagctgaatttgtaaccatggtgctggcacactgtggtaattgaattctactgggagctttcctccaactacttgcttcaaaatggttacaaaactcccagtcaagtctttatatccagatgaattctccttaatcattctaagatatatatgcaaggaggcagccatgaccccaacatctctgtcacaaagtgctttccgaaacttaatatgaatatgttgtacttgattaggagcaatgagatggaatttgtataatgccagaacagcttttcttcgtacaatctccctgaagacaaaaaatgaaatttaaacaagacaatctgaattctcaagtatttactttgaaagattataggccagatgatttcaaaatactggct

SEQ ID NO: 19514 - DNA, 203 bp, Homo sapiens
ggtcctgctcatccaaccacccctaaatacccaccctttggactttgagctgaacatgcccactggcccccaggccacatgggacctggaggagcctacctggggcctgcccctgccagcaggtgccagggctggtgaggaagagctggggggcagaggtaaagccctgcaggggaggccacagggtccatcccgtcttcagg

SEQ ID NO: 19515 - DNA, 503 bp, Homo sapiens
  misc_feature (1)...(503): n = a,t,c or g
gaaaatgatttgtggaaatgcttaaaatagacctaactgaatacagtctcatcttgccgcgcctggcttacctatctgtggaaagctaggcttcccaggctgggctctgcctgtctggtgcctggaggtgtgggagggaagatgagttatttaactggtaagcgatttgaaacactatttttatattaaagtaaatggcatggagtatagtgcaaattcatttttaagatagaacacaaaacttgaaagaagttttatgcgtgtgacagtgtatggggctgcagttggtctccctggaggggacttccacacctcctgcctttaggccatgggtggaaagtgctcagtgaagtacacctgtgtggcccagttctgaaagctttatacagttgaattttaagtggggttgataacaccttggactggtagtggtaaaaatctangggtgacctttaaatgccacagtttttaaaaatnttttgtgcttttatagatagaaaagg

SEQ ID NO: 19516 - DNA, 429 bp, Homo sapiens
  misc_feature (1)...(429): n = a,t,c or g
ttggnttntgtntcgtnaanccctttgntatccntctatctattcgatgatgaagataccccaccaaacccaaaanaagagatctctcgaggatccgaattgcggccgcgtcgacggaaaacattaattctttctgcctttgctgatataatccacatagtaataatttaagctataatttatttttaaaatgagtgcctcttgggaagcttcttttctgttctaacagttccctgttaaaatgaaaatcttaggccagtgcagtggctcacacctgtaatcccagcactttgggaggctgaggtgggtggatcacttgaggtcaggagttcgagaccagcctggccaacatggtgaaaccctgtctctactaaaaatacagaaaaattagccagggttggtgcatgtgcctgtaatcccagctactca

SEQ ID NO: 19517 - DNA, 368 bp, Homo sapiens
gcggcacgaggacaggaaggtgaagaagaactcatcatgctggaagggtggtccaccctaactccgcagggacagaagctcctgtgtctgggacccttccagaacttgctctatgtatctcttcaagtgcctgtgtatttatatcctttcaaatatcctttgtaataaatcataaacatgtttccctgagtttttatgccactctgtcaaattaattgaacccaaagagggggttatgggaaccccaatttgaagccagtccatcagaagttctggaggcctggacttgagactggcgtctaaagtgggcaggcagtcttggggactaagccctcaacctacgggatctgaaactgtctcctgggagg

SEQ ID NO: 19518 - DNA, 345 bp, Homo sapiens
  misc_feature (1)...(345): n = a,t,c or g
ctccacttcactgatctgaaagttgagggtgttggaatagaggtgcagggcggcccggttactcttcctgacatgcagggagacatatttggcattgaagttctctatcatggctcgagaggcctggtccatcagtttctgagccagaccgaggcgccggtgggaacgcttcacagccaatgaggtgatatgtccatggggcacatcatctgggtcctcttccattttggccaggacataccccacaatctcgtgccgaattcttggcctcgagggccaaattccctatagtgagtcgtattaaattcgtaatcatgtcatagctttagggnntcaaggggncaa

SEQ ID NO: 19519 - DNA, 335 bp, Homo sapiens
  misc_feature (1)...(335): n = a,t,c or g
gcaatggattttgagcacctcccccaaaagaaataaaaaacatccaacatggtatactaacttgatattattgcttcttaatttttgcaaagaggaaaagaatcagaatttgcataatttagccccacattgagaataatcaatacagtgagagaagaatttttattgcttaaaagaaaaacaggctaaatgtcctttttttttttccttcaagggtaaggaatntgaaaaaaccanattttaaanccantaaaaggaanggttatnatccancagcaacngntgcatgtgggtgaaaaaaanancccancnttnttngccaaatccntagggga

SEQ ID NO: 19520 - DNA, 362 bp, Homo sapiens
caggttctatgtagtcgtcaggcgggcaggtcctagcgtcagactccattatgtactgactgtgtgtccttagccaagctatttaacctctctgtgcctcaagaaaaaaaggcataaataagagtactgaccaggcgcggtggctcacacctgtaataatcccagcactttgggaggcccaggcgggcggatcacaaggtcaggagttcgagaccagcctgaccaacatggtgaaacctcgtctctgctaaaaatacaaaaattagccgggcgtggtggtgcatgcctgtaatcccagctactcatgaggctgaggcaggagaatctcgggaggcagaggttgcagtgaccgagatagtgcc

SEQ ID NO: 19521 - DNA, 377 bp, Homo sapiens
ttttatttgaaggctaaatgaatttaaagtaacacgaggaaaatgaggtatgttaggaaaaaatgtacaatttgtttttcctaccttaatatctctgtaaggtaagttttacaattttacaggtaagaaaagtggaggagaggtagaataagtatttggaatactcagctaaggaatggtaagagtcacaatttcagctgaagtctgccttgcttcaaagtcactacccatccccatcagccacattgctttctaaacatttaatgtgcgtggccatctagccacacagcctggcctttgataaagagatgtgtaccgtggagtgtcacctgttggttcatgatcaggggagacttgtgtctgtacatggtggattg

SEQ ID NO: 19522 - DNA, 213 bp, Homo sapiens
gcttccccaagaaggtgagtgcttgtcatggaaaatgtcctgtggtgacaggcccagtggaacagtcacccttctgggcaagggggaacaaatcacacctctgggcttcagggtatcccagacccctctcaacacccgccccccccatgtttaaactttgtgcctttgaccatctcttaggtctaatgatattttatgcaaacagttcttgga

SEQ ID NO: 19523 - DNA, 478 bp, Homo sapiens
  misc_feature (1)...(478): n = a,t,c or g
ttggccccccancagctatgacatgattacgaatttaatacgactcactatagggaatttggccctcgaggccaagaattcggcacgaggagacagaggggaatatactaagaatacgtccaaagccccacatgctatgctaagcctagagattacaaagatgaataagtcagttcctgtcctcaagtaacctactgagaaatctattcaatacttgaatattataaaactaaacttttcagacttcctctttctgtaaaggacacaaaaatagcagcaaaaagataataataaagtattgctagtaccatttttcggcctccagaagatcctgattcacactattggtgctgtgctctctgccatcaaatgttctgattttgggatattctgttcttcctgtacatgctgctctcatttttaaattgaaagcagcttgngctatctgcttataatgcttcctgctaattaggatctg

SEQ ID NO: 19524 - DNA, 364 bp, Homo sapiens
ggacttaagttgtcaactctgtgctgataatgaccgaattttccatcagccttgaattctcacacaaaccccactcccaaattctaagtaactactcttattttctcccaactcagcgcttagacagaagtcgccttcatctccccttcctccactcaataggttactactgttgattcccctatttgtatcaatagccgaattctccctatccctgatcacaaaacctgggaaacagaggaagcacagagaggtctcctttctccctcatatccactaatttcttgagagtggtctctgttatccattgctgcataacagatgaccacaaatttagcagcttaaaacacaaacgtttatcatc

SEQ ID NO: 19525 - DNA, 310 bp, Homo sapiens
  misc_feature (1)...(310): n = a,t,c or g
cctaatttctcttaccctgtaaatttctgtgtgggtgtgtgtgtgtgtgtgtgtgtgtgtgtgtgagagagagagagagatagatacagggaaagagtgngtttaccanatntattatataggaaggtttgncgtatcntntnccatctctcaattctnaagtcccnattttcatccntgggaganntttctaggatagggtanctnatggnncntattaanttttantnntggaattntctaattgtngntngtggttacctgaanaactntctcntaaaaanggnccngtntantgnnatataatgtg

SEQ ID NO: 19526 - DNA, 392 bp, Homo sapiens
gacttcttccagttcatagtattgacttcagcccaaacggagataactccctgggtgtccttgagggattgagctgggctggacagctccccttgagccaactctaggagtacaatgtcaggggaaccccagtttgtgaaaaggacttacactggaggatatttgttatctggggatatgatgcggtggcggcggcgcctcaagataaggggctggggtttctgggtggggggccaacagagtggtgccagtaacagccccagatagaggagtacgcaggcccagcatgaggcaaccttgacccagaaggtggcccagctacccttgatgaaggtcttttccagttctgctccctcatagctgtgtaaccaaaggctctggttagagaatat

SEQ ID NO: 19527 - DNA, 344 bp, Homo sapiens
gttttttttttcttgaagtttgaatttctttaaagtagaaggagaatttggaaatgaagcattcccttcagaataaattagtgtctgtagaagagaaaaacaattaacacattcatgcattatggcttagttttcacctttctttccaagggcaatttatctaagaaaagctgtttgtcctgatttcggtgatttattcatatgcttgcatttgcctaagtatatttgagtttcacagtctctgcttccagcccaggacaacacccttgtaagctctggtcacaaccctggagcatgaagtctgagtggaaggttctagactggtgcttacctgtggctccaaa

SEQ ID NO: 19528 - DNA, 328 bp, Homo sapiens
gattggatttgactgaagtcccagttatgtctctgccctcccatgacctttagcagggcaggtttctacactgtgctgggttccctgaaatcacagaatgaggctggtaaggccggcatagtgggtctagtgaggaggtcaatccgatgggatctggaatccacgggcctggttctgagcctgctctcccatctgtaatggtgattcagttccttaacctctcagggtgcaattccttcaagggtttattattactttttgcttttttttgtccatactagaccataagcttcctttttattttgagacagagtgttgctgtgttgcc

SEQ ID NO: 19529 - DNA, 376 bp, Homo sapiens
gcaggaactcttcctctgatcctcattgccttagcggcaccagggttagaatggctgctgttggagcccacgtgtttggaggtttgggatcagatgagatgacctttcttaccttgaaattcaagggtttttttcttacacctcttgactgccctgtagactcccagtatgacattgatagagcatccttttggagaccaagatgcattcccaaagctataaacacgaacatgtgtgttcaggcttccttaaatacatgttgtcaccaaaagctgattcctgcttttgtgcaaaatggctcttggtgggtctgccactctgagtgatcagtcatgtcagatgccactggacccccactacccaagtgactttccct

SEQ ID NO: 19530 - DNA, 408 bp, Homo sapiens
gccgacttgccaagaagtttcaaagacaagcagcaaacttacaagattgttaccgactctatcagggtataaatcaactacctaatgttatacaggctctggaaaaacatgaaggaaaacaccagaaattattgttggcagtttttgtgactcctcttactgatcttcgttctgacttctccaagtttcaggaaatgatagaaacaactttagatatggatcaggtggaaaaccatgaattccttgtaaaaccttcatttgatcctaatctcagtgaattaagagaaataatgaatgacttggaaaagaagatgcagtcaacattaataagtgcagccagagatcttggcttggaccctggcaaacagattaaactggattccagtgcacagtttggatattactttc

SEQ ID NO: 19531 - DNA, 423 bp, Homo sapiens
  misc_feature (1)...(423): n = a,t,c or g
gctactgctcctacttcctgtggttcgagaatgacatggggtacaaactccagatgatcgaggtgcccgtcctctccgacgactcagtgcctatcggcatgctgggaggagactactacaggaagctcctgcgctactacagcaagaaccgcccaaccgaggctgtcaggtgctacgagctgctggccctgcacctgtctgtcatccccactgacctgctggtgcagcaggccggccagctggcccggcgcctctgggaggcctcccgtatccccctgctctaggccaaggtggccgcagtctgcctttgcatcctgtcctccagccacccttgcttgccactgttccccatgacnagagcctcctgtctgcagaggccatcctgaggatagggcanagtgcccagggnggccccagggcttt

SEQ ID NO: 19532 - DNA, 534 bp, Homo sapiens
  misc_feature (1)...(534): n = a,t,c or g
gaggtagctcgaagtcttcccgcatgcgcgtggaaccgctcaatcttcgcttccctcaattttaaggaggttaggcgggcgaaagagcgaaatcgtcccgaaaagcaggcagagcatgaacgggaggcgccaccagaaccgccaacaacacccgacccaaatcgcgacatccagttaggacgcttaccagaaccgttcacgtaggacccaccccagagttaggtaagtcgacctcaaagcgtatacgaagaagcagctcagtaaaaacggttacgataacctcgaaagaaaaattatatgaggggactacgaaatagtttaaccagtaccaagtcgtacgccaaaaccgcggcaacgacgttcagtttacgagatacgttaacgggtagaacacaaggatcagaacaggttcataccttcaggggaatcctaccctcgtctaggagagaaccccaaactatcgagaaaaagaggacgcaccccntgtaacgggatgcanccccncaanaccatatccncgatggttttttaccc

SEQ ID NO: 19533 - DNA, 486 bp, Homo sapiens
  misc_feature (1)...(486): n = a,t,c or g
gcaacgccagcttttgttatttattcaagactcccccactcttcctcccttgacacttgagtcgtatgtggttgtgccngaatatcttagtccagtcccctgatgatggacgtgagatcagttccgatcttttgtgatcacgaatagcactgcattgaataacctgtagcttgtgagccaacccctccacccaccccttaaggtatgtgaaccccatgataaccttggccttggactttccttcccggagcctgcagaacgaggagagatatgtgggcatgtggccagctctggcctggcatgcaaacaggcctgtggggtggggtgggaggtgggggtaggccctccctgagccaggtgggacagattcctgctgngtcaanctggnnantgaggagcacaaggtgagttcaaanggttgggcaaggcaccagccccaaggtcctggngaatgccntatgtgactggagaaaggaacctgtctgg

SEQ ID NO: 19534 - DNA, 500 bp, Homo sapiens
  misc_feature (1)...(500): n = a,t,c or g
gaactggcctgtcttaacttactaaagaaacaaatgaaataaagttacaaagctttattttcaagttttctaggtcttggttctctcctcctttgctggcacactgttccgaatgatgtaccatggaagttgtacttccctttccaccctgctttctcaaatacattttcctgacaggaaagtaggtagtttggtttaagagccttttctgaactgacctgaaccgagcgtagccagggagggaaccttttacatttctactccttctagttctgagcctgctgcaggctgtctgtagggtaagggtcacagacaaaagtgacaaaatatttgaagtgataatgacttaactacagtatttttctttcctcacttcttttataaaagcaaatgccagcctggacaacggggtgaaaccnnatctntaccaaaaattaaaggaaattanctggcatggnggcatgancctgtggcccaggttcttnanaggntnaagtgga

SEQ ID NO: 19535 - DNA, 325 bp, Homo sapiens
gtgaagttagaagtcgaaatagacaaagaatcaaggaaaattaacacaaattagttagcttgggggaacaaattaccgtttaggtccactaaatgttgggcaaacctcttaggtagtattgtccccaacatcattgatgggaaacccaagtggagggtttgtccaggataacacaaacattgcccagttgagccagaatttgaactcaatgttctgctcacttcaaaatatgtgctccctgaaatagggtatgactccctcatgaaataattttattttccttgctgagcagttttgaattagtattttagaatggaggtttata

SEQ ID NO: 19536 - DNA, 337 bp, Homo sapiens
gtcacagaatattattttgatttttttaatcattaaaaaaagtaaaaaccactctcacagcccttacattaaaaaggaggtgggccagatttggctgcaggtgggagtttgcagaccccagttctagaggggtaaactaatggtttaatgaccacagctgctgctcacacatcaagacagacagacatgggccgggcgtagtgactcatgcctgtaatctcagcactttgggagactgaggcgggtggatcacttgaggtcaggagttcgagaccagcctggccaacatggtgtaaccccgtccctactgaaaatacaaaatattagctgggcgtgg

SEQ ID NO: 19537 - DNA, 323 bp, Homo sapiens
gcagagtaagactctgtctcaagaaaaaaagagttattgatgttttgcttattataagcagcaatgttttgtagtaagccatttttaaatagtgaattttttgctgtatcagaatatagtagcatagtaatttttactcttatttaactcatagcaaaggttactcttatttggaattctcctttcagttaaataatttataccagactttctgaaaatgtttgaggaggattatatgggttcttatttactggttctttgagaatttcaaaatactttacacatttgctttatattcccatagcagtttagatagggtgtgt

SEQ ID NO: 19538 - DNA, 457 bp, Homo sapiens
  misc_feature (1)...(457): n = a,t,c or g
gtcgaactcctgaccttaaatgagcctcctgcctcagcctcccaaactgctgggattacaggcgtgtgccaccatgcctggctaatttttatattttcagtagagacgaggttttgccatgttggccaggctggtctcgaactcctgacctcaagtggtccacccaccttggcctcctagagtgctgggattacaggtgtgagccactgtgcccagcctcttttgctttcttaaagactttggtcgggtatttgtgttgttgagtattgtgtctgggtgtgggtatttgattctttttttgttttgtgtttttggctgtcctgtctattggatgtgatatgttatggatgtgatggtgttagtgtcgagcgtgctgtagaatctcccatttctgaaacaggcgtgaaaacctgtactgattcccacgtcctccagctaccacttcatttgtccngtt

SEQ ID NO: 19539 - DNA, 358 bp, Homo sapiens
gcatcccaagggtaaatcccacttgatcatgtgaatgatccttttaatgtgctgttgaattcagtttattagtatattggtgatttttgcatccttgttcatcaaagatgacatggtagcttggattacaggcgcccgtcaccatgcccaactaatttttgtatttttagtagagacagggtttcaccgtattggccaggctggtcttgaactcctgacctcaggtgatccacccacctcggcctcccaaagtgctgagattacaggtgtgagccactgcacctggcctgcggtattttcttttaggacatttaacagatgtatttgattactgataagactttccatattaagttga

SEQ ID NO: 19540 - DNA, 541 bp, Homo sapiens
  misc_feature (1)...(541): n = a,t,c or g
ccattgaancccttaacagctatgacatgattacgaatttaatacgactcactatagggaatttggccctcgaggccaagaattcggcacgagaaacaatgagatatataccccatatttatttttcctcctttatagttgtccttgcagtattgtacagtgtctctgaggccaatttttcctttgtaagtagtaagcataacttggaaattaggttctcagaaacagtgttcaaccataagtaaccactgaagacacctgtctgtgccgtcatctctctgtagttaattgggtctcctaactacagccctgtagttagttaggcttgtagttcagctataggcttgtgctgtagcttgttttgatcacatatagcaattatttatttatatatttcaaaacattgctcaattcacccatccagggattcctttttctgactgctctgtacctgtgtttacaggatacttatgtaatttatagcttagctgagcttttcgggtaatttctttgggaatgcaaataaagtactacattttaa

SEQ ID NO: 19541 - DNA, 346 bp, Homo sapiens
ttgtgaatgtttcttacaaaaagaaaaaggaacaaagaataaatagtgaccgtgaagaaaggtggtcttgatttggggttggggatagactggggcgaggcagaagcttgacaagaggctgctgatggctggagggagctgggagaagaggcgttccaggtcaccccaaacggagcgtagagcctggacagcctcatggggtaaggccacgccaccctcccatcccacagttgagtgtggaagactggatgtctcagggccagcagacgcccgacacgcagcctcattccccaggtggaatccacctgcagttatgggaggacaaaccaaccatcagtcgacgcgg

SEQ ID NO: 19542 - DNA, 1409 bp, Homo sapiens
  misc_feature (1)...(1409): n = a,t,c or g
ggtggaatattagatgacaaacttattagtaataatgatggcggtatctttgatgatccccctgccctctctgaggcaggggtgatgttgccagagcagcctgcacatgacgatatggatgaggatgataatgtatcaatgggtgggcctgatagtcctgattcagtggatcccgttgaaccaatgccaaccatgactgatcaaacaacacttgttccaaatgaggaagaagcatttgcattggagcctattgatataactgttaaagaaacaaaagccaagaggaagaggaagctaattgttgacagtgtcaaagagttggatagcaagacaattagagcccaacttagtgattattcagatattggtactactttggatctggcaccgcccaccaagaaattgatgatgtggaaagagacaggaggagtagaaaaactgttttctttacctgctcagcctttgtggaataacagactactgaagctctttacacgctgtcttacaccgcttgtaccagaagaccttagaaaaaggaggaaaggaggagaggcagataatttggatgaattcctcaaagaatttgaaaatccagaggttcctagagaggaccagcaacagcagcatcagcagcgtgatgttatcgatgagcccattattgaagagccaagccgcctccaggagtcagtgatggaggccagcagaacaaacatagatgagtcagctatgcctccaccaccacctcagggagttaagcgaaaagctggacaaattgacccagagcctgtgatgcctcctcagcaggtagagcagatggaaataccacctgtagagcttcccccagaagaacctccaaatatctgtcaagctaataccagagttagaacttctgccagaaaaagagaaggagaaagagaaggaaaaagaagatgatgaagaggaagaggatgaagatgcatcagggggcgatcaagatccnggaagaaagaagatgggacccccccccncnnaagcnanatgcttnatnggcccctttaacggggcctctctcccttcccttgggaanctgaacccctccctnccccccccccngagnntatggnccgaaattccgaaccnggannanccagctgcccgcaaaagnttcttccngctttcttggggnccnnaaaaaagccccnangcttntttggncctgcccccnggnannaacccccccnnggggncctncntttgnnaaccccccgggcccaangggtcccnntttttttcggggncttaaaacnntttncccgngngnggnncncccnnngggntcaaattgcccccccntnnnnggggccccnnaaaccccttngnaaannctnnaattttgccngnccnaaannnnncccccncccccccccccc

SEQ ID NO: 19543 - DNA, 363 bp, Homo sapiens
gcggcacgaggatatttataacgatgtttctgttacttattccatattctctttgccctcagcaagcacttcatctgtcgttggttccttgcccaatggggtcacctaaacttttattcttgaatggtctgggccatcagcagtcctgcctgatttgggttattatagtttttttttgattttaattatagggcattggagtgtaagggggtgcacccagtatgtctgggtgccctgcattccagacatactcatctttaccatcactgtgcagaagcaatctaatttttcccttcattatcaggattagtcacaccaaccatcaaagtggactccttctttgccttaccttcacttgcatga

SEQ ID NO: 19544 - DNA, 387 bp, Homo sapiens
aataagtcggttctagcgcagtttttttttcttgtctataaagcatttaacccccctgtacacaactcactccttttaaagaaaaaaattgaaatgtaaggctgtgtaagatttgtttttaaactgtacagtgtctttttttgtatagttaacacactaccgaatgtgtctttagatagccctgtcctggtggtattttcaatagccactaaccttgcctggtacagtatgggggttgtaaattggcatggaaatttaaagcaggttcttgttggtgcacagcacaaattagttatatatggggatggtagtttttttcatcttcagttgtctctgatgcagcttataccaaataattgttgttccattaactgaataccactctgg

SEQ ID NO: 19545 - DNA, 375 bp, Homo sapiens
ggccctcgaggccaagaattcggcacgagaatttttccccaatacttagattgtctccaatatttaagtcacttccaatagtttgctattacaaacatttttaagtgaataattttcatgtgactcattctatgcacatggaaatattagatcgtaagcatgtgcatctttaacttgtcaggacatttcaaatgctcttaggatgttgcatcaatttacatgctaacatctgtatatgactgcttccatttttcacatcctcaccagtccttggtaataggagtttttgttgttactgctttttctcaacctaatggttataagatgcatcttgctattgccttaatttggattgcactaatttctagttgtgcc

SEQ ID NO: 19546 - DNA, 359 bp, Homo sapiens
cgcctgcctctccagctccttcctcaactggtcacactggattaaagccttggttttttcaaaattggcttcctcagatatttgcaaaacttgtttcacctgttcataagcacttgcttctctttgctgcgtatctgccaagctgctccttacggaaactagtgcagacatcaagtcatctctttctcccagagaaagaccctctgtcctcacttggcgagcggcgggcggagcagccagaaaggctaagagccttcgtggcaggacggcatctgtgcgggacaatcatctattgtggagagggctgcaggggaaagcccagagaagagcaaattagttttttaaaaagtggggggagg

SEQ ID NO: 19547 - DNA, 539 bp, Homo sapiens
  misc_feature (1)...(539): n = a,t,c or g
gtgcatgccatttgtcacttaccatacttcaccatggccgagcttcatgtcacatggcctggcgattgtgcttgttcacactggggccaggattttcatactaaaacgtcactgacaatggggctacttttctcctgaatagctcctctgggcttgttgcagttctagttttcccagtagttccatggcaggttcaacctctcagtgtcctgaaaaatggaaccacccactaaccatatgcactggctgcccaggtggctgcactccggggatcacgtttcagtactgagttccttcacgcacttggttcaccaccatcactcttgagttttggacaaaagaggtgggtatgccaggcacagtggctcacgcctgtgatcccagcactttgggaagccgaggcgggcggtcaactgaagtccggagttcgagacagctgacagcatgganaaacctgtcnctactaaaaatataaagttggccgggtnttggnggccaatgctgtgncccggctatccggaaggtnagnaagaaacccc

SEQ ID NO: 19548 - DNA, 548 bp, Homo sapiens
  misc_feature (1)...(548): n = a,t,c or g
ggggacggggaccagcagctgtcgccgccgctctcagatttcctgttanacaagacaaattagagttttcctactgacttaacttgggtgaanagggaacagaaatctttgccccctgactttggnaatctcgtttaaccttcaaactggcgatgtcaagggttccaagtcctccacctccggcagaaatgtcnagtggccccgtagctgagagttggtgctacacacagatcanggtagtgaaattctcctacatgtggaccatcaataactttagcttttgccgggaggaaatgggtgaagtcattaaaangttctacattttcatcatgagcaaatgataaactgaaatggtgtttgcgagtaaaccccaaagggttagatgantaaagcanngattacctgtcactttacctgttactggtcanntgtccanagagtgaacttcgggcanaatcannntcccatcctgnatgccacggagaaaaaccanactatgganagnaacnggcatacagttgtgcaagnanananggggatcnanaatt

SEQ ID NO: 19549 - DNA, 387 bp, Homo sapiens
gaacgagaaccaggaggtcatcggtgtggccgagctggtgaacaagatcaatgggccatggttcagcaggttcgacgaggacctggcgacggccttctccatctactgcggcatcagcatcgcccattctctcctatacaaaaaagtgaatgaggctcagtatcgcagccacctggccaatgagatgatgatgtaccacatgaaggtctccgacgatgagtataccaaacttctccatgatgggatccagcctgtggctgccattgactccaattttgcaagtttcacctatacccctcgttccctgcccgaggatgacacgtccatggccatcctgagcatgctgcaggacatgaatttcatcaacaactacaaaattgactgccg

SEQ ID NO: 19550 - DNA, 333 bp, Homo sapiens
gcagtcccctgtggtttctgttggagcataaggtttccagtaagcgggagggcagatccaactcagaaccatgcagataaggagcctctggcaaatgggtgctcatcagaacgcgtggattctctttcatggcagaatgctcttggactcggttctccaggcctgattccccgactccatcctttttcaggggttatttaaaaatctgccttagattctatagtgaagacaagcatttcaagaaagagttacctggatcagccatgctcagctgtgacgcctgaataactgtctactttatcttcactgaaccactcactctgtgtaaaggcc

SEQ ID NO: 19551 - DNA, 428 bp, Homo sapiens
  misc_feature (1)...(428): n = a,t,c or g
gcggcggaggaggcgcagccggacatttagccgctcatcttcgatgaaatcgttagcaccttaggagaggggaccttcggccgagttgtacaatgtgttgaccatcgcagcctctcctgccaacttacaggggtggggctcgagttgccctgaagatcattaagaatgtggagaagtacaaggaagcagctcgacttgagatcaacgtgctagagaaaatcaatgagaaagaccctgacaacaagaacctctgtgtccagatgtttgactggtttgactaccatggccacatgtgtatctcctttgagcttctgggccttaacaccttcgatttcctcaaagacaacaactacctgcctacccatcacaaagtgcgccacatgggcttcactgtgcangctgcaagttcttcatggatacnaactggc

SEQ ID NO: 19552 - DNA, 495 bp, Homo sapiens
  misc_feature (1)...(495): n = a,t,c or g
cccagttatgacangattacgaatttaatacgactcactatagggaatttggccctcgaggccaagaattcggcacgagcttcactcccatactgtagggctaggcaagcaaagcaaactgattctgcaatgcttctaatagttattcctgctcattattttagctagatgtattctaaagtctttatcccaaagagttgaatcaaaggttcttccactcctccaacctgattgtgctgacaagccactaagctgagccatctaatatacagggtggcagggatgaagtcaccgttactgtccaacagcttttattttaagctggtgtgggctgggcatatcaaagacaggcaaagaaaaataacttggagagttgccattgaggatatatccacagtgagccaacagcacccacacaagcagccctcgctgtataatgccctctactgggtcttgagggagattaaaaagaaagaactctttcattctggggaa

SEQ ID NO: 19553 - DNA, 337 bp, Homo sapiens
cagaacttcttcagttaaacaacaacgactggtacagccaacgctattgaggagtgaccttgtattaaataactgcctgctgctcagagatgatctttattctgtcattggggtatgggatagaagcccttgcttatttttaatctgatgaatctgtatagagcccatcgttgagttaccaagacaatacctgctacagtattttggggagcaaactaaagaccagaacttaaattttcactttagacattggatgaatagtatgaagacagtttttcagttgatttggataaaactattttagtgcattgacaagtgtaacttcaacttcatatag

SEQ ID NO: 19554 - DNA, 500 bp, Homo sapiens
gaatttgagcctgggagttcaggatgtgcctaacaacatggcaagatgctgtctcaaaaacacacacacactaacaggaagaccaggccccaggtccctttcatcctcattcattcataatttagtctaaaatccattaggtttcagaccaatcataggtgttcatgttgggaggcaacagtgacctggtggggggtgtcagcaaagcagggtgaggatagtgcttgtgtgttgtgtaaagaggggagtggggttgatgtcagcagcgacaggagattagttatatgcagaggggttgatcaaataaggaaatacattgaggacaatgggaagtgcctctctgttggagatggggttgtaaatatgtaaaagggaggaaactagaataaatcctgaaatgtaggtttggaattggaattactggcatgaattcatggttcccaaaatatcaagatgtattcagtatggtagtaatactgaaaaaaaaatgtagagagatt

SEQ ID NO: 19555 - DNA, 388 bp, Homo sapiens
cccacgcgtccgagagcaactctgccaccagtacaggctcattcatggacattgcttctacaaatacgagtaacaaaagtgacactaatatggagcaagttcctgccacaaatgatactattaagcgcttagaatcaaaattgttgaaaaatcaggcaaagcaacagagtgaatctggacgtttaagcttgggagcctcccgtgggagcagtgtggagagcttgcccccaacctctgagggcaagaggatgagtgctgacatgtctgaaatagaagctaggatcgccgcaaccacaggcaacggacagccaagacgtagatccatccaagacttgactgtaactggaacagaacctggtcaggtgagcagtaggtcatccagtcccag

SEQ ID NO: 19556 - DNA, 423 bp, Homo sapiens
gttggaatctgattgccaatgtgttatacctggagtccccagctggggtgggcttctcctactccgatgacaagttttatgcaactaatgacactgaggtcgcccagagcaattttgaggcccttcaagatttcttccgcctctttccggagtacaagaacaacaaacttttcctgaccggggagagctatgctggcatctacatccccaccctggccgtgctggtcatgcaggatcccagcatgaaccttcaggggctggctgtgggcaatggactctcctcctatgagcagaatgacaactccctggtctactttgcctactaccatggccttctggggaacaggctttggtcttctctccagacccactgctgctctcaaaacaagtgtaacttctatgacaacaaagacctggaatgcg

SEQ ID NO: 19557 - DNA, 622 bp, Homo sapiens
gtgcgcgctccgagtgtgtgtgtatttgtgtatcggcggtcccgcaggtcccggatgttgcggacagtatgaggcaagcgcagggggacggggaccagcagctgtcgccgccgctctcaggctctgggaaccacccttctactttctgtctctaggaatttcactactctagagatttcctgttagacaagacaaattagagttttcctactgacttaacttgggtgaagagggaacagaaatctttgccccctgactttggaaatctcgtttaaccttcaaactggcgatgtcaagggttccaagtcctccacctccggcagaaatgtcgagtggccccgtagctgagagttggtgctacacacagatcaaggtagtgaaattctcctacatgtggaccatcaataactttagcttttgccgggaggaaatgggtgaagtcattaaaagttctacattttcatcaggagcaaatgataaactgaaatggtgtttgcgagtaaaccccaaagggttagatgaagaaagcaaagattacctgtcactttacctgttactggtcagctgtccaaagagtgaagttcgggcaaaattcaaattctccatcctgaatgccaaggga

SEQ ID NO: 19558 - DNA, 207 bp, Homo sapiens
gcagatagtgttgctatttagcaggaatggatgtattctgatccattaaattcaggttaatagaactctatatgtaaaattacccatttggaatgatcttttacctttcaccttatcctggattctaaaatgtgcaaggattgtagtcattaaatatattggccttttgcttttactgtcctaccaatcaatccatgagtttttttg

SEQ ID NO: 19559 - DNA, 410 bp, Homo sapiens
  misc_feature (1)...(410): n = a,t,c or g
attcggcacgagcaaagcatttgtccacacaccacttagaaagcactgttggctcccacctgtgtgatggggcccgccctgtgggagactctgatctttgacatctgacttcagatcagatgggagggaagggggatggtgagagtgaacctcacatagggccggggcccatgtgaatatcggggcgggggggggggtgccccccnatgcnaaggggtgcctgcaggtanattcatnccnaanattctgggnaaatncccttggggcatnaaanatcnccccacnaaaanactttntgacnanattgancanaaantttntcgggnattggcccaccccnccncaaatcanagctaccatgaatcattgccanncgggcccgctgccaaaaatcncgtnttgggctaaaa

SEQ ID NO: 19560 - DNA, 325 bp, Homo sapiens
cgcggccgcgtcgactctgatctcagattttgtttctttgtttttgtaagtagccttcaaatgaaggccaagatacttttcccaaccttttgctcttgaaatatcacagataaagttcagagcaagccatggtctctcaaagcatggttcttataccacctgcctctgaactacctggagagcttgttgcaaatacatattcctaggccccattgcagatgtctgactcagaatctttgagggtgatgttccttggtgcttctggtagagactaaatttggagaaccatagatctggtagcttctgtagttacagtgactttttt

SEQ ID NO: 19561 - DNA, 328 bp, Homo sapiens
ggaatctcattgctccgtcatctctgtggcattctcggccccgctgatgttggtgagggtcagccacgctctttgcttctgagtagcccattgtgtggaaatgctacaatttgtttatgcatttgtctgtttccagttttttgctatttgaataaagctgctatggacatttgtgtacaagtcttttgtgaacatgtttttattgctcttggatactacctaagagtggaattgctgtgttgtgtggttaaaggtgtgaaccgttttccaaaaatggttgtactgttctacagtcccccaccaatgcttgagttccggggcctccatg

SEQ ID NO: 19562 - DNA, 493 bp, Homo sapiens
cagctatgacatgattacgaatttaatacgactcactatagggaatttggccctcgaggccaagaattcggcacgagggcattggaagtgggagagtcttgtgggactgagccttcactctgtgggatctgatgctatcttcaggtacagatactcctcaacttacaatgggtttatcaggatgtaaacacatcacaaattgaaaatattgactaggcacagtggctcatgcctgtaatcccagcactttgggaggccgaagcaggtggatcatccgagcccaggagttcaaaaccagcctgggcaacatggtgaaaccccatctctgcaaaatatacaaacattatccaggcatggtggtacatgcctatagtcctagctacttggaggctgagataggaagatgccttgagcccaggaattcaaggctgcagtgagctatgatcacaccactgcactgcagtctgggggactgagtgagatcctgctctaa

SEQ ID NO: 19563 - DNA, 496 bp, Homo sapiens
  misc_feature (1)...(496): n = a,t,c or g
ctttgantntgaanccattgctatgacatgattacgaatttaatacgactcactatagggaatttggccctcgaggccaagaattcggcacgagtttttttctggttctgtccactaagagagcctagaagtaatgacatcccactagcaatgtgcacacgccagcacccagatctcagttctaaattccactcttgactacaagggttccctggagaaatggctggttccaacactacagtaaggaaagtaggattaacctgaatcattttgctgtgccagaaagaaagaaagtactcaaagaatgacagaacatctccccaagtcacagaagccagcttgaagggacttccacaggccaaacttgggatcatctgagcatcagaaaaaataacagtagtaacaaagtatggcctggcacggtagagctcacgcctataatcccagaaccttggaaggctgaggcgggcggatcacctgaggtcaggagttcgag

SEQ ID NO: 19564 - DNA, 494 bp, Homo sapiens
  misc_feature (1)...(494): n = a,t,c or g
caacagttatgacatgattacgaatttaatacgactcactatagggaatttggccctcgaggccaagaattcggcacgagcccagctgcagaagctgccgccacctccaatgcacaaggtgtctcatctgaaaagaaacctgagccccagggaggcggcgcggagcgaccctggcagagctggcgcaaacagggcgagaggtcgctgggcagcgttcgaggaccagagggagctcggccacagaagaccccagtgatctgatcccgggatcccggctccaagctctcctcgcattttacagatttcacccccgcgactatctccccaaaacggagcctttatatcaagagaaggtgcgggagctggggcaaccaggactttctcgggcacccaagatgcgctccattaggaagaggtggacgatctgccaataagtctgctcctgacttttattanacntggaaatancnngaactggggggccccngagaccc

SEQ ID NO: 19565 - DNA, 327 bp, Homo sapiens
gctagaaagaagaatactgacctgagaggaggcccagtgagattctgaaacctaattcttcgaaggcgtactggcccttagttcagttattttagttgtataagttgatattttttttctggaatgtagccatttgctgttatctgggaaacaagattctaacaggaaaccagcctaagacacttcaggtcgagcgctgcctcggagtctgtgcccgtcgcgtcccctgcttgagttttgcacttggaagaaccctgcaccggctggcgtgtgcgacggcccagtcccatccagagcatggagcccgaccccagccagcgccttcca

SEQ ID NO: 19566 - DNA, 351 bp, Homo sapiens
gaggaagagatcaaagaccaaccacagaatgtatctgaaaatctgcttccacaaaatgcaccaaattattggtatcttcaaggattaattcataagcagaatggagatctgctgcaagcagccaaatgttatgagaaggaactgggccgcctgctaagggatgccccttcaggcataggcagtattttcctgtcagcatctgagcttgaggatggtagtgaggaaatgggccagggcgcagtcagctccagtcccagagagctcctctctaactcagagcaactgaactgagacagaggaggaaaacagagcatcagaagcctgcagtggtggttgtgacgggtaggagga

SEQ ID NO: 19567 - DNA, 320 bp, Homo sapiens
ctgaggtgacccgggcagcccttctcagtgggtcctgctggccgggtccgggtcccgggggtggggacagggttgtcctcggagcgttggatgatagagtcgatccagtttacaaactgtgccaccggggcaaaggcatcggggtagagccctgaggcgcagcctccccggacgaaggaggcaattccgtggattagcccgttgcagaccaaggggctgccggagtccccgcgtcacgttgagctcctgcaggacgctggcgatcccacggttcctgcccagaaggccccagcccatggccaggcactgcaccccgttgc

SEQ ID NO: 19568 - DNA, 501 bp, Homo sapiens
gggaaggtaatggctgggacgggctagcagttcaggggattctctctaaagaaatgctgttttgtccaggtaagaaaatgtgcttgtccatttagcccacaaatattgtgatttcccaggggttacaagagaggagacacattcttcgtccttaacagcgtgatggtcattgaatccttggtttcttgggaattatcttctttccctagttccctttgcaggagcagcagtggactgcaagtgggctctgggtgcgggttcgacggccatttagcaagttgtgacttgtgtgaaatcactcagattctgagttttggtttcctcatatgtaaaattaggacagtaatgtctaccttgtggagtaatggtaaggattaaatgcaaaagtagatatataaaatgttaatactgagtatagctatattgggccattcaaccccactggactgaactccatgagggcagagccatgacatcatcctccaccatgactgagctgtt

SEQ ID NO: 19569 - DNA, 378 bp, Homo sapiens
gttttttttttaatagggacagggttttaccatgttggccaggctggtctccaactcctggcctcaagtgatctacctgccttggcctcccaaagtgctgggattacaggcgtgagccactgtgcctggacgacctgagcattttcttagtccatgtttatttatgttacccacgtttcttaatcccttgactcctgttctggctttgttgcctcctttctcctcagtccttcaacaggtcccttgatgacatggggctggctctggttttccaggtgtcccctcgtcccagccacctcccacagagctgcatggccaacctggttctgggcacagggaccacctgacaggcagtgggcaacagccggggcagcagga

SEQ ID NO: 19570 - DNA, 430 bp, Homo sapiens
  misc_feature (1)...(430): n = a,t,c or g
atgcccgggatgatgtatataactatctattcgatgatgaagataccccaccaaacccaaaaaaagagatctctcgaggatccgaattcgcggccgcgaattccagatctatgaatcgtagatactgaaaaaccccgcaagttcacttcaactgtgcatcgtgcaccatctcaatttctttcatttatacatcgttttgccttcttttatgtaactatactcctctaagtttcaatcttggccatgtaacctctgatctatagaattttttaaatgactagaattaatgcccatcttttttttggacctaaattcttcatgaaaatatattacgagggcttattcagaagctttggacttcttcgccagaggtttggnctccnttccctantccnttgncgncntngcctntnnnctcntntcnntttcc

SEQ ID NO: 19571 - DNA, 418 bp, Homo sapiens
aattcggcacgagttaccctttaggttttaggaggcttgagaatggaaggatcctcatttctgcccttcctggttccctgctttggtgtaggggttaggaaaaacaggaaattcctctcagctctgcctcagatctcctacctctccttaagtcttgtagggggttccaaggatggctcttctaaccagaggctggcctgtctttaaaacttaactactttagggtggtgccaccactgcagactattgtggtactttgtgacagaagacatgtacacacacaccacacacatacatacacactctctcactctgtctctcttacctttagctgcttgatcattaagccatccaacttcatgccagttcccttctttatagaagagtgaagggaaagacttcctgggtttgacttaaa

SEQ ID NO: 19572 - DNA, 331 bp, Homo sapiens
gctggaagaattattaaagagtcttttatggtgaatttttttcctaaaataaaatgacagggttgtttaaaaaagaaggatatgtaggacaaaccagaaagtccaagcatgtcgtgaatgatctaggtcataatacagttagtaaaaagggaatttataaaaatgttatgtgattaattgactataatgaaattataatagtttttctaaaaaactggacttcagtattaaaaatacactcaataattggttaaaacaagatttcattagaaaaattgtgttactcttagtgcaagaagtttttaatttttaaattcaataatctgtttct

SEQ ID NO: 19573 - DNA, 553 bp, Homo sapiens
  misc_feature (1)...(553): n = a,t,c or g
ggccaagaattcggcacgagattctcctagggatgtgttgtcatttaaaagaggttgtgattagcatgaaggactggggacaggagcaggagatggcagagcagctgtaggcactgatgtaatgcctccagctttatgaggacgggcccaaccaggcttcacccatttggggccctcaagcgggagcgtcagtggcagccctcgccatcgtccgtctgttgaatgtattgccacatggccacattatgccccaggagccatgtgttggaggacagtatccttaggcttctcagaaattccacatgggagcctcaaatggacatgcttttcttgaaaacaaaaatatttgtaaaaatgtaacaatgggagtcgtttaatctcaagtctcccctataagcaaaaatagataaaattatgaaatgtaagatgtaaattatctgtttcttagctgatccttaatcttgatgatattttcaaaacaaatgatataaagacatgagaaaaggtttcctttaaaaagtcgtggttctcgccaggcgcantggctcatgcc

SEQ ID NO: 19574 - DNA, 682 bp, Homo sapiens
  misc_feature (1)...(682): n = a,t,c or g
gatagctcaagaacttagaattttgtggcaagattccgagaaagagtgaagaggatctcctatgggtgaaggcggaggagccttccccaggcgggcgtggccctgacctaggcagccagaccgctgtgtcgtccctttaccctatggagttgctgatgcctagaaagccaaagcagacagatgccttctgaggccacctagctgggaccgtttataaaaaggaaactgaggcccagccaggcacagggacttgtccaaggtcacaccgtgttctgtagagacctgggcttcttgcaagtgctctcaggccccagacaagaagcagcagaggcctgtgttggcccctggttttccccaggtgtttgactgtgggtggaaagtatgagagccctgggcccaaccctgctcctgaccanctgtgtatcttgggcaaatcacttcctcctctctgccctcaatccttctcancctgtgggcaagcaaggcctatctctgncccggttttaagccanaagctgccaaaaaaagccctggacactgttaaagggctnttcaccaaaggtgtnattggcatcagggtcaaggaaccggaccaagtgagcacctttctgctgnaactggccaaatccgaaatcanaaagggaaaaaaggaaaaatccccaatttgaaatccggggncaaa

SEQ ID NO: 19575 - DNA, 483 bp, Homo sapiens
ggagcggtgtggagcggagagaatactcgaagggctctcctgatactaacagttttacgatttaaaacttcgccagaatttcgacagggtctcactgtattgcccaggttggtctcgaactcctggcttcaagcgattctcccacctcagcctcccaaagtgctgggattacaggcgtgagccaccacgcctggcctcactcaaacagtaaacgagctttattgcagccgggcacggtggctcatgcctgtaataccagcactttgggaggctgaggcgggcagatcacctgaggttgggagttcaagaccaacctgaccaacatggagaaaccccgtctctcctaaatacaaaagtagccgggcatggtggtgcatacctgtaatcccagctactcgggaggttgaagcaagagaatcacttgaactcaggaggcggaggttgcagtgagccaagattgcaccattgcctccagcctgagca

SEQ ID NO: 19576 - DNA, 265 bp, Homo sapiens
ggggaccggaatgctaggaaggaaagcagagatggcaatttaaaatagggtagttttaaaaacaaaacaaaacaaaacaaacacaagtaatagtgtagtctgggagagcctcactgaaaggtgagaaagtaaaggacaagccatatctgggatatctgggaaaaggatgctctaaacagaggcagcagctagggcaagggcttgacacaaaggaggagtcaataaatacaagttaaagataacaccaaaatgtaaactttcagac

SEQ ID NO: 19577 - DNA, 550 bp, Homo sapiens
  misc_feature (1)...(550): n = a,t,c or g
cagctatgacatgattacgaatttaatacgactcactatagggaatttggccctcgaggccaagaattcggcacgaggtcagtctactcttccagtagaaactgttttgccacttttggggggaatcttgagctaccagctcatctctcagatggagtgaaggtacctgagcgcaggaaccatggtcttcattgctgcctcagcattagcggaagtgccacgggccggctcccagggggccagagtttcccaggaacaccattgagtaccactgaactagagtctgcaagttaaagtaaggcaagaaggaaaaccggaaacaactgtaaaaacctgacctttcgtcaccttaatactggccatcatttatcgagtgcttattatgtaacagacattgttctcagtggtggaatgcagtgttcctcaaacctaaatgtgggcctgaatcgcagcggatcttggtaaaaatgcagtttctnatcagtacctctgggtgcggnctgagattctgcatttncaacaagctcccaggatactttgntanaaaggc

SEQ ID NO: 19578 - DNA, 647 bp, Homo sapiens
gctagtttggaatgtccattaggacctttaataaatgagttaaaaatttgtcttatgagacacacctatttaagtacagattttggctttattgcccaaaaccctcctgaaagggtacggagagtcccctctgtgggctggcagtgtgaatgagatctgtttagtctcgtgcatatagttgctgttttttaaatgaacacagttgagtatttgaagtgaatttgaaaaagaaatgttacttaatctttccctaagcccatgggttacagaatgctagggaggcaatttggttacctgcaatggctgcttttgccagcgaggccaccattcattggtcatcttggtatttgtgtgtgaatctcactttcctcaatgtaaaaaggaatcaagtatggatttcagaggtgctcttagattccccatacacccaagggtaataaacgtgtacaagtacagtgttcatgatacgtgccttggtgggagtccgtggtgccacagggaaggggctcccactgcttctggtctccagggacagtgctgctggaaaggctagtgatgagcttcaccctggagcttcttccgggaccttgcaagcctctccatccagcatcttctctatcttacatgaatgccttctttctgaacat

SEQ ID NO: 19579 - DNA, 391 bp, Homo sapiens
gccaacagatatctcagctataacatctttatacctccacagttgcctcccctagctcttgagcatccactctctttctccaggattattgctggagtctcctaaagggacactacttccacagtttgtcagatcaacaccactcttctgtttaaaatcctcagtcaatttctatgggacaaagtgaaaaggaaaaaaatccaaattctttagtgtataggacccctgctcaactttccaactgcctgtcattccactctcccctcacacactccaccttggccttctttcagttccctgaagaacactccagcttttgttatttgcttaacttctagcatttttgctacccttcccatgtcttcgcagctggctgcttctattcctttag

SEQ ID NO: 19580 - DNA, 392 bp, Homo sapiens
gcttttatagtcacccagcatcctttgccaaacacagtgaaagacttttggagactggtcctggattatcactgcacatccgtagttatgctaaatgatgtggatcctgcccagttgtgtccacagtactggccagaaaacggagtacacagacacggccccatccaggtggaatttgtctctgctgacctggaagaggacatcatcagcaggatattccgcatttacaatgccgccagaccccaagatggatatcggatggtgcagcaattccagttcctgggctggccgatgtacagggacacaccagtgtctaagcgctccttcttgaagctcattcgccaggtggacaagtggcaagaggaatacaatggcggggaaggccgcaccgt

SEQ ID NO: 19581 - DNA, 341 bp, Homo sapiens
ggaagtatgagagagctaaggtgggagccagaggctgagagaagaaagggggtgacctagttcatgccaaatgaatctcacaagcaagactagattgtaaaatcagcaaagtcgctcacagctgcattatgtcctccctgagctctgggcacttttgcctttgtgacctccttcctccaacaattaacattaaaaattgtattttattataaagacaaacataatcatgactgaatttattattacagatatgttatgattagagtaatttttattctaactttaaaagaaatgaaaattaaacatttttgtggaccccaggcactgtaccttctgtggct

SEQ ID NO: 19582 - DNA, 324 bp, Homo sapiens
gcgggttaagattcggagagagaggtgctagtggctggacttgacctggaaagaatcttctgctgactctcaacttttcctggaaaaaatggatcattcccaccatatggggatgagctatatggactccaacagtaccatgcaaccttctcaccatcacccaaccacttcagcctcacactcccatggtggaggagacagcagcatgatgatgatgcctatgaccttctactttggctttaagaatgtggaactactgttttccggtttggtgatcaatacagctggagaaatggctggagcttttgtggcagtgtttttact

SEQ ID NO: 19583 - DNA, 407 bp, Homo sapiens
gtgctgttggagccgctgtggttgctgtccgcggagtggaagcgcgtgcttttgtttgtgtccctggccatggcgctgcagctctcccgggagcagggaatcaccctgcgcgggagcgccgaaatcgtggccgagttcttctcattcggcatcaacagcattttatatcagcgtggcatatatccatctgaaacctttactcgagtgcagaaatacggactcaccttgcttgtaactactgatcttgagctcataaaatacctaaataatgtggtggaacaactgaaagattggttatacaagtgttcagttcagaaactggttgtagttatctcaaatattgaaagtggtgaggtcctggaaagatggcagtttgatattgagtgtgacaagactgcaaaagatga

SEQ ID NO: 19584 - DNA, 1012 bp, Homo sapiens
gggtagaaacagagtactcctttctggactatgtgatgggaggctgtcagatcaacttcactgtgggcgtggacttcactggctccaatggagacccctcctcacctgactccctacactacctgagtccaacaggggtcaatgagtacctgatggcactgtggagtgtgggcagcgtggttcaggactatgactcagacaagctgttccctgcatttggatttggggcccaggttccccctgactggcaggtctcgcatgaatttgccttgaatttcaaccccagtaacccctactgtgcaggcatccagggcattgtggatgcctaccgccaagccctgccccaagttcgcctctatggccctaccaactttgcacccatcatcaaccatgtggccaggtttgcagcccaggctgcacatcaggggactgcctcgcaatacttcatgctgttgctgctgactgatggtgctgtgacggatgtggaagccacacgtgaggctgtggtgcgtgcctcgaacctgcccatgtcagtgatcattgtgggtgtgggtggtgctgactttgaggccatggagcagctggacgctgatggtggacccctgcatacacgttctgggcaggctgctgcccgcgacattgtgcagtttgtaccctaccgccggttccagaatgcccctcgggaggcattggcacagaccgtgctcgcagaagtgcccacacaactggtctcatacttcagggcccagggttgggccccgctcaagccacttccaccctcagccaaggatcctgcacaggccccccaggcctaggttcccttggaggctgtggcaagtcctcaatcctgtgtcccagaggtccctctgggccacaacccaacccttctcactctcctcagtgctagcactttgtattttttgatacttttatacttgtttctgcttttgctgctcttgatcccacctttgctcctgacaaccctcattcaataaagaccagtgaagaccac

SEQ ID NO: 19585 - DNA, 398 bp, Homo sapiens
  misc_feature (1)...(398): n = a,t,c or g
gatatggctcggcgtgggtgttactctcttcacaacagagagggaatcaagcaatggaaatcccagatcaaagccacagactctcagtagaggactgcaacaatggagacatcacatttgctagcatgagggccatgcttttacactgctcacccgtcacctggcgagatgctgctggagcaggtggcaatgaggagatgaggcactgactggtggaggggatgacaaatgagacttagtggttaaggaagcagacagaaagatggcagccccaagatgtnnagttactgtctacaaatgggcttggntgggctactcttgaagaaanaaacaaaaagggtagatgggagganaaagaacagaacaggagaaacagacttagtcagacaattgttttc

SEQ ID NO: 19586 - DNA, 348 bp, Homo sapiens
gcccgaatgacccgcacggctctgagcacaccgtcagcggacagcacttcgccgccgagctgcacattgtccattataactcagacctttatcctgacgccagcactgccagcaacaagtcagaaggcctcgctgtcctggctgttctcattgagatgggctccttcaatccgtcctatgacaagatcttcagtcaccttcaacatgtaaagtacaaaggccaggaagcattcgtcccgggattcaacattgaagagctgcttccggagaggaccgctgaatattaccgctaccgggggtccctgaccacacccccttgcaaccccactgtgctctggacagttttcc

SEQ ID NO: 19587 - DNA, 312 bp, Homo sapiens
  misc_feature (1)...(312): n = a,t,c or g
gcacctgagctcatccctgctgacatgcagcaatatctaaaagttccattatttaccataataaccatgacatatgagcacataaatgctgttttacattatctcctttaatctgaatcataactgttctaagtagattaaaatttccgttttatatatgaataagctaaaatttaaagttgagttaattttagcaagttcccacagctgagaacacagacaaccagcatccaaaccctgtcctctttttgtattagcacactgtcccttactcatttgnnncacttctttatattaagaagtatcttnaga

SEQ ID NO: 19588 - DNA, 539 bp, Homo sapiens
  misc_feature (1)...(539): n = a,t,c or g
gtgtnnnattgnananantagatcnctttngnaatttcctacgactcactatagggaatttggccctcgaggccaagaattcggcacgagtccacccccacacaaggctcggtgctcttcggcacggtcaacggtatgatagggctggtgacctcactgtcagagagctggtacaacctcctgctggacatgcagaatcgactcaataaagtcatcaaaagtgtggggaagatcgagcactccttctggagatcctttcacaccgagcggaagacagaaccagccacaggtttcatcgacggtgacttgattgagagtttcctggatattagccgcccaagatgcaggaggtggtggcaaacctacagtatgacgatggcagcggtatgaagcgagaggccactgcagacgacctcatcaaggttgtggaggagctaactcggatccattagccaagggcagggggcccctttgctgacccttcccaaagctttgcctgctgcctcccctctntcacatcgcttcttggcatggaggcc

SEQ ID NO: 19589 - DNA, 356 bp, Homo sapiens
gggaaggaaagcccaggacctccggagcagagcacagcagctgcagaggcaaggccagcatgtcgcccaacttcaaacttcagtgtcacttcattctcatcttcctgacggctctaagaggggaaagccggtacctagagctgagggaagcggcggactacgatcctttcctgctcttcagcgccaacctgaagcgggagctggctggggagcagccgtaccgccgcgctctgcggtgcctggacatgctgagcctccagggccagttcaccttcaccgccgaccggccgcagctgcactgcgcagccttcttcatcagcgagcccgaggagttcattaccatccactacgaccag

SEQ ID NO: 19590 - DNA, 392 bp, Homo sapiens
aagcattctttttcagctcagttctccaacttaaagttcatagactggaaatttataaaaccacaaagaaaaagactaaggaaaaaatgaataaggcctccccctgggaggatttagtaaagaataattgaagtccatggaatccccccagactgaccattcatatgcgacttggggatagaggttctttaaaaagtgctgggattacaggcgtgagccaccgcaaccaaccagtggtgcttttaaatgaattaatcacatttattgaccacaatagatctacaaacatttttaaaatgtgtggtacttgtggacaaaggcatattacttatttcatctacagcaatgattggttcatatgtagatgcagatgccttagaaaaactcctcag

SEQ ID NO: 19591 - DNA, 330 bp, Homo sapiens
gctgctctttttccagtgtcttaaggtagaagattaggttatcgattagaaacaattttctttggccgggtgcggtggctcatgcctgtaatcccagcactttgggaggtcaaggtgggcagatcacctgaggtcaggagttcaagaccagcctggccaacatggcaaaacctcgtttctactaaaaatacacaaagtagccaggagtggtggcaggcacctgtaatccctgctactctgaggctgaggcaggagaatcgcttgagcccaggaggcggaggttgcagtgagccgagatagggctattgcactccagcctgggagacaaag

SEQ ID NO: 19592 - DNA, 348 bp, Homo sapiens
attcttaagtctagtacttccttcactatatccaaaggtaaatccaacaacaattcattcccgtttccaagtctcatattcatgactgtgaaataaataattttcggtagagaatttgtattcctgctaccagcagcactgtccacgcacttccccagatagcatatactaaatactcacgaatttaattaaacagatgatcaggaagaatttactgccaaccatttaaaaatggattccaaaaagaaacatatattatttaaaacattattcactgattacatcttacattccatgtcgacgcggccgcgaattccagatctatgaatcgtagatactgaaaaaccc

SEQ ID NO: 19593 - DNA, 524 bp, Homo sapiens
  misc_feature (1)...(524): n = a,t,c or g
atttgaaaatctgaatccatagctatgacatgattacgaatttaatacgactcactatagggaatttggccctcgaggccaagaattcggcacgaggggaattaaactatcaggaaattgggaaaaaaccttcatattcaacggtggatgtcctgggggttaatttcaaaagggaactgcagcggtgagccaagatcgcgccattgcgctccagcctgggcaacaagagcgaaactccgtctcaaaaaaaaaannnnnggcgggnnctgcaancancctaaatncccaggcngcctnnggnaaatgtgtnangggananacctcaaaggcntgtncancagtttancaaaaaagggtntccccancagtaaangttganngaaancagcngggttnacncntgtncagcaaagncncnctgagtntgttancaancccagacccanggcctggagggaaaggccccaaaggggttncantagggctttttgaccaaaaaatccaggctttgggctgcagggaaa

SEQ ID NO: 19594 - DNA, 322 bp, Homo sapiens
cacattttctaagtcatttgtgttgtgacccaattaaagtgaagggaaatgataaaaagttgatgggcagatcactgtgtcatttcaatctggcaagtctagaaggctggttttctttccgggaggccaaaatactaaagtgaatggtgctaaagacacaaaaacaaaaccaggctacgaagggcatggcatccaggtaagatgtactcaggtcgacgcggccgcgaattccagatctatgaatcgtagatactgaaaaaccccgcaagttcacttcaactgtgcatcgtgcaccatctcaatttctttcatttatacatcg

SEQ ID NO: 19595 - DNA, 1032 bp, Homo sapiens
aattcggcacgaggcctcgggcgccgtggatagagcaggagggtccggagtattgggacggggagacccggaaagtgaaggcccaggcacagactgaccgagagagcctgcggaacctgcgcggctactacaaccagagcgaggccgggtctcacaccctccagaggatgtatggctgcgacgtggggtcggacgggcgcctcctccgcgggtatgaccagtacgcctacgacggcaaggattacatcgccctgaacgaggatctgcgctcctggaccgccgcggacacggcggctcagatcacccagcgcaagtgggaggcggcccgtgaggcggagcagctgagagcctacctggagggcctgtgcgtggagtggctccgcagatacctgaagaatgggaaggagacgctgcttcacctggagcccccaaagacacacgtgactcaccaccccatctctgaccatgaggccaccctgaggtgctgggccctgggcttctaccctgcggagatcacactgacctggcagcaggatggggagggccatacccaggacacggagctcgtggagaccaggcctgcaggggatggaaccttccagaagtgggcagctgtggtggtgccttctggagaggagcagagatacacctgccatgtgcagcatgagggtctgcccaagcccctcaccctgagatgggagctgtcttcccagcccaccatccccatcgtggggcatcattgctggcctggctgtcctggttgtcctagctgtccttggagctgtggtcaccgctatgatgtgtaggaggaagagctcaggtggaaaaggagggagctgctctcaggctgcgtgcagcaacagtgcccagggctctgatgagtctctcatcacttgtaaagcctgagacagctgccttgtgtgggaactgagaggcaagatttgttcacgccttccctttgtgacttcaaaaaccctgactctctttctgcaaaggcacctgaatgtgcctgtgttcctgtaggcataatat

SEQ ID NO: 19596 - DNA, 490 bp, Homo sapiens
  misc_feature (1)...(490): n = a,t,c or g
gnnnnnnnnnnnntnnnntttnnnnnnttttganaacngctatgacatgattacgaatttaatacgactcactatagggaatttggccctcgaggccaagaattcggcacgaggcggtatgaagcgagaggccactgcagacgacctcatcaaggttgtggaggagctaactcggatccattagccaagggcagggggcccctttgctgaccctccccaaaggctttgccctgctgccctccccctcctctccaccatcgtcttcttggccatgggaggcctttccctaagccagctgcccccagagccacagttcccctatgtggaagtggggcgggcttcatagagacttgggaatgagctgaaggtgaaacattttctccctggatttttaccagtctcacatgattccagccatcaccttagaccaccaagccttgattggtgttgccagttgtcctccttccggggaaggattttgcagttcttt

SEQ ID NO: 19597 - DNA, 329 bp, Homo sapiens
attattttcattttaagaaaaggttccctttctcccctcccaccccaagtatttaacatgaaagaatgggcttccttacatattaattttatacttatttttgaagcagcaacaattaaccatcaatttggcatttctgtttacagtcgctacaaaaattttttaaatttcacaaagccattatccagtgttgccatgaaacagagactgtaaattctaggtagctaagattctttctgaaaccaatgttaagtcaaagaaatataaagcagggcattacactaagtttctggatctagtacactaaaaagagtgaaacctaggaaaag

SEQ ID NO: 19598 - DNA, 358 bp, Homo sapiens
  misc_feature (1)...(358): n = a,t,c or g
cttagaccaccaagccttgattggtgttgccagttgtcctccttccggggaaggattttgcagttctttggctgaaaggaagctgtgcgtgtgtgtgtgtgtatgtgtgtgtgtgtatgtgtatctcacactcatgcattgtcctctttttatttagattggcagtgtagggagttgtgggtagtggggaagagggttaggagggttctgtgaagngagaccttcnttttacttttcttntattgcctctgagagcatcangcctanaggcctgactgccaagccatgggtancctgngtgtaaaacctgganatggaggatgatccccacgccncagcccttttgtctctgcnaact

SEQ ID NO: 19599 - DNA, 545 bp, Homo sapiens
  misc_feature (1)...(545): n = a,t,c or g
tttganaaccttttgactnattacgaatttaatacgactcactatagggaatttggccctcgaggccaagaattcggcacgagtaaataagcagacagatttataggaataaacaggttaagaatttgaatatagaaatatagaaaggaatatattagattaaattatagagtcctaaagtagagtgtaagccagaattatatgtgctcttacacataccacatactgtataggattgtttatgaggttcagttgagataatataaatagaagtgctcgtaagtaggatgtttgtttctgcaaaatgaattttattaaatatttagtgtactgtagataaagtgattcttaagaatttttaaaaactgggccgggtgcggtggctcgcgcctctaatcccagcactttgggaggccgagttgggctgatcacaaggtcaggagtttgagcccagcctggccaacgtggtgaaaccccatctctgctaaaaattcaaaaaattagccgggcatggtggcgtgtgcctgtaatcccactacttggga

SEQ ID NO: 19600 - DNA, 418 bp, Homo sapiens
gggattctgccctgctcatatttgcacctttctcctccctctgacctccctcactgccatcagcaaactagagtactttgcctgtcgggggtgtttgccaagtgtttctgagtagaccctggtactacctggtggacactaaagagggctctaggcagtaataagagggaattctggttgtaccttgtgcaggggaggcttcctgctgttgctggattccctgttggaaagaagctgggcagttgtgtttagaactgaccctgcagatggggaggcttcccccttctctctcttcctgagggctacttccagatgagtgggggagcctgccagtgctcatcaggtccacctgacatgtcaaaaggaaaaaggagaaacctgggtcttccccgggaactttgaagttacgaataggaaa

SEQ ID NO: 19601 - DNA, 325 bp, Homo sapiens
ggcggattctctggttttggatcaggcacaggagggttcagctttgggtcaaataactcgtctgtccagggttttggtggctggcgaagctgagggcgtgtcagcaggcctttcgatccctgggaccaaccgcatcctcagcttcttccccgagaaatgctggagcaggctgttcagaccgacgttgccatcaaaacacatacacccagaaagaaacaacagaaaccaaaactcacaaggcgcatgattacttgttttatatttcatgttgggttttccctcccactattaaacagtctgtttccgtacagaacgtatgtgggtt

SEQ ID NO: 19602 - DNA, 336 bp, Homo sapiens
gggggatttgaacccaatttgggctatctccaaaccccacactttcggaataactgtggaggtatcaggatgcatctattatatgtcaggggactgctagagactcaaagccctcccctcctgtccataggaaaggagagaccccttagtactgattgctttggtggggctctggcactccgcagtgatcacctataggaaaacatggagtatcagaatattggtctctcaggaacctggctttgtggggtggtttgaggcagtagttgccccttcatatgtgcacccaggcccctgccagacaggtaatcacattgcctcctccttgtggcagat

SEQ ID NO: 19603 - DNA, 386 bp, Homo sapiens
ccaatatttaaaggaacacagcaggtaaggaatgaagcctctgaaatagtactcatggatttatacatggcagatcttactgtctctacacatttggaagtgttcgttggtttaaagaaatgatagaggttttgaactactgacagtcttaaaagtgaatttaaaaactgttcatactttttatggtgtaaatttcctttgctcgatgtcagtgattcagataactcttgaccttgagatgatggcttttcacaggtttcttatattttatatctcttctgaacatgaattgtcattttagatttttgacatttgtatcaaaagagaagttgaggaaatcttcagaacactggtaacttttagttttgctatagacttcagaagtg

SEQ ID NO: 19604 - DNA, 494 bp, Homo sapiens
  misc_feature (1)...(494): n = a,t,c or g
cctttgctatccacatgattacgaatttaatacgactcactatagggaatttggccctcgaggccaagaattcggcacgagctgcatagggtcggcgtggtggtgtgcacctgtaatcccagctactcaggaagctgaggcaggagcacttgaaccttggaggcagaggttgcagtgagccgagactgcgccactgcactccagtgataaaactgtatttatatacataactccaatgtagattctttacattcatgccactcagtgtaggtccagtactgtcagcatcagtgtaggtgggcagttgtaagaaatgcaagttctagggactcacctcagaccttctgaattagaatttgcattttaacaaagtgatttgcatatattcaagcttgagaagcaatgctttgatgcccaattattattctcctagcccaaactgctgcaaatcttaatatccacaaagctgntttcttatactgctgggattaata

SEQ ID NO: 19605 - DNA, 792 bp, Homo sapiens
  misc_feature (1)...(792): n = a,t,c or g
ggaggagcggcagcacctccaggaggttggtcttttccacctgggcgagtttgtcaatgtcttttgccacggctctctggtaatgcagaatctgggtgagacttccacccccacacaaggctcggtgctcttcggcacggtcaacggcatgatagggctggtgacctcactgtcagagagctggtacaacctcctgctggacatgcagaatcgactcaataaagtcatcaaaagtgtggggaagatcgagcactccttctggagatcctttcacaccgagcggaagacagaaccagccacaggtttcatcgacggtgacttgattgagagtttcctggatattagccgccccaagatgcaggaggtggtggcaaacctacagtatgacgatggcagcggtatgaagcgagaggccactgcagacgacctcatcaaggttgtggaggagctaactcggatccattagccaagggcagggggcccctttgctgaccctccccaaaggctttgccctgctgccctccccctcctctccaccatngncttcttggccatgggaggcctttncctaagccagctgcccccagagtcacagtnnccctatgtggaagtggggcggncttcatanagacntgnnaatgnnctnaangcnaaacattctctcctgganttttaccantnacacatnattcanncatcaccttanaccaccaagccnngntnggtgcnccatgcnncctcnttacggnaaggatcngtannctannggctgtcncantgngnnccngagtc

SEQ ID NO: 19606 - DNA, 354 bp, Homo sapiens
gcttcatcaggaaactgggagttagcagaacgcagggcaaaggagaacatcagggaaataagtctctgtagagaacaggaagtggaagaagggacacattgtgagcctcaggtgataggccctcttatcctctcattcatgggatggggtaggggagtgggtggtcaggatttggagaaaaaggaatgtcacttcaaaaggggaagagaacaacttgggctagacactttctggtggacatgaaatctcgtaagacattgaggggattacagaatgttgaggaaaaggatatccctgggagaagagaacagagttagggctttcaatagagactggttcctttgtctctttacc

SEQ ID NO: 19607 - DNA, 462 bp, Homo sapiens
  misc_feature (1)...(462): n = a,t,c or g
agtccacaccttcttggaagacatcagcccaagtggtgcatgtgcgttcaagctgcagaagctgtattgaaaggtcaggttgaaactgacgcctctttccaaatccaggaaagttcctagcagcaagatagagagaagcaaaaccctgaaccccagctccagccaaccagggccatatgtgcctttctagactttcaggaatgttaggctctgaaatgtaagggcaaaatgtctccanccctgcacccagtccaagtctttctggagtcagttggcangacaatgtgccaaaaattccaagatgatggaaacttctctcttggaaaaagaggtcttcggtgttcttggggtaaatccccagatccccaaaagattgtttcaaacangttttaatagcactgggaaggnaacaatgagtcttcccctgggaaatcanagtgncttaaggccnccnnnntggct

SEQ ID NO: 19608 - DNA, 348 bp, Homo sapiens
gggagtgggcaccctgcagcagtgatgatccagaactatgtgctgtgacgttcgtggacaggccagttattggctcatctgtgacctacgatcatccctccaaacctgttgaaaaaagactcatgcccccacccccgcaaaaaaacaaagattcatggctggaccatgtatgatgatgaaagcctgtgtctttgagggattctaccctgaacatacctcacagatcctccctgtcatgccacatttcactgattggaatgtggaaatggaaaaggaatttaggatgtgcattttcacctgaggtttccctgcatccctgcagtgccaaagccccaccttcagggacca

SEQ ID NO: 19609 - DNA, 363 bp, Homo sapiens
  misc_feature (1)...(363): n = a,t,c or g
ccttatcctactgcttctctagtatctcagaatgagagtgaaaacgaaggccacctcaatccatctgaaaaactccagaagttaaatgaagttcgaaagagattgaatgagctaagagaattagttcattattatgaacaaacgtcagacatgatgacagatgctgtgaatgaaaacaggaaagatgaagaaactgaagagtcagaatatgattctgagcatgaaaattccgagcctgttactaacattcgaaatccacaagtagcttccacttggaatgaagnaaatagtcatagtaatgcacagtgtgtttctaataatagagatgggcgaacagttaattctaattgtgaaattaacaac

SEQ ID NO: 19610 - DNA, 430 bp, Homo sapiens
  misc_feature (1)...(430): n = a,t,c or g
gtagagttggagtctctctattttgcccaggcaggtataaaactcatggcctcaagtgatcctcctacctcagccacctgagtagctgggattatagacaggtgtcaccatgcccagctaattgttcaaatttttttttgtaaaggcaagctctcactatgttgcccaggctggctttgaactcctggcctcaagcaatcctcctgccttggccttccaaattgttgggattacaggcataagccactgtgaccagacaaaaattccttttatgtgggtgcttggtaacacctgctaggctattccaagatgtgaataaaatttagccctggggaggagaagggggtatacaacgctagagaattttgtaaataaaataagaaccttgtccaataaacatctacttattgaatgngantggcgtgacccc

SEQ ID NO: 19611 - DNA, 341 bp, Homo sapiens
gtgacagtaataaatcaatgtgaggatggatagaatttagtatatgatagagaaaatgtcataaatggataaaaggaatttacaacttgaggagaaaacctttacaatttcctatgggtgtcagaagtactctcagcgaaaactgatggctaaaacagtatctactattctctgataactttttttttgagacagagtttcattgtcacccaggctggagtacagtggcatgatctcagctcactgcaaactctgcctcccgaattcaagtgattctcctgcctcagcctcctgagtagctgggattacaggcgcccgtcaccacacccaggtaatttttg

SEQ ID NO: 19612 - DNA, 896 bp, Homo sapiens
  misc_feature (1)...(896): n = a,t,c or g
gcggcacgagcggcgacagcgggtcggcgggccgcaagagggggtcatgggtaaagactactaccagacgttgggcctggcccgcggcgcgtcggacgaggagatcaagcgggcctaccgccgccaggcgctgcgctaccacccggacaagaacaaggagcccggcgccgaggagaagttcaaggagatcgctgaggcctacgacgtgctcagcgacccgcgcaagcgcgagatcttcgaccgctacggggaggaaggcctaaaggggagtggccccagtggcggtagcggcggtggtgccaatggtacctctttcagctacacattccatggagaccctcatgccatgtttgctgagttcttcggtggcagaaatccctttgacaccttttttgggcagcggaacggggaggaaggcatggacattgatgacccattctctggcttccctatgggcatgggtggcttcaccaacgtgaactttggccgctcccgctctgcccaagagcccgcccgaaagaagcaagatcccccagtcacccacgaccttcgagtctcccttgaagagatctacagcggctgtaccaagaagatgaaaatctcccacaagcggntaaaccccgacggaaanagcattcgaaacgaagacaaaatattgaccatcgaagtgaagaaggggtggaaagaaggaaccaaaatcactttccccaaggaaggagaccagacctccaacaacattccagctgatatcgtcttttttttaaaggacaagccccacaatatctttaagagagatggctctgatgtcatttatcctgccaggatcagcctccgggaggctctgtgtggctgcacagtgaacgtccccactctggacggcaggacgataccgtctg

SEQ ID NO: 19613 - DNA, 365 bp, Homo sapiens
gtcaataccctgaatccagtctgcattgtttttcaagttttaactcttgaacttggctaatctatgacaaccttcccacctaaccctcatctttggaggaattcagtgaaagttgactgtagatctgttagattcctctgcttccattctatactgtttcttttttattctccctatacagaacacttgcttaggaccattaaacaatctaatctaaagaagttgctaaagtttaaagccttaacatactactgttaacatactaatattactgctttgaaagaaccttcagaagcacttaatgacttgcccaaggtgacaaaaaggtggttgagatctatcccacatcctgtctttcagtaccc

SEQ ID NO: 19614 - DNA, 396 bp, Homo sapiens
tggacatcttaataacttccaagaaagagttcatgagcttcaatttgatatttattggttgactaggtttctttctgtcttacctttccagttgttagggttcttgatatgtattttggtgatgaaaatttcaactctaaaagctaaacaatcaagatattggaattatccagcaagtgattggcagatttcgagtagacttcttccattcttggctgaaatcaatgaacatgtctactattgctgttgattttgttcttttctctgaaaagtctgtttttgggagggcctcagatggtaaagtgcctttttattgtctcttaaagggaatgggggaatcaacagtttgagaatttttgttttatctgtatgtataaaattgccttctccttttat

SEQ ID NO: 19615 - DNA, 308 bp, Homo sapiens
ttaactttaaattaccagttataatatttaatccaactctgaaaaaataagtatactgacacttcaggaagatgtatgttttatcctgtgatttcatgtatcatctactatgcagccatgtgttccagtttgagaacccccccccacccagtttattcattcactcaaaaaatacttagatcctatgccaggctctgggaaaacactcatcaacaagacagacatggtttccgccttcatagagctcacagttcagccgagatataatgaaaaaagtcatgcagaataggaggcacagagagatacta

SEQ ID NO: 19616 - DNA, 374 bp, Homo sapiens
gaataattatccagcttctgggtaggtaaatcctgccctgcctcagtgacgtttactaatgaaggacagggatataagcggccagagtctggaaggaagataataagctttaagtaaaattgaaactaagtcttacttgtcttttgttgagcctgtaccatgaaacctggctcatagaatgaatatgtgattgtttgttgaagctaaataataaacaactcaggctaaactggaggaagagccggatgcagtggctcacacttgtaatcccagcactttgggaggccaagtagggctgatcacctgaggtcaggagttcgagaccagcttggctaacgaggtgaaaccccatctctaccaaaaatacaaaaaaa

SEQ ID NO: 19617 - DNA, 279 bp, Homo sapiens
accttgtatgacctgattacgaatttaatacgactcctatagggaatttggccctcgaggccaagaattcggcacgagaaaaagtattctttgtaaatagtagaagattactttttgcaggtttatgttgataaggagttttgagctgagctgttactttttggtcgttggttggggtttatttatttatttatttatttatattttttttgagacagagtctcgctctgcactccagcctgggcgacagaacaagactccatctaaaaaaaaaaaaaa

SEQ ID NO: 19618 - DNA, 255 bp, Homo sapiens
ggcttcttgccaagataaaaagatgagggctgtcctgtcacataatgcttatttgtgtcctcactgtttctgttctttagattaatacatccagttccttttcaacacactgtattaggaaaatgttattttaactgcaactctgttttaaaatttttttttaatttgaaaatgactaagtcttaatcattccacattggctcataattttgacctcagtcaccttttggagtaactcaccaaaaggccagttat

SEQ ID NO: 19619 - DNA, 421 bp, Homo sapiens
  misc_feature (1)...(421): n = a,t,c or g
tatgacatgattacgaatttaatacgactcactatagggaatttggccctcgaggccaagaattcggcacgagccacacattccagacattatttgttagaaaagttgtttctaaagcgtatatcaataaagaaaccacatttctttattgatatacgctttagaaatgtggtttctttattgatatacgctttagaaaccacattttccaaaagatttttgcttgatantgtttaaaaggaagtaggcaattaactttggtttctgattgcattccatcatacttgccaggcagtttaagcttctgatttctagatgtgcttanatttgtacaagaacagaaagccaactgaaggcaaggtcctataagaaaaaatccaaattgctttgggaggcctggctgggccggatcatgaggcag

SEQ ID NO: 19620 - DNA, 462 bp, Homo sapiens
  misc_feature (1)...(462): n = a,t,c or g
aatactctgatgaccngacacgaatttaatacgactcactatagggaatttggccctcgaggccaagaattcggcacgaggagctataaccttccattagggagctgccaggtgcctgtgttgggggcagctctccccagttcattctggtggtgcagcatggccttgcaggaaactctttctgttgcttctgagccctcctgatcccgggaagcacagagagacctaccatgcagagtgaaccccagggctctcagctcactcggcccctccccacctgtctcctgctgccactgccttctcttccttttcctctgcttaataagaaaaagtttaaaatgttagcttgggctgggcatggtggctcacacctgtaatcccagcactttgggaggccaaggcaggtggatcgtttgtgcccaggagttcaaggncagcctgagcaacatggngaaaccccat

SEQ ID NO: 19621 - DNA, 444 bp, Homo sapiens
  misc_feature (1)...(444): n = a,t,c or g
tttgaanacncgttatgacatgattacgaatttaatacgactcactatagggaatttggccctcgaggccaagaattcggcacgaggtgacatattgctgggtccaacatccaggtgatgtaacttttatgcctgggtcctggcaccagaggacattgtctttgcaccactcacacaggtgatgtgattttcttctgttacctggtctctgctcacaggaagaattgtgaccttggccaggctcggtggctcacacctgtaatcatagcactttgggaggccgaggcgagtggatacctgaggtcaggagttcgagaccagcctggccaacatggtgaaacccccatcttacttaaaacacaaaaattagctgggcgtggtggcaggcgcctgtagttccagccacccacgaggctgaggcaggagaatcgcttgaaccaggta

SEQ ID NO: 19622 - DNA, 372 bp, Homo sapiens
gatcgattcatgtaaagctggacgtgggcaagctgcacacccagcctaagttagcggcccagctcaggatggtggacgacggctctgggaaggtggagggcctacctgggatttgaccagagtccgcctggctccaggctctgccacccacaggaagaagaaactacactgacagatgtgagacagtgtttccccttcagtctttgaacaggctttgtgttttctaaatgacactggataaaagggaattcattcaagagctccaaggcttccctttccgcccggcttctgttgccctggcctgagcagcgagcagctgggaggggactgaactgcccctaaccagggttgtggctggtggggttgggacta

SEQ ID NO: 19623 - DNA, 541 bp, Homo sapiens
  misc_feature (1)...(541): n = a,t,c or g
tggaacccttntgacacgattacgaatttaatacgactcactatagggaatttggccctcgaggccaagaattcggcacgagggctcgcaccgcacagctcccaacagctgagatgcaatgccaaggactttcttccccatcagacatgccctcgtccacacgaaacttacaatcaaaaccccagttagcccagcctgacgaggacgtctactttttcttgaaaaatgtctttcctttcccaaaagtgactctgctttgtctgaaaataatataactttaatggctttaagttattgtttgaaagggttcataaaagacaataaatgggagacttagaatggctcaccagttaaaatccaagtttcttatatttcttgtatttgctaatttcccttatctgnttcagctgcttgttcagaaaaatttcattcatagactcaccttatcccagccctagagactcatattctctatttgccctggaatcctgttcactatttacaattatattattctgaataatagtatttactatttcat

SEQ ID NO: 19624 - DNA, 524 bp, Homo sapiens
cgtttgacatgattacgaatttaatacgactcctatagggaatttggccctcgaggccaagaattcggcacgaggagagctagcaccatgagcttcaataccctgcagacatgaaaaagatactaagggaatactaaatcagctctacacacataaatttgacaatgtagatgaaataaagcaattattcaagaaatacaaactacttcaccttgcccaatttgaaaaaggtaatttgaatcatttcctacaactattaagggaagtgaattcataatttttaaactccagtttttttgagaaaaagaaatctttagacctaaatgagttcactggagaattctatgaaatgcttaaagaataattaatactaattctacacaatttcttccagaaagtagaataggagagaacatttcttaatttattttatggagcaactactaccttgataccaaagccagagaaaatgagcacaaaaagaagattacaggctgggtatggtggctcatgcctgtaatccc

SEQ ID NO: 19625 - DNA, 332 bp, Homo sapiens
gtcagggcaagcatacttgttagctgcttggggtttatgtggcctttacttcttgatccaaatcccttttcttggctatggtttggcgccacctagtggcaaatgttcatgctggcttaaatatcgtttggtactcttactcctctggtttggatttacaggatccaaaccaaggatccaagcctttagttggttaacagttagttgattagttggcactcattttgtcacatgattcaggatgactgggggaaaacaggatattggggtatatctttaactttttcacttctaagataatctacagtttccctacctctcgctcatacctt

SEQ ID NO: 19626 - DNA, 361 bp, Homo sapiens
  misc_feature (1)...(361): n = a,t,c or g
gcacacatgcacacacagcacacacgcaaacgcacagcacacacaaacgcacagcaaacacgcaccactacacccagctaattaaaaaaaaaaaaacttttttgtagagatgacgtctcattatgttgcccaggctggtctaaaactcctgggctcaagcgatcctcccacctcagcactttgggaggctgaggcaagaggatcttttgaggctaggagttcaagattagcctgggcaacaaagcaagaccccatctttacaaaataaaaattaggccaggtgcagtggctcacacctgtaatcccaacantttgggaggccgaggcgggcanatcatgaggtcaggagttcgagaccagc

SEQ ID NO: 19627 - DNA, 664 bp, Homo sapiens
tttttttttacgagatatatatttaggatcaagaaagatgttaaggacaaagtataggagaaacaaccatttcctgtagctctcaaagcaaattatgagctcatttttctctattctgcaagctcagctgcagaagcatgtgaagctaacaccaccgatgatggcgttcccagcatgacattctcttggacagcagaatgttaatcgacacgcgtgcagcagtatgtgaaactcacaccaccaatgaggcagttcccaacacgaagttctgttcgccggcagaatactaatctgcaagagcagaccatgccccttgttgagcctgaaacctgaagagcagagcttttatcccatgcaaaggaaatagatatgtcctggtcttctggcccacgctgctcctggcctggagcctcatcacctcttgcctggagtgggcctgcccggacctggagggctaccaagagaatagcagcgaggagggcgataatcctcatggctggggtgacagatcctcaagctaggcagggcgagcagagagggcagacagcagtcctgtgttccaggtcttatgtagcaagagcagccatgcacacagaggagaggacttccttatttaagggtcttgtcgacgcggccgcgaattccagatctatgaatcgtagat

SEQ ID NO: 19628 - DNA, 338 bp, Homo sapiens
gctggttttgtaatctttttaactgattatttgactggtccattgaacaatttaagaagaacaaggaagataacaaaatcattagctgtcttgtaatcctctagcagcattcatccaaggagatctctcattattattcagaagcaacttctgatggctagcagttagggagaccagagcagttcatcagttgattagcagtcttcatgacttcgttcagctaataccaacatatgcttagggacaaagcaaaatgaagggattaaagttacgtagaactgtcatattagaggccgggcgcggtggctcatgcctgtaatcccagcactttgggaggc

SEQ ID NO: 19629 - DNA, 385 bp, Homo sapiens
gaaggcttttatttcctcttttttccccacgttgaatccagattaacataatatgtaaatttgtgtttttctcaactgagtgtggtaattccattgcattaaagtgttagggacttttgtcttcactaataatccacttaatctctcacaataaaaagcactttcatttctactgacttacatttatccaatcaaaactttttatattactagactttttgttacttttacctagcatccaaaaccatgttttatgactggttggcaaagagctgttgactacagattgtaatattgcaatgtatattgttaaatatgctatctgatggatctccagaaatattctgtgttatatacataaaaaactatatgcataattcccagg

SEQ ID NO: 19630 - DNA, 354 bp, Homo sapiens
atctcagcagaacctacctctgctgatgctcgggaatctagacagggcctgtcaccaggaacgatcaccaaaggaattcttttgtaaacaatacatctctgaaaagtcctaaaattaagaccagtgcccaaggtttccttccaggtatcacagcttagagtgctaaaaacaatgttttggggggttttgttgttgttgttgttgtttgtcactgctagtgatggcagaaaggaaacaattctgtcccatagagtgttgaaatgtgtttggagctaaaagaagatggatgggatctctgggacctgttgccagaatctagtctcaatggccagggtctcaggagatgttcctccc

SEQ ID NO: 19631 - DNA, 397 bp, Homo sapiens
  misc_feature (1)...(397): n = a,t,c or g
gcaggtgagaaaacagaaattcctgttggaagagatggaggtagtagagtaacgtaaggatattacaaaatggagaaggaaaactataaacaaacagaattcatacacttcagaattttaactctgtccatattagtctttattgttattaaatagtttagattctgttaaagtttgcacacacatctgcccctgtatgtgtgtatgtgttcacatatagataaaatgtagggtttttttttgttttttttttttagtacctgaancctttgccccggggaccnttgtcagccagggacaggcnttgaanaacttttttccctgttaaatgtaaagttaaactagggcttaananctctgaataaanacttttctntgtcanaaagngcngcattaa

SEQ ID NO: 19632 - DNA, 544 bp, Homo sapiens
ggctggttcctcctcctcggcctcaccattccagaccaaatttgaaaaaatggttgacctcacccaggtaatggatgatgaagtattcatggcttttgcatcctatgcaacaattattctttcaaaaatgatgcttatgagtactgcaactgcattctatagattgacaagaaaggtttttgccaatccagaagactgtgtagcatttggcaaaggagaaaatgccaagaagtatcttcgaacagatgacagagtagaacgtgtacgcagagcccacctgaatgaccttgaaaatattattccatttcttggaattggcctcctgtattccttgagtggtcccgacccctctacagccatcctggcacttcagactatttgtcggagcacggatctaccacaccattgcatatttgacaccccttccccagccaaatagagctttgagtttttttgttggatatggagttactctttccatggcttacaggttgctgaaaagtaaattgtacctgtaaagaaaatcatacaactcagcatccag

SEQ ID NO: 19633 - DNA, 321 bp, Homo sapiens
ttcaagaccaatctagtaggaaagggcatgactagctctccaattctggtcttgaaagccaactctgaatttggggcacagaagtgcaggataagcctgagacatcttgtcacaccagatatcttctttgccatgaagtaccactagggtgttgtttaaaggacttgataaccagcttgaagaggttcctactgaccagaaatggaatgaaatttaagcatcaataagggtaataactgcaagagactgacatccactatggtttaaatccatgaggtcacaatgatacttaatttttcattattctgaaaaccagtaaat

SEQ ID NO: 19634 - DNA, 398 bp, Homo sapiens
  misc_feature (1)...(398): n = a,t,c or g
ggaaaattgtattctggatttagtagtctgaaaacccaagcacagcatgggtttttaagctaacctttctccatttttagccaagtcctttctctctagttagtgaaattttctaagaatagagattcctgcattgtccttttacttcttggcagttttagtccataaatagatatagttaggtttttattttatttttattatttttttttttattaaaagatttggaggctgggcgtggnagtcatgcctgngatcccagcactttgggaggccganacgggtggatcacgaggtcgggagatcgagaccatcctggctaacatggngaaactccatctctactaaaaatacnaaaaattagacgggcgtggtggcggcacttgtangcccagcta

SEQ ID NO: 19635 - DNA, 521 bp, Homo sapiens
  misc_feature (1)...(521): n = a,t,c or g
gattctggtctctgaggctcatcgggatcttttttccaagctgactgcattttccattcaggctctgccctccagtggcagtgttcctgctctctttgctaaggcttttcctccaacagctcttctgggctccacaaatcccagcttgtcctgtaggctccagtgcatgcatgatgcattctggaagcctgccttggtggtgcggccaacaggggccaccttccccgctgctgcttcccttgggtgttctgtctcaagctcttccgtgccttctccagtccagtcccttgtattgaagctgtcgcatgtttggagtcagcgttccttcttattctgtcattgttccctttctcttaaccttgtcatatgggtgcaagtatcttactggtccctgagtaccgtaagttacagttctctcaaaagactcctttttcaagctgggtgcggtggccaatgcctgtatctcaacactttggaagctgaggtggaggntnanttggggttgattccanaccacctgg

SEQ ID NO: 19636 - DNA, 96 bp, Homo sapiens
tgagaccgtgtctcaaaacaataaataaataaaaacaggtactgtctgctgatttgtttttctatccatattttgcactagcccccatccaaaaaa

SEQ ID NO: 19637 - DNA, 670 bp, Homo sapiens
gagtaattctcctatctcagcctcccaaagtgctagggttacagacatgagccactgtgcctgtctagacttgtactttcaactgtccatttctccctgtctgtcccatgggcactcatgaaaaaacagaatgctcccaactttattcatcttccaagcctgtagctcttggtatactcactgttgcaagtcagaagcttgatttcatcattgatgtttttctcacgtttcacatctcactcatcaccaagtcatgttggtgttaatttctgattaacccttgaatttaccgtcttctcatcctctgtacaaaagcctcaagtgagggtcaaattcaacattatcctgatctagacagcccccattctcaatccacccttttccaagttgattgcccaaggacttctaacaataaactctcttttgcaccacagacttctttgaaaatatacatgctgttgaccctctctgtagaaaaccgcacacataaaacttaccaacagatttcattggttcttgggttctcccgaagcctatccatggtttatagattaagaattgatgaggtagctgggcacagtggctcacacctacgatcacagcacttcgggaggctgaagcaagcagatcacttgaggtcaggagtttgagaccagcctggccaacatgg

SEQ ID NO: 19638 - DNA, 332 bp, Homo sapiens
  misc_feature (1)...(332): n = a,t,c or g
gcggcacgagtctcattcaggttggggaatgagaagacctttgaaagtgcctaggatttctataatggaagaagggaggatgagggggcctgcgagtggggctttaggaaattgcccagcacagacaataaagcatgattaggttaggggatgaagtgtagttccacatggcagaagtgtgaccagaaaggtggttggggttcagcctgtgaagaagtttgagccactggaagtttttaagtcataaaggggtgtgatgaaatctttgttgacaaagctcaccagtggcagtgaagagaaagtgaattanatcccagccagtacaagatgat

SEQ ID NO: 19639 - DNA, 311 bp, Homo sapiens
  misc_feature (1)...(311): n = a,t,c or g
ggagaaatacctaatgtagatgacaggttgatgggtgcagcaaaccaccatggcacatgtatacctatgtaacaaacctccagttgctgcacatgtatcccagaacttaaagtatatgtgtgtgtgtgtgtgtacacacaatggaatccaagtatccatggacaggctgaatggataagcaaaatctagtgtgtgtgtgtatgtgtgtgtacacacaatggaatccaagtatccatggacagatcgaatggataagcaaaatcgtgtgtgtgtgtgtgtgtgnntgtgtgtgtatacnctatggactatta

SEQ ID NO: 19640 - DNA, 428 bp, Homo sapiens
ggagagctagcaccatgagcccgacaagttcaagggagcaatagggagattggcttgattagagtgtgtttatttgttggggtgggagaagttagccagcaggggcttaataaatatttgtgggtttgaataacagcagataaggtgaaaagggcaggtccaacttacagagggccttgaaagctaagccgaagaaaatacaattaaccaacaaataatgtggacaaacctgaaatctcactagtaataaaaacaatgcaaactgaaaaaaacacggaaatttccccctcacattcccttaaatgaacattaaaaaaaattattattctcactactaggaagactatacataactggtaaatttgtaaactgatataatcttattttttaaaaggcttggttattagtttcattgaatggttatattc

SEQ ID NO: 19641 - DNA, 376 bp, Homo sapiens
  misc_feature (1)...(376): n = a,t,c or g
ttaagatctatacaaaaaatcaaggatccacagtaatagaatatttttcatctgcatatgaatttttcccttccctttttgtctacttttagatttaaaaaaaattaccaggacattcttattaaatactattacctgttttggtttctgcacattaagaaagtcacagagaagccagacacagtggcatgctcttctattcccagctactcaggaggctgaggctggagaatcacttgagcccaggagtttgaggatatcctgggcaacatggtgaaacttggcaaaaacaaaaacaaggccgggcgtggtggctcacacgtgtagtcccagcactttgggaggccaccggctggcggatcacgaggtcangaga

SEQ ID NO: 19642 - DNA, 488 bp, Homo sapiens
gcggcacgaggataattggcagggccttagaccagcacggacatgcttcggtcacctggattccttgagatggaacacagagcagactgcacggctcaggacagactgagagtagagtctcccatggtgtcttcctcagaatgctcaacctattgacctgttcccatgagacacatacacatacatgcatgcatgtactcacacagacacgcatgtacgcacacagacacacatgcacacgcacactcagacaggcatgtactcattcttaaccacattcttctagcctctcatgctgtcttggaagaggttttattggctgtgaaactgattccacattgaatatgtttgtcccaggatgcaggaactgaatcatttccctgcaatgcttggtgacatttcacagagtagccattcttactcctgaagggagagtctctgatactggtattgaatggatatttttggatctaaaaactctcctatgg

SEQ ID NO: 19643 - DNA, 325 bp, Homo sapiens
gctcatcatctgggagatcgaggtgccaaagcacttagtcggtcggctaattggcaagcaggggcgctatgtgagttttctgaagcaaacatctggtgccaagatctacatttcaaccctgccttacacccagagcgtccagatctgccacatagaaggctctcaacatcatgtagacaaagcgctgaacttgattgggaagaagttcaaagagctgaacctcaccaatatctacgctcccccattgccttcactggcactgccttctctgccgatgacatcctggctcatgctgcctgatggcatcaccgtggaggtcattgtg

SEQ ID NO: 19644 - DNA, 505 bp, Homo sapiens
  misc_feature (1)...(505): n = a,t,c or g
atttgaagccttngctatcacatgattacgaatttaatacgactcactatagggaatttggccctcgaggccaagaattcggcacgagtgctactgtaacagatttccacaaacttcatggcacaaattgaaacaacacaagttgattatctttttttgttcagaagtctgtcatgggtctcactgggctaaagtcccagtgtcaatggggctggcttctggagcctctgggaagattgttttctcgccctttccagcctctagagtctgcctgtaagccttggctcgcggcccctccttccgtcgtccaagccaacaacagtcgctgggtttatcccacatcgagttgccctgacttcctgcagccttctactttaaagtgtccttgtgattacattggccccacctggacactcagaacactctccctgtcttaaagtcagctgactagcagccttaattccatttgcagcctcaattcccctttgctatgtgatgctacaca

SEQ ID NO: 19645 - DNA, 413 bp, Homo sapiens
agctatgacatgattacgaatttaataccgactcactatagggaatttggccctcgaggccaagaattcggcacgagacttcaagtttcttataaaatgtaggtaatagtactttcctttaggatttactttttgaggaatggagataatacatgtaaatctttcagagtggtttttaatagacaatacataatggctatcattaatcacaatggttcaggtatgtgtgttttcttgtggacccatcagggttttccaagattcctgcctgtacccagccaagaatttagggggcaggggaagcctctggggtttcgtgttgtcttggatattgatttccatttcttctccctttccataccttacagctggataaaagataatggtgactaagaaaaacttggaattttttt

SEQ ID NO: 19646 - DNA, 490 bp, Homo sapiens
  misc_feature (1)...(490): n = a,t,c or g
acatgattacgaatttaatacgactcactatagggaatttgtncctcgatgccaagaattcggcacgagcgacaccaccctccgtggctgggacacccggagcatgagccagatctactgcatagagaatgcccacggacagctggtgcgggaccttgactttaatcccaataagcagtactacttggccagctgcggagacgactgtaaggtgaagttctgggacacccgaaatgtcaccgaacccgtgaagaccctggaggagcactcccactgggtgtggaacgtccgctacaaccactctcatgaccagctggtcctcacgggcagcagtgacagcagagtcatcctttccaacatggtgtccatctcgtcggagcccttcggccacttggtagacgacgatgacatcagtgaccaggaggaccaccgttctgaagagaagagcaaggagcccctgcaggacaacgtgatcgcacctacgaggagc

SEQ ID NO: 19647 - DNA, 498 bp, Homo sapiens
  misc_feature (1)...(498): n = a,t,c or g
ctttgactctngangccccttgctatgacntgattacgaatttaatacgactcactatagggaatttggccctcgaggccaagaattcggcacgagacaaatcatcatccccattttatcattcacagaatagaaaacatttgcccaaggtcactcagctaatacagcaaagctgagactggaggcaagaacagcatcaagctatctcttagactctatatttttaaaatttcatttaattatcagctcaggacacctggccatgttttttccatctgtgtgtccatcttctcatcttgtcaccttcttccttagggcaggttccacctcttatatttcttagactttccctcagcactttgtatttatctccacaaatactgggagagataggcagtggactcacaggcatgtgcttatctgtcattttctggtaatacagaaaatgatcaacagcccaggatatactttcccattggcttgngggtgtttctattc

SEQ ID NO: 19648 - DNA, 528 bp, Homo sapiens
  misc_feature (1)...(528): n = a,t,c or g
gggatttttagcatgttgacattagacttgagaaatgtcatctggatccttctttcagataaattcatgatgaaattatttgtcttgcttttaaaggtgtcagagagctgggcatagcggcttatgtctataatcccagcactttctggggctgaggctggaagattgcttgagccaaggagttcaagaccagcctgggcaatatagtgagatgccatccctacaaaaagtaaaaagattaaccaggtttggtggcacacacctgtagtcccagccggaaggctgaggtaggaagatcagttaagcctgggaggtcaaggctacagtgagctgtgattgcatcactgcacaccagcctgggcaacaaagtaagaccgtctcagaaaaaaaaaaaaaanaaggattttnattnaanngnccnaancttnttcccttaangngggntnantttnacttggnnctgccngngtttanacgtncggactgggaaaanaacnttannntngtggnattnnatttnntnccatt

SEQ ID NO: 19649 - DNA, 398 bp, Homo sapiens
  misc_feature (1)...(398): n = a,t,c or g
gttggctcgaaatgatattcaatgtatacattaacttgagttacattttgctgcataatgcttgagttacattttgagtattacgtgttactcataatacatattgagttacattttgctgcataatacattatccccaagtttaacaccttaaagcagcacatatatatctcatacccttctgagggtcaggaatctagaagcagcttagctgggtgactgtggctctgggtctctcatgaggctgcagtgaaactgttggccagggctggaggatcccttccagcctcactccatgactgttggtgggaggcttcagttctccacctggttctcacaatataatttcccccagagtgagttatcanagagagtgtgcaaccagtaatctgtanaat

SEQ ID NO: 19650 - DNA, 491 bp, Homo sapiens
  misc_feature (1)...(491): n = a,t,c or g
ggagcccaggagtcctcggccagccctgcctgcccaccaggaggatgaaggtctccgtggctgccctctcctgcctcatgcttgttgctgtccttggatcccaggcccagttcacaaatgatgcagagacagagttaatgatgtcaaagcttccactggaaaatccagtagttctgaacagctttcactttgctgctgactgctgcacctcctacatctcacaaagcatcccgtgttcactcatgaaaagttattttgaaacgagcagcgagtgctccaagccaggtgtcatattcctcaccaagaaggggcggcaagtctgtgccaaacccagtggtccgggagttcaggattgcatgaaaaagctgaagccctactcaatataataataaagagacaaaagaggcagccacccacctccaacacctcctgagcctctgaagctcccacaagncaactctcctcccacaacagcttccacagcatgaaat

SEQ ID NO: 19651 - DNA, 326 bp, Homo sapiens
gagaataagcaaaaagagttgttggacttgagcaattattttggtcttggttaaggatgagttcctgaaataatttattgtgaagatgcacacaaggtaaccccagggagcacacctccaagaaatatagccagggcccacaggacctggggaagccacacagctttttattctctgattctttctctcaatccctccctccccgtgttcctcatttctgcctctcttagcttgttttatggccttgaaaatctcctaatctgcaataactcattgttttgggttaccatggtaccaaaaatggcctcaactctccctgatcttac

SEQ ID NO: 19652 - DNA, 518 bp, Homo sapiens
  misc_feature (1)...(518): n = a,t,c or g
ggtgctccagtgactttgtggtcaaaatgcgcatcaaggagatcaagaagaataaggagatgaagtttgcagtcaaattcatgttctcctagccctgctccctctactaccctttcttctacggggcggcagagccccactgaagggcactcctccttgccctgccagctgtgccttgcttgccctctggccccgccccaacttccaggctgacccggccctactggagggtgttttcacgaatgttgttactggcacaaggcctaagggatgggcacggagcccaggctgtcctttttgacccaagggtcctggggtccctgggatgttgggcttcctctctcaggagcaaggcttcttcatctgggtgaagacctcanggtctcaaaaagtangcaagggaagaaaggtaagggaaaagtgganggggtcaaggaacctgaggggngggttcaaagtaaaagngggngcaantcanntncccccntncggggnggggcncaccttnaaaaggaatc

SEQ ID NO: 19653 - DNA, 344 bp, Homo sapiens
gcggcacgagcatggagcagatgtgctccagtgactttgtggtcaaaatgcgcatcaaggagatcaagatagagaatggggaccggaagctgattggagcccagaaaaagaagaagctgctcaagccgggccccctgaagcgcaaggacaccaagcggctggtgctgcacatgaagaatggcgcgggctgcccctgcccacagctggacagcctggcgggcagcttcctggtcatgggccgcaaagtggatggacagctgctgctcatggccgtctaccgctgggacaagaagaataaggagatgaagtttgcagtcaaattcatgttctcctacccctgctcc

SEQ ID NO: 19654 - DNA, 330 bp, Homo sapiens
aaaagatgtcacagattagcgtcttcccagagtgtgaatagggcacgttctcctacatgcaaacacacatgcgcacacacacaatacccttggacatgagggtccccgctcagctcctggggctcctgctgctctggctcccaggtgccagatgtgacatccagttgacccagtctccatccctcctgtctgcatctgtaggagacagagtcaccatcacttgccgggccagtcagggcagtaacaattttttagcctggtatcagcagaaacccgggtcgacgcggccgcgaattccagatctatgaatcgtagatactgaaaaacccc

SEQ ID NO: 19655 - DNA, 378 bp, Homo sapiens
  misc_feature (1)...(378): n = a,t,c or g
cagctcctggggctcctgctgctctggctctcaggtgccagatgtgacattcaactgacccagtctccatcctccctgtctgcatctgtaggagacagagtcaccatcacttgccaggcgagtcaggacatgaacacctttttaaattggtatcagcagaaaccaggggaggcccctaagctcctgatctacgacacatccaaattagaaacacgggtcccatcaaggttcagtggaactggatctgggacacattttactttcaccatcaacaccctgcagcctgaagacgttgcaacatactactgtcaaaaacacattactttcggcgtcacgcggccgcgaattccagatctatgaatcgtagatctngaaaaa

SEQ ID NO: 19656 - DNA, 327 bp, Homo sapiens
ctgtgagtcaggaatcagggcacagcttatctgggtcttcgacttcagggtttctcatagactgtaatcaaggtgttgactgggattatagtcatctcctggggaaggggctgcttctaaccttactcacatgattgttcgcaagatttagctccttgccaaatgggcctcttcaacatggcagcttgcttaatcaaagcgtgcaaattgataaggcaatagagagcgagtgtgaacaagacaaaagtcacaggttagtcacctggtcttggaaatgacatctcatcactttgccatatttggtagttatagcccacattcagtgag

SEQ ID NO: 19657 - DNA, 441 bp, Homo sapiens
  misc_feature (1)...(441): n = a,t,c or g
gcacaaaagtatatgaaagaactcagcacataaacgacacagccaatattaattgaaatgagaaatatttacatgatcttccagcattgggcatttgatttcattgaacatttataacttctatgcttaaagtacttttagaatttgaccacagagttcatttgagagtaatacagacaaaagctaacataagatgggtgggtttagccaccttacagagtaaattatcctaagagatgttttataaaagagcagctaataatgttcggagaaacagccaagacataggtaaatatatcttcaggatggcatgacagaagtggaatgagaagagagtgaaaatgctaatgntctcaattatatttcatgaataattatgagttaaaagggcagaaagtcatctnaaacctttgaaacngagaaccaaagagaaattatttg

SEQ ID NO: 19658 - DNA, 427 bp, Homo sapiens
attacgaatttaatacgactcactatagggaatttggccctcgaggccaagaattcggcacgagcaccatgttggccaggctgctctcgaactcctgaccttgtgattcacccgctttggcctcccaaagtgctgggattacaggcatgagccaccgttagttatacttttaaaaccagccctgcccttcccaaaatgatgagctgaccttaaaatgtagaatgcatggtttgatcatacttctgtactcttattttgcatttgctgttattttcacaccaatctgaataatattttggcttagtgtgttgttgataaactgtgtacccactgttatacagtgcttgactgtgagagaaatttatatgtcaagaaaatcaaggacaaatatatatatatattacatggatgtttgaaattgtataaa

SEQ ID NO: 19659 - DNA, 400 bp, Homo sapiens
gggtggccttgacaatgagctgatgttagcccttctccaggctggaggccaaggccagactggggagggggccttgggcctttcaggacttgccctagatggaaagatttgggccactccaatggaggatcaaagttggggctccagcttcccctcatcctagaagaggatgggggggggtcctcaggggtttttcggaggatggagaggcaagcagccgcctttccgtctggctgcagagagctgggacagaggccaagaggggcccatctgtcgcctcccagtcctgccagcttctctgagcaggctgggctggggaggaggacggggggacagctgtctggcccgggagatgggaacaggggccactttaggaggacaggaagctggactgtttgct

SEQ ID NO: 19660 - DNA, 567 bp, Homo sapiens
  misc_feature (1)...(567): n = a,t,c or g
gnnnnnnnnnnnnnnnnnnntttggnntttgganaacagctatgacatgattacgaatttaatacgactcactatagggaatttggccctcgaggccaagaattcggcacgagcagatccaggcagccttccgggagccacggcttcttgtggttactgaccccagggctgaccaccagcctctcacggaggcatcttatgttaacctacctaccattgcgctgtgtaacacagattctcctctgcgctatgtggacattgccatcccatgcaacaacaagggagctcactcagtgggtttgatgtggtggatgctggctcgggaagttctgcgcatgcgtggcaccatttcccgtgaacacccatgggaggtcatgcctgatctgtacttctacagagatcctgaagagattgaaaaagaagagcaggctgctgctgagaaggcagtgaccaaggaggaatttcagggtgaatggactgctcccgctcctgagttcactgntactcancctgaggttgnaaactggnctgaaggggnccngggcctttgggccaatnannanttcc

SEQ ID NO: 19661 - DNA, 364 bp, Homo sapiens
  misc_feature (1)...(364): n = a,t,c or g
gataaaatataatttaaccatgagtcaaaattgggaatgccttgcctgagttgtaatgttttcattttatgtgattccagtggtatgtttgaaccctgatatgtaagtatctgtgtgtgtgagacaggattgggtaggtggcaggagaccctgagggaggccagctactaaaaggccatagttttggtttaattttatgaaataatttactgaaaaagaaacttcgattcacagcatttcttcatgctttaagtggatcaacagcattgggtgaactgtgcctccctgggttcaatgaggtttnagggaagcnnggaaggaggagggaaaatggntgnggaaaaccaagggggnnaggaaatgg

SEQ ID NO: 19662 - DNA, 359 bp, Homo sapiens
gtaggttagtgtggggccgtgtctcagtccacccaaggtctcctcggatcagcctggagaggcactcggacctggagcagtgaggagaatgaataccttccaagaccagagtggcagctccagtaatagagaaccccttttgaggtgtagtgatgcacggagggacttggagcttgctattggtggagttctccgggctgaacagcaaattaaagataacttgcgagaggtcaaagctcagattcacagttgcataagccgtcacctggaatgtcttagaagccgtgaggtatggctgtatgaacaggtggaccttatttatcagcttaaagaggagacacttcaacagcaggctcagc

SEQ ID NO: 19663 - DNA, 534 bp, Homo sapiens
  misc_feature (1)...(534): n = a,t,c or g
tttggnnnctttgaanccctatcagctatgacatgattacgaatttaatacgactcactatagggaatttggccctcgaggccaagaattcggcacgaggtctgtcttactccttcttagccatgcatggtggggattatagtgaactttgagggcatccaggagacacacaacaaaaaagtgggctgtgaaagaagtaaacaaccttgatgggtgagagatcattgaaatgtggaagactgtagtctaggcaaaacaacaacaacaacaatacaaaacaaatagctatcgtacagagactcgagtgagagttgaggagcagttccattagagtggcaaacaggaaatgtactctgagggtaggaggtgccactgaagggttttgtacaggacaataagatcacatttgcctgtaggaaagattcctagcaatgagggattgaactggagttgtgcaaaaaggagtccaggatctgagttagagcaagcatcacggcttctggggcagatggtgatgatgccacaagcaggctg

SEQ ID NO: 19664 - DNA, 499 bp, Homo sapiens
ggccagctccacccacgggcttactgcagtgtgtcccggctccatcccgatggccacaccacagcagacatgtgtgggcagtggggctgggccgtgggcctgcggtgaggtgcaggaaggggccagtcccgctgcctcagcaccccttgtcctggactcttaccccccaacaccctgtcctcttcataggcagccagcacagggtttaaaaccacacaggatttacatttttgcaaagcgtaacgttgaagagggcccaggtcacttagtgcaatgtatttataatcttggccacacgtgtctggcgtagacacctgaagttcctcggttctccgccttggtgggtcttctctcctgcgggcacagtgcagatgcagatgagtttcagagctggtcaaaagtaattcatcacctgtaggatgcagaactgctcattctgcacctttgctagtgcctgtgtgggtggctccctgccctcccatccttagggcagtgttat

SEQ ID NO: 19665 - DNA, 718 bp, Homo sapiens
gaggccaagaattcggcacgagcaggcgtgcccttgacaggcagggagggctaggctgtgcatccctccgctcgcattgcagggagatggctcagcgacttcttctgaggaggttcctggcctctgtcatctccaggaagccctctcagggtcagtggccacccctcacttccagagccctgcagaccccacaatgcagtcctggtggcctgactgtaacacccaacccagcccggacaatatacaccacgaggatctccttgacaacctttaatatccaggatggacctgactttcaagaccgagtggtcaacagtgagacaccagtggttgtggatttccacgcacagtggtgtggaccctgcaagatcctggggccgaggttagagaagatggtggccaagcagcacgggaaggtggtgatggccaaggtggatattgatgaccacacagacctcgccattgagtatgaggtgtcagcggtgcccactgtgctggccatgaagaatggggacgtggtggacaagtttgtgggcatcaaggatgaggatcagttggaggccttcctgaagaagctgattggctgacaagcagggatgagtcctggttcccttgcccgcgtgggaccccaatagaactcaacccttccatgccagcccttcctgctgcctcctcctgtctggctcctggggcccatgcttagacccagcttcaccct

SEQ ID NO: 19666 - DNA, 291 bp, Homo sapiens
ctgacctttattatctgattgtttgacactgactttgtctgatttgcaaatatcctcctttgtacttcttcccttctcataatttattcattaatgaacaactaccatgtgtaaaatactttgccatgtatcgtgagtaaaatggtgtataaaaaaatttccccgactgcaaggctattataatgtggtggaaaggaagacattgaagaaataattacaagtgtgttgggggttagaagaagggaaacacacacacagtgctctgtgcatgtatcacaggagtagctaacc

SEQ ID NO: 19667 - DNA, 325 bp, Homo sapiens
tttttttgagaatgagctgtatttaatttaaaaaaagggggaaggggtgtaccccacaaatgatacagtaatgaggatacacaattaaatcccatagcatgactgaaggctttcactgtgtttgacgtcatcacaatggaaggcataaaaagtggagtaaatcaatgttgatacagtccaatctagtccattaggcaagatggtgcaagaagtcatttaaattaaaagtgccctacccttacctaaatggctagcagacatggagaacaccacagtgatgaatccacagagctttctccatgtagctataacaatgtgttgtcga

SEQ ID NO: 19668 - DNA, 442 bp, Homo sapiens
gcgtaaatagtctaaagaaatcttgccaagactgcaagctgcaggctgatgacaacggagacccaggcagaaacggactgttgttacccagtacaggagccccgggagaggttggtgataacagagttagagaattagagagtgaggttaacaagctgtcctctgagctaaagaatgccaaagaggagatcaatgtacttcatggtcgcctggagaagctgaatcttgtaaatatgaacaacatagaaaattatgttgacagcaaagtggcaaatctaacatttgttgtcaatagtttggatggcaaatgttcaaagtgtcccagccaagaacaaatacagtcacgtccagttcaacatctaatatataaagattgctctgactactacgcaataggcaaaagaagcagtgagacctacagagttacacctgatcccaaaaa

SEQ ID NO: 19669 - DNA, 409 bp, Homo sapiens
gggggaagggacttttattttcttttagagaggggaaagtgtgagctcttcccttattcctaatggctatttttgaagcaaagaaggccagcaacattggcacatgccacctggcaaaggacccttgagtaagtgaaggtctcctaaaactgggattaagaaaccttgctctcctcatctccaaggcagggaccatcaagaacctacagactccatctcttctgcaagcctcatgccaaccctgggctattgctgctgccccttaaacacaggctgtccttaacccacctctcctgccctgtgatatgtctgctgagttggcctggccatttccaagaggctgtagaaaggggagaatgtcaaggaagacttttggtagagaaggagcagaaagatgtgtttttgggaa

SEQ ID NO: 19670 - DNA, 411 bp, Homo sapiens
gcttgggaactgaatcacacaaatactgcttttccttttgttcccaaacagacagctggaatttcacaatcccatgtcatagccttatctcctctactcctgcttttcacttttactttatcttatgtaaaatgtagatttactgaggctcataagaacctcacaagaatgtaaccatctaggctggggcgtgatggctcacgccagcactttgggaggccaaggtgggcagatcacctgaggtcaggagttcgagaccagcctggccaacacggtgaaactccgtctctactaaaaatacaaaaattagccgggtgtggtggcacatgctacttgggaggctgaggcatgagaatcacttgagcccaggaggcagaggttgcagtgagccaagatcatgcctctgcactc

SEQ ID NO: 19671 - DNA, 380 bp, Homo sapiens
gattcaccaagcacaatatgaagaaaaaatagaaaagaaatgactttactttcttaactttttctatataaatacatgctatgtattatcttcagagttagaaaatattaaggccattctaattatagaaaaattccatttatcctacaaatatttgaaaactcactatttgccaaacactactaggtaattgagaccaggatgggaaaggcacacatttcagtccttgcccttatgaagctttctatctaggagggcagagacatgaatcacctggttacaatgtggtgagcattatgaagacgtatcaactgctggtaacatccacctttctgaggtcaggcatgcttcttcctgatgaatgacttttgagctgccgc

SEQ ID NO: 19672 - DNA, 510 bp, Homo sapiens
  misc_feature (1)...(510): n = a,t,c or g
ggggttcttctgtgaagagaattccagtgatgatgatgtgattctgaaagaagaattcagaggggtcattatcaagcagggatgtttactgaagcaggggcatagaaggaaaaactggaaagtgaggaagttcatcttgagagaagaccctgcctacctgcactactatgaccctgctggggcagaagatcccctgggagcaattcacttgagaggctgtgtggtgacttcagtggagagcaactcaaatggcaggaagagtgaggaagagaacctttttgagatcatcacagcagatgaagtgcactatttcttgcaagcagccacccccaaggagcgcacagagtggatcaaagccatccagatggcctcccgaactgggaagtaaagagactcctgattcctcttccctcctgagggaagcccatggccaagctcagtcaagacctgtcccttntgngacaaatcaacgggaaacagccnagggngggaagtttatttcangggggg

SEQ ID NO: 19673 - DNA, 429 bp, Homo sapiens
  misc_feature (1)...(429): n = a,t,c or g
gtgnnnttntgnntaangatactcttngactgactacgaatttaatacgactcactatagggaatttggccctcgaggccaagaattcggcacgaggtcttggctctacatgaagtactcagagctggttacagcaaaaaggatggagggaaaattatacagcagacttggaacagaacatttgaaggtatcgccgggcaggtgtccatagatgccaacggagaccgatatggggatttctctgtgattgccatgactgatgtggaggcgggcacccaggaggttattggtgattattttggaaaagaaggtcgttttgaaatgcggccgaatgtcaaatatccttggggccctttaaaactgagaatagatgaaaaccgaattgtagagcatacaaacagctctccctgcaaatcatcaggtggccta

SEQ ID NO: 19674 - DNA, 446 bp, Homo sapiens
gtgaagctctgattgctcttttgagagaaggtgagagcctggaggatttgatgaaactctcccctgaagagctcttgctgaggtgggctaattaccacctggaaaatgcaggctgcaacaaaattggcaacttcagtactgacatcaaggactcaaaagcttattaccacctgcttgagcaggtggctccaaaaggagatgaagaaggtgttcctgctgttgttattgacatgtcaggactgcgggagaaggatgacatccagagggcagaatgcatgctgcagcaggcggagaggctgggctgccggcagtttgtcacagccacagatgttgtccgagggaaccccaagttgaacttggcttttattgccaacctctttaacagataccctgccctgcacaaaccagagaaccaggacattgactggggggctcttgaaggtgag

SEQ ID NO: 19675 - DNA, 330 bp, Homo sapiens
gtccagataaggcagtgctataccaccttaccatggtaagtcaaacccttagaacaaaattagggagcataatttttggaaagttataactatttatctttctccttcgttttcttgtcatcccttttgtttgtttttttagtaatagccagtattttttatttccactttcccatgagtctattatagctaacttgtaatactgtaactataaaggaaaatgttttcctctcctgcctcaactcctaaaataaagcacttaatcattaggacttctatgtgaaaaaatatatgctgtgtgtaataaacccaatgcactttaaatatatt

SEQ ID NO: 19676 - DNA, 332 bp, Homo sapiens
ggcggcaacctttggcactgcatccatgagcatgcccacgggattcggcactcctgctccctacagtcttcccaccagctttagtggcagctttcagcagcctgcctttccagcccaagcagctttccctcaacagacagctttttctcaacagcccaatggtgcaggttttgcagcatttggacaaacaaagccagtagtaaccccttttggtcaagttgcagctgctggagtatctagtaatccttttatgactggtgcaccaacaggacaatttccaacaggaagctcatcaaccaatcctttcttatagccttatatagacaatttac

SEQ ID NO: 19677 - DNA, 441 bp, Homo sapiens
  misc_feature (1)...(441): n = a,t,c or g
gtgttntntggannaccgctancacangattacgaattaatacgactcactatagggaatttggccctcgaggccaagaattcggcacgagacccaggttgactgaataacattctcaaaattcttttatgatttatgcctagtgttcacccttttaaagtgttcccaggcactgcccttacaaacagctcccttcaggaaaaaggaagctccttaccatgtgcttccaggtgtttactctgtgtagccagtcctggagaacatgcataaataacaaacagagtgcgattcccctttctgaatcttttaggtgctggtgaaaagttacaggcaaacaaccctaaggaacaatctctctgctcccttgctcactgtgggagaggagctggcgctatggttcggggaatgcgcagtgctgtctgcatgttcaggttttccaaa

SEQ ID NO: 19678 - DNA, 397 bp, Homo sapiens
  misc_feature (1)...(397): n = a,t,c or g
gagggcttatatttggagtgcaagggttctggaagtttctgtatgtcctggaagtaatgtggatgtggtaagagaactggaaaagagcagagatcaggaagcagaggctgaagagtgagaagaacaccagcactagaggccaccactgggaggtcagcaggggagaagtacagaacctgagagaacagatgaattcagcagtgcttcatggtatgaacacaggctcagcatgtttgtgaccaactgtgtccatccagaccacagcaggggccaccaggacaggggagggtggcanaccagggntctttttgcaacaggtccttgaccntgtttgaaatttnttttnngaaacncnntttaaanaaaaaaaaagggggaaacctggggtttnttttta

SEQ ID NO: 19679 - DNA, 337 bp, Homo sapiens
ggtggtggtgcccacctgtgatcccagctactcaggaggctgaggcaggagaattacttgaacctgggaggcagaggttgcagtgagctgagattgtgccactgtactccagcctgggcaacaagagcgagactccgtttccaaaaaaataagagagaatagaagaagctactgcatgatgttagttaccaagcctgccatgggtcctctcttgctagacacactccatagatccccccactgagctgtggatgggcaaaccccggtggaatcccaccctccccaacaccccactgagccctgggccccctcctcccttcctcacctccaccttctc

SEQ ID NO: 19680 - DNA, 436 bp, Homo sapiens
  misc_feature (1)...(436): n = a,t,c or g
tnnnnngatttggaacacctntgactgattacgaatttaatacgactcactatagggaatttggccctcgaggccaagaattcggcacgagcaataaactggggttaatgcgagatgatacaatatacgaggatgaagatgtaaaagaagccataagaagacttcctgagaacctttataatgacaggatgtttcgcattaagagggcactggacctgaacttgaagcatcagatcttgcctaaagagcagtggaccaaatatgaagaggtagcacagctttatctacctgacagtgttgctcattaaggatggagttttagaaacaagagaaacatgttcatttgcatagtgttagagttctctgagtcatgtcaaataaatatgtgaggttaataaagcaaatgttatttccgttttagaagaaaaccacattg

SEQ ID NO: 19681 - DNA, 481 bp, Homo sapiens
  misc_feature (1)...(481): n = a,t,c or g
ggtgnnntntgnnctntgatatanaatactcttangacatgactacgaatttaatacgactcactatagggaatttggccctcgaggccaagaattcggcacgaggagagctagcaccatgagtcaaccctttgaaaaaactaaggagcctgcctgtccatacagggcaagcttaaaatagaattatgtgaagtggtctggtcatcctgtgacctgtggcagaaaatagtagcaaagaaagcgagagaaaatatcagaatctgaaatttcaccaattcatgataaccacagaccctcctggaccttccctgggaaaaaaaggaacagagaaaggggagaatattctgtcttcctcagattccagcccatccctttccaatgtccagagtctaccatctgtgaatttataactccaccctttcttcctccccatttccagtcttctcagttaagccttctgtagcaaatggatgagttaaga

SEQ ID NO: 19682 - DNA, 337 bp, Homo sapiens
ggaacttttggaagacgcattgaaaccgcagcagtagctttgccttgtaagtattttgccttattctacttactctttcttagataagtaattggccttataaaccaatctaagcaaatatcaatattttttattctattcttttaacttggcgtttatttcatttgaaatggtttagcttggcagataggatcatctaagaattaggacatccagtatttttaccttgggtcaatcactgcctaattttgtgaccttggcctagtgcctgggtagtggatagttcagaaaactctgactgcctgccatgccctctggcctctacaagaagcaggat

SEQ ID NO: 19683 - DNA, 475 bp, Homo sapiens
  misc_feature (1)...(475): n = a,t,c or g
tttggattccctntngaaacccctatgacatgattacgaatttaatacgactcactatagggaatttggccctcgaggccaagaattcggcacgagatgaattttacacatggatgccatagtgataaacattttattttactatgttatttaaatttctaatttaaattatgaatagataaatattaggcaatggggattatcaaagattggaatactagcttaagatggtttgagttaggtgagtgcatgtgtaaaggtctttatgggctcacaaatagtttttttagtgaaggctaagttctgggtatctgttaaaaagggattgggagaataaaaattaaattcttagatagagttcacattttgtcatatttagatctttaaactaaagctagatatactttcaaatctgctgtaacctgagaactctcaggttaactgctgaggcttatctttacaagtccacaaacac

SEQ ID NO: 19684 - DNA, 451 bp, Homo sapiens
gtctggtcctgatacacccgaatcttaagagatcaaatgatgctgtgaaagaatgtggctgttaccaggaataacgacaaaattcccagaggaacacaacattggacaaaatacttcataggggaaaagagtacacctgaggcctcctgtcacatagaaaatctgtagcatgatccaggtgcaagaactaaaaccaaaagagaaactgacacaacccccagagaatgacttctttgctacaagagaggggccatgttgtgtggcccaaaactcaagcctctcaaccctggttcacacagtggatctccacttctgtttacctaggtttgtcttgagaaagcttctgttgtttgaaagtccaaaaagactgttatgctgagataatactactgttttttgagtgcttagtaaatgctagacactaagcgctttgcatatatcaatgctctta

SEQ ID NO: 19685 - DNA, 378 bp, Homo sapiens
gaccaaagtggccacaggccatgcttctcttggcttctgggctctcttctgccttcccttatgactccctgggatttacgctttccatgctgctgtttttcgagagaaacaaatcacgtgttgaagtcctggctaaggagccgtcagctcccagcagttattgggactctgagaaccgtggttgtcagctgtgaggtgcaggttccttgttctcagaagcgttctagctggcgggagctggacaggtttcctctggaacacaattttacctggtttcacatctgactggcaggaaaaagggaagcagggcaagtgaggttagggctacccgggacagacggggatggacggagccatgtcgtcagcgcccagtggagg

SEQ ID NO: 19686 - DNA, 484 bp, Homo sapiens
tgataccgtttgactgattacgaatttaatacgactcactatagggaatttggccctcgaggccaagaattcggcacgagggtaagcaggccgtttcagcatcaggcaagtggctggatggtattcgaaaatggtattacaatgctgcaggattcaataaactggggttaatgcgagatgatacaatatacgaggatgaagatgtaaaagaagccataagaagacttcctgagaacctttataatgacaggatgtttcgcattaagagggcactggacctgaacttgaagcatcagatcttgcctaaagagcagtggaccaaatatgaagaggaaaatttctaccttgaaccgtatctgaaagaggttattcgggaaagaaaagaaagagaagaatgggcaaagaagtaatcatgtagttgaagtctgtggatgcagctgttatgaagatggttaaacttgaaacaaacaattttaagaattat

SEQ ID NO: 19687 - DNA, 368 bp, Homo sapiens
ggctagtgagtgagcctgtttaccaccaagtacccacgtcttcctttggctctgttgtcctctgcttgtttcatcttgtgacttaaaacacacacaccttagccaactgtttatgctaatgatgaaagagaagtcaaagtaaataagcttaataaaataatagtttgggcctgcgcagtggctcacccctgtgatcccagcactttgggaggccgaggtgggcagatcacctgaggttgggaattcgaaaccagcctgaccaacgtggagaaaccccgtctctactaaaaatacaaaattaactgggcgtggtggcgcatgccagtagtcccagctgctcggggggctgaggcaggagaattgcttga

SEQ ID NO: 19688 - DNA, 357 bp, Homo sapiens
atcattcccaggtggttcagcctgtgacaaccacagggaccagaacacagcaagccccttgagaagtcagatggtttattttgcccaggatagagatccaagattttcagaaatctatcacaacatcaatgcggatcagagtaaaggcatctcctccagcactgtccctgccacccaacagctattctcccagggcaacacattccctcctaccccccggcggcagagaatttcaggaatagtgggcctagcccctcctgtaaccattgtccagccatcagcttctgcaggacagatgttggccagatttcccgcactccaaccccacccaaggagcaaccccaacttggaccccta

SEQ ID NO: 19689 - DNA, 344 bp, Homo sapiens
gcggcacagaggctgtaaatgataagagggggagattcctagaagctgcctgccacagaggagcgacttgggttggcgacctttcctacagctcataccccaacttttggctcctccagtctgatcccaagtttagagatccttggcatcagcctacctagaagtgcttgctccctccctaggagagtccaagggccactgctctctgccgcccccttctgtcacccaatcagcctgggacccactaactcctcaagtggtgacaatcagggactgctatgtgggcctgccttcaattagggactggacccagcaccagaaagggcaccacaagattaagttaa

SEQ ID NO: 19690 - DNA, 258 bp, Homo sapiens
  misc_feature (1)...(258): n = a,t,c or g
atcacagctcactacagcctcgacctcccaggctcaagagatcctcccaccccagcctctcaagtagctgggaccatgggcacatgccaccacatccagctaatttttaaatttttttgtagagtctgggtctccctgtgttccccaggatggcctcaaacttctgggctcaagcaattctcctgccttgggctcccaaagtgttgggattanaggtgtaaccanggggcctggccccgggaattcggtgacaaaaaa

SEQ ID NO: 19691 - DNA, 436 bp, Homo sapiens
gcaattatgaataaagttgctataagtatttccatattgtttttgtatgaatataactttttctttatcttggataaatagctagaagaagatgagtggatcttacattaaatcttgcaggaaactgttactctgttttctcaaatggctgtaccattttgtatttccactagcaatgttcaagagttctagttcttcagcaggggcacagtggctcatgcctgtaatcccagaactttgggaagccgaggccgtcggatcacttgaggtcaggagttcgagaccagcctgaacaatatagtgaaaccccgtctctattaaaaatacaaaaaaattagctgggcatggtggtggacggctgtaagctactcaggaggctgagacagcagaatcgcttgaatctgggaggcagagattacagtgagacgagatagtg

SEQ ID NO: 19692 - DNA, 359 bp, Homo sapiens
cctgcagctattgtcccaagccagtcggatcctgaaagactccaaacggtgccttttcgaggagcagtgaagtaggccttgaaaccaaggtaaccagcgtcaatataatgaatcccacagagtccataagaggcatagcagttgtcctgagccacagtgacaccattgtagggaagcagccaggccagttctgtactcaagaagcgcttgatagagtttatgggttcgtaaggacgtcgaaggtcccagaatttgattttccggtcactccccgctgagacaaggaaatggctgttagctttgcaccattgaagggtacgcacagcctggtcatgggctaggaaacactggaaggggta

SEQ ID NO: 19693 - DNA, 405 bp, Homo sapiens
ctaaataatcacgttgctaaaatgggccacatggcccatttctttaaacaataaatggtaaattattattttggggagtgaaagctaaaagaaataatatgtctaatacgatgtggcattttctctatacagtacagttttagcattgaaaaggacctcagcaattccatttgccccgttttcagatgaggagattgaggctggtagttacagtggttttgcttcatgtcccatcccactggggctgctatgcaagctctcagtctagtcttctttcctctgcacttggtggccatcagctgtaacaagtcctgactagacaagggctttgttgttgactacaattcaatgccttttttgcctgcgtttgtttggaccctgctaatcaaggctacagggcagctg

SEQ ID NO: 19694 - DNA, 443 bp, Homo sapiens
  misc_feature (1)...(443): n = a,t,c or g
gggaagatggtgtagtgagaaaagcactggactgtaagcaaagaactgggtttctctacccttgtttttccataaatcctctgtatgaccttcagtaccacttagtcctactgtttctttaactttaaggaaagttaagttagactgggaaaacttctgtgtctctaattctgtgactgcatggtctaaggaccagataaaacctatttgactatctagttccaccttacaggtagaggtcggttatctgtgtgccctaggctagaagggatcactgggggactaataacaaagaattctgtttctatttgcttcctgatcttgttgcactggctgataggcctgcagaaggctgttatcaacaatttatggncacctgaatgccatgctcttatcagcagagctaatcacatttaagctctctgagttttctggttcnaaaa

SEQ ID NO: 19695 - DNA, 750 bp, Homo sapiens
gcccagcaggagaaggccaagagcacctaaggaaaaggcccaacccctggaagacctggccggcttcacagagctctctgaaacatcaggtcacactcaggaatcactgactgctggcaaagccactaaaataccctgcgaatctcccccactagaagtggtagacaccacagcaagcacaaagaggcatctcaggacacgtgtgcagaaggtacaagtaaaagaagagccttcagcagtcaagttcacacaaacatcaggggaaaccacggatgcagacaaagaaccagcaggtgaagataaaggcatcaaagcattgaaggaatctgcaaaacagacaccggctccagcagcaagtgtaactggcagcaggagacggccaagagcacccagggaaagtgcccaagccatagaagacctagctggcttcaaagacccagcagcaggtcacactgaagaatcaatgactgatgacaaaaccactaaaataccctgcaaatctccaccaccagaatcaatggacactccaacaagcacaaggaggcggcccaaaacacctttggggaaaagggatatagtggaagagctctcagccctgaagcagctcacacagaccacacacacagacaaagtaccaggagatgaggataaaggcatcaacgtgttcagggaaactgcaaaacagaaactggacccagcagcaagtgtaactggtagcaagaggcagccaagaactcctaagggaaaagc

SEQ ID NO: 19696 - DNA, 346 bp, Homo sapiens
gcgagatattatagaataactaggaattgagagtaaagtaagtgttggggaaatacaaagaaggtagactcttcagaacatggtacagggtcacttggttatagtgggttagagaaagagaagatgaggtttactctcagttttcagagttggataactgaaggagtggtgacatgattcaacaaaatggaatacagaaagaaaaagagaaagaagcataattagttctagaaatgttgagcttttaggtcctgtgggatagttacaaggagttttcaagtttgtgataagatatatggctctgatgctttggagagggatgtggtttgaaagtataaattcagaa

SEQ ID NO: 19697 - DNA, 414 bp, Homo sapiens
cttattcatgtttttaggtgatgatggtcattgaaactcacttcttttcaggtgtagctacaattgtgtaatgtacaatattagagaaaggacaggctttttatgagtaacacacaccatatataaaacagcctttctggctgaccacatggttaaatcatacccttcccagtactggggggaaaaaatgacccttcttagaatgtgcaagttccatgagagtaatatattgatatgattttgaaaagaattgttgatagttcatcttcaaacttatcattccagtatgcatctttaagataatgtgattctaagtagatgactttatattcttgattaaagagtgctatacatgttaagaaatgcattaaggaatacaataaatattctaaagtgatgtaaaaaaaaaaaaaa

SEQ ID NO: 19698 - DNA, 386 bp, Homo sapiens
catacgactcactatagggaatttggccctcgaggccaagaattcggcacgagtcttgagaagccaatttcttagagctgtcattcaagagtggttcaaatttgagatataaaaacctttctcaaggtagactctttggcccctatgcctagtatgtcagctgggcctctgaagctctcctctttgaggtcctggcaggctctggcccctgttgagaaggggaagcagttatgtgaactcatgtgctggaagaatccactctaccccttccctggcttctctgctgcaatttttgtctttaaacgtattttcaggtgattccagtttgcatacataattgagaaatataagatttggtccccagtagagagccaggtgaacttaag

SEQ ID NO: 19699 - DNA, 299 bp, Homo sapiens
gtgtgtgtgtgtgtgtatgcacacataggttttagaatagtgcaaaagcatgcaacagaatcaccaataaacagattctggtccctagctccagggattctgatccagtaggttcggtgtagagcctgagaattagcctttgttttcttttctgttttgaggcagtcttgctctgtcgccctggctgagtgcagtggtgcaatcacgactcactgcagcctcaacctcccaaactcaagcaattcttccacctcagccttccgaacagctgggactacaggcacgcaccaccacacctg

SEQ ID NO: 19700 - DNA, 367 bp, Homo sapiens
ggttggaaattccgttgatttcctcagagccctactctgcgtctgaaggtgggcatcatatttgaaagactgcttctgattactattgaggccatgcatgctccctacttgctctctctggctgatgagtgtggccaccaaagaaatccacaggtagtccattccctgccgttggtgcagtgctctggaaggaagctctgtgggaagcccctttatgtttgtgttggccttgtgcactctgaaagatgaggcaggtggctggccaggctcacagtggtgcctgccttaagacttatgggcagtcctttgtctggacaaaggtgacagaccaacagttattgacttagtaacagctccatcagtaagg

SEQ ID NO: 19701 - DNA, 392 bp, Homo sapiens
tcactatagggaatttggccctcgaggccaagaattcggcacgagaaaatgtggctgcctaataacctgtgcaagttttaaaactcagaatttcaaactgcaaatattttagaagatatttattttttcacttagtttcaatctggatgcccagatgaagagaatggaaactctaattgttactattttgaaaagatccagcctacccttgtcaattactgaatagacctttcacaggactggaaaagtgttttgggctccacctgctggacccacggagcttttgtgttcagtatgtgactgtactttagaaaacaaattaaatcagtggaattgggaacaaattgtccttctcaacagggctggtagacaaagacatgtaaaaatgaatc

SEQ ID NO: 19702 - DNA, 443 bp, Homo sapiens
gataataaacctgctgaagaagttgtcccggccagcattcttctgcattccaacattgccagccttgtcaaagaccaggtgattctgaaagtggactccggagactcggaagtggtcgatgggcttatgctccagcacatcactctcctcatgtgctcagcttataggaaccagctgctcaacatttttgtgcgcccatccttagtagcagtagcattgcagatgacaccagggttcaggaaagaggatgtctacagttgctttcgcttcctacgtgatgtttttgcagatgagttcatcttccttccaggaaacacactaaaggactttgaagaaggctgttacctgctttgtaaaagtgaagccatacaagtgactacgaaagacatcctagttacagagaaaggaaatactgtgttagaatttttagtaggactctttaa

SEQ ID NO: 19703 - DNA, 472 bp, Homo sapiens
  misc_feature (1)...(472): n = a,t,c or g
gagnnntnnnnnnttganntttgatanccgnttgacatgattacgaatttaatacgactcactatagggaatttggccctcgaggccaagaattcggcacgagtgggtgaaagggggaggggggaaaggttcccggggtacctagacccgagagctggcctgccgggtctggcccctgtccaccttcaaaagttttccaactttcccggaaagcccccaggggtctgcttcctcatctcagagcagagatacctggagctaaactctaggttacttggagacccaggcgtccgggccctaacagctcctgcagaacctttgaccaaataagggcaaagttgcttctcttgcctcgcccgcccccctcccttcccctctccgcttctgcttttcctgaaggagagttctgagcatccaaaggctcctcacttacctcactgactccctttatttcctgggtttactttcccca

SEQ ID NO: 19704 - DNA, 406 bp, Homo sapiens
ggttcctctctcacagatggagctgccctgagggaatgggagggtgcatgagtgggaaggtgggctctattctaggttgaaggaacttgcctgagtcaagaagctgcctgggcaatggaatgggactttggaggaagtcactggggtgaaggtggggcgggactctccagtagacatgaaatttcatggacgttgacattgcgaggggcacagtattgggcagaaaccaaacactgacccgattcctcccccaggaggtggacgtgggtttggctgccgatgtaggaacactgcagcgcctgcccaaggtcatcgggaaccagaggtgggtgcagggggtgtgggggtgtgggcaggagaccccagagcatctcccagccccggggtggcagccgctcctgatgcc

SEQ ID NO: 19705 - DNA, 459 bp, Homo sapiens
  misc_feature (1)...(459): n = a,t,c or g
tttggaaanncgctatgacatgattacgaatttaatacgactcactatagggaatttggccctcgaggccaagaattcggcacgagacaacgtgttcatggttgaaaagggaaaattaataggatttgagtagacagcttgatacagcttgacccaagtacattttatttggtctgaattacttgttcaccatggaaattgttgatatttgtgaaatgcatttctttaagcatgttctttatatgaataacgttgagagcccccgttaaagggggaaagtaccatatcgattggtgttgatataaattataacagttagtgaaactcatttgactaaaactcacagtattgtaaaccaaaatagatttgttaataaaataaagacgttaaaaaccagctgggcgtggttgctcatgcctgtaatcccagcactctgggaggccaaggtgggctgatcat

SEQ ID NO: 19706 - DNA, 441 bp, Homo sapiens
  misc_feature (1)...(441): n = a,t,c or g
anaccctttngacatcattacgaatttaataccgactcactatagggaatttggccctcgaggccaagaattcggcacgagtgttttctagagaattccaatatttgccacaagcatacagattgagtgacataattgcattcagtgaggtaaattatgatgaaagccaatggggattgattttattaataggaactttggtaaacagaattaagggaagggaaaattcttcgttggatttttttgacagtattctgttgatgaattgctttgtatgttgaaatgacttttaatatctgtcttatatgaaaacagttgttgaaattatagtgttttaagaaaaaagtagtacaacgtgttcatggttgaaaagggaaaattaataggatttgagtagacagcttgatacagcttgacccaagtacattttatttggtctga

SEQ ID NO: 19707 - DNA, 389 bp, Homo sapiens
  misc_feature (1)...(389): n = a,t,c or g
ggggaaccacgcacaaaccgtacaagttacagggagatgggtttgggctttctatgtgggagaacattcagatagttagcagtgtctgaaaatgtttcagttttgaccagggaggtatttaagtaacagatggatcattatagacagagaggctagtattggttgcgtacgtgggaaaggtaatggtgaggctggatgtggtggctcacgcctgtgatcccagcactttgggaggctgaggtgnnnnnnncacnaggtcaggagttggagaccagcctggccaccttanngaatnnngtttttcnnaaaatnccaaaaattatccggtttggngacaggcacctgtggcccactctcaggaanctgnnccggagaatccttgaacctga

SEQ ID NO: 19708 - DNA, 515 bp, Homo sapiens
  misc_feature (1)...(515): n = a,t,c or g
accngntatgacatgattattgaatttactacgactcactatagggaatttggccctcgaggccaagaattcggcacgagagcttcaataccctgctccgaatgtggcctggctgcttctcaatgatctgaaacaggcgaaaggacacagcacctgggttggtgggacgctcatagtcgagaaggggccagaaactccactgccacggctggaattcaccacacttaacgccctgcaactctagaaagcagggctcacgcctgtcatcccagcactttgggaggccaaggcgggtggatcatgaggtcaggagattgagaccatcctggccaacatggcaaaaccctgtctctactgaaaatataaaaattagctgggtgtggtggtacacgcctgtaatcccaactacttgtgaggctgaggcaggagaatcacttgaacccgggaggtggaagntgcanggagctgagatcgcgccatttgnacttcaacatnctggtgacagaatgagactt

SEQ ID NO: 19709 - DNA, 432 bp, Homo sapiens
cctaaagctatgacatgattacgaatttaatacgactcactatagggaatttggccctcgaggccaagaattcggcacgaggaggagcccccagctctgccccctaggactctggaaggcctccaggtggaggaagagccagtgtacgaagcagagcctgagcctgagcctgagcctgagcccgagcctgagcccgagcctgagaatgactatgaggacgttgaggagatggacaggcatgagcaggaggatgaaccagagggggactatgaggaggtgctcgagcctgaagattcttctttttcttctgctctggctggatcatcaggctgcccggctggggctggggctggggctgtggctctggggatctcagctgtggctctatatgattaccaaggagagggaagtgatgagctttcctttgatccg

SEQ ID NO: 19710 - DNA, 547 bp, Homo sapiens
  misc_feature (1)...(547): n = a,t,c or g
agaangntnannantnnanttnaaaatttgaaatctgaatccttaaagctatgcacatggattacgaatttaatacgactcactatagggaatttggccctcgaggccaagaattcggcacgagccgggggccctgaggcgagcccctccccaggtgtggccccgtgccggaccaggcgccatccacgctcctgcctcgcacccctcagcccacacttggggtctcctggtgcagagatgtgctgaggccctgtccgtctggatggtgctcatggtgggcagggggcccctgctctctacgctgtcgtggacgtggtctccacaggccacggcagcacctgtgagtccctggccttcttcccggggtctggcaggtgctgctcaggtgtgggctgatctgccggtgtggggagtgggggtggctgtgccccagggtcaagggtcataccctgtcgcccacaggacaagttggatggctttgttcccgcgcactttcttggctggnacctgaagacccngatgatacgagactggnggatgtgcatga

SEQ ID NO: 19711 - DNA, 358 bp, Homo sapiens
gtaaaatttaaccatatgaatatactacatcttgaaaaataggatacaatgtaagtagaaaagttaataactcctaattggtttagcccagagaagagagttacctctgattgtagcaggtgtctaaaataatcactgttaagcatgttgcctttttagtctgctcagctctgaccagctaaaatagcctcccctcctgctggtgtggcttcctgtggatggcctcacaaggtcactttatgtcaacagcacacctagacaaagtccttctgttgaaggcagacaggatcttctgtaggctgtgatctgaaatagatcccccatctatgtccattttcgcatctgctcactgccacta

SEQ ID NO: 19712 - DNA, 395 bp, Homo sapiens
gaaagcaattgctcttgggaaagctatacacagctctgttttgtcaatgacctttgttgtaagtctcccaacgtcctattaggagccacagcaggtgaggcatttggtgcagcaggaaacatggggactgcctaggctcgaatctgtggcaccctgagcaattacttaaattgtggagcctagttcctcatctgtaagatggacttgagattcctacctctcatgattactatggagattgaataattggtaaaattctcctagctcagtgactgccacaggatgggtctttcagattttggttctctttagcttctggttcttgaaagaaattaatctgtatataacataagaaactttgaaagtcaaaaaaacaaaaaattttaattcctccg

SEQ ID NO: 19713 - DNA, 346 bp, Homo sapiens
gtattataatggcagctttcgcatctgcaattaggactaattctgacagttacaatttctgagggatggtaaacagtgaacgagatgtgcagcagaggtattacacgtgaaaagcccttgtctctttaaccttgttgttttttttctcgcagaggttaccttttcccgatggtgcaaaatcgacttgacataactgttcatcagtttcagggttttccctggaggtatttgcatcaaatcagcccagtcaagcttcaagttgaaattggcaggccagaaactcacagggtagagactggaaaagagacagccaaagtacaggcagcaaactgacagcagcagagtg

SEQ ID NO: 19714 - DNA, 288 bp, Homo sapiens
ggcagggctaggcagcaagatgaggagatgcttgaactcccagcccctgctgaagtggctgccaaaaatcagagcttggagggggatacaacaaaggggacttcagaaatgtcagagaagagaggacctacttccagcaaccccagaaagagacatcgggaagattctgatgtggaaatggtggaagatgattcccgaaaggaaatgactgcagcttgtaccccccggagaaggatcattaacctcactagtgttttgagtctccaggaagaaattaatgagcaggga

SEQ ID NO: 19715 - DNA, 309 bp, Homo sapiens
ggaaagtagtccaggctgtccctgaaactgagtctgtggacactgtggaaagctttgaacaattgtgttttcgtcacaggagtctttgtaatgcttgtacagttgatgtcgatgctcactgcttctgctttttctttctttttattttaaatctgaaggttctggtaacctgtggtgtatttttattttcctgtgactgtttttgttttgtttttttcctttttcctcccctttgaccctattcatgtctctacccactatgcacagattaaacttcacctacaaactccttaatatgatctgtggaga

SEQ ID NO: 19716 - DNA, 447 bp, Homo sapiens
  misc_feature (1)...(447): n = a,t,c or g
ccgcctgggtgacaaaggtagaatntatccaaaaaaaaaagttattatttctgaagattgtatgaaatttataaaagtctgctggccctgatatgatgctgtcagtcatgattctgattactgtcttaaaatgctgcacataagtaattaaatttccttgtgaactgggaagtttcatcagacttttatcataactattgtaattggcaatagtccaaattttcttttgttttctttcctgtttttgagacacagtctggctctgtcgcctaagctggagtgcagtggtgggatctcggctcactgcaaactctgcctcccgggtccacgccattctcctgcctcagccacccaagtagctgggactacaagtgctgccaccacatccagctaattttttgtatttttagtagagaggaggtttcaccatgttggccaggggtgggc

SEQ ID NO: 19717 - DNA, 424 bp, Homo sapiens
gagagctaccatgagtcaacctgctcaggaacctgttagggacctctaagaagccattactctgtcacaacaccctcactgactccttccttatctcacataaaagagggtggaggttctcttcttttccactcccattgctcctacaaacccataaattagtaacttcttccctctcaaaagtagcaagtaaatgtatactcatctctaaacccagttctctaaactagctctggtgagactggaaaaatggccattgcccctgtgggacccagcttcttcaacttcccacctcagagtttgccttccacctgcaagctgaacactttcttctctcctccattggtaagcctgctggggagcaaggaacagcagcagttttctagctgatctgactgattaagtgtgcaagttcaattaactg

SEQ ID NO: 19718 - DNA, 339 bp, Homo sapiens
cgcggccgcgtcgaccataaagtgatttacccatatcactgtgaagaaaatctaattggagcttattatttatcttttttgtttgctttttgtctttagcctgataatacaaagaaaatattgagttcagaagttaactttgaggctgggtatgttggtgcatggctataatcccaacacttttaaaggccaagacagggctgggtgcggtgtcgacgcggccgcgaattccagatctatgaatcgtagatactgaaaaaccccgcaagttcacttcaactgtgcatcgtgcaccatctcaatttctttcatttatacatcgttttgccttcttttatg

SEQ ID NO: 19719 - DNA, 413 bp, Homo sapiens
cactttttaaaatcttgttccatgcctccaggtttatctttgtcttatctaccagtttattcctgtgaacttcagattgaaccattcattgcagcagtagccttaaaaaggcttttgtttatttctttggtttgttaactagtgtcatctatttagagaaacatttttgtttttaattgctcaaagctgtcgccgctagtcttatgagctatctactaaaactatggagaaactttgtatgtgcacacaaaagtattcaagagacagtattgctaacatctcatcttaatgtcttttgttattgagaagttttaggtgcttcaaaacaatataaatggataatagttgttatttggggaattgtaatgatgttggtgctgcttccttctaagagctcagacaagtaaagtatg

SEQ ID NO: 19720 - DNA, 374 bp, Homo sapiens
gcagcggaatctaccaacatacgggactcagggaagagttcagcaaggataggggcccagggtgtatggtcaccaagcccacccagagagaaggaatgctggagtgggcaagggtgcctgtcccccagcaggccactcctggcaacaggccaacgccacgccctgaggatgaacagagggcaccaacaggaacccccacttctcaccccagccccatgtgcccaggcaaaccctctcccggggtaccagctcttctgagagttgagtccggatgcctgtggttattcttccttctctggaagtttcctcgttccagggaccgcctctattctgaaccacatgaggatccacttaataggttgtggcttctcgat

SEQ ID NO: 19721 - DNA, 548 bp, Homo sapiens
  misc_feature (1)...(548): n = a,t,c or g
ttgannnccnttgaanaccgntatgacatgattacgaatttaatacgactcactatagggaatttggccctcgaggccaagaattcggcacgagtggatatattgaataaatgccaaagatatttaggttctcttcattgaacacttagttaattcattatatccattttctaccttatagttcaggcacatattgtttatatcaggcattaattttggtacttggtttgaaaactgtgtatgtgcttctgtaagataagagttctcagtcacttattattattggccataatttaattgagtctaggagatctttgattcatcattatttcaaatacttacaaaacagagggaaagttagcatagttatggtttaaaaccatgagtgatataggttagtagctgttggtagcaaatttcaacccgtttcatcagttagaatgtttctttgaaattttcctcctcaaaattgttcgcagatgtttaagtaaagagcctttgcaaaaaatattcatggaaccctctggtatccattacttaaatggtta

SEQ ID NO: 19722 - DNA, 332 bp, Homo sapiens
gattttttgagatggagttttgctcttgttgcccaggctggagtgcaatggcacgtttttcggcttaccgcaactgccgcctcctgggttcaagcgatagctgggattacaggcatgcgccaccatgcccagctaatttatttgtatttttagtagagacggggtttctccatgttggtcaggctggtctcgaactcccgacctcaggtgatgtgcacacctcagcctcccaataaaccatgacttttaagaggaatagcaggtttacttcccctgccagcattggggtgctctctaagcaacagtaggcggaaagtggtctggcgtattaa

SEQ ID NO: 19723 - DNA, 513 bp, Homo sapiens
  misc_feature (1)...(513): n = a,t,c or g
ttnnnnnccannagctatgacatgattacgaatttaatacgactcactatagggaatttggccctcgaggccaagaattcggcacgagagtgatggcatctatatcataaatctcaagaggacctgggagaagcttctgctggcagctcgtgcaattgttgccattgaaaaccctgctgatgtcagtgttatatcctccaggaatactggccagagggctgtgctgaagtttgctgctgccactggagccactccaattgctggccgcttcactcctggaaccttcactaaccagatccaggcagccttccgggagccacggcttcttgtggttactgaccccagggctgaccaccagcctctcacggaggcatcttatgttaacctacctaccattgcgctgtgtaacacagattctcctctgcgctatgtggacattgccatcccatgcaacaacaagggagctcactcagtgggtttgatgtggtggatgctgctcgggaagttctgcca

SEQ ID NO: 19724 - DNA, 339 bp, Homo sapiens
  misc_feature (1)...(339): n = a,t,c or g
gttcatgcctgtaatcccagcactttgggaggccgaggcgggcggatcacaaggtcaggagatccagactatcctggctaacacggtgaaaccctggctctactaaaaatacaaaaaattagctgggtgttgtggcgggcgcctgtagtcccagctacttgggaggctgaggcagaagaattgcttgaacccaggaggcggcagttgcagtgagccgaaatcgcgccactgcactccagcctgggtgacggacagagactccgtctcaaaaaaganaagaanaantatgncnggtcaaannaagnaaatnaannaantttaggtttccttaaggccctg

SEQ ID NO: 19725 - DNA, 297 bp, Homo sapiens
  misc_feature (1)...(297): n = a,t,c or g
gcggcacgagtgaggactttcatgtgccagacaatgaactaagggctctacatgcattatctcattgatccttgccccagccctttaagagaggaggtaccattgttatttccacttagagatgtgaacactgaggaactgagaggctacctcactgtgggtgtctgtgtgtatagaggtccagnnagtcacaggacagtctgctcncacagctagaaggaagtgcnnganngntgntcttgncctgttnttnagnnntanntantgtattntgctctctnggncattactnnactg

SEQ ID NO: 19726 - DNA, 433 bp, Homo sapiens
  misc_feature (1)...(433): n = a,t,c or g
ttgnnacngcttgactgattacgaatttaatacgactcactatagggaatttggccctcgaggccaagaattcggcacgagggcgtggagaggaagaaaacaattcccgctgcaggaggatgtgaacatgctggtgcatctggggaatgaggacctgtagctggagggtctggtgtgcagagaagacagcagtcaggtgagggtagagaagcagcctcagacttaggagagaagctgccaccttagatgatcaattattgtttgctggaagaaaggtagggtggggctagaccatgcaaggccctgaataccttgctggagtgtgtggaatttactttatgatcaggtgtcttccatggctatgaatcgcacccaacagcaatatgatgggagctatgaaaagccatgcagtaagcaagacagatgggctctc

SEQ ID NO: 19727 - DNA, 340 bp, Homo sapiens
gtgtacttgatattcatttttcattcacaaaatataacgtttaattatttctgatgcattttaagataaataaatataagaagatattgaagatttttcctattgcctagaattggtgatggtgtctgcaatttgaagacacaaccttaaattcacacattctaaagggaaagtcaccaagaaactacttccaatttgggccacacccatctcgggatttctaaagagatagcctaatacaacttattatcctatctaccactccaggagttcctcctcttatccccactccaatctcaagtcatcctttggtagagggttatcataggctgtccacaca

SEQ ID NO: 19728 - DNA, 604 bp, Homo sapiens
caacaaggcctgctaaattttgtattcttagtagagatgaggtttcgccatgttggccaggctggtctcaaactcctgacctccagtgatcctcccaccttggcctcccaaggtgctgggattataggcatgagccaccattctggccctacaactttggatttgattcctgctcatatgcagagtttctaactgcttaaatgtctgcaacatttagctgcaaggaaggaagcttaacacaaagtcctccagggagcaaaaaactgcaccaccacgcccagctaatttttttgtatttatagtagggacagggtttcactatgttggccaggctggtgttgaattcctgacctcgggtgatccacccacctcggctcccaaagttctgggattacaggtctgagccaccccgcccagcaacaaggctaatttgagggtcacttctttgatgccttttcttgcccatgctataggtcagaactaggacaagcagaggaggtcatatataagctacgtaagtctcttggcctctttgtaccttagcttccccatttgagaaaaatgaatggatcttaagacacgcttttcagagttgataatgggc

SEQ ID NO: 19729 - DNA, 423 bp, Homo sapiens
ggggaaagaaagcagcgatggaagggctgaaaatggttggagatgaaacgtctctgacagctttgtgcctcccaagggcatactgttcagtcggcgtcttccttggttccagggtcctgtgcttggattgtggggaacagactccccggggggtgctgcaagagcgtttccaagtcctgaaccccacctggagtgctgaggcccatggcctggctcctgatggtgacgtctttctctcagaggagcaagtccggagctttcaggtcccaacctgcgttcaatgtggaggccatctgaaaccagatgtcgttttcttcggggacacagtgaaccctgacaaggttgattttgtgcacaagcgtgtaaaagaagccgactccctcttggtggtgggatcatccttgcaggtatctgacttgcaag

SEQ ID NO: 19730 - DNA, 359 bp, Homo sapiens
accgcatgttctcactcataggtgagaattgaacaatgagaacacttggacataggatggggaacatcacacactgatttcccagccaatagtctccttcccccagtgtacctagttaactcagttttctgaaagtactactttgatcataaaccttcactcatactccttcctccaggaagtggagcttgattcatctctccataccaccccttcaacacgcatacagccaacccttgactagatttaaagacttatttctaatgaacagagtatgagaatggaaaaatagtaacttaacagtggagtgatctggtagatactgccttaatcaaatgatggaggctaataccaccagg

SEQ ID NO: 19731 - DNA, 303 bp, Homo sapiens
  misc_feature (1)...(303): n = a,t,c or g
gttttaaacaaaacaaagatgacacaaaaattgctgctgcttgtgcagagggctggcatctcaactgcctagggccctccctctttcccctctccctaccttagctgtaccacactgtccgttccctccccccatgatagggacagcagaagatgcccaggtactgaagacaaacgccaagtgactcaggcgtgtgggacctggtagacagcttgtcattttctggctttattntatgntngtcnttcntttgaacccttnttncncatgtctagaccctctgagagctcttntntntcttat

SEQ ID NO: 19732 - DNA, 423 bp, Homo sapiens
ggagcttcaataccctgcatctgatgaacattgatacacttgggtgtcttcctctgcactggaaaaaaaataatttagatagaattctaaaagttagcatgtttcgtcaatagcttcactgttcctcatgcccattcatcacatcttgcttgctattgaaatcctcccttgctttgtaacattattaaagtcagtcattattaaagtcgtctcaaaaagagacacctctgcaacttctaagatgttgtcaaccaggaatcatattttcaatacttcaaattctattgcattttcaagctttggaaacaaatataatattcttgcatattttctaagatgaaatttcatgtagacaatgatgtgatagaaaggatgatgcttatctaatgattttggcattgcccttgataactatgacactga

SEQ ID NO: 19733 - DNA, 477 bp, Homo sapiens
ttgaacccttgactgattacgaattaatacgactcactatagggaatttggccctcgaggccaagaattcggcacgagcaataccctggctggaagcagagtgacgcttcatggcaggaaagttggaagccccaggttctaacccagactctatctcttctcaccaggtggcctccagtaggtttcctaacttctctctgcctacatttttttgtctgaaagtggggacagtaatagtccccacagctcatgctatgacaattccattagaatccatgcaagccccttagaaccatgactgacacagtaaatgcttactaaatatgacttgctatgaaagcaggtgtaaaactgttgccctgaaagttttaagtaatgtccagaaaactacctcctgctcacctgccacactttccatccagtcagtgcagtaggcccttttgcagaaatcaaaaatatatgtagcagtggcaacca

SEQ ID NO: 19734 - DNA, 304 bp, Homo sapiens
gggtgttcactcctctttgctgctgctgttcatctgtttagaggagtttggctcctctaaacaagggaagccagggtcactggttcaggcactgtgatgttggggagctaaccaagagaaaagcttggtgcctgtccacagccttgggcagggctctatcggtggctgtcttggtccccaggaggaaagagtttgaggatggtttcctgcagctacaaacataactgcttaaggcaccagcagataaatgatagatagatagataaaatagatttgatagattagatagatggatggttagggg

SEQ ID NO: 19735 - DNA, 335 bp, Homo sapiens
gcatcaacacccaccttccacaactcagtctgcacctcagttggcaaaggagactggatggccatctttcctcatgttcccttgagtatttcaatgtagaaagcccttcaagtggtattatattttaaccttttacattattgttattaatgttagtaatatattgttatgttttctaaattatttttttttaagctgacgtggctttttttctgtggctcccagtgggtctacggaccttggctgacatatgttggtaggtactctggtcagctcagctggctgtcctggttcactcagaagataagtctctccaaagcaaattcacatgcatt

SEQ ID NO: 19736 - DNA, 494 bp, Homo sapiens
  misc_feature (1)...(494): n = a,t,c or g
gcagaggatcagtggtcccaaaacaacagcttttacaacagcacataaaaagcaaaaggccgctggtgaaaaatgtagctactcagaaagaaacaaatgcagcaggtcctgatagtcgatcaaaaattgtgcttctggtagatgcttcacagcaaactgatttcccatcagatatcgctaacaagtctctctcagagaccactgcaacaatgctctggaagtccaagggcaggagaagaagagcatcccaccctactgctgaatcttctagtgagcagggggctagtgaagccgacattgacagtgatagtggttactgcagtcccaaacacagcaacaaccagcctgcagcaggggctttgagaaatcctgattctgggaccatgaatcatgtggaatcatctatgtgtgcaagtggtgtaaattgggccaatgttacttnccaagnaaatcaaaaaaacccttggttggaaaaaattcagccattttctaaa

SEQ ID NO: 19737 - DNA, 366 bp, Homo sapiens
gaatgtttattaatctaaccattcccagagtccacagaagtttgaagctcagagatcaaaattagctccaaatagaaaagtaatcatctgttttctcttttttctgttgatttttagtagcatattaccatcaaaacacataatttttatttatgacaaaatgggttttctgctaattgtcagtctagttcctacagtaggaaaaatgatgtgcttgccatggccagtggccttccctcctgctgaggttcttgcctatcatcctgtacagcgtagagactttcatgatattctagctgcagtgatatcccctactgctttgcgtgccaccatgtggaaatatcatgatagaaattctccattccc

SEQ ID NO: 19738 - DNA, 456 bp, Homo sapiens
  misc_feature (1)...(456): n = a,t,c or g
agaatacaaaggcccctctttccatgggtcgtttccagacctggctattacaagagaacactggagtgctaaacacagattatgagtctgaaatactgggaaactgctgacagaaaatctctgtacgtggcaagggctctgctgggggtggctctcaacccgacactgtcagtgatgggaagggctctgctagggggggctctcagccccagacactgtcagtgatgggaagggctctgctggggggctctcagcccccaacactgtcagtgatgggaagggctctgctggggggctctcagccccagacactgtcagtgatgggaagggctctgctaggggggctgagaacccacgccgagctcgtgccgaattcttggcctcgagggccaaattccctatagtgagtcgtattaaattcgtaatcagtcataacggtatcagagtcaannnctc

SEQ ID NO: 19739 - DNA, 468 bp, Homo sapiens
aatttaatacgactcactatagggaatttggccctcgaggccaagaattcggcacgagagaccatttattagtaggtgtgctgtgtgtgaggcgcctgccatggtgatggccgtgcacagccagaccattcagatcccaccgtgccccagcgggtggtcctcgctgtggatcggctactcttttgtgatgcacaccagcgctggtgcagaaggctctggccaagccctggcgtcccccggctcctgcctggaggagtttagaagtgcgccattcatcgagtgtcacggccgtgggacctgcaattactacgcaaacgcttacagcttttggctcgccaccatagagaggagcgagatgttcaagaagcctacgccgtccaccttgaaggcaggggagctgcgcacgcacgtcagccgctgccaagtctgtatgagaagaacataatgaagcctgactcagctaatgtc

SEQ ID NO: 19740 - DNA, 464 bp, Homo sapiens
  misc_feature (1)...(464): n = a,t,c or g
ggannnntttgaagancnntatgacatgattacnaatttaataccgactcactatagggaatttggccctcgaggccaagaattcggcacgagaactggtatcatcacacatcagtttggttcactgatttctgaaaataaaccatttatacttgtttcctaagctttcctgcatttgccaccttaagcagagtcaagttcagttctcctggtgccctccaggtatcttaggctggattcccctctgacaaccacattgtggtttccataacaagcagctctgactagttctgtatccccaggcactagcatggtccccagtggctggcagcttaaactatgtgtgggtggtttctgggccagagtacctagaaggcttgggccttaaccctgtacactcagttgcctttggtagactactcattctggtcttcaaccaccagttggctggagcacctcacatt

SEQ ID NO: 19741 - DNA, 415 bp, Homo sapiens
caagcaggattctgtgtctctgggttcaggaatcctcaggcagcagaggggacttgctcctcagcccccatcactgcccccacccctacccgtgtaggccaccgagtgaggcccatggactggggagggctgtgcctgacgactcctgtgtccctctatgagggcccagcgccctgaccctcctgcctaggtttctaccttttctctctgtctttggccagctgggggagggggtagaggccgggtgagcaacatggcacagagcaagaggcacgtgtacagccggacgcccagcggcagcaggatgagtgcggaggcaagcgcccggcctctgcgggtgggctcccgtgtagaggtgattggaaaaggccaccgaggcacttgtggcctatgttggagccacacttgtttgcac

SEQ ID NO: 19742 - DNA, 183 bp, Homo sapiens
gtaaatctctaatttttttcactttatgaataaaaataaaaatacatataacaaatgtgtcagcactgacatatgttacttctggataatgaatatagcaaaccttgaagtatcgttctctgtactctacctttggaacctttggaaaaaacttttatttttaaactgctttctttctttttt

SEQ ID NO: 19743 - DNA, 329 bp, Homo sapiens
ggaagaaggaagagacaaatgttggggtctacggattcagttccagtttaatgatgtggccctctaaggagataattttgccttaaacagaaagacttgaccctcttaggtgtcatacctaagatcagtgtgttttttgtgtccaattcttttatcaccaaaaaagagaagaaatattgcagtgaatgaagattcctctgcattttagcactgctttttcaactgtagttggcttttgaatgaggatgacaatggaagagatgaagaatgaagctgagaccacatccatggtttctatgcccctctatgcagtcatgtatcctgtgttt

SEQ ID NO: 19744 - DNA, 339 bp, Homo sapiens
  misc_feature (1)...(339): n = a,t,c or g
ggcctcatggagttcacagtaaggaaggtaggaattaaagaattcatttaattacagttttgagaagtacaatgtacttctcaaagggagtgttacaggagaacttaacaccaaaaggtcagggacattgaagccaagatatgaagaatgcgagggcgtgaaccaggcaagtgcagtgaggaagaaccttccaagctagggatcaaccaactatttttttttttttganacagttttactttatgcccaagctggagtataanggcntgatctcagnttactgcagccttccctcccaggntcaagggatncttgngcctcagcctcntgagnanctgg

SEQ ID NO: 19745 - DNA, 379 bp, Homo sapiens
ggtcttgccctgtagcctaggctgtgcagtgatgtcatcagggctcactgcagccttgacccttctgggctcaatcagtcctcccacctcagcctcctaagtagctgggactacaggtgtgccaccaccatgcccagctaaattttgtattttttgtagagatggggtttcgctgtgttgtccaggctggtctcgaacttctgggctcaagccatctcctgcctcagcctctgaaagtgctgggattacaagcatgagccaccgccctggccgtggcctatgttcttaatccctctcctaccttccttccttcttgcatctgtttcccttttctctttctttttctccctttcctgctcttttccttcctcatatccca

SEQ ID NO: 19746 - DNA, 387 bp, Homo sapiens
gagaagttccacaatcttaatattacatggtgtggcttccttcaggagtttattagggatttggagattcccaaatattctactaacttatacccttgagagaggggagaataaacagaggagtgaatgtgaatcagaattcctagcttcatagtctaaatagaaatcctctaagatcataaaatgtccctaagaactcatgccttacattaatttttttggtattttttctattgattctaagcatggaaatgtagatggagattttggtgatgtattttcaaattatgtatcaataatagggaagcttacttgatttctttaaaatctggtcactatatctataaatatagtggacattaaatgtccagcataagggaattatgt

SEQ ID NO: 19747 - DNA, 446 bp, Homo sapiens
  misc_feature (1)...(446): n = a,t,c or g
gncgcccntcccttgancccannacctcttatgactgccacgaatttaatacgactcactatngggaatttggccctcgaggccaagaattcggcacgagcttagagcgggcagccagtgcttcctcttctgtttgtacgaaataatgtgctcattcagctgtttgagcctccaggtcacttccgcatccaatgacctattggatccttggctgctctgcaagatgattggtacattaatgcaggaaataacttcaacttacagatcggatgttcagcttcaaagatgtaaagtgtgtgtaggaggtgaaggggttgaacctagagcttagattttctaagctgtaacttgctgtctctagacctgtgctctagatgcaactagtttgtttcagagcctaatagcaatttgctgtggaggtgtcaccctaagccttcaggcccata

SEQ ID NO: 19748 - DNA, 212 bp, Homo sapiens
gctgtttagctttcaaattctaacacaggttcttccttttatatgaataaccttaatagagaatgccttgtatcgccatctcttaatgttcctataaacttgattttccagttaaattgcagctccctggtgagggaacatgtctttaaacctttgtgtgtgcctcattgtacctgcataattatgtaaagttctttttgtggtggtggtgg

SEQ ID NO: 19749 - DNA, 426 bp, Homo sapiens
gtcaataccctggacttcatatcaaatttctccctgttctggggccaccaaacaattctgatggtggtggctatccttatcaaaacagtaaatgtcattccccaactgcttaaactatgctttatttatcaatgaggtggtagcctacctcaggatcacttttatagtaatttccacggtcttactatttaaaggaatgtttccagaagtatctacatctgaattcacctgtctactgctattacctatccagggatagtaagaaagacacttttggttggaatttctctggtgtcacaaaatacataggcattatgacttgttctgcctaccttgtaactgcaaaattcacacagtatttttccacacggaataccctcttctataatgactactggcaccctctttatttcctgctaagaatgg

SEQ ID NO: 19750 - DNA, 322 bp, Homo sapiens
gttccttgttctgcttcccactcctgcaatacctcctctaagttaaaccgacgcctgtagtttacaaagaagttcttcacttggccaacagtcttgttgccaattacatctgcaatagcttgaaaatctttaccatatttgcggacacctggaaggcaaagtaaataatacacctgtgaaggatcaataaggagagctgtgtgtactatacatcatgcacacacaaaagataccagcaatgaaattcctttctgataaactctgctcatttctcaattctgagatagaggctaagatatcagggtcacagatgaaaactatg

SEQ ID NO: 19751 - DNA, 464 bp, Homo sapiens
  misc_feature (1)...(464): n = a,t,c or g
gnngnnnnnnnnnnttgganattnggtatgacntgattacgaatttaatacgactcactatagggaatttggccctcgaggccaagaattcggcacgagttccccgcccttctcttttctacagtatctgttacctcagtcagattgaggatgcacatatactgggaaaataatcgacttccagcgtccctcatgtagtctctacctgattcaggaatctctaacccagtatcggaacgttaagcggcttctccgctttcctgccgtgagaaactcgaggtgacaacctccgtttccggttggctccggttgcagagttgagtgtcctgagaggtcagattgctgtcagacatggcccatgaacatggacatgagcatggacatcataaaatggaacttccagattatagacaatggaagatagaagggacaccattagaaactatccagaagaagctggctgc

SEQ ID NO: 19752 - DNA, 388 bp, Homo sapiens
gtactcctgctggagaccgggattgcaaagatgactgtcatgttgtctcgtgcatcttacatcttttactgtgattaaaaataaatgtcgtggggttcacgtcccacagacccttatgtactgcagaggtcaaactggggcgggtttctcacacgcgtcatcacgcgaggccagtgtccgtcggggtgtgtgtctacaagcacggggcttcgtggcctatctttatgaaccctccagggtgatgtgaagccagccacaaacaaacacacacatcatctgaaaacaataacaaaagatcggggttctacgaaaaagagaaaatagtttaacagagcttcattaaaccaagaacgtgcttctgacttgttgacctactggaatcgcttgt

SEQ ID NO: 19753 - DNA, 91 bp, Homo sapiens
cttcaggtaatggaatagccaccttccccttccccaacccctaccagtgagaagcaaaagctataccttcctgggtcagcaggaccacacc

SEQ ID NO: 19754 - DNA, 437 bp, Homo sapiens
  misc_feature (1)...(437): n = a,t,c or g
gcggcacgagccagcactttgggaagccgaagctggcggatcacttgaggtcaggagttcaaggccagcctggccaacatggtgaaaccccatctctactgaaaatacaaaaattacccaggtgtggtagtgcacacctatggtcccagttctcggaaggcagaggcaggaggcaggaggattgcttaaacccaggaggcagagcttgtagtgagtaataaataaggatattatgttgcaagaaattattagagcagtaacttaatatgtgaaacgcatctcacttattacctggcatatatcaataaatgatagccagtattattttcagcatccattaaaatttgtttttcgtcgggtgcagtggctcacacctgtaatcctagctacccaggaggctgaggcaggagaatcacttgaacctgggangcaaaggt

SEQ ID NO: 19755 - DNA, 688 bp, Homo sapiens
  misc_feature (1)...(688): n = a,t,c or g
gggaacccggtttctgaggttaagaacctggtatganggaaaagataaaactgcatacgaggggcccgagaacgattcgaacaccggcgattaaatcccttaacgggaaatcgtcattagcgatgtactcacaacaatagatcccttcgcgtcccttagcaaatttagtttaaactcccctcggcgtatttaaatcgacacccaaggaaataatatcgttaaacccttatacccgtcgcgcgtcgaatttcgagcagatcccacaagcggtcatcgccctctagcacatcgaaaacacaccccgagaacagagaatcctcaccgcaccacgaaccaccaacataaacagtaacccgaccgcaaaccataccaagcccacaaccgagcacggacctaagcgaaccatcatccaaggacaaatccgcccancccctnctngtngggaccannttcgggganatttnggccntnntccanccccaatttatatacangggncgtntagtanancganaacaccggaagtnntcanactngagggaanatatagnggngccgcanancctaaagtacgcgcgcgcccgtaaatcgaacaccacaggntaaaaagacaaccgtacggacggnaaancaaacgtaacanccgaaaaattgagcgtaacaagcgcgcccgggcanaattaataac

SEQ ID NO: 19756 - DNA, 508 bp, Homo sapiens
  misc_feature (1)...(508): n = a,t,c or g
tttganncccctntgaanccantgctatgacatgattacgaatttaatacgactcactatagggaatttggccctcgaggccaagaattcggcacgagattgccaaatttatttccagaaaagttatctagtttatatttttattatattatattatatttatttatttatttattttttaatagagacaaagtctacctgtgttacccaggctggtctcaaactcctgggctcaagcagtcctctcacatcagcctcccaaagtgctgggacgacaggcgtgagccactgctcccagcctactttatattttcattagctggaaatggaggttcccagaaacatcaagatttgtgacattagctgggcttggtagcatgtgcctctagtcccagctactcaggaggctgaggtggttgtattgcttgagttcaggagtttgagttcagcctgggaaacatagcaagactctggctttaaaaaaaaatgaaggctgggtctggtggct

SEQ ID NO: 19757 - DNA, 339 bp, Homo sapiens
gcggcacgagttccattttatgaaaagaaagctgaggcagagctggcattgaattcaaattttggatttgttgaagtggtattagaattaaatcttgcattgggcaacacagcccttattagtcatctgttggattctggaacattttataatgtatcagtcaaaaaattaatttgtggagtacaaaaaacttgtgctagattcgtgtggcccttggagatcacccagtattttcttccttgggtttatcagacagcagaagtaagcttccctccaagatagaccaggaactgcattcactttccactcatgcacactcattaatgattcccctccatt

SEQ ID NO: 19758 - DNA, 681 bp, Homo sapiens
  misc_feature (1)...(681): n = a,t,c or g
acacataaccaatatatcataccggggaacccggtttctgaggtaaaaacctggtatgaggtagcggtataactacggtccatcgtagttccgattcttcggatctaggcgacttcctnattctagttcttcgancaatcaggatcatanatattggtcattacgttcgatcaacccgcccccaccccccggcagagatgagcctctatcacgccgtttaggtcggctctaaatcttcggatctaggcgacttctcgttcttcgaagggtcgggaccatagctacgagttactgnattcggttcgcaatataacctccgcgccctacctctccctctcggcggtcggaccccgggaaccctattaagaccacgtttaagcgggacctctccccccgtcccctaaaccancancaccanatccgtccggcntccaaaacccnacctnggggtttaaaacgggccnaacttanccngggnaacccccttttnaggggcgggaaaancgggnnttttaaantnccttgngttctnnctgccataagcnnntagggntcggnaaaagggccggcctaaccggntaangcnaaatcgccccnnaaccnaactnaangnnaagccgctangnacaatttnccaggaacannaaatactagnntaagaancnnaacgtgaaaaaaaaa

SEQ ID NO: 19759 - DNA, 672 bp, Homo sapiens
gttccccgcccttctcttttctacagtatctgttacctgagtcagattgaggatgcacatatactgggaaaataatcgacttccagcgtccctcatgtagtctctacctgattcaggaatctctaacccagtatcggaacgttaagcggcttctccgctttcctgccgtgagaaactcgaggtgacaacctccgtttccggttggctccggttgcagagttgagtgtcctgagaggtcagattgctgtcagacatggcccatgaacatggacatgagcatggacatcataaaatggaacttccagattatagacaatggaagatagaagggacaccattagaaactatccagaagaagctggctgcaaaagggctaagggatccatggggccgcaatgaagcttggagatacatgggtggctttgcaaagagtgtttccttttctgatgtattctttaaaggattcaaatggggatttgctgcatttgtggtagctgtaggagctgaatattacctggagtccctgaataaagataagaagcatcactgaagataatacctggaagcatcatagtggtttcttaactctccaaaataagatttcttctctgtagcctacttgtctggtttatcccttacagaatattagtaagatttaatcaattaaaatat

SEQ ID NO: 19760 - DNA, 342 bp, Homo sapiens
  misc_feature (1)...(342): n = a,t,c or g
ccggtttggcacactcattcagtaaatccttatggagagcccaatgtctgcataattgtgctgtgctgatgaccaagctagacctaccagtgacggctcctttgagatgtacgggacanntnttntgtcatctnttctgggaagcctntccangcttggtgaacagtggcaagatgtttaacagttgtacatgtgtcccatgttcctttctaagagcctgggcaaaccagacccggncgcaggccatcggantatggcgagagcttcctctctcctttctgaccttttgtgagatggcaacaacctgcagagngacacaagcagcaggcttatganggtgct

SEQ ID NO: 19761 - DNA, 511 bp, Homo sapiens
  misc_feature (1)...(511): n = a,t,c or g
gcagcttctcagtctctccctcagatgcctcctttgtgtaatagaaaaatcacagtactcttcccatccttcaagctggcaattggatggaagcactgtggggaaggagcgctgagagtggatggctacctccctcctgccagcctctccacaaagaccgcagctggggctctgcccttactgaagcaagtgcagtagggcaggaacaaccaaactgattaagtctttagtttctcagtatctccaataaagcttctttctgttattttgatttagactttaaatctgttgccttaatccaatcagccaggtgggatggcaggctgaggntagcctgcctgccccacgcccggggttttatgaaggttaagtgcaaggactgngaaaagctgtgtactggcacgtgcggcctgtctggacatggaaancggcnatgcccntggggttttgcccaaagggggnnaaaggcccccncgntnttntngaaancaggggatttggnnngggggcc

SEQ ID NO: 19762 - DNA, 463 bp, Homo sapiens
gatcaatcccagttatgttttatgttctttcttaccacacttttaagatttatactcttccttaggactttaatatgctactgccagtttaccagagttggcataaaaagcaaaatttgccattcctaatctcattgttcttattcaaagtgtggtttgctacctattcgtcaattgtaaaatcaattgagtggttctaacatgctttaaaaaatacagtagaaaataccagactgcactgagcatactaattcatacatatgaatttaattcatacccatatacatacaaatttaagaactgttttgcaaaacatatatctttttatgtacacgcatatagagacatgcatattgatttagttataaggtaaaatatatttcatggtattggacctagtcagaaaagtttgaaagccattgttttaattgatctcagactatttggctatttaggcaatttc

SEQ ID NO: 19763 - DNA, 487 bp, Homo sapiens
  misc_feature (1)...(487): n = a,t,c or g
ccgcttgacatgattacgaatttaatacgactcactatagggaatttggccctcgaggccaagaattcggcacgagggcagatgctctcaagagtatcaacaatgccgaaaagagaggcaaacgccaggtgcttattaggccgtgctccaaagtcatcgtccggtttctcactgtgatgatgaagcatggttacattggcgaatttgaaatcattgatgaccacagagctgggaaaattgttgtgaacctcacaggcaggctaaacaagtgtggggtgatcagccccagatttgacgtgcaactcaaagacctggaaaaatggcagaataatctgcttccatcccgccagtttggtttcattgtactgacaacctcagctggcatcatggaccatgaagaagcaagacgaaaacacacaggagggaaaatcctgggattctttttctagggatgnaatacatatatttacnaataaaatgcctcatg

SEQ ID NO: 19764 - DNA, 449 bp, Homo sapiens
gggtgaaaactcctagaaagtgaaaacttggataagccttttaagaagcagtagtagaatgtgcagaggctcagggacgttaaaatgcccttcataatcaaggaacattttggtgtggccacctcgccattcaaatgtgcgagaggggcagcgagaggcagccgggaagacggagcctgtgtagcacactctgactggaatcagactgcctgggttcaaacccctgttttgccacttgttagtaaagagcttacctgctctgtgcctcagatttcccttctgcaaatggggatgggaatagtgcctcacagggttattttagagatgccttctcctgacacattgtaagcactcaacaagtgttagctactcccagttggaagctagaatgtaaaaggccttaaattcccagccaaagagattgaatgctaaaattaatttcaagccaa

SEQ ID NO: 19765 - DNA, 396 bp, Homo sapiens
cgactcactatagggaatttggccctcgaggccaagaattcggcacgagattttacagtagggacttctgcttctggatcatccttgggtcagaaaagcacacatgtctgggtacggtggcccacacctgtaatcccagtactctgggaggctgaggcaggaagattgcttgagctcaggaagtcaagaccaggctgggcaacattgcgagaccctgtctctatgaaaacaaaaaattagctgagcgtagtgttgcatgcctttagccccagctactcaggagactgaggtggggggatcactgtagcccaggagttcaaggctgcagtcagccatgatcgcaccactgcacaccagcttgggcaacaagagacactgtctcttaaaaacaaacga

SEQ ID NO: 19766 - DNA, 309 bp, Homo sapiens
cattacagtttgaagctgcttgggcattaactaacatagcatcaggaacttctgcacagactcaagctgttgtgcagtctaatgcagtacctctttttctgagacttcttcgttcaccacatcagaatgtttgtgaacaagcagtatgggctttgggaaacattataggtgatggtcctcaatgtagagattatgtcatatcactgggagttgtcaaacctcttctgtccttcatcagtccctccatccccatcaccttccttcggaacgtcacatgggtcattgtcaatctctgcaggaataaggatc

SEQ ID NO: 19767 - DNA, 503 bp, Homo sapiens
  misc_feature (1)...(503): n = a,t,c or g
gcactctcatttaatcacccaatgtggactaaaaattaaatttacttaaaatttactattgtaactttcataccaaccactatattgtaatgccagatattctccattaaagatccctatttctaatctcttagcatttcctgtacataattctttttagacaaaagcattacatgttttggatacgttctgaaatcatttgggagaaattcgacagaatgcctgtttagctgtcttttatttgcatttgaaatatttaaaatgtactcattacccagtcttccttaatgtattgaattaagaaaactgggccgggcacggtggctcatgcctgtaattccagcactttcggaggctgagatggacggatcacaaagtcagaagatcgagaccataggggtcaacatagtgaaaccccgtctgtctaaatacaaaaagtaccaagcgtggtgggcanacctgtatcccagctaccaggaggctgaggcaggggaatcacttga

SEQ ID NO: 19768 - DNA, 217 bp, Homo sapiens
ggtactcttgacttttcatggagcattttatgttctgacgttaggagctttgctaatttgctggctaaaggcgctctctgaagtgactctttctattcttttccactgatgggtgaaggtagggaaagaattggcaatgtaatgtggaaaaacctctgagcaacagatctttcctctttccagtagctattttaagccctctctttttttttttttt

SEQ ID NO: 19769 - DNA, 337 bp, Homo sapiens
gctggggatgaaactcaggcatttatctactttttgaaagcagccaagtggagactaataaataggagtgtggagaccactagattaaacaacctatttcagcttcactgaagttgaatgaccacatgaatacatttccttacaagtaaagttttctctcatccaaaggcttcaagtgtgtcaccgtgggcaagaccaaatgtatacaccacaacaaaattttatctgtgtcaacagcaatttgtacattttatatactctaattcatccaaatcaattgcctgattacagtttgggtaccttagaaagtggatagtcttataactggtgctgcagg

SEQ ID NO: 19770 - DNA, 324 bp, Homo sapiens
cctgacctcgtgatctgcctgccttggcctcccaaagtgctgggattacaggcgtgagccaccacgcctggccttctaaatattttaaatgccgtttttcatttttaaaatttctagtttgttgttaactatcatacttctactgtggaagatgaggatttctctcattactgtaacaccccatcccataaacgtattcattagctccccatatttccagtagttatagttttaatttagactaattttcagtgtttacattaatataactatgtaaataatagttccggttgaaccatgtcatacaccattattaccttttct

SEQ ID NO: 19771 - DNA, 348 bp, Homo sapiens
gacaaaattaaaaaggaagaattgaagagatccctatatgccctgttttctcagtttggtcatgtggtggacattgtggctttaaagaccatgaagatgagggggcaggcctttgtcatatttaaggaactgggctcatccacaaatgccttgagacagctacaaggatttccattttatggtaaaccaatgcgaatacagtatgcaaaaacagattcggatataatatcaaaaatgcgtggaacttttgctgacaaagaaaagaaaaaagaaaagaaaaaagccaaaactgtggaacagactgcaacaaccacaaacaaaaagcctggccagggaactccaaattca

SEQ ID NO: 19772 - DNA, 334 bp, Homo sapiens
gggcttttgtattcattcacttaaccttttctgggcttctactcaatgccagggacattgacaggtactggggatgcagatatgacaagatggtgtcactatccttcagatcctaccgaatggaaaaaaagagagacacaattcagagagatgcacagtgctcattttggagtcagaagacctgggtttgagacctaggcctgctttttgctaatctcaacaccctggagaagtcttacactttctttgaggaagatgtggtccagaaagctgaacgtttacccttgactccccacagggtagggcctggaacccaggcataccagtgcctggt

SEQ ID NO: 19773 - DNA, 465 bp, Homo sapiens
ctttccgcgccgccacaatggtgcgcatgaatgtcctggcagatgctctcaagagtatcaacaatgccgaaaagagaggcaaacgccaggtgcttattaggccgtgctccaaagtcatcgtccggtttctcactgtgatgatgaagcatggttacattggcgaatttgaaatcattgatgaccacagagctgggaaaattgttgtgaacctcacaggcaggctaaacaagtgtggggtgatcagccccagatttgacgtgcaactcaaagacctggaaaaatggcagaataatctgcttccatcccgccagtttggtttcattgtactgacaacctcagctggcatcatggaccatgaagaagcaagacgaaaacacacaggagggaaaatcctgggattctttttctagggatgtaatacatatatttacaaataaaatgcctcatggacaaaaaaaaaaaaaa

SEQ ID NO: 19774 - DNA, 337 bp, Homo sapiens
gccaaaaatacatggaaaggtttttcttgtacctccccggaatctttcctggctactctcaggtcaataattcttgagttcctaagtggtaagcctctttccatgaagccaaaattccaatgctcttacctcacatttatgaaaaagacatactctgtttttcattctttcttaaaatctttcctgtgttgcctcatagtttaccttcttggttgataagacttggagactgtgaactatttttgcttggagcaacaatgtatttttattagcagattctaaatatagacttacagtttatcctcttgaccattttttttagtgccttcaagagtag

SEQ ID NO: 19775 - DNA, 537 bp, Homo sapiens
  misc_feature (1)...(537): n = a,t,c or g
ccccctttgaancccttnacagccatcacatgattacgaatttaatacgactcactatagggaatttggccctcgaggccaagaattcggcacgagcgacgggggatcctgaggcccgaagtgatgccaccaaaaagaaatgaaaaatacaaacttcctattccatttccagaaggcaaggttctggatgatatggaaggcaatcagtgggtactgggcaagaagattggctctggaggatttggattgatatatttagctttccccacaaataaaccagagaaagatgcaagacatgtagtaaaagtggaatatcaagaaaatggcccgttattttcagaacttaaattttatcagagagttgcaaaaaaagactgtatcaaaaagtggatagaacgcaaacaacttgattatttaggaattcctctgttttatggatctggtctgactgaattcaagggaagaagttacagatttatggtaatggaaagactaggaatagatttacagaagatctcaggccagaatggtaccttt

SEQ ID NO: 19776 - DNA, 364 bp, Homo sapiens
  misc_feature (1)...(364): n = a,t,c or g
caaatatcaattttttaattggattgggttttttttttaaattgagttgtaaagttctttattctagatgcaggtcttttgttggtcatatgggttgttaatattttctcccagtctgtctcttgccctttcattttcctaagggtatctagtttttacgttattgtatttaatttttatgtttctgctccgtttgaggccaattttgtgnttnangatgggatagggnttcctgttatggggcctccnacnaacatgantntgagctgntcctgnngcangancttgttgcagaccggnggctgaanngancnccnnttctccttnaccaggnnctcactcccatgtngagctncatgacttc

SEQ ID NO: 19777 - DNA, 552 bp, Homo sapiens
  misc_feature (1)...(552): n = a,t,c or g
gtnnnntnnnntattgaaacccttttgatgaccannaatttaatacgactcactatagggaatttggccctcgaggccaagaattcggcacgagcggcacgagcggcacgaggcctcccaagtagctgggtttacagatgtgcaccaccatgcctggctaatttttgtgtttttagtagagacagggtttcaccatgtttaccaggctggtctcaactcctggcctcaggtgatcttcccaccttggcttcccaaagtgctgggattacaggcgtgagccaccacacttagctaatatattttcaaataacatactttacatctgttttcaaagagattttgaagtgttggcaaacttttaaaagttactcccaaatattatagtttaaggcaaagatctgcctatttctcaagtttaatttttaatgaacaactttagaaaccgatggagaataagcaaattaaaaatggtaaatcaagggctgggcacaatgcctcatgcctgtaatctttaagattacactttgggaggccaaggcaggcagatcgctt

SEQ ID NO: 19778 - DNA, 423 bp, Homo sapiens
gggtgcttgtacagaagaagaataaaagagtttcccaaacacacaattagtagttgagtcagggagtctattcctcactaaaaatcatactgaagttataaatttagaaaacatgcccttcccccacaagacaaaatgacttaggaattgaatacaaaggtgagttagtcagtggctggaatgtatggtacagagctcctgaaccagtggattgctaactgttgctctcctctcctcctaggtgcaaggcagttgatacctggctgtgtttaaagagagagcatgccatacatatttcaaaacttgacatcccccatttcaaaatggagagtatcttacttttagagttgctgggataaatatattatttatttaaacatttcaaggttcaaaaaagaaaataatacgcctttggaatacaga

SEQ ID NO: 19779 - DNA, 303 bp, Homo sapiens
tctacttccacttaagctgcagaattgagggtgggccttagacctggtatgtggaggagagaatgattaattatacctggttcatgctttagattgaaagagctacctttcaaagtcaagtttattgaggtataattaacctacggtgaagttcgcgtttttaaagcatccagaattttggcaaatttatacagccatgtaaccagtgccacaatcaagtaataggacatttctgtcaccccaaaattcctcccacctctttgtagtcaattttctacctgccaaccccgggtcttcacaact

SEQ ID NO: 19780 - DNA, 405 bp, Homo sapiens
gggggcaaatactctggatcagtgcttctgaaactctccaattctttttttattttttccaaactgtcttggagcaatacttttggaaataactgaacttgaacagtaggtatcttgctgcatgtgcaaatcaccatatgagtttgacaataatcacaatgatctatactttgttcaatgagattagtcttctgatcatgtgcttggaagtcacagcaatggcaaattgctataaaatttctaaatatagattttcaatttatgaatttatctttccacaggctagtaaccaagtgttcaccagccaacatctgtctgtagactacactttgagtagacaggctaagtggccagtaaaatacatgtaacccaaagaatgggagataaactccaagataattgagg

SEQ ID NO: 19781 - DNA, 513 bp, Homo sapiens
  misc_feature (1)...(513): n = a,t,c or g
gaannannannannnntncannnannnnnnnnntntntnnaanatanngaanagnngtnntnnannnnannngnnnnttgaagccttnnttganacattagaatgatacgaattaatacgactcactatagggaatttggccctcgaggccaagaattcggcacgaggagatcggtgccactgcactcccgcctgggcaacatagcaagactccatctcaaaaaatgaaaaaagaagttaggggattatatatctttaaatgtagtatctttgaataattgcttgactttgtatctgggaactgttctttgcgtctggacaccaagtaaaacattaactttttgatttccttttccaagaagaagacgtaaagcaggctaccagcaattttgagaacttgcaaaaacagcttgcaaggaaaatgaagcttcctattttcatagcagatgcattcacagcaagagcatttcgtgggaatcctgctgctgtttgcctcctagaaaatgaattgga

SEQ ID NO: 19782 - DNA, 414 bp, Homo sapiens
  misc_feature (1)...(414): n = a,t,c or g
ttnnnnnnnttccctttggancnntgnntnccactgattacgaatttaatacgactcactatagggaatttggccctcgaggccaagaattcggcacgagggattcccgtcgtaacttaaagggaaattttcacaatgtccggagcccttgatgtcctgcaaatgaaggaggaggatgtccttaagttccttgcagcaggaacccacttaggtggcaccaatcttgacttccagatggaacagtacatctataaaaggaaaagtgatggcatctatatcataaatctcaagaggacctgggagaagcttctgctggcagctcgtgcaattgttgccattgaaaaccctgctgatgtcagtgttatatcctccaggaatactggccagagggctgtgctgaagtttgctgctgcc

SEQ ID NO: 19783 - DNA, 558 bp, Homo sapiens
catcacgccagctgaggtgggtgtcctggttggcaaagaccggtcaagtttttacgtgaatgggctgacacttgggggccagaaatgttcggtgatccgggactcactgctgcaggatggggaatttagcatggatcttcgtaccaagagcaccggtggggcccccaccttcaatgtcactgtcaccaagactgacaagacgctagtcctgctgatgggcaaagaaggtgtccacggtggtttgatcaacaagaaatgttatgaaatggcctcccaccttcggcgttcccagtactgacctcgtctgtcccttccccttcaccgctccccacagctttgcacccctttcctccccatacacacacaaaccattttattttttgggccattaccccataccccttattgctgccaaaaccacatgggctgggggccagggctggatggacagacacctccccctacccatatccctcccgtgtgtggttggaaaacttttgttttttggggttttttttttctgaataaaaaagattctactaacaaaaaaaaaaaaaa

SEQ ID NO: 19784 - DNA, 407 bp, Homo sapiens
  misc_feature (1)...(407): n = a,t,c or g
ggagattcttccagccctttgtgttttaattcatcacacagatgtaaatatactggtagacacagtctgggccctctcttaccttactgatgctggcaatgaacaaatacagatggtaatagactctggaatagttcctcatttggttcctctgctcagccaccannnnnnnaaagttcagactgctgcacttatagctgngggcaacattgttctggaactgatgagcnaacacaagtanttttgaactgtgatgctctttcacacttcccagcactnctgacacatcccaaagagaaaattaatagagaagcagtgtggttcctctccaacatcactgnaggaaatcagcagcaggtacaggcagtaattgatgccaatttgtaccaatgatnatacaccttttg

SEQ ID NO: 19785 - DNA, 515 bp, Homo sapiens
  misc_feature (1)...(515): n = a,t,c or g
ttgnnnnntacngaatcccttngctatgacatgattacgaatttaatacgactcactatagggaatttggccctcgaggccaagaattcggcacgaggaaaaaagggatgggaaaaatccggaaggtgaggtgctgtcttagagttgaggcccagacactgtgtcacagtggggtccctgggccctgcgggaagatctgagtactgcnnnnnnngcatgggtgtgtggttcaagacagatatgctgaggaagaaaggggaggatattccagtgtctttaacatcaaagacgctttgcttacttcatgacttgagatcagggttaaccattcttgaatatgttgcaggnggaaaaagaggaaaacctagtgattatttgaggcctttactgagccagtcacatctcctaaaccagttagaggagttcattatctgacatggtaaaatgcatatgtccaaactgaaatgcagttcaacccttataaagacattttctgatcctgcatttactgccct

SEQ ID NO: 19786 - DNA, 303 bp, Homo sapiens
  misc_feature (1)...(303): n = a,t,c or g
catagacctgcatacctctctgacgtactctttccttcacgcaactccagtcacactaggtctccttgcttttctgtttcagggcctttgcaggtactcttcactctgcctgggattcttgcctcacatatctgctttcatgtgaatcctccatttccctctggtctctataatatcactcaatgaagctttccctagccacctatttaaaattacagtaactccatcaatacttctattcccccctcctatcttacttttttattcccagcacttaacattttgangntgntatatttattg

SEQ ID NO: 19787 - DNA, 516 bp, Homo sapiens
acctttatgacctgattacgaatttaatacgactcactatagggaatttggccctcgaggccaagaattcggcacgaggagacgaacaaggtcctgggtccctacatgtcatactggctagagactgggaaacagattaactgagagaagccatcaagcctgaagagacatcgtgtttgaaatgtgtaaggcacagtgtacccgccgtggatcaaaacaacctgaaggacagacagacagacacaccgaggatcagcagatatcagtggggacaggtgctgatgatggtgcaaatgagagtcatgaaggaaagttaaatgatgaccaaagaccaagtaccttccccacaatgctttgacaagcgcttttataagcaccctggaatttagacactacccggggagaaaaggaaagggagacaagcatgaattgtctgagaaacccctgaattaatcatgtgtaccccaatgcaacaaggatctagatatagaataattttaattatagaaaacaaaa

SEQ ID NO: 19788 - DNA, 371 bp, Homo sapiens
gcggcgctgtagctgtgcgcctggctacaagctgggggacgacctcctgcagtgtcaccccgcagtgaagttcccttgtgggaggccctggaagcggatggagaagaagcgcagtcacctgaaacgagacacagaagaccaagaagaccaagtagatccgcggctcattgatgggaagatgaccaggcggggagacagcccctggcaggtggtcctgctggactcaaagaagaagctggcctgcggggcagtgctcatccacccctcctgggtgctgacagcggcccactgcatggacgagtccaagaagctccttgtcaggcttggagagtatgacctgcggcgctgggagaagtgggagctggacctgg

SEQ ID NO: 19789 - DNA, 332 bp, Homo sapiens
gaccatcgaacagagctcgcctcccctgagccctaccaccaaactcatcgacaggaccgagtccctaaaccgctccatagagaagagtaacagtgtgaagaaatcccagccagacttgcccatctccaagattgatcagtggctggaacaatacacccaggccatcgagaccgctggccggacccccaagctagcccgccaggcctccatagagctgcccagcatggctgtggccagtaccaagagtcggtgggagacgggtgaggtacaggctcagtctgcggccaagactccgtcctgcaaggatattgtggctggagacatgagcaaga

SEQ ID NO: 19790 - DNA, 402 bp, Homo sapiens
gggcacccgcgtcgtgcctcctgggttgtgaggagtcgccgctgccgccactgcctgtgcttcatgaggaagatgctcgccgccgtctcccgcgtgctgtctggcgcttctcagaagccggcaagcagagtgctggtagcatcccgtaattttgcaaatgatgctacatttgaaattaagaaatgtgaccttcaccggctggaagaaggccctcctgtcacaacagtgctcaccagggaggatgggctcaaatactacaggatgatgcagactgtacgccgaatggagttgaaagcagatcagctgtataaacagaaaattattcgtggtttctgtcacttgtgtgatggtcaggaagcttgctgtgtgggcctggaggccggcatcaaccccacagaccat

SEQ ID NO: 19791 - DNA, 561 bp, Homo sapiens
ctgccccacttccccttttcccagtattactgaatagtcccagctggagagtccaggccctgggaatgggaggaaccaggccacattccttccatcgtgccctgaggcctgacacggcagatcagccccatagtgctcaggaggcagcatctggagttggggcacagcgaggtactgcagcttcctccacagccggctgtggagcagcaggacctggcccttctgcctgggcagcagaatatatattttacctatcagagacatctatttttctgggctccaacccaacatgccaccatgttgacataagttcctacctgactatgctttctctcctaggagctgtcctggtgggcccaggtccttgtatcatgccacggtcccaactacagggtcctagctgggggcctgggtgggccctgggctctgggccctgctgctctagccccagccaccagcctgtccctgttgtaaggaagccaggtcttctctcttcattcctcttaggagaagtgccaaactcagggacccagcactgggctgggttgggaagtagggtgt

SEQ ID NO: 19792 - DNA, 462 bp, Homo sapiens
ccctaacagcttctgacatccattacgaatttaatacgactcactatagggaatttggccctcgaggccaagaattcggcacgaggtaatgagacatttactaacgctgggctcgactcagaattcagaaacagaaggtagatgactggcaaggactgttcctactctagagttttaaggtcattagaaagcttttgttttgttgaaagcactgtactttgtgtacgatatggttgagccttttagaaggttgctgagacttacgtcttatctttgcttatatagtatcgactagaggttggcaaactttttctgtgaagcgccagatagtaaatgctttaggttttgcacatacattctctgtcacagctagtcaacgcttgtaagaggatagcagctgtagacaatatgtaaacaaatgagctatgttccaataaaactttgtttacaaaagcatgcggt

SEQ ID NO: 19793 - DNA, 298 bp, Homo sapiens
gagatatgcttcaaacagaaaatgcccacccctcctcctttacccagcataaactctatggttaattcttaaaataatgccttacagtctccattaactcccttgcccttctcttgctttgtcatgctcgcttggcaaaacctcatctctgactaaatgcagttctttgccttctctgttcctgcaccaaaaatgatcaggagaaagcatattaccaggctgaactgtcactttaaattcatgaccagtaacttcatggaggcccttaacgtttcctgatggtcatactacaattttt

SEQ ID NO: 19794 - DNA, 318 bp, Homo sapiens
attttgtgaagccatgagttccagaaagtaaaggtgacatcggaaaaataatcaaaagctatttaaagcatctataaggtgctctctttctgtcttctacagatgagtcacacctttgagcttaatctttgaaaggttagagaataaattgatttttataaatactgcaaatcaggcttttgtttcctttttcagatatcttggacaaatcacatattttaaaatttgttcttgtatttattggttttgcagaagaaggcatcgtcatgcacagtatttgtaattaaaagcaaatcatttgtttaaaaaggcagtttg

SEQ ID NO: 19795 - DNA, 496 bp, Homo sapiens
agggtcattttaggagagctgccccagcccctcgaacgcctggcttggggtgtcattctgcctggcggccaggcctccagcttcccctgccccgggcctggggctgtcactggccctgatccgaacacctccagattccggcttctacatgggacagacggggacgcacaggccaccttccttctggcagggactcttatttattcccattgctctagggctttcggtttccccttcttccggtaggccgcgtagaggcatgcaccgggtaggtttccgcggtgaccccgcggcggcctgagggacgctccctgccccatcccggctgttgggctgggccgctttgcctatgcttcgccctgtgctgtgttctccagctttgtagcagcagccttgacaaacccaggcgcactgtaccaaggcaatgtaacttttgattttcggtcaatttaagttctttagtcaccaaatattaataaacagtttcgacttcaaa

SEQ ID NO: 19796 - DNA, 226 bp, Homo sapiens
  misc_feature (1)...(226): n = a,t,c or g
ctggaactctgctcctcaaatgacaaccacccttggttacccctaactccaatctttgttttctcaacttagcggggccacgtggctttatctgggatccccttcctgcactgaggtgtgaaaagtgccttcaagcnnaaaacnggcatcacagggctcatctcacttgnntcccatntgtcaggganccacgttttgngctacctattatctgatatctgaaaac

SEQ ID NO: 19797 - DNA, 533 bp, Homo sapiens
  misc_feature (1)...(533): n = a,t,c or g
tttggnnnttgganacngctatgacatgattacgaatttaatacgactcactatagggaatttggccctcgaggccaagaattcggcacgaggaacaatgccactgcacagtcgctggtccttattgatgaatttggaaagggaaccaacacggtggatgggctcgcgcttctggccgctgtgctccgacactggctggcacgtggacccacatgcccccacatctttgtggccaccaactttctgagccttgttcagctacaactgctgccacaagggcccctggtgcagtatttggattggccaannnnnnnaggacaggaaggaggtttgcgaaggtgttgcgaagccagccatgcctcccacacagcttgcccagcttggcttcctgacaagcttgtggctcgtggcaaaggaggtctcanacttgatccgaagnggaaaacccntaagcctgtcanggatttgttaaanaaaacccantgggaattgcnaaactttnggggaaaantttnnaaccggnttggaaaaac

SEQ ID NO: 19798 - DNA, 848 bp, Homo sapiens
gtatcggtgacccatcactacatggagatgtttggtcgtggctggaattcttcctcacgtcaattttcagtgctctttgggtgctccccttgtttgtgcttagcaaagtggtgaatgccatttggtttcaggatatagctgacctggcatttgaggtatcagggaggaagcctcacccattccctagtgtcagcaaaataattgctgacatgctcttcaaccttttgctgcaggctcttttcctcattcagggaatgtttgtgagtctctttcccatccatcttgtcggtcagctggttagtctcctgcatatgtcccttctctactcactgtactgctttgaatatcgttggttcaataaaggaattgaaatgcaccagcggttgtctaacatagaaaggaattggccttactactttgggtttggtttgcccttggcttttctcacagcaatgcagtcctcatatattatcagtggctgccttttctctatcctctttcctttattcattatcagcgccaatgaagcaaagacccctggcaaagcatatctcttccagttgcgcctcttctccttggtggtcttcttaagcaacagactcttccacaagacagtctacctgcagtcggccctgagcagctctacttctgcagaggaagttcccttcaccgcatccgtcgcctgccaaactgaaggctactgcaggtcactgagttgcctgccatccaaaggggatgggcgggattggaagaagctgtggcagctcttttccctgttcacctcccgcctgccagggaaggcaggacccgctctgccaagggccctctgcgtattcccttctctctga

SEQ ID NO: 19799 - DNA, 419 bp, Homo sapiens
agccggccccccagccctgccctggcgtccgtgctgctggccttgctgctgagcggtgctgcccgagctgcggagatcgtgggcgggcacgaggcgcagccacactcccggccctacatggcctccctgcagatgcgggggaacccgggcagccacttctgcggaggcaccttgatccaccccagcttcgtgctgacggccgcgcactgcctgcgggacataccccagcgcctggtgaacgtggtgctcggagcccacaacgtgcggacgcaggagcccacccagcagcacttctcggtggctcaggtgtttctgaacaactacgacgcggagaacaaactgaacgacattctcctcatccagctgagcagcccagccaacctcagtgcctccgtcgcacagtccagctgccacagcag

SEQ ID NO: 19800 - DNA, 380 bp, Homo sapiens
gtccagtagctgggattacaggcacgcgccaccacgcccagataatttttgtatttttagtagagacagggttttaccatgttggccgggatggtctcaactcctgacctcaagtgatctgcccgcctcagcctccctgtaaccagctgggattgcaggttcccggttggtatttccttatttggaaagaccatctttgtaggtgttattagctaaagtcaagtcattctgggttagggtgggccctaaatgccattgactgctatcctgctaagagacagaagagggagggacacacagggaggggaccacgtgaagacggaggcagagacgggaagaggcagaggtgactggagtgacgtagccccaggccttggaac

SEQ ID NO: 19801 - DNA, 519 bp, Homo sapiens
  misc_feature (1)...(519): n = a,t,c or g
gagagaaggctgaggtggtggggaagctattagaaatggtacaagatgaagcagaagttagaaattcttagacttgtagctgatagagggtcaataattctcaggagaggagttccccttcttagttcatggcccttgtcttcctatctcttagtttctctagctgtgaaaaattagacatttggatggcagaatcagtcacaatgagagtgatcaggtaggaagtctgatatgactttaggtgagacaaaacaaaatatgtcaggtacagatggtgagttaaaggaatgatgaagtacctaagtatanccccgttctcatttcctcctgcaagggaagaggcagagctgctcctggtcccttgtgcatcctggcatgtttgcctccaacttgagtggctggtaactcaacctgcagctccnaaggntctanagcaattctgccangangtnctntananaaggngcaaggggaaancaagtcccaaggntcnaccanatntnnaaaaaatttcctcca

SEQ ID NO: 19802 - DNA, 370 bp, Homo sapiens
gtagttttgtaaatgtgttgctacatagtcaagttcctttgtggcaaagaaatattttgttttgatattaggagccagcccatgtaatgcctctcaggcttgcttgcttagaagaaaaaagtcaccctttgtggtttttaagaaaaaaattctgtgcagatctgttcctcctcctgctccttcccttttctgtacatacagtgctcattggaggctcctgctaaaccttcttaaccagagaaataataggtatttgttagacctgagtgtacatttcacatgttatccttcacatatttctcattttcatctagtactttcttaatgcctttgttggagtccgcatcctcatctttaaaaaaaaaaaaaa

SEQ ID NO: 19803 - DNA, 364 bp, Homo sapiens
  misc_feature (1)...(364): n = a,t,c or g
gagcaagaaagagagagacttcaggccaagcttgccttgctgaaagaagacaatggaaaatagagtaagaatacagttatgtaccagaagcctttctgatcacagccagccgtctaatcttgctgaaagttaatctaaaaagcatctataagggccattcatggtggctcatgcctgtaatcccagcactttgagaggccaaggcgtgtggatcacctgagttcaagagttcaagcccatactgggcaacatggcgaaatcccttctgcacaaaaaaaaaaaaggggggnccgtttnaangnanccntgnggggcccaannttnacncggnctngcaangtnnaanntntnnccntatnggggg

SEQ ID NO: 19804 - DNA, 511 bp, Homo sapiens
  misc_feature (1)...(511): n = a,t,c or g
tgctcgggtctttacttgggcaacgggcaccatgataccctatgttctggggattagcagtgaggaatggaaagtgcccagctcagggttggcacataagggaggctccccagcctgggaacgattataacagagggcccctcacttcacagatgaggaacttgaggcaagtcaccagcccctgatcatttcgcctaaaagagcaaggactagagttcctgacctccaggccagtccctgatccctgacctaatgttatcgcggaatgatggcccagggctcctcagagcatgaactccactatgcatctctgcagaggctgccagtgcccancagtganggacctgacctcangggcaanagacannnnaggcaccaaggnggatncaagagctgactatgcctgcattgctgagaacaaacccaacctgagnacccaagcacttcttancccaggcggntggacagggtccccctgtgggncagccagtaaaaccatgnncccccactt

SEQ ID NO: 19805 - DNA, 476 bp, Homo sapiens
  misc_feature (1)...(476): n = a,t,c or g
caggaatgtctgaggtggcaacacttctcttcagccagacagcactggccagtttggagtctgtccatcctgcaggccacaagctctggatgaggaacttgaggcaagtcaccagcccctgatcatttcgcctaaaagagcaaggactagagttcctgacctccaggccagtccctgatccctgacctaatgttatcgcggaatgatgatatatgtatctacgggggcctggggctgggcgggctcctgcttctggcagtggtccttctgtccgcctgcctgtgttggctgcatcgaagagtaaagaggctggagaggagctgggcccagggctcctcagagcaggaactccactatgcatctctgcagaggctgcagtgcccagcagtgagggacctgacctcaggggcagagacnagagagcccaaggaggatccaagactgactatcctgattggtagaacaaaccnctggcc

SEQ ID NO: 19806 - DNA, 430 bp, Homo sapiens
  misc_feature (1)...(430): n = a,t,c or g
gggttggttcaacatatgcaaaccaataaatgcaattcgtcacatgaatagaacaaaaaacataaaccacatggtcatcttaatggacacagaaaaggcttttgataaaattcagcaccccttcatgttaaaaaccctcaacaaactggcatctaaggaacatacctcacaataataagggccatctatgacaaacccacagccagcgtcacaatgaatgggcaaaagctggaagcattccccttgagacccagaagaagataaatatgcccattctcaccactgctattcaacatagtgatggaagtcctatccagagcaatcagggaacagaangaaaactcatcataataggaagagagaaagtcatagctatccgnctttgcagatgatataatctatcccataaaacccntngnaatttacccaa

SEQ ID NO: 19807 - DNA, 373 bp, Homo sapiens
gaactggaatctataataaactgagtgttttgcatcttttctttcaaaacaaaacaaaaaaaggcttacaagtagaaaacaagctagctgcagtaatttttacgccaaaatccattaatatggtagttcctggctgctgagcaaacctatagctcaattgcccacagtttgtacaatcaaattagtattgatgttcaaagtgatctatttgaggccccataagatcctcaaacaaatatattaaaaagcatagctctcaagcccagtgagacccaagttgaatctctactgtactgttacttaacttgctatatgacctcagttttcctatctgtaaagtgtgggtaacattccctatctcacagttttttgg

SEQ ID NO: 19808 - DNA, 330 bp, Homo sapiens
  misc_feature (1)...(330): n = a,t,c or g
cttgctttaaatccaccaattaaaccttcctgagggaaacctgtttggacaataccttggactccacgaaggcattggcccatgggtccctccctctctccctgtctgcacttcctgacctctgcatgagcggcctgtaggcgtgccgtgtaccctccanaacctgcaagtaataaaatctttatttccatcttgtgtctcttctaatcattgaaagggtgctctccatcttagagattctatattaagaccatgcaatgtaattacaataataattctgatgtcatgttgcgtggatttgacaaatccataataaagcccatgtggaag

SEQ ID NO: 19809 - DNA, 373 bp, Homo sapiens
caaggtggcggtgcaggccgtgcaggccatgaaccgcatctgtgtgctggacgtggacctgcagggtgtgcggaacatcaaggccaccgatctgcggcccatctacatctctgtgcagccgccttcactgcacgtgctggagcagccggctgcggcagcgcaacactgaaaccgaggagagcctggtgaagcggctggctgctgcccaggccgacatggagagcagcaaggagcccggcctgtttgatgtggtcatcattaacgacagcctggaccaggcctacgcagagctgaaggaggcgctctctgaggaaatcaagaaagctcaaaggaccggcgcctgaggcttgctgctggtcttgggcccccgggc

SEQ ID NO: 19810 - DNA, 388 bp, Homo sapiens
  misc_feature (1)...(388): n = a,t,c or g
gaacattggaattatcggactagcaacttgaaataactacaaataatatgctaaggaatctactagaaaaagtagataacatgcaagaacagatgggtaatgtaagaagacagatggaaattctaagaaagaatctaaataaaatgctagagataaagcattgtaatggaaaggaagaaggcctttaatgggcttgttagtagatgaaacatagctgaagaaagaatctctaagcttaaggatatttcattagaaactttcaaaactggtaagcnaagagaaaaaagactgnanaaaaaaaanccngaacngancntntaanaactttnggcngccccnaaangnataacntgnatgnaatgngaatcttnaaggggaaaaaagggaa

SEQ ID NO: 19811 - DNA, 338 bp, Homo sapiens
gagccagcttgcctcctgcaccccacccccaccaaccaggggagccactaagctgactaacaactgtcccctcacccaccagctatttccccagggtagagtgggcaattctcaccttcaaagagtccccgcctgcccaggcctttggcacagaggctgagtggacagtcaggagagaggcgagaggcaaggcgaagcctgtgtccctgtttcagttgcactggggttggagcccagggtaggggtttccagcttccccaggctccggccttgtcagtctctttgcatgtgtggatttttctgtgtgtgtttctgtttgggtttttgttgttgggttt

SEQ ID NO: 19812 - DNA, 407 bp, Homo sapiens
  misc_feature (1)...(407): n = a,t,c or g
tttganacttgttgnctgattacgaatttaatacgactcactatagggaatttggccctcgaggccaagaattcggcacgaggaggcaggaggtttcactcaaacccaggaggtggaggttgctgtgagccaagatagtgccattgcacttcagcctgggtgagaagagtgaaactccgcctcaaaagaaaaaaaaagaaagaaagaaatactattctcttttctttcctccacaaaaaataagagttaaagttaggaaaagtgaaattgaaacttgtgggcttgatgcaaaaaattaacaacctgatacacatctgaatcttctttggttgctttaattgtagcattcgtagaagaatctttgaatgggtccaattttgggactgcaaaattttgctgaatttaaa

SEQ ID NO: 19813 - DNA, 469 bp, Homo sapiens
  misc_feature (1)...(469): n = a,t,c or g
gnnnnnnnnnnntnnnnntttggannttgganaacnttatgacatgattacgaatttaatacgactcactatagggaatttggccctcgaggccaagaattcggcacgagcaaatactttcaaaatagatttttaatcagagtatttaaaccattgatttacttttctttcttaataaaaaacaaataaaaaaaagaaatattggccgatgcagtggctcacacctgtaatcccagcactttgggaggccaaggagggcggatcacctgaggtcagactatcctggccaacatggcgaaaccccgtctctaccaaaaatacaaaaattagctgggcacggtgatgcgtgcctgtagtctcagctactcgggaggctgaggcaggagaatcactcaaacccaggaggtgganggtgctgtgaaccaaagatagtgccattgnacttcacctggatgaaaagagtgaaact

SEQ ID NO: 19814 - DNA, 508 bp, Homo sapiens
  misc_feature (1)...(508): n = a,t,c or g
ttggaatntgattccnatcagctatgacatgattacgaatttaatacgactcactatagggaatttggccctcgaggccaagaattcggcacgagctagccaccaagccatagttcttttgtttgtcatagttgaatttcaaaatgtctttttaatgaagcccttcctgattggggagaaaggacataagtattgtgctttagttttatgtgctggtttataaaattgtgtatgttgactcaatatccccataagcatagggaaaggaaaacaggtcattttttgttcagaatcttatttgagaaaaaaaaaaatgatcaaagaaaagatttgcataaaaatctgcaaattcaggataaatgtatgaaaacattttaaaatgtgattataaaatagaccagtatagcttttcaacatttggttgtaagaatcccaagaatgnaagtttatgatcttagtataccacctagaatcgagacaaatacatgaggntatgaatcatgccatt

SEQ ID NO: 19815 - DNA, 390 bp, Homo sapiens
gggcctggctaactcctgccaggcagtgcccttcccggagcgtgccctcgccgctgagctcccctgaacagcagctgcagcagccatggccccgccctgggtgcccgccatgggcttcacgctggcgcccagcctggggtgcttcgtgggctcccgctttgtccacggcgagggtctccgctggtacgccggcctgcagaagccctcgtggcacccgccccactgggtgctgggccctgtctggggcacgctctactcagccatggggtacggctcctacctggtctggaaagagctgggaggcttcacagagaaggctgtggttcccctgggcctctacactgggcagctggccctgaactgggcatggcccccatcttctttggtgcc

SEQ ID NO: 19816 - DNA, 376 bp, Homo sapiens
ggtgatctcggctcactgcagccttagcctcctggctcaaacaagccccctgcctctgcctacccaaagtgctgagattataggcgtgagccaccgtgcccaattgtgatcgtttttcccaaagaatgtatcacatgctaacaaaccatatatttatgtatttcattgttcatagtaactacaatttaaaaatacaaacttagccgggcatggtggcgcatgcctgtagtcccagctactccggaggctaaggcaggagaatggcttgaacccgggaggcgaaaattgcggtgagcggagattgcgccattgcactccagcctgggcaacaagagtgaaacaccatctcaaaaataaataaataaataaaaagaaa

SEQ ID NO: 19817 - DNA, 528 bp, Homo sapiens
  misc_feature (1)...(528): n = a,t,c or g
ttgnnnccnnaacagctatgacatgattacgaatttaatacgactcactatagggaatttggccctcgaggccaagaattcggcacgagccagttttcccatgattccctagtgctcctgcactagtgcactctgtgcttctgctcctggtaggccttgctagctgccctgtgccaagcatccacatattaaccttgaaactagaaggtatgaactctgtttggaaaggggctcaggtaggaagtgagctgcctcaggtcattgctagttggaatggcctttgagcagggatttctgacttgagggaaacatcaagtatctactatgtacaaggcacttgaggtgggcaccgcaggaaatttagtgcccccttggtgcttcacatgtaataagtttgcactttgcctgcattccaacacaaagcagagtgaacactggtgtaaaagcacagggtattctctgggagccctgcaaaaaaaaccccaaaaacccaggccggtcgtggtggctcacacctgtaatccagca

SEQ ID NO: 19818 - DNA, 389 bp, Homo sapiens
ggaagtttgctgtaagtataatttagtatttttataggtattttgtcttttatctctgcttgctttaagaatcaaacaacttctataaacaaaaccaaacatatattatatatcatgcatatacataatatatacatttgttatggcttaaataggtctcctcaaaattcaagtgttaccaatgtgatatattaaaagatgaggtctttttttgtgatctgcttgctggggaaagggtggggcctttaagaggtgattaggccgagtggatctctcccttgtaaatgggattaggtacccttataaaggagcatgacaggggcagtagatcccttttcttgcccttctaccttctgccatgtgaggatgcagcaagaaggctctcacta

SEQ ID NO: 19819 - DNA, 372 bp, Homo sapiens
  misc_feature (1)...(372): n = a,t,c or g
gcctggagatccagaagctgactgcacagatccagctcctgcctgaagagtcactaagtgtcttttctcaagaatgtcataaacaagccatgcaaggtttcaagctctacatgccacggggtcggtactggcggcttcgtctctgtcctgaacctcccagtgctcctagtgagtatgctggtttagtggtccgcaacctactggagcctgtgttgcaaggattgcaagggttgccacctcaagcccaggcccctgcccttggtcaggctctgacggccatcgtgggtgcctggcttgaccacattcttacccatggggattcnggntcancctgcanggagccgctgnanntnanacangantttggagtgg

SEQ ID NO: 19820 - DNA, 378 bp, Homo sapiens
ggacggcagggcactcatcaacagcccggagggggccgtgggccgaagcctgcagccgctgtaccggagcaacaccagccagctcgccttcctgctctacaatgaccaaccgcctcaacccagcaaggctcaggactcttccatgcgtgggcacacgaagggtgtcctgctccttgaccacgatgggggcttctggctggtccacagtgtacctaacttccctccaccggcctcctctgctgcatacagctggcctcatagcgcctgtacctacgggcagaccctgctctgtgtgtcttttcccttcgctcagttctcgaagatgggcaagcagctgacctacacctacccctgggtctataactaccagctggaagg

SEQ ID NO: 19821 - DNA, 342 bp, Homo sapiens
  misc_feature (1)...(342): n = a,t,c or g
gggagagattaagcagtagcagtaatagtcaataatctgcgtctaaagtggcttgctggctttacttcagtaaattctggccatgtgaagaatacctaaatcaactatcagagttcttaacagtgaacctgtcataactatgatttttttttcttttttgcaattatagaattgattttttttttccttttggggcaaaagtcttgctctgtcacctgtgctggagtacaatgccacaatctcggctcactgcacttccgctcccgggttcaagcaattctcccgtgtcagcctccccaaanttgggattacaggcgcatgccactaccgctggctaatttt

SEQ ID NO: 19822 - DNA, 409 bp, Homo sapiens
aatttaatacgactcactatagggaatttggccctcgaggccaagaattcggcacgaggctacacaggtgaccacgaatggttaaattcttgaagagaattctagtaagagaaatataagactgtcctctgtttcaaatttatgtcaatgaaaccgtaacttatttcctttagaaaaataattcctgtattgttgttttccatacttttctttcgcgtgaggaccatggccctatatttttaattaggtcatcctaaaacaatgtagaattaatgctgatggctgaattacctgtaattttcctgctttctgttttggttttggtaaaatgctcctattttggtacctaggaattaactgcataattgaagggagaaatgggacatataattcagtttcttatacaaag

SEQ ID NO: 19823 - DNA, 335 bp, Homo sapiens
gccaagctttcctcggggtgcttttcaccaaggagccctacctggatgagcagagagctgtgaaatatctttggcttgcagccaacaatggggactcacagagcaggtaccaccttggaatttgctatgagaaaggccttggtgtgcagaggaatctgggagaggccttgagatgttaccagcagtcagccgctctgggaaatgaggccgcccaggagaggctgcgagccctcttttccatgggggctgcagccccggggcccagcgacctgacagttacaggactgaagtctttctccagccccttcctctgcagcttgaacaccctgctagca

SEQ ID NO: 19824 - DNA, 306 bp, Homo sapiens
ctaatttatacttatctgaaggttacaaattagacttttaaattttctttgtagttggtggtgtttgagggttggctagaaatgaaagcctggattttgtgccatgtttgtaatatagtttgttccttgatcaaataatcagagaaaagaaacttaaagatctttgtctgtgaagaagaaaattatctccctagttcaatctgtagtgaaataagactacagaaggcattgttttttccttttttattttttgtattatatatttttcttaaatatgttttattgtcttctctaagcaaaaagttc

SEQ ID NO: 19825 - DNA, 332 bp, Homo sapiens
cagaaatgcagctccacgacatccccaagcaggaaggggcagtcctgccaggggacatggctccacaccacgcccctcagtgcagcatgctgacatgtgacatgcctgtggcacagcttgcattttcccttcggggctcacgcagccacccactgacccaacaactctgctacagctgggcaccaaccacggccgcaggctaaggtcgacgcggccgcgaattccagatctatgaatcgtagatactgaaaaaccccgcaagttcacttcaactgtgcatcgtgcaccatctcaatttctttcatttatacatcggttttgccttctttatg

SEQ ID NO: 19826 - DNA, 341 bp, Homo sapiens
gctgggagatggagagcttttggaaggctgtcttcaaagcctgtcaaatcatacaatacaggccaacatttagctaaactgtatcaacctggcttggcaggaaaaaatcccaagcaccatgtttggttatgaaaatccaatgaaataatctacatataaatgtttaggactgggtaaagtagagcagaaattcaagttctgtaacaatcccattcctgccctatatagaagtcatcgtatggagtggcagaatctagctgtatttgatggctttgatttagttacatcaatctgtgctacccgaacatgcaaattttacacattaagggccctctagctta

SEQ ID NO: 19827 - DNA, 512 bp, Homo sapiens
agctatgacatgattacgaatttaatacgactcactatagggaatttggccctcgaggccaagaattcggcacgagtggaggttgtggaattcgccgttcgaaagcagggactaaaagccccacttcgtcttacgttccgaaaggaaggcgtctgttgagcctttctctcagtcgtgagggaggcgtcgacggcgtgcggaagtcctgagttgaggcttgcgggatcctttccggagaaagcgcaggctaaagccgcaggtgaagatgtccaactacgtgaacgacatgtggccgggctcgccgcaggagaaggattcgccctcgacctcgcggtcgggcgggtccagccggctgtcgtcgcggtctaggagccgctctttttccagaagctctcggtcccattcccgcgtctcgagccggttttcgtccaggagtcggaggagcaagtccaggtcccgttcccgaaggcgccaccagcggaagtacaggcgctactcgcggcatactcgcg

SEQ ID NO: 19828 - DNA, 341 bp, Homo sapiens
gaactggagcaggaggaagagtcttttcatcactgatggtgatttccacttggtttgtatagtctacgacaactcccatgggcaaggagtcatcactcttgtctgtcacaggcaattcagctcgactagaatcctccagtagccaagattcccaattaatctgatcactttgtcgagcaaggatactaacttctgttgaagccgcagatgctgccagcactaaatcccattcctcaatgtaactgaggtagtaatgatgctgtctctccgtgcagctgccataacagggctccataaagttcacaaatatctctgggtgcttttcttcttttttcggtagt

SEQ ID NO: 19829 - DNA, 385 bp, Homo sapiens
cattttcctacctatattacacaaaaaagtatagaaaagatttaagtaattttgccatcctaggcttaaatgcaatattcctggtattatttacaatgcagaattttttgagtaattctagctttcaaaaattagtgaagttcttttactgtaattggtgacaatgtcacataatgaatgctattgaaaaggttaacagatacagctcggagttgtgagcactctactgcaagacttaaatagttcagtataaattgtcgtttttttcttgtgctgactaactataagcatgatcttgttaatgcatttttgatgggaagaaaaggtacatgtttacaaagaggttttatgaaaagaataaaaattgacttcttgcttgtacata

SEQ ID NO: 19830 - DNA, 422 bp, Homo sapiens
aatttaatacgactcactatagggaatttggccctcgaggccaagaattcggcacgagggacaacccaacagcaccagtggggatgttctcctaagccgcagagggcctggccacgccatccgtcctccaggaagagccatggtgttaatgcaggacaagggcagctctcagcagtggcctggtctggggggcgagggtggtggcacaggtcccttaagcatgctcagagctgccctgctgctcatcagcctgccatggggggcccaagggacagccagcaccagcctcagcactgctgggggtcacaccgtgccaccgactgggggccgctacttgagcattggagatggctctgtgatggagtttgagtttcctgaggacagtgagggcatcatcgtgatctccagccagtacccaggcc

SEQ ID NO: 19831 - DNA, 345 bp, Homo sapiens
ggaaaagtggctcagatgcagagtgttctgtggagaaactgcagccccacttctgtttccctggagtctcccaatggatcattcaggagtgtcctatgtgagaattgagccaaggaaaatactcatgcaaccagcctgagtcgcggtgaggggacgagaggttgtacacacattggtagttattttgcaccagcagtgcctttctcactgggggtacttggaccctcagatcttcttttctaatagccatttgccaccccaagtagtatgtcggccatttctccttaaaacaccttccctacctttcccatgtactcagtttagctctcaaagaaggggtgaatc

SEQ ID NO: 19832 - DNA, 502 bp, Homo sapiens
  misc_feature (1)...(502): n = a,t,c or g
ntcagctatgacatgattacgaatttaatacgactcactatagggaatttggccctcgaggccaagaattcggcacgagggttacctaatgggagtgcgagagctctgcaccaggcaccaggttctctttattgctgatgaaatacagacaggattggccagaactggtagatggctggctgttgattatgaaaatgtcagacctgatatagtcctccttggaaaggccctttctgggggcttataccctgtgtctgcagtgctgtgtgatgatgacatcatgctgaccattaagccaggggagcatgggtccacatacggtggcaatccactaggctgccgagtggccatcgcagcccttgaggttttagaagaagaaaaccttgctgaaaatgcagacaaattgggcattatcttgagaaatgactcatgaactccttctgatgttgaactgccgaagaagaaaaggatattaaacgctttggcattaagaaaccaagat

SEQ ID NO: 19833 - DNA, 382 bp, Homo sapiens
gatggagatgaggtcaaccctgggcaaagggaagaggcaggtgatgagattaggcggaggaagggggagggagcaggtctcaggcaaaacaaagcggcagcaacagtcctcccagccccccgcccctcctctcccagagcgaggccttgccctgggagcggccatatggatgccttggggactctggggagcccatctcagccatgccctgcctggctggccacagccctgccagccctcctgaaatcccaccggtagtgcccaatagccaggcaggccttcgagtgttccagtttatcacaggctggtggtgccactgggctccaggccccatgggcaatgagctgtgagctggacaggaagggagcagcctctgtgggaa

SEQ ID NO: 19834 - DNA, 517 bp, Homo sapiens
  misc_feature (1)...(517): n = a,t,c or g
ttgnannccaacagctatgacatgattacgaatttaatacgactcactatagggaatttggccctcgaggccaagaattcggcacgaggtcacgtatgttttaaatattcaaaagtttctgtcagaaaacagtattttggaattaaatttctagaatctttcataatattctctcctctctactgaacatagtactaggttggtaactggaggatcccagaaagtcatgctaatttttctaacaaaacaggccttgctgtctctaactctgatctgatatcctgctttgagcaaataaaagagccctggaatgtgaagagacatgagacagtagtcagcttctcaggtaggtaagcatgaatgaagcagataacagagacgagggatacgaaggtcataaagaatttcanaccttanaatgtggnatanaatgcnctgcttccctggaaaggngtcctaaaaagncttnatttntntncncccaantaggagcatntttngncccntacccttaaat

SEQ ID NO: 19835 - DNA, 448 bp, Homo sapiens
ggaaaagtaggcaatatgaatttagtgtgatttttcagtcttacagaaagtcttttatgaacatcataaaaatgtgtcaataaattactgttgataataaaatattaatagataaatgagttagatttctgcagaaaagatactttttttgccttatgtatttttttgctgtttatttgcctatgtattctttgctcatgtttatgtcttctatttgttcacaacctaaaatgtatttcttctggttgtattcacttatcagtcattttgaaaatatgtagtttgcaatctgttcagttctgggagcagatagctaacaagaaatagaccatgattttagtaatgaatgtagaatcttctgtgtcacctattacaagatcaagtatggctttaaaaatggacaagagttaattacatacagtgaagaaagggactcttatttgtgagg

SEQ ID NO: 19836 - DNA, 267 bp, Homo sapiens
ggcaatatttcaagttactaaataaattgcctcagtttctaagccgtgttttttgttttttgggggagttttttcttgctgttggaggctatagctataaacatttgcagtgcatttctgcagtgagcttgcttctgtttactctattgaatcatatttctaatggggtatttaaggcgataagctcacacctcaccctgcttgctccagtggttatggccagtgagaatgtgcggtgttgcattgcagaagaagctaggaaagctc

SEQ ID NO: 19837 - DNA, 455 bp, Homo sapiens
  misc_feature (1)...(455): n = a,t,c or g
gggaggtaggaaggggaggaagtctgagtaagccagttggcttctaagccaaaaggattcctctttgtttatctctgagacagtccaaccttgagaatagctttaaaagggaaattaatgcttgaaatggtaaagtccccttaagccaacaaaccctctgtagctatagaatgagtgcaggtttctattggtgtggactcagagcaatttacaagagctgttcatgcagccatccatttgtgcaaaatagggtaagaagattcaagaggatatttattacttcctcataccacatggcttttgatgattctggattctaaacaacccagaatggcatttcaggcacaacgatactacattcgtgtngtctgcttttaaacttggctgggctatcanaccctgaactgcanctgnaacctttgcctggagcctacatttggggaaaaaaaggccta

SEQ ID NO: 19838 - DNA, 333 bp, Homo sapiens
ggccttggaaggaatatcctatggaaatagaagatatattacagctttagcctcttaggagtgtgtgtgatttgtccaaaaagataagctttatgttagcaattataaagaaactataggcatgttgcatttttctgagagccatggccaaattcttggtaagagtttttttgaaaatcatagtattttatgtcgacgcggccgcgaattccagatctatgaatcgtagatactgaaaaaccccgcaagttcacttcaactgtgcatcgtgcaccatctcaatttctttcatttatacatcgttttgccttcttttatgtaactatactcctc

SEQ ID NO: 19839 - DNA, 469 bp, Homo sapiens
  misc_feature (1)...(469): n = a,t,c or g
ggngnnnnattggaatcgtatgactgattacgaatttaatacgactcactatagggaatttggccctcgaggccaagaattcggcacgagaccgtgaagggcattcagaaatacaaagcaaagattgtttttgcagctgggaacttctggggtaggacgttgtctgctatctccagttccacagacccaaccagttacgatggttttggaccatttatgccgggattcgacatcattccctataatgatctgcccgcactggagcgtgctcttcaggatccaaatgtggctgcgttcatggtagaaccaattcagggtgaagcaggcgttgttgttccggatccaggttacctaatgggagtgcgagagctctgcaccaggcaccaggttctctttattgctgatgaaatacagacaggattggccagaactggtagatggctggctgttgattatgaaaatgtcagac

SEQ ID NO: 19840 - DNA, 434 bp, Homo sapiens
  misc_feature (1)...(434): n = a,t,c or g
gnnnnnnnctttgganaccccccttggacaccgctatgacatgattacgaatttaatacgactcactatagggaatttggccctcgaggccaagaattcggcacgagtgaaaatgaaaaacaagtggtgtcagcagtcaaattacaggcatgctttttgtgacatgactcgttaaatctgagtgtagtgaatgacttaagattgggaacaatgtgaggtgttcagcgcatcactaatgacatgtattacatatattttatggtaaaatgtgaaattatagtgctttccctaaaatgcatattatcaaggatatcagtaaactgaaatacgttgttaaactcctcacttttctacagccttctcttaatgtataggaaataaattaaaactgaaatttggggctttttatttctacnatactttnttttattgct

SEQ ID NO: 19841 - DNA, 496 bp, Homo sapiens
  misc_feature (1)...(496): n = a,t,c or g
tttganntttgatnccctgctatgacatgattacgaatttaatacgactcactatagggaatttggccctcgaggccaagaattcggcacgagaactgggtatagtataaaatgaggtgggagaggtgggctggagccagaccatgttaaagtattattcttgcttctctcattctccacataataggtcctatggattttattttctcaacacagtccatttcaaatcatcctcctctccccatttgtactttcacctttctgattcaagctgccctcatctctttcctggattaacaaaatatccccttaattgacctctttgcttccattcttactctagcccccataacattctccatactaaggccagagtgatcattttaaaaatgcaaacttgccaggtgcagtggctcatgcctgtaatcccaacactctgggaagctgaggtgggcagatcacctgaggcaggagtttgagaccagcctggccaaca

SEQ ID NO: 19842 - DNA, 385 bp, Homo sapiens
ttttcacgtcagtttttctagattggcaatagcctgttgcaaagtgcctaaacctttgagaaaaattactatgagcaaggtccatgatttagttttcaatataaagggaattccattctatactgtaaaatccaaaaatgctagttgccctcagcttttgagttgacttccagaaagttgagatcttttgaccattttttctcgtgtcatataaaatgtgccacatggtagttgtcaagctgtgggaagcatgtacacttttttcttttttttaactttctaaaaggaaaagttcaaagtcctttccacagttagtcttcgcttcttttggatttttctttttagagctaaattattcataccaatgaataagtgagtctgttct

SEQ ID NO: 19843 - DNA, 373 bp, Homo sapiens
gaaattattccaaaacatagaaaaagaggaagcactctacaattaatcatgaagacaaatttgaaaaatccaaaggaagatagtaaagcaaattcagcaatgactagaaatcattatcaagctgagtttgttccagaatatcagggcagtttaacaatggaggaaaaagatcatatctcaaaagatgcaggaaaaaaggtttggtaaaccttggcagccattgataatttttttaaaataaattttagaaagcttggagtagagaacttttttaacctaataagtggcatttacaaaaagcctacaacaaatatcttactttatgctgaattacgaaatgatttcctttaagattataaacaagaacaggatg

SEQ ID NO: 19844 - DNA, 345 bp, Homo sapiens
gtcctttcataaggaaggctaatggtttttgccacaataatgacagaaaagaggaagcaaaaatacatgataggtgattgcagttattaaaaaaaactgaggctagaggtagagggaagatgacagataggagacagggctgacctgcagctcccactcggatgaatagaacagcatatggagactcacaccatggacttttgctccaggaaccaccacaggagtataccagaaaaactgaaagaaatcaccaatcctttgaaagcagcagcaggctgctgcaaattctgtgagactggcaaaaaactctggtgctgtctccaaattgccaccttctggctggag

SEQ ID NO: 19845 - DNA, 348 bp, Homo sapiens
  misc_feature (1)...(348): n = a,t,c or g
gcggcacgagttttttttctgccaagtatttctaatttaagatgactcaaagctaaaggtacatttctttaaaaaaaaaaaaanggggccaattnatcnggttntanttaaaanaantnttantcaaaaaaacccaccncnttccaaantnaattcccntatcantaaaaaaanggttngnaaaaatcaaaaaattctgcanngcnctttaccttnaaaaaagtntttnaatagtatttctatanggttntttcagggcatatnattggatncaanacctgcgtnaangactntnnggnaaaaattaccaaangactnttagnangggttnttgcccctggacaaaac

SEQ ID NO: 19846 - DNA, 465 bp, Homo sapiens
  misc_feature (1)...(465): n = a,t,c or g
tgatnccgtatntgaanccgngatgatgtatataactatctattcgatgatgaagataccccaccaaacccaaaaaaagagatctctcgaggatccgaaaataaatgttttttattaggcagaatccagatgctcaaggcccttcataatatcccccagtttagtagttggacttagggaacaaaggaacctttaatagaaattggacagcaagaaagcgagcttagtgatacttgtgggccagggcattagccacaccagccaccactttctgataggcagcctgcactggtggggtgaattctttgccaaagtgatggacagatccccaaaggactcaaagaacctctgggtccaagggtagaccaccagcagcctgcccagggcctcaccaccaacttcatccacgttcaccttgcccacagggcagtaacggcagacttctcctcaggagtcaggtgcacc

SEQ ID NO: 19847 - DNA, 1113 bp, Homo sapiens
acttctatgacatgattacgaatttaatacgactcactatagggaatttggccctcgaggccaagaattcggcacgagctacctgcagaggggtccatacggcgttgttctggattcccgtcgtaacttaaagggaaattttcacaatgtccggagcccttgatgtcctgcaaatgaaggaggaggatgtccttaagttccttgcagcaggaacccacttaggtggcaccaatcttgacttccagatggaacagtacatctataaaaggaaaagtgatggcatctatatcataaatctcaagaggacctgggagaagcttctgctggcagctcgtgcaattgttgccattgaaaaccctgctgatgtcagtgttatatcctccaggaatactggccagagggctgtgctgaagtttgctgctgccactggagccactccaattgctggccgcttcactcctggaaccttcactaaccagatccaggcagccttccgggagccacggcttcttgtggttactgaccccagggctgaccaccagcctctcacggaggcatcttatgttaacctacctaccattgcgctgtgtaacacagattctcctctgcgctatgtggacattgccatcccatgcaacaacaagggagctcactcagtgggtttgatgtggtggatgctggctcgggaagttctgcgcatgcgtggcaccatttcccgtgaacacccatgggaggtcatgcctgatctgtacttctacagagatcctgaagagattgaaaaagaagagcaggctgctgctgagaaggcagtgaccaaggaggaatttcagggtgaatggactgctcccgctcctgagttcactgctactcagcctgaggttgcagactggtctgaaggtgtacaggtgccctctgtgcctattcagcaattccctactgaagactggagcgctcagcctgccacggaagactggtctgcagctcccactgctcaggccactgaatgggtaggagcaccactgactggtcttaagctgttcttgcataggctcttaagcagcatggaaaaatggttgatggaaaataaacatcagtttctaaaaaaaaaaaaaa

SEQ ID NO: 19848 - DNA, 301 bp, Homo sapiens
gccagaagtccattatctcgaagtcgtagacacaccttccaagcatcccaatctttggtttctttaatgacaatagcatttaataatccttttcctcttacggcagttacaacatcagaaggtagcttcatgagttcatttctcaagataatgcccaatttgtctgcattttcagcaaggttttcttcttctaaaacctcaagggctgcgatggccactcggcagcctagtggattgccaccgtatgtggacccatgctcccctggcttaatggtcagcatgatgtcatcatcacacagcc

SEQ ID NO: 19849 - DNA, 437 bp, Homo sapiens
accagctatgacatgattacgaatttaatacgactcactatagggaatttggccctcgaggccaagaattcggcacgagaactggagaggagcagacctgtgagaaccagaggtaggccattctaggccggagaaacacatctaaatgtacaaagaccttagggcaggaaagaggaactgggaaaaggtctgtgtttctggagcaaggcaagcaacagtatggctctggacacaatggaagaggtaggcagcagccagtccctacagggtcctaaacaggaagaatgcaatgacagcagctaacatctattttgtacttgctatacaccagcgttgtgctaagcattttgcattcattaactcatttagtccccacagcaacctgtgaggtaaagatgattatggctgggattccaggtgtgagccatcgtgccagg

SEQ ID NO: 19850 - DNA, 365 bp, Homo sapiens
  misc_feature (1)...(365): n = a,t,c or g
atttggaattgggatctgcaaatagctgtcctaacaacactgcatgaaacaattggggtaccaaggttttcataggaccacatcttaaagaaggagatttcttatgaattaatgaacctgtttcacagggcagaaggaaatctttttttgtacagattgggtttttatgaaaaagaaagtaaaaaaaaacaaatcaattagctggtttcagcagatttctcacctattgagtttacctggttcttttttatccttagatgtaaaatgatttataaatctcaaaacacacctgggaaaactatctatgtgattcaaatatagcangaacatgaatttaccaactataccaaatgnattttgaaatg

SEQ ID NO: 19851 - DNA, 486 bp, Homo sapiens
  misc_feature (1)...(486): n = a,t,c or g
ggcactccagcccaggcaacagagcaagacttcatctcaagcaaaagaacaaacaaaaaaagttgagctggaatttgagcttatttattattccttgaaaatcaagtgtagataccctcgattgctaccatagggagtgccacagcaagagctcaataacttttaagtggtgaagagtataaatcgtggttttccaagtgtagtctaaggtctaacagcatcggggatatctgggaaattatcagaactacagaccctctggctgcaccccaaacctgctgaatcggaaattctgaggcagtagcagaatcccatggtagccaggtgggtgaaggggagcgaggacgttctacctgccttgaagaagacacctgacctgcggagtgagtgaccagtgtttccagaacctggaatggatgccattccatnggnatgtccagacccctggggaacccncttgtngggttgggtttagggccaacaacc

SEQ ID NO: 19852 - DNA, 379 bp, Homo sapiens
gcaaggagtatatggacactacactggggcccttcatcctgaacgtgaccagtggggcccttctctgcagtcaagccctgtgctccggccatggccgctgtgtccgccgcaccagccaccccaaagccctcctcctccttaaccctgccagtttctccatccagctcacgcctggtggtgggcccctgagcctgcggggtgccctctcacttgaagatcaggcacagatggctgtggagttcaaatgtcgatgctaccctggctggcaggcaccgtggtgtgagcggaagagcatgtggtgattggccacacactgagttgcacatattgagaacctaatgcactctgggtctggccagggcttctcaaatacatgcac

SEQ ID NO: 19853 - DNA, 450 bp, Homo sapiens
  misc_feature (1)...(450): n = a,t,c or g
ggcatatctcgttgttgttgttttttttaagacggagtcttggtcttactccccaagcaatggtgcgatttcgtctcagtgcaacctctgcttcctgggttcaggctattctcctgcctcaacttcccaagtagctgggattacaggcgcccaaccacacccagctaatttttgtatttttagtagagacagagtttcaccatgttggccaggctggtctcgaactcctgacctcaggtgatccacccgcctcagcctcgcaaagtgttgggattgcaggtgtgagccactgcgcctggccacatgtgtatatcttaaaggaaataatgctaggtaatttagtcaggtgcttgatgagcatttgtcatcatcatacggagtcaatttgctttttctataaaagttctttttgtaaatgattagntgcttaactgctttaattcttctagg

SEQ ID NO: 19854 - DNA, 336 bp, Homo sapiens
  misc_feature (1)...(336): n = a,t,c or g
gtggagtgcaaaggaggcgacctgcaacagaggagtcccggatcaccagcaaccatgacggaccaacaggctgaggccaggtcctacctcagcgaagagatgatcgctgagttcaaggctgcctttgacatgtttgatgctgatggtggtggggacatcagcgtcaaggagttgggcacggtgatgaggatgctgggccagacacccaccaaggaggagctggacgctatcatctaggaggtggatgaggacggcagtggctccatcgacttcgaggagttcttggtcatgatggtgcgccagatgaaanaggncncgaaagggaatgagcgagga

SEQ ID NO: 19855 - DNA, 576 bp, Homo sapiens
  misc_feature (1)...(576): n = a,t,c or g
tttgnaacncctatgacatgattacgaatttaatacgactcactatagggaatttggccctcgaggccaagaattcggcacgaggcaccatagcttcaataccctgtaacacctgaatggaaatagagtggcagacttgcaaacacaaaatacaggctttctggagaagtaagagattataacatgacattaaaaaaaaaaaaaagatatgatagcgttttctatagagaataaaagcaccttttaaaaaagcacaaataaactttctcagaaggattaaactatgaaaaaggcaagaaattatttacaataaaaaattcttcaatgttttacaaagctgattctatttggagatattcttcaactatgtacaatgcaaagactganaataaacttcaacacacacacaccntntaagngttgtaatgtaggtgctgacagacntttagatatctttaattcaaatttcctcactgaggaanaattgaggtctcttgctgcccagtttggagctnttccaggacntatatccaaacaaatttttgcnccttgaggtttaanattttnccggggggg

SEQ ID NO: 19856 - DNA, 515 bp, Homo sapiens
ggtgaatatgaggagtatattactaaacttttcaactaccacaaagttcttcctatgaatacaggagtggaggctggagagactgcctgtaaactagctcgtaagtggggctataccgtgaagggcattcagaaatacaaagcaaagattgtttttgcagctgggaacttctggggtaggacgttgtctgctatctccagttccacagacccaaccagttacgatggttttggaccatttatgccgggattcgacatcattccctataatgatctgcccgcactggagcgtgctcttcaggatccaaatgtggctgcgttcatggtagaaccaattcagggtgaagcaggcgttgttgttccggatccaggttacctaatgggagtgcgagagctctgcaccaggcaccaggttctctttattgctgatgaaatacagacaggattggccagaactggtagatggctgctgttgattatgaaaatgtcagacctgatatagtcctccttggaaag

SEQ ID NO: 19857 - DNA, 405 bp, Homo sapiens
gctggagatacagagatgaataacaagtagttccttccctgaagcagctaaaatttttgtgagggagacagaaatgcaaacaaattgttacagaatgtgagacagccatgtgccacataatgatgtttcaatcagtgatgaactgcataggacggtggtcccattagattataatggagctgagaaacctctatcgcctagtatttactatactgtactttctgttattttattttatttgaccagaagtctcattctgttgcccagtctggagagtagtagtgtgatctcggctcactgaaacctctgccttctgggttcaagagattctcctgtctcagtctcctgagtagctgagactacaggcatgccgccaccacccctggctaatttttttacttttgg

SEQ ID NO: 19858 - DNA, 305 bp, Homo sapiens
  misc_feature (1)...(305): n = a,t,c or g
attggctgagactgaatctcctttgtaccttcagcagattgagtaatagtggcctgtcaggcacaggggagttttggaaacaagtccgtgttttccttcccattacagcttgaaaacgtagtagtgtggtgttcacagtaaatggaaattgatggcttattctccccaaagataaagatggttaacgaaaaccaaactcaggagggaccttatttctgtcacttaactttctgtccagcccttgttaggccccaggagggtttcttgntgncagncggtttgagatncacttggcanaactaatt

SEQ ID NO: 19859 - DNA, 359 bp, Homo sapiens
attggctgagactgaatctcctttgtaccttcagcagattgagtaatagtggcctgtcaggccacaggggagttttggaaacaagtccgtgttttccttcccattacagcttgaaaacgtagtagtgtggtgttcacagtaaatggaaattgatggcttattctccccaaagataaagatggttaacgaaaaccaaactcaggagggaccttatttctgtcacttaactttctgtccagcccttgttaggccccaggagggtttctttgttggtatcagctgccagccggtttgagatccacttggcagagctaatttgaactggtttttggcctgatcttgcataggacactaacatc

SEQ ID NO: 19860 - DNA, 383 bp, Homo sapiens
taaagagtgataactgaacaaagttaaagttcacttttggatgtttactaccagatgaagagtgaaaatagtcgttttagtttgtgccttgacttcttgatgaagagatttgttgtcagacatttttttctgaaattccaagtgattagaatggctagtaaatacgaaagtctgtcttgccataatatgttaaatttttgtagcagatacttgtgatttgtgcatgcatccggtattttgtcaagttgaagcaagcctttatgttaggactaattcctgataatatgaatggaaaacatactaaagccagcttcttgttttagatcttctgaagtatatcagtggctttaatgacaaatcaggcccattttctcctttcctat

SEQ ID NO: 19861 - DNA, 357 bp, Homo sapiens
gttaggatcagatcctagcatctgcagcttagagctgagcctgggcgttcgtcaataacctgcagcatcattttcccgatctcctctggggctcccttttctgtcctccagccaggaagctggggcttcagttaccttgttctgctttgtgtgcttctacgactgtgtccagggccacctgccagggggacagggaaagaacaacacataggatttggcccacacttttgggatcacagctcctcctctgagttttgacttggcagctttctctgtccagggtcgcctggcagggggacagacagaagagcaacacacagggtttggcccacacttttgggatcacagctcctccct

SEQ ID NO: 19862 - DNA, 353 bp, Homo sapiens
caacttcagaaatcttgaaggcaggcgcaaacgggcataaattccagggaccactgggtgagagaggaataaggcccagagcgaggaaaggattttaccaaagcatcaatacaaccagcccaaccatcggtccacacctgggcatttggtgagagtcaaagctgaccatggatccctggggccaacggcaacagcatgggcctcacctcctctgtgatttctttctttgcaccaaagacatcagtctccaacatgtttctgttttgttgtttgattcagcaaaaatctcccagtgacaacatcgcaatagttttttacttctcttaggtggctctgggaatgggagaggggta

SEQ ID NO: 19863 - DNA, 580 bp, Homo sapiens
aacacctaattgtgctaattaataagatggatgatccaacagtaaattggagcaatgagagatatgaagaatgtaaggagaaactagtgccatttttgaaaaaagttggcttcaatcccaaaaaggacattcactttatgccctgctcaggacttactggagcaaatctcaaagagcagtcggatttctgtccttggtacattggattaccgtttattccatatctggataatttgccgaacttcaatagatcagttgatggaccaatcaggctgccaattgtggataagtacaaggatatgggcactgtggtcctgggaaagctggaatcaggatctatttgtaaaggccagcagcttgtgatgatgccaaacaagcacaacgtggaagttcttggaatactttccgatgatgtagagactgataccgtagccccaggtgaaaacctcaaaatcagactgaaaggaattgaagaagaggagattcttccagggtttatactttgtgatcctaataatctttgtcattctggacgcacatttgatgcccagatagtgattatagagcacaaatccatcat

SEQ ID NO: 19864 - DNA, 474 bp, Homo sapiens
  misc_feature (1)...(474): n = a,t,c or g
cccaaagtaaacatatttagaaacataattctccctctggtgaggttgtgggcatgtggcggcttgactgagctggaggcaaaggggcagctgtgggcgtcatgggagtgtgtcatggctgccgaagccctgcttgtatgcggaccagtcccgatagaagtccacagagccatccatcctccgctggaaaacggtccagccccctccgtccgtgtccatgtcacagagcacagtcaggggccggcagtcggcaggtagatggtgtgccagccgctcaggaaatacccccggtctagcaggtccttgcagttgcgtgggcctgtcgcacacgactgagactgcccagcgtctcctttctcttcacgcatacccttctctcctcggctcctttgggccccactggcctgcttttcaggggctccagggngaccgcnttntnctcttntccaatgacacctgctctcctttggcctg

SEQ ID NO: 19865 - DNA, 341 bp, Homo sapiens
cttcccttcgggctcacttcctacctctctgaggctctgtccgtctctgtctcactttccctctcgtctctggtttcccttctctgtctctctgttgcggtgtctctctcctggctgggtttgatgtctgtttctccctgaccacctgctctgtcactcatgctagtttgggttccctaccctggtgcctattctgggatatacatgggtatgtgggcagccctgggctggcacatgcagccttggaggctctggcgtcagggacccccatgagggctaccagtaagaaccagagagagcgacggttcctggcttcagccccaaaccctggctgcaatatt

SEQ ID NO: 19866 - DNA, 423 bp, Homo sapiens
ggttgtctcacctgttacaaatatttttaaaaatgaacttgtctttccaaagctttcaacattcatagaaagaacaacttgttttctaccttaatatttcactggttaagtaataattgttaagttatgtaattttaatatcaaatcagctgacaaaagattgggaaaaagaagagtgactctttgtaagcatgcagctcaactggtggaagaagtctgcaggcatagtggcaagggcctgaccagctatgcccgttcagcatactgcaggcctcagttagtatactttagtggtgaagtggaaaaaattagctagtagattgagtctcatgaagaggattttatgttttgaaaaggatttttaaaagctttaaaataagttatgcataatatcccaattttataaaaatagagtttatcctg

SEQ ID NO: 19867 - DNA, 335 bp, Homo sapiens
ggaaccataaatgaccatagtccattttaatgacagtagaagagtcatcctaataatagatagtaaagaaatagattgtgacaagtggatcgatgtgggtttcttctgccattttccatctacactagacatgcaagagtttgaaaaagtatattacaggccaggcgcggtggctcaaacctgtaatccctgcactttgggaggccgaggtgggtggaacactgcaggtcaggagttcaagaccagcctggccaacatggtgaaaccccgtctctactaaaaattaaaaaaaattagcggggcatgatgatgcacacctgtagtcccagctactt

SEQ ID NO: 19868 - DNA, 424 bp, Homo sapiens
gtccagagtatcgcggacattcatccaattcaagtccagccgggccggattcttagtcacatatggtgccaagcttggacggaataagaatatgaatttgagtgggcgaccgtatcgacatattggtgtccttggaacctctaaactatatgtgattaggaaccaaatctttacttttacaccccagttcaccgaccagcatcacttctacctggccctcgacaatgagatgatcgtggagatgctaaggatcgagctggcctacctgtgcacctgctggaggatgacgggcagacccacactcaccttccccatcagtcgcaccatgctcacaaatgatggctcatacattcattctgctgagctctccacaattagaaaactagaggatggatattttggaggagccagagtaaaattaggg

SEQ ID NO: 19869 - DNA, 470 bp, Homo sapiens
  misc_feature (1)...(470): n = a,t,c or g
ctgaancctttaagacntgacatgattacgaatttaatacgactcactatagggaatttggccctcgaggccaagaattcggcacgagaggcagtctgtccagtgctcctaaaggagagcagctccccttttccagttatgggagatgtgggcaataaagcattactgtcaatgccgtgatgttcactgcaacatatgcttgatgttttcataattttatccatctttttcagacatcttactgcagaacactgtatgttttccaattattatttttcagaaatgtggtttacagcttctatcaggattagcttcagcttcaagtgacaaaagtcacttgaaatatgagttgctgaaacaagatggcagtctctcccctcaacaggactgttacaacaccttatcttcagagaaccaggctctctgcaacatttcagggacgtcgttcagtaccttatgtggaattcaag

SEQ ID NO: 19870 - DNA, 726 bp, Homo sapiens
gccgaaattcaagctggagaagaactacaatctagtggagtccctgaagttgatgggatcaggatgctgtttgacaaaaatggcaacatggcaggcatctcagaccaaaggatcgccatcgacctgttcaagcaccaaggcacgatcacagtgaacgaggaaggcacccaagccaccactgtgaccacggtggggttcatgccgctgtccacccaagtccgcttcactgtcgaccgcccctttcttttcctcatctacgagcatcgcaccagctgcctgctcttcatgggaagagtggccaaccccagcaggtcctagaggtggaggtctaggtgtctgaagtgccttgggggcaccctcattttgtttccattccaacaacgagaacagagatgttctggcatcatttacgtagtttacgctaccaatctgaattcgaggcccatatgagaggagcttagaaacgaccaagaagagaggcttgttggaatcaattctgcacaatagcccatgctgtaagctcatagaagtcactgtaactgtagtgtgtctgctgttacctagagggtctcacctccccactcttcacagcaaacctgagcagcgcgtcctaagcacctcccgctccggtgaccccatccttgcacacctgactctgtcactcaagcctttctccaccaggcccctcatctgaataccaagcacagaaatgagtggtgtgactaa

SEQ ID NO: 19871 - DNA, 345 bp, Homo sapiens
tttattatatgccaagtggagcagaaattcagatccttactttatcttggccaaatgccagattaaaatgttactagttgggttaattcacatatatgtgtaaatatgttttccaatatatgattgaaggttagcattgttatatcataaaactatgctaaggagaatacaggcagaaaacaaagacaatacctctcaaaaaaacccaacttttaattgaatacagagatttcattctcagagaagaactccttattcttagttctacactgaaacatttactaataccagcagatagtttaaattaataatatttctggaaggtaaacacagatgatagaaaat

SEQ ID NO: 19872 - DNA, 408 bp, Homo sapiens
gaaggagaagccctctccgggcaccgggccacagtcaatggcactctcctacccagcgagcaggccgggtccaccagtgtccagcttccaggcgagttccacccagtctcagaagctgagctctgctgtactgtggagcaagcagaagaaatcatcgggctggaagccacaggtttcgcctcaggtgatcagctagaagcatttaactgcatcccagtggacagtgctgtggcagtagagtgtgacgaacaagttctgggagaatttgaagagttctcccgaaggatctatgcactgaatgaaaacgtatccagcttccgccggccgcgcaggagttccgataagtgaagtgagcaggtcaacagtaggactggggcagaagctctgcctaaaatgaagtgaaagctg

SEQ ID NO: 19873 - DNA, 394 bp, Homo sapiens
  misc_feature (1)...(394): n = a,t,c or g
aacagctatgacatgattacgaatttaatacgactcactatagggaatttggccctcgaggccaagaattcggcacgagggatgaatggataaacgaaatgccgtccatccatacaatggaatcgtactcagccttagaaaggaaatgctgtccgtccatacaatggattcgtactcagccttagaaaggaagggaatcctgacacacgtcacaacacggatgaccttgaagacgttatgctgagtgagataagccagccacaaaaagacaaatacagtactgtgtgattccaattatttgaggtccctggagcagtgaaatggtggagcggaatgggggttgccaagggctgggggagtggggaatgaggagttagttnttnatggggacaga

SEQ ID NO: 19874 - DNA, 529 bp, Homo sapiens
  misc_feature (1)...(529): n = a,t,c or g
ggtgaaggggcagaagctgatcatcaccaggtaggcctcgggcgtaaggacagtgacgaaaaggccttgtgttagaattagacccacacagcaaaatagaggagcaaagaagaagtgtcgtaggcactacctacatcacactaagcagttcattaggaatagacgcacacagcattcgcataaggacacttctgatatcccacgttaaatgcaaataatgactgggtatctagggtcatgccaagattaactaacctgttgttctcatcttcatactttagaagccctcacaagagcttcacaagttggataaccggacacgttgatcaaaggagagaatcataaaacacctattaccatagtgctgcagaatgaatgtagatttttacatcaggctagagttttccttttgcacagggatctctgactgctttttttgtagcttttcttacacaaaccaaccccatatgcttcatccgaagtgaggaactttacgcncaaaacgcaatccggntgttaaagtcctaaa

SEQ ID NO: 19875 - DNA, 921 bp, Homo sapiens
gaataccattgtcaatcttatttttttaaaagtactcagtgtagaaattgctagcccttaattcttttccagcttttcatattaatgtatgcagagtctcaccaagctcaaagacactggttgggggtggagggtgccacagggaaagctgtagaaggcaagaagactcgagaatcccccagagttatttttctccataaagaccatcagagtgcttaactgagctgttggagactgtgaggcatttaggaaaaaaatagcccactcacatcattccttgtaagtcttaagttcattttcattttacgtggaggaaaaaaatttaaaaagctattagtatttattaatgaattttactgagacatttcttagaaatatgcacttctatactagcaagctctgtctctaaaatgcaagttggccttttgcttgccacatttctgcattaaacttctatattagcttcaaaggcttttaatctcaatgcgaacattctacgggatgttcttagatgcctttaaaaagggggcagatctaattttatttgaaccctcactttccaacttcaccatgacccagtactagagattagggcacttcaaagcattgaaaaaaatctactgatacttactttcttagacaagtagttcttagttaaccaccaatggaactgggttcattctgaatcctggaggagcttcctcgtgccacccagtgtttctgggccctctgtgtgagcagccaggtgtgagctgttttagaagcagcgtgttgccttcatctctcccgtttcccaaaagaacaaaggataaaggtgacagtcacactcctgggttaaaaaaagcattccagaaccacttctctttatgggcacaacaaagaaacgaaggctgaagttcgcctacccaaatgaaaagtagg

SEQ ID NO: 19876 - DNA, 347 bp, Homo sapiens
  misc_feature (1)...(347): n = a,t,c or g
taattttgaagattgctcaatatcctactactgtgcagtattagccaccgtgccaggccaggacattttcttgtatttatatctttgataatattctcttacctccttctactccttttttggggtctaccattgaaattcctgtagtgatactcagtttcttatatttactttcatatttcccacctcttcatctctttattctgctttttcaagatttcttcatttttatgttccaaccattttgttgcatttttaagttttgacatattttaaatttccaaaggctctttttaaattctttcatttttttctttttttttgaaaatgcttttcanagcattttg

SEQ ID NO: 19877 - DNA, 354 bp, Homo sapiens
gaaaattcacctaaccccattcttaaatccagaagcagggagagggaggggagggggcgttctgtgaatacctaaccagtgcctgaacagagaggaagttattatttaccaggggaaatggtgtgcctacataaagtttagctgctttaaaaagaaagtagaaacaaaactggcaaactggaaataaatgtcatgacttgatttaatactcaaactagcggttggacaaaatgcaagcagcttggtgagtattagtgtctgttcctgggtgggctctgagttgatataaggagagggaactgcaataactgaaatgttggagaagcagttagccgttctccgtaaagggtctgc

SEQ ID NO: 19878 - DNA, 487 bp, Homo sapiens
  misc_feature (1)...(487): n = a,t,c or g
tctccccttngacaangtnatcncttcgtnattccgaatttaatacgactcnctatagggaatttggccctcgaggccaagaattcggcacgagcagtttaccacttgcatctttcgacgcatctaaccttgaatgcgctctatgtatgagattattctatgagccagtcacaacaccttgcgggcatactttttgcttaaaatgcctagaaagatgcctagatcacaacgcaaagtgtccattgtgcaaagacggtctttcacagtgcttggcatcaagaaaatacagcaaaaatgtaataatggaggagctcatagctaaattccttccagaagaactgaaggaacgaaggaagctttatgaagaggaaatggaagaactttctaaccttaataanaatgtgcctattttcgtgtgtactatggcctatcccaccgntccttgcccctgcacatctttgagccttgttaccgctgatgattcgta

SEQ ID NO: 19879 - DNA, 374 bp, Homo sapiens
  misc_feature (1)...(374): n = a,t,c or g
cccgcctcgacctcccaaagtgctgggattacaggcatgagccaccatgcccagtcgatatctcactttttattttgccatggatgagagtcctgggtgtgaggaacacctcccaccaggctagaggcaactgcccaggaaggactgtgcttccgtcacctctaaatcccttgcagatccttgataaatgcctcatgaagaccaatctcttgaatcccgtatctacccagaattaactccattccagtctctgcatgtaatcagttttatccacagaaacattttcattttaggaaatccctggttttaagtatcaatccttggtcanctggacaatatgaatcttttncactgaagttagggatgactgtgat

SEQ ID NO: 19880 - DNA, 368 bp, Homo sapiens
  misc_feature (1)...(368): n = a,t,c or g
ctataggnaattgggccctcgangncnagaantcagcntcgagcccagatntaaacacagaaatcntntatgtancntatacaccgnnngcnctccanncnggntgacaaaaggaananttagcctcngcaccnggnnnatatnantttnaaanaacngtnntgnccangtgcctagnttnnngcnnggaggcctatgcactttggcncnctnttgaggtgcggatgaccngtcgtggttanntcnnaaccagcctgnccanggtgnagnaaccccttcngtncnnagntacntgaaaggttnanncngcangatggnncagcacctggaatgtcanggcttcaggnngcngngantgnacaantgct

SEQ ID NO: 19881 - DNA, 453 bp, Homo sapiens
gccaggcctctggctaccacttggacctttattgcccttcctgctttcttcctccaacagctctgaccttcactctgttcctctttcatcacaagctcatctatattccaggacttcacatttgttatttcttctgtctactctgtctctcaagacaatagaggtcacagcaaatacaaacctttatactaatggattttgttttcttcttggaccctccatagcaaccaagagatgtttaaactctcatccattggatgttacccatgctcacttggtgaataaattctggcattttggtggtaatgagaggagccagagattcattgagcgctgcattcagacctttcccacctgctgtctcctggggcctgaggggacccctgtgtgctgggatctaatggaccagactggagagatgagaatggcaggcaccttgccggaataccggct

SEQ ID NO: 19882 - DNA, 441 bp, Homo sapiens
  misc_feature (1)...(441): n = a,t,c or g
agaaggactcagcgcctgccatgtctcggatccctttgacctgggtttcttgccccaaggtcccctcccctgcctgtaccctttgctcctggctccaaggagcaccccaaagttccagcctatcctgaatgatgaagataattatattttttccctctccttactggtagctgggacaaagttgggatttttttccatgaaggtatttttactgtgggtaagtgggtaaaataaaaagagcagaggatcgcatagacttacagaaagtgagtgtgttctacagaaaggctgtgtgtttgtttaatctagctcccatctacctcgtaagcagctttcccttcggctactttaagtagttgagcagggttttctttttcttttaaaaaattatggcctttcatttanttatggggtaataaaccangagggnagttgaaagcc

SEQ ID NO: 19883 - DNA, 376 bp, Homo sapiens
ggttgctttttgaaaatgttactacatggagggaaacaaaactgggtttcttcctaatgcctcttaccaagacaatctccagatgtattatagagataaatgtggaaggtaaaactatgaaagaaatagaagaaaatgcaggagaatatcttcatgatctacaaatggaaaaggagttttttaaatctcaaaggcataaattaaggcagacattaacttatttatatagaatttaagtatgtatatttaaccgaagaacatattaaagttaatactcaagagaacaaaataaattatttatagtgcctaatactgatgagggattaagtatctagtgtataaaaagaagcctgcaaattaagaagaaaaagatagc

SEQ ID NO: 19884 - DNA, 414 bp, Homo sapiens
gcaactgtagaaaagtatagtattgtgtttgtgtcgattttcagcatagtttatcatgctatacaaaaggctacatttagcttttttcttctgatgtttctctgcccaagagagacagttacctcattcttctcatttgtgacacagcattccataacatgggtgtatgtgattttatttattcatttccctgttgaagggcatctagtatgtcttcccatttttttgttcctagtgccagtatgcagtgaacatgctggtgtgtgcctcctgggctcaccattatgtacatctcagctaggtacagtggggaggaactgctgtgcaatagagtatctgtctttaatattaaatatgtattactttcttggcttctaaggtgagtgtgccattttaaaagagagttttgggttg

SEQ ID NO: 19885 - DNA, 342 bp, Homo sapiens
ctccctttattaaatcattttcacagaccagaaatacaaaatgaaagtagaaataggccccaggtaggagctacaggcctggcctcacatgacccctgctccagcaacttgaacaggacaagcagcagctacatccttaaggtcgggaaagtaagatgaggatttggatcctgcattgccctgcctcccaccctatctctcccgtcgacgcggccgcgaattccagatctatgaatcgtagatactgaaaaaccccgcaagttcacttcaactgtgcatcgtgcaccatctcaatttctttcatttatacatcgttttgccttcttttatgtaactatactc

SEQ ID NO: 19886 - DNA, 437 bp, Homo sapiens
gcgcagcctggccccagcgggcaaggattgacacgtcctgcctgaccaccatcctgccaccaccttctcttctcttgtcactagggggactagggggtccccaaagtggcccactttctgtggctctgatcagcgcaggggccagccagggacatagccagggaggggccacatcacttcccactggaaatctctgtggtctgcaagtgcttcccagcccagaacaggggtggattccccaacctcaacctcctttcttctctgctcccaaaccatgtcaggaccaccttcctctagagctcgggagcccggagggtcttcacccactcctactccagtatcagctggcacgggctccttcctgagagcaaaggtcaaggaccccctctgtgaaggctcagcagaggtgggatcccacgccccctcccggcccctcc

SEQ ID NO: 19887 - DNA, 298 bp, Homo sapiens
caacagtaggctattagtagttgagtttttagggagtcaaaagttatactttgatttttgactgtgtgggcttcagtgtcccaacccctgcattgttcaagggtcaactataatatgaaagaaataatataaaatacctcattaataattttgatattaattacatcttgagatgacaatattttgtttatactggcttaaacaaaacattattaaaattaatctcagccaggtacagtggctcaagcctgtaatcccagcacttcaggaggccgaggcaggaggatcacttgaggcc

SEQ ID NO: 19888 - DNA, 423 bp, Homo sapiens
ggatcaatttatcaaaatgatacaacaatttcaaaacatgtatctaaataacagagcttcaaaatgcacagtgagagaactggtaaaacaaaaggttaaatggagaaacccacaataatatttggagatttcaataaccctgtgtcactaattgaaggaagtagtaaatagaaaatcagcgggactatggaaaacttgaagaacacagccaattttacttaattgatttttataaaatgttccgcacaacagcatcagaatgcacattcatttccagtgcacacagaacatttacaaaatagaccattttctgtggtgtaaaagaggtctcaataaatgtaagatgattcaaatcatacagaatgtggtctgtgaccacacagctttaaataagaaaccaatgccagaaagatctctagaaaa

SEQ ID NO: 19889 - DNA, 356 bp, Homo sapiens
gagaaatcctacaactcaacaaagagaaaccaattaaaaaatgggcaaaggatttgaaacagacatttgttatcttccttggagaaatgtccaaggacatgaaaggacttttactatcataaatcaccaggaaaatcctaatcaaaaccatgagataccacttcatattcactaagatgactataatcaaaaagatgtaccataacaagtgttaacgaggatgtaaagaaactggaacccttacacatgcttgtgggaaatggtacagccactgtggaaacaatcttgacagttcttcaaaaagttaaacatagaattaccacatgacccagcagttctaccctaggtatatatat

SEQ ID NO: 19890 - DNA, 538 bp, Homo sapiens
  misc_feature (1)...(538): n = a,t,c or g
gggaagaattgtgtacttcagaccatacttaaatacagtacctgagtcctcttgggaatcttagaaattgagttaatccctaatttcattacatgaattgagatcttcctagattgcatctgctgagaggagaaatgagcaagaccaaaacagcgctgagaacatggcgaggcatggcctgcatccaccagtgtggtcctttttactgctggggatggcaggacgtggttctgtcctctccatgccacagatgcagttagctctagaaagtccagcctttctctanattgtaactgactgatacagaaaaataacagtggaggtcaaattgcgcagcagccagaagtgttttcatccatttagccatttctgtttcacctgctatggcagananaggccaccanagaaactagccaacttaaaagtccaaatccaattccttnaaatgatttcanttactcagtttatatgntcacaatagccacacaccnagttaatcncaaagcctatctccgctgagacccagagagtaagacac

SEQ ID NO: 19891 - DNA, 385 bp, Homo sapiens
  misc_feature (1)...(385): n = a,t,c or g
tttggaatcccatctatgacatgattacgaatttaatacgactcactatagggaatttggccctcgaggccaagaattcggcacgagtgagttactggtgaagcggcaaatcaaacgtctagaagagcccagcctccgctgtgtggaactggttcatgaggaaatgcaaaggatcattcagcactgtagcaattacagtacacaggaattgttacgatttcctaaacttcatgatgccatagttgaagtggtgacttggcttcttantaannggttgcctgttncaaatgaaatggnccatancttangagncaattgaactggnttatatcnncncnaaacattcanactttgntgatgcttgngtctattgaacnctagnttt

SEQ ID NO: 19892 - DNA, 354 bp, Homo sapiens
gcgcactcttgccatatcagagtggccttccctgaccacaccctccttggtggtcactctcctcctccccacccagccagcactcttttctcccttcccctgcttacatgccctcaccctctggtaactccatgtttacttgtcaccctctcgtggaatgtgagctcccagcaggcagggccctagttctttccatcagctgtgtcccaagtgcctgaaagggtgctgggcacggcacatgcccagcaaataggggtggaatggtaacccttttcctgtaagtctgaactatccttgggctaggaatcgaccatctcttcttactcactttgtgatgtgggaagctcacggcct

SEQ ID NO: 19893 - DNA, 507 bp, Homo sapiens
  misc_feature (1)...(507): n = a,t,c or g
cttgnnnnccaacagctatgacatgattacgaatttaatacgactcactatagggaatttggccctcgaggccaagaattcggcacgagcaaaaactcaaatgtctatagtgttaagcaccaactactttactaaatactttttcattaacagctttaacaaacttttctgaactgttgcattggtgagatttgtctgtctctggaaggatgcactcaacatatattacatagtttggtaacaacacccacatgattgagtaggtttatcattatcctttcaagaatcaagcatatgagttaaaaataatgttaacattttaaggtcaaaaaatgaaagcaagattaaaatatggttatttgataatatatagagaaatgatggcaaggagacatttgttcagcagcaccagggtcttgttgcactggctgcattttcccatcaggattctggaaatgctttttagtggggctgaggatatgctctggttgggagcaggtttcagcc

SEQ ID NO: 19894 - DNA, 331 bp, Homo sapiens
  misc_feature (1)...(331): n = a,t,c or g
gttactatttcctgtttccttaaggaacaaagagatttattttgacatctataggtgaatatcaggattccaagtggaaatgattccttgttcttttctatgaattgccctgtcattggaggtttactggaatcaaagacaaatgtgctactctggactgttgaaaatcagagtggtcaaaatcacataacttgatgtttactgtcaagggaaaatacggctggtatagttatttcatagagccctgaaattgcctaagggtctatcatatcgtntgctattaattatngggttaaaatattttccacanaagtntagcnngattaacttt

SEQ ID NO: 19895 - DNA, 359 bp, Homo sapiens
ggaacatcaggccaccgcacatgaaggcagaccatggtgatgagcttccttttgttttcagaagtttctttgggggcaactacattaaattcactgaggaagaggagcagctaagcaggaagatgatgaagtactgggccaactttgcgagaaatgggaaccccaatggcgagggtctgccacactggccgctgttcgaccaggaggagcaatacctgcagctgaacctacagcctgcggtgggccgggctctgaaggcccacaggctccagttctggaagaaggcgctgccccaaaagatccaggagctcgaggagcctgaagagagacacacagagctgtagctccctgtgccgggg

SEQ ID NO: 19896 - DNA, 310 bp, Homo sapiens
gtgtcattcatgaatctctataatcaaggacaaggataattcagtcatgaacctgttttctggacgctcctccacataaataattgctagcttattaaggaatattttaacataataaaagtaatttctacatttgtgtggaaattgtcttgttttatgctgtcatcattgtcacggtttgtctgcccattatcttcattctgcaagggaaagggaaaggaagcagggcagtggtgggtgtctgaaacctcagaaaacataacgttgaacttttaagggtctcagtccccgttgattaaagaacagatcc

SEQ ID NO: 19897 - DNA, 505 bp, Homo sapiens
  misc_feature (1)...(505): n = a,t,c or g
tttgaanacncgttatgacatgattacgaatttaatacgactcactatagggaatttggccctcgaggccaagaattcggcacgaggtgagccttgggtatttcttggccttggggatttaaagtttctcaggttaaaaatgatgcctgtgggtttctataaggctgaaccagtgacctgttccttcattcaggctcatttgagttgcaagggaaagaaatccatgtaaaccgggttaagcaaaaggggaagtgtattgacttatatcactaaaagcccagggtagggctagcttcaagcagagctggatctgggggtttgaaactgtcatcaggatctgggactctctcaccacctctctgcttgttggcaccattctctcgtgatgacagcagtttcaagtacctttaagggacatcaccaaagaaagagcttctcctttaacacaagtcctaggattgtttccagctgacccagtagggcacttgccatccataaaacaggc

SEQ ID NO: 19898 - DNA, 344 bp, Homo sapiens
ggaaatgtatgtatgtatgtacatacatacataaatagaaaggtatgtaaaggggtgaattttgttttcctggaaatttcacttacgcaggaaacttaattatgaaacttgattacttgatgagtaaatagattagttgctattagatctactcttggggaagcagtagcatttaaccgcctattggcggtagtagagagtcttcccaaaccttcagatgctaggcaggttgtgcctcatcaggagtgcacagactttgaatgagtggtagggactgagatgtactggggtgcactaaggctttctgaaaggagcaggtgctactcagagccctcttactgccg

SEQ ID NO: 19899 - DNA, 471 bp, Homo sapiens
  misc_feature (1)...(471): n = a,t,c or g
actgattacnaatttaatacgactcactatagggaatttgnccctcnangccaagaattcggcacgaggagcaaggtccttttgtgttctcagttcacaagagggtgacaggctaagaagcttgctcaggaccccacacacagtggcagggctggaatttgaatgcagactctgctagaacgtcccctgccatccatccatcatggtcattagggtggtttttatacttggtgattgtcagagtgtctctgtagtcgtgtctattactatagctttcttttgtgccccagccttggctgtttttagtcaaggataataattgtttaaaaagagctgggcactgtggctcatgcctataatcccattgctttgggaggccaaggcaggaagatcgcttgagcccaggagttcgaggttgcagtgagctgtgattgtgccactgcactccagcctgggcaacagagcaagacc

SEQ ID NO: 19900 - DNA, 376 bp, Homo sapiens
ggtttgtgtctatgtgagtgtgtgcactctccgaacttctcagcctcgggctcaggaccctggaacgggatccaggatacactagcaggtatttgagcggtcattctactctcccggaacccctgcagctaggaaatgtggggtgaaaggaaagtcaggagcaccccacacctctcttcctcctgtagtagagggaggctaggcctggaaagacattcaagggctttgcctctcctcgctcctgttctgggaaccccagctaagagttccccacaatggtttctgagcttcctctagcctgtcgtacgtacatcttggcaggtgttatgtcaccttttggatactgagaaaacacacaatccccatgttattgctt

SEQ ID NO: 19901 - DNA, 342 bp, Homo sapiens
gagactcagcactgctcacataagagccagccaattccagccccacttacagaatcagtgtctcagtgggtgggggcataggaattttaagacctccccccaccatggactctgtgcctccaatacccttatagaaacattgacttcattgaacccgtcagtgggcaaatgagaaactgagcatgcaggatcctcaatgtggatgtgggccaggtggcgcaaggctcttggggcagaacccccagtgtccctgaggcatccttgatctccctagcctgcctcatcatttcaggaaccttccagatgacttccatctcgtggttgcctcctcaccttcaccca

SEQ ID NO: 19902 - DNA, 386 bp, Homo sapiens
attgacctgttgtattggcgggacatcaagcagacgggcatcgtgtttgggagtttcctgctgctgctcttctccctgacccagttcagcgtggtgagcgtcgtggcctacctggccctggccgcactctcagccaccatcagtttccgcatctacaagtctgttttacaagcagtgcagaaaaccgacgaaggccaccctttcaaggcctacttggagcttgagatcaccctttctcaggagcagattcagaagtacacggactgcctgcagttctacgtgaacagcacacttaaggaactgaggaggctcttccttgtccaggacctggtggattccttaaaatttgcagtcctgatgtggctcctgacctacgttggcgctct

SEQ ID NO: 19903 - DNA, 527 bp, Homo sapiens
  misc_feature (1)...(527): n = a,t,c or g
ttgnnncccnaacagctatgacatgattacgaatttaatacgactcactatagggaatttggccctcgaggccaagaattcggcacgagctgtcaggtggtgaaaatgttctgtacctctagggagatggtagttgcacaggtgtacacatttgtcaagctcaccaactatacacttaagatttgtgcacatactgtacgtaagccatatctcatttaacgcacctagcagaaaggaggctaggcagcgcttagtctgggatcagtcttagaatggagaggtgcttctggccaacagcacctaacactgcagctgggttttcagagagcgtggggtcctcacaggcagagcttcccatgaggagcacagagcaacagttcctgccaggcacacagtggggaaggcctcgccaaccctaacgccaacgctgaacagaaacactgaataacgtgcacatgtacatataanaaagaaacgctatgaaataaaactgacaagctgtaataagaagctatggcttattaaca

SEQ ID NO: 19904 - DNA, 245 bp, Homo sapiens
ctgagaggcttcaaaatcctgctcttttagttttacaatttagagggtgagattttcctctctaccctctagatggcgtttaaccttcttccatcagtgttctgtttcattctaactatgaggagtaacgcaaaaatcggatgtattccagtcacattgcatttgaattctagtttctaaacttatgatgcaatcccccatccaaattactgctgagggagatcattaatttgcctactatattt

SEQ ID NO: 19905 - DNA, 374 bp, Homo sapiens
gcagatggggagactgaggtactcgtataactcagtcaggtgaagaaatttacccaagtaacactgccctgaaatgagccactggggctcaagccctgggcctaagcactgcagtgtgctgccacagtggagaggatggggatcttcctcttgcctgatcttctccccgcaggcactcagccttttctctggtccccataacggccctcccatccggggtacaacccctgggaccctgcctttaccttcagcagtcccatctatgccctgctctgtcttcctcctgccttcatccttaggtgaaatctcagactgtcagacccctagtagaacttagaatatgtcctatccacccccgctcttccccacccact

SEQ ID NO: 19906 - DNA, 395 bp, Homo sapiens
ggcctgaagtgggtttcactggcctaaaatcaaggtgttggcagagctgtgttctttctggacgttctgggtaggaatccattttttgcccctttgtgcttctagcagctatctgtattcctcagctcatggccccttctggcaatggcatacttctagcttttgcttccattatcacatctcctctatgactctgacactcatgtctccctctttataaggacgcttgtgatgaagttgggcctacatgaataatccagaagaatctccccatctcatgatccttaatcatatctgcaaagttccttttgccatgtaagataacatattcacagtttcctgggattaggaaatgaacgtgttgggttgtgatggtaattgactctatgggggac

SEQ ID NO: 19907 - DNA, 495 bp, Homo sapiens
  misc_feature (1)...(495): n = a,t,c or g
ttgtncccntacccttgacnccttaacagctatgacatgattacgaatttaatacgactcactatagggaatttggccctcgaggccaagaattcggcacgaggactaatcatttaagggacaagcccccataagagtggctactaaagtgggaggaggaaaagcagaaggagaaagagttgaagacaggcgaggctgtggtcccagtgctgaattctgccaagcagtgacttgattcatgaacactcactggatgctgactctgttgctcttctgagtgctggggtagaggagaggagaggtggagcccagttcttgcttttaggagcttatgttctaggaagttcaagtattttttcaggtagtatgaaatagcaggaagaggaagcaggctaaagggacacanagtgattgggggctattttaaagtagaatgataaggaagaacctgtctagagagctatttgaacaatgcctgactgagggacaccagaa

SEQ ID NO: 19908 - DNA, 398 bp, Homo sapiens
gtatttcattcctgggactgataactatcgatcgctaccagaagaccaccaggccatttaaaacatccaaccccaaaaatctcttgggggctaagattctctctgttgtcatctgggcattcatgttcttactctctttgcctaacatgattctgaccaacaggcagccgagagacaagaatgtgaagaaatgctctttccttaaatcagagttcggtctagtctggcatgaaatagtaaattacatctgtcaagtcattttctggattaatttcttaattgttattgtatgttatacactcattacaaaagaactgtaccggtcatacgtaagaacgaggggtgtaggtaaagtccccaggaaaaaggtgaacgtcaaagttttcattatcattgct

SEQ ID NO: 19909 - DNA, 408 bp, Homo sapiens
gccatgagcttcaataccctgtaagacacaatgactaaatactatcattattactagactaccagtttaaatgtaaattaagagagaaaggagaaagaaaacacattagcaaatcaggttagggactgttactcagcaagctgtaagaagcatctgagccactgcgtaaagaacctcccatccaaatgtgtcaaaggagagtgaatccgaggaggctgctgtaagaaaggaacttacgccagagatggaacggagtgcggcctagagtatcagccatataggcaaaacagatgttggatggaagggaaaggctgcatgaaaaatacacaatttgtttaaaaagcactctacagcagcaaaactaagtctactctgaaagcaaaactaagaagtttagaatctgaagaa

SEQ ID NO: 19910 - DNA, 462 bp, Homo sapiens
  misc_feature (1)...(462): n = a,t,c or g
ttgaannccttatttgaacaccttgantgattacgaatttaatacgactcactatagggaatttggccctcgaggccaagaattcggcacgagagtccactggcatcttcatgaccatagagaaggctggggctcacttaatgggggagccaaaagggtcatcatctctaccccctctgctgatgcccccatattcataatgggcatgatccctgagaagtctgaaaacagcctcaagatcatcagcaatgccttctgtaccaccaactgcttaatcccccggccaagcccatccatgacaactttggcattgtggaaggacttgtgaccacaatccatgctgccactcctgcccagaagactcgatggcctctgtgggaaactgtggcatatgtctgtggggctctccagaacatcatccctgcatctactggtgttgccaaggctgtgggcaaggccatc

SEQ ID NO: 19911 - DNA, 628 bp, Homo sapiens
gatttcatgtctcagggagtaggtttgtgcagttacagcttttctgttggtatgcataattaataattggagctgcaaagcagatcgtgacaagagatggacggtcagaagaaaaattggaaggacaaggttgttgacctcctgtactggagagacattaagaagactggagtggtgtttggtgccagcctattcctgctgctttcattgacagtattcagcattgtgagcgtaacagcctacattgccttggccctgctctctgtgaccatcagctttaggatatacaagggtgtgatccaagctatccagaaatcagatgaaggccacccattcagggcatatctggaatctgaagttgctatatctgaggagttggttcagaagtacagtaattctgctcttggtcatgtgaactgcacgataaaggaactcaggcgcctcttcttagttgatgatttagttgattctctgaagtttgcagtgttgatgtgggtatttacctatgttggtgccttgtttaatggtctgacactactgattttggctctcatttcactcttcagtgttcctgttatttatgaacggcatcaggcacagatagatcattatctaggacttgcaaata

SEQ ID NO: 19912 - DNA, 403 bp, Homo sapiens
  misc_feature (1)...(403): n = a,t,c or g
gtggatgagttttttaatcctcttggtatcttaatttctccatctacccagtaaggctgttaggaggattaaatgtgctcgtatttctaaaacaatgtanaacaatgcctgacacttaggatgtgtcaaataaattggtggttctcaaactttagcagggataaatctcctgganaacttgtttaaatgcaatttgcaggacttggttccctggatgcttacagtgagggcccanagttgtgtgacgctggcacaggtagtcagtaccacctggtcactgttgcacctggatacctgccaccctctgggagcagcaggatcctgtgtccctcaggattggccctaattgcccggtgggttgctaaaatccttgcaaattgtggtcttgtgtgttgtgggctca

SEQ ID NO: 19913 - DNA, 354 bp, Homo sapiens
gctttcaataaaagacctatgtaagccagacacagtagattattttatgcaatatagggcatattaaaaataaaactactggccgggcgcggaggctcatgcctgtaatcccagcactttgggaggccgaggcgggtggatcatgaggtcaggagatcgagaccatcctggctaacacggcaaaaccccgtctctactaaaaatacaaaaaattagccaggcgtggtggcaggcacctgcagtcccagctacttgggaggctgaggcaggagagtggcgtgaacccggcaggcagagcttgcaatgagcctagatcgctccactgcgctccagcctgggcgacagggcaaaact

SEQ ID NO: 19914 - DNA, 385 bp, Homo sapiens
ggactgctgcagcctaattagtcattatgcctaatggcagttgcagctccaagcttcatactctcacacatttgttgttactaggtccctagcagcacaggcttctcatttagcaaaaattttcccagaaggctccagcatctgggaggtctttgaagaggattctggggaatgtttgtgtgcacttaaaaggagacccaaagactagatgtgatgcctggaatcacagcagccatgtttttactagacctgaagcaggcaagagggtgacagagctgaaagtggaaccagagtccataaatgcatcattgagtcatttagatcttgcgcacctggagcttaacatgccaaatactaatctggtctaggataccagataatatgt

SEQ ID NO: 19915 - DNA, 417 bp, Homo sapiens
gtgagctgccgtgcccaacggagaccttcttaaagatgtctgtccctatgtgattctgaatatggaaaactccattgccaatgagggtcatggttttgtagagaaagcagatggtaaatggactctactcttcaggaattcagcttgcttggcaagtaaggttggataggccaggtgatgtcagacctaaaccaggagtcatcctgcattcctccctacccttaccctcacatccaatctattggcgattcctgctgactctccaaaaagtatcggaatcagagagctctctcctcgtgcactgctacatctggtccggtgttgttatccctcatctaggctagcacactgcctcctaactggtctctctgcttccacctttgccaactcaaatccattctcttcccagtggcagaa

SEQ ID NO: 19916 - DNA, 390 bp, Homo sapiens
gctctttggcttgatgccctgatttccaggcccagtggtgtctcagtgtcacctctggctctgtagttggcctactccatctgccctgcctgaagtctcggtctttcagtttggtggggtcccacccaggcagccatctgtgagagactcccacacagttctgcagggcatctttgaaacaggtagagtcagccttgactacatgttcccacccccaccctatcccatctgtactctctgagtctgacatcaaagtggcagccctggcggctcctgcctgtaatcccagcactttgggaggccaatgagaatggatcactggaggtcaggagttccaaactaagcctggccaacatagtgaaaccccatctctactaaaaatacaaaaaa

SEQ ID NO: 19917 - DNA, 443 bp, Homo sapiens
gatagcaggaaatgtgtgaagtactttgtgctgttaactcatttaatcctcactaccctatgtggttaggtattactggtattcccattttatagatggggaaattgtggcccaagataacacagctagtaggcagcctgaatccagagtctgcgattaatttttatactctactgcttctgtatctgagattcagagggaaaaaggttttgtgaaaacccagtaggtatgtgggtcactgagggagcattggtggtttgcagacagggctcccctaagagagccagagtccctgacaagaatgagactgagctgagaccatgggaatgacaatcataggccctcaggccatgatctctgcaaagtgctttcatttccattatctcattagttcctcacactgcagagttaacctctactctgcagatgggggaaagcagttc

SEQ ID NO: 19918 - DNA, 336 bp, Homo sapiens
gcggcacgagctaaatgaaaagtaatatgcatgaaaaacaatctcattaactaaaagaaatgatctactaaacctcataagtagatacgtttgttaaaattactattttacagcaactttaaattatactcttccccaaccaggaaagctggtctatgaattattaacttgtctacccggtaaacacaactttgtactttatatatcacaagacttcattgtactatcgaaggtgtacttcacttcaaagcaacccaatggaggaagatgatgtaaagttttgttgcatgacttatagattggtaagaatgaaagctggctgggtgcagtggctta

SEQ ID NO: 19919 - DNA, 363 bp, Homo sapiens
cagatctcttatgccttgaccagaagaatcaaaataactcaccttatcatgatgcttgccctgctactcagcagcccagtgttatccaagcagagaaaaacaaaccacaaccacttcctactgaaggagctgagtcaactcaccaagctgcccatattcagctaagcaatccaagttcactgtcaaacatcgacttttatgcccaggtgagcgacattacaccagcaggtagtgtggtcctttccccgggccaaaagaataaggcagggatgtcccaatgtgacatgcacccggaaagtcgacgcggccgcgaattccagatctatgaatcgtagatactgaaaaaccccgcaagttcacttc

SEQ ID NO: 19920 - DNA, 450 bp, Homo sapiens
agagagttcgtcaggatccttgtgaggatatttctcgtatccagaaaatcagatcaagggaagtagccttggaagcacaaacttcacgttacttaaatgaatttgaagaacttgccatcttaggaaaaggtggatacggaagagtatacaaggttgtcttccacgtacttgttttgacctactaccctaaataattgtgttttcagatattgttttcattattcttttatttatttatttttttgagatggagtctcgctctgtcgccaggctggagtgcgcggcgcaatctcagctcactgcaacctctgactccctggttcaagcgattcttctgcctcagcctcccgagtatctgggattacaggcatgtgctactacacccagctaatttttgtatttttaataaaaacggggtttcccgtgttggccaagatggtcttgatctcc

SEQ ID NO: 19921 - DNA, 375 bp, Homo sapiens
ggctggatatttacatggtttgtcatccttttagtttaaacaaatctagatctttgtgttttaaagtacatttcctgcaaaaagcatataggcacttttttattctgtctctcaacccctgtatgagaaatagtgtttagttcatttacatttaatgtaattgctatagctagatttaaacctattttgccatttcctttctgttaataccatctgtgtttttttctcttacagtttttcccccctctggttagttttgtctctttcatttgttatgtccatgttttactttgtggccttgaacaaatttattgtagctgctttaaagtgcttttttgctgattttcaatatcagggtcattttgaggtcttttt

SEQ ID NO: 19922 - DNA, 164 bp, Homo sapiens
ccctgctatgattgattcgaatttaatacgactcctatagggaatttggccctcgaggccaagaattcggcacgagccaaatctcagctacttggttttcagtgagtttgtcttaagtagtgattcaaaaagatttgatttcctcagtaatttttttttttttt

SEQ ID NO: 19923 - DNA, 345 bp, Homo sapiens
gtcggcgtgcgggaggatcacttgaggtcaggaattcgggaccagcctggccaacctggtgaaaccctgtctctactaaaacaaaaaatacaaaagttagccaggtgtcatggcacatgcctatagtcccagatactcaggaggctgaggcaggagagttgcttgaacccaggaggcagaggttgcagtgagccaagattgtggccctgcactccagcatggatgacagaatgagactccgtctcaaacaaaagaaaaggaaaaagcatatttcattgcctccaaaacaaatcctgcaccccttagccagcatcccccaaccccattccctctcaagccctaggc

SEQ ID NO: 19924 - DNA, 335 bp, Homo sapiens
atttttaatgtaattggtgatgtatcatctttttttccccactttgagatgattcatattagtatacaaatagcttcctcagaccattttacagttgtatcataatttgtgtccaagtcccctcccagtggctttatggactgtttctagtctttgctgttctaaacagtgctgcagtgagtagtattttacatacatgtgcaggtatctaagagagaaagtgccgggctcaaggaaatgttcttctgtaattttgatagtcttttctgctagcctttgtcactccttgcttttcttaacacagctctgtcttgctgctttgctgtctctgtatg

SEQ ID NO: 19925 - DNA, 342 bp, Homo sapiens
gcttcacttctgcggggacctagtttgcccccacctgatgcaacccagaaaatggactgactgcgagtgccttggggcggagaatgtgtcttgctacgtgtaaagcacctagaaccctgccagattcaggggacacagcatcctgccgttttcctgccgtcccccgcccgccacacagtaggcgctccagtggctcggggcatctaccaggcaggccgcgctgtcctgccctgccggggctggagtggagcaaccctccggggccacccacatctgggtaccttttccccactttttccaccccagccgcgcacagtcaccagaaaactcttttagaaatac

SEQ ID NO: 19926 - DNA, 342 bp, Homo sapiens
gccattatttattttttttcctagcatttgctgcgactacacactgccggagcgtttggaaatgttgtttgctgttaccctgtatttgtctataaaattcttactgtagggaatggccaagtggaccatcagttcgtcctgagatcttctcatgtctctcacgtctttgaaaatggcctgtgaacagactgcatcatatgtaggatgtctggcaaaatagtgtacagcgttcttttctcaaatgagaggaaatgtgtaccttttcgccgcgttgtgacaatgtaaatgttaagaattagtctaaagatgaaaattctttggccaaaacaagataagccttat

SEQ ID NO: 19927 - DNA, 344 bp, Homo sapiens
gtgaaaaagtacttggtactaaaaatatcagaatataagtcttgtactaaaaaagtcagtagaacacaaacaacataaataaacctgaaaaatattgtgctgcttaaaaaaaatattaggctgggcatggtggctcatgcctgtaatcctaacagtctgggaagccaaggcaggcagattgctcgagcccaggagtttcggatcagcctaggcaacatagtgacaccccatctttacaaaaattaaaaaaaaattagccagatagagtggcgtgctcccagctactcgtgaggctgaggggaggatcacttgaacccaggaatttgaggctgcagtgagctatg

SEQ ID NO: 19928 - DNA, 396 bp, Homo sapiens
gctagtttaaacaatacagaatatttactatcttatacaagaagtttgtcactcaacggaagagtgagggaacagtgaattccaaagccatttcaattagttctgtgtagggtgttgctcatagagattcaaatcgaattaacatatattcaaaaagtatttgataattttatttccatgctattgccatgccgtggagaagcagcaaagtataggcattttttgctttagtggttaagagcttttctttggagacaaacctaagttagactcctgctttgggcatttacttccagtgtgatctgggacatattacttaatttcccctttatttgtatcaccttaaaatggaaataataagacttacctcagaaggtgttctaaaagattaagtgg

SEQ ID NO: 19929 - DNA, 372 bp, Homo sapiens
gggtgagtttttcacaaaagcattcatttttacatagcttctaagtagaatgcaatttgtcatgttcttatatgcaggagcaaagatttcataaaattttggaattaatcagcatagttttatccatattcttaaaatcacattttaaatgtttagattcaaaatggatatttaattttctttcttcttccatttcccatatttaaataattgtcattgccaatatatcgttatggaaatagaaaatactaattccatttagtggctcctctaaaattttctttttcatgtttgggtttaaatggctaatgctagttaagaaaacatagtaagacaaaaacatatgcacatgcagagagatagagagtcttt

SEQ ID NO: 19930 - DNA, 355 bp, Homo sapiens
gggcatccaacagtgcgccgagtctgtctctgtcatggtagagaccgagcctctgtcactgcaggcactcaatgcagccagacctattcctcctgtgcccctcatctgctcagcagctatttgaatgagatgattcagaaggggaggggagacaggtaacgtctgtaagctgaagtttcactccggagtgagaagctttgccctcctaagagagagagacagagagacagagagagagaaagagagagtgtgtgggtctatgtaaatgcatctgtcctcatgtgttgatgtaaccgattcatctctcacaagggaggctggggttcattttcgagtagtattttatactttagtg

SEQ ID NO: 19931 - DNA, 512 bp, Homo sapiens
  misc_feature (1)...(512): n = a,t,c or g
ccttaaaaatttgaaanccttaacagctatgacatgattacgaatttaatacgactcactatagggaatttggccctcgaggccaagaattcggcacgagtgatcagagaatgggatgaaatggagagtgaaggggaggccgcctcaacttcagtggtcagagagggccactctaagaaggtaacatttgagcagagacccacttggcaaagagaagacagttacataggtatctaaggaaggcattctcctttcatcaaagtgttcactgatgctttgcttagaagaattgacaacacccaagagtccatccttagaagactggctgaatgtatcaggattcaactgggtgagaaatgagttgaatatttgaatatggtaggagttctgaattacagaattaaatgaaaacaaacagaacaatcgatgacagcatatatgtgtactctcatttgtgttttctttaagtgagggggcttcaggggctttcactcagcagctatttacctact

SEQ ID NO: 19932 - DNA, 328 bp, Homo sapiens
gggaagattggtttaaaaagaaaagtgtaatgcaagaatttaaagaaatatttttaaagccacaattattttaatattggatatcaactgcttgtaaaggtgctcctcttttttcttgtcattgctggtcaagattactaatatttgggaaggctttaaagacgcatgttatggtgctaatgtactttcacttttaaactctagatcagaattgttgacttgcattcagaacataaatgcacaaaatctgtacatgtctcccatcacaaagattcattggcatgccacgggattctcctccttcatcctgtaaaggtcaacaataaaa

SEQ ID NO: 19933 - DNA, 500 bp, Homo sapiens
gggccccgccatgggcccggccctgggcgctggcattgagcgcatgggcctggccatgggtggcggtggcggtgccagctttgaccgtgccatcgagatggagcgtggcaacttcggaggaagcttcgcaggttcctttggtggagctggaggccatgctcctggggtggccaggaaggcctgccagatatttgtgagaaatctgccattcgatttcacatggaagatgctaaaggacaaattcaacgagtgcggccacgtgctgtacgccgacatcaagatggagaatgggaagtccaaggggtgtggtgtggttaagttcgagtcgccagaggtggccgagagagcctgccggatgatgaatggcatgaagctgagtggccgagagattgacgttcgaattgatagaaacgcttaagcagttgccttttttaaacatcgatacgaacctctgaatttgtattttttcctgttaaccatttaaattgttggctggatta

SEQ ID NO: 19934 - DNA, 454 bp, Homo sapiens
  misc_feature (1)...(454): n = a,t,c or g
gcggcacgagaaaatcaccacctgattaatatgtagaatatttccattactgcaaaaagaattccaggtaccctttggccattaattctctctactgctcagtgaaccactgatcatatctccatcactataggttagttttgcctcttgtaggatttaatataaatggtcatcccagatcttttatgtagacttccaaacctagcattatattcacattaataatatgaacttggccaggtgcagtggttcatggctgtaatcttagcactttgagaggctgaagtggtaggattgcccaggagttccagaccagcctaggcaacatggcgaaaccctgctctacaaaaagttagctgagcgtggnggcacatgtgtgtagtcccagctacctgggaggctgaggccggaggatacttgagccangaaggcaangcttgaatgagctgtgaat

SEQ ID NO: 19935 - DNA, 371 bp, Homo sapiens
ggccctcgaggccaagaattcggcacgaggggcttcaatgctttctgtagcaagcatgcatctggagaaggagccatgaagatcgtcaacctcctcaacgacctctacaccagatttgacacactgactgattcccggaaaaacccatttgtttataaggtggagactgttggtgacaagtatatgacagtgagtggtttaccagagccatgcattcaccatgcacgatccatctgccacctggccttggacatgatggaaattgctggccaggttcaagtagatggtgaatctgttcagataacaatagggatacacactggagaggtagttacaggtgtcataggacagcggatgcctcgatactgctt

SEQ ID NO: 19936 - DNA, 437 bp, Homo sapiens
ggcttggcctcttcctgctaatgcgtgccagattctttaatatttcatgtaaaaaatggtataacgaaaagagaaatttggtggctttttttttctacttgaaagcaagaaagagagtaatatgcacgccaaataaagtatttttcagttttgaatacactgagggctatatggatgctgtcagcagaatgtaaatcattacatttttatcactaagtgttaaagtccactgtatatttggtatacaaagaatacattcatcaggcgttctcttctccattcaaatcccacagatgtttcatacaaaataatgccattttgagccagatatggtgacacatgccctatagtcctagcttcttgtggggaggaggtgggaagattgctttggcaagttcagtgctgcagtgtgctatgagcatgcctgtgaataccct

SEQ ID NO: 19937 - DNA, 165 bp, Homo sapiens
ccttaacagctatgacatgattacgaatttaatacgactcactatagggaatttggccctcgaggccaagaattcggcacgagcaaggaagcataagtcgaggaaaggcccacagggtagggaggaggaggaggaggaagacaattcacaccaggtgaagaaaac

SEQ ID NO: 19938 - DNA, 342 bp, Homo sapiens
ggaacgccggctcttcgcctctcagcgcggcttgtcctttgttccggacgcccgctcctcagccctgcggctcctggggtcgctgctgcatcccgcacgcctccaccggctgcagacccatggccgagcgcggggaactcgacttgaccggcgccaaacagaacacaggagtgtggctagtcaaggttcctaaatatttgtcacagcaatgggctaaagcctctggaagaggtgaagttgggaaactgcggattgccaagactcaaggaaggactgaggtgtcatttactttgaatgaggatcttgcaaatattcatgatattggtggaaaaccagcttcag

SEQ ID NO: 19939 - DNA, 354 bp, Homo sapiens
gcaggctagtgctctcccttgcccatcaccgactctgctttagaaagatgcatcttcctgtcaaatcccagttactaggtgttgaagagttaggccattttcacattatggaacaatcagaggccaccctgggccctcctcagagatgctgtcattctgactagaagcagaagccccgggagccccgagccagccttaggtgctcttctcacagggaaaggtgggctttgctccctttagaggcacagggctgaccccaccccaccattcatgcatgctgatggccactagccattagcatggacccagggctgggctgtggacaccgaacagggcaaggctcaggtgcccagg

SEQ ID NO: 19940 - DNA, 439 bp, Homo sapiens
  misc_feature (1)...(439): n = a,t,c or g
ttgantacctttttggaatanccgttatgacatgattacgaatttaatacgactcactatagggaatttggccctcgaggccaagaattcggcacgaggtaccactgtgtagtatgcacagtgtctagagcatagcagatcctcaaatatcttctgatgactgacatttctctgtaccaggaattggccaacttgcttccctccatttgcaactgcccgttgcctgaccagggtcccatgcaaagaaataaagttatatgttttcttccttattcttgaaagaaacatgctatttgaaggttgtgatttgtcctagtttgaattctctgtgaatcagaccgtgaggaaaggatttgcaattcatttgggaggtgatcccaggaaacactggtaaaggagtatggaactgagacagggaatagaagtcagcccacaaacc

SEQ ID NO: 19941 - DNA, 498 bp, Homo sapiens
  misc_feature (1)...(498): n = a,t,c or g
gtgttgccatataaagcagtaataatgtttaatgtatgaagcttaaaaaatgacatctaaaatgttggaaaagagtaagtctttagacttactctctttttttttgagagagtctctctttgtctgcactccagcctaggtgataaagcaagaccttgcctcaaacaaaaaaaaagcaaaccctgaaaagtctacatgcatattgaangtttaaaaacatataaaatgaattagataaagcaaatatcttgaaagataaaactgtgaaaaattttatactaagaaatgngccaacttatttgacattgataaattatttcctagagaaaagtgtaattgaagtttgnctaaagaaaaaaaaaaccaancagccnaaataattgttacccagtcangtaattcaatcagaaaatcttaanccaggaaacanaggcccaaagnggttatatggcaagttctccncaaccaagnaanaattgccctanatttctaaaatag

SEQ ID NO: 19942 - DNA, 544 bp, Homo sapiens
  misc_feature (1)...(544): n = a,t,c or g
tttgnnnnccatcttgaaancccttttgacatgatcacgaatttaatacgactcactatagggaatttggccctcgaggccaagaattcggcacgaggagatggaagaatctggagctcgacatggaggtgtaggcagaagctgcagatggaatcaccaggccatggatggttgtagtaataagaatacatacttggccagtcgcggtggctcacacctgtaatcccagcactttgggaggccaaggcgggcagatcacctgaggtcaggagttccagaccagcctgaccaacatgatgaaaacccatctctactaaaaatacaaaaaaaaaaattagcctgacatggtggcgtgtgcctgtagtcccagctactcaggaggctgaggcaggagaattttttaaacctgggaggcggaggttgcagtgagccgagattgtgccacttcactacagcttacacaacagagcaaggctctgtctcaaaaaaacaaacaacaacaacaacagaacaacaaaaaccctnttgaacagtcccagattgg

SEQ ID NO: 19943 - DNA, 353 bp, Homo sapiens
gaggcagagcgagaataacaggagggcttttctgaggagggtagaggagcaggggaactgtatcattaatggctcagatagaaatatgcattctcagcagggtgaggtggctcacacctgtaatcacagcactttgggaggccaaggtgcatggatcacctgaggtcaggagtttaagaccagcctggccaacatggagaaatcccatctctactaaaaacacaaaaatgagccaggcatggtggtgggtgcctgtaatctcaactattcgggaggctgaggcaggagaatcgcttgaacctgggaggtggaggttgcagtgagctgagatcacaccactgcactccagcctg

SEQ ID NO: 19944 - DNA, 481 bp, Homo sapiens
accgctatgacatgattacgaatttaatacgactcactatagggaatttggccctcgaggccaagaattcggcacgagcggaatcatcaccatctgtgtatgtgtgattgaggtaagagcttaaccacagggttattgtgaggattacatgagttaagtcaggtaagatttcagaataataccaggtacacagtatttacacaataaatgttagctatttttactaatatatgaattcccccagccaagtagcaaataatgtaattaacaatttgctttaaggtatatagaaaatgtgctataagaacatctcttggccgggcgtggtggctcacgcctgtaatcccagcactttgggaggctgaggcaggcagatcacgaggtcaggagatcaagaccatcctggctaacatggtgaaaccccgtctctactaaaaatacaaaaaattaaccagacgtagtggcaggtgcctgtagtccc

SEQ ID NO: 19945 - DNA, 355 bp, Homo sapiens
ggaggaaggaagagaggagaggggtttcctggttgctgaagggcatcccttacagagaagcccacagaggagtgttctgaccaatgtagggtacaggtaggagggttggtctcttcctggcctccctgcagggaacagcttagactgtggctgtctttgtgcctcccctgtgcaacttccacccatttctcctaagccccttgaactcacaggccaactgtcccgtgctcaggctggagggacatcatctctaaagactgctgcctgcctgagtggaaaagttgactctcaggccgggctcagggctcacgcctgtaatcttagcactttgggaggccgaagtgggtgtatcact

SEQ ID NO: 19946 - DNA, 454 bp, Homo sapiens
tgattacgaatttaatacgactcactatagggaatttggccctcgaggccaagaattcggcacgagggaattaacagggcaatgagaaaagcatgtcatttaacattttatgaaagacagatacttcttttgttaaaataatatgtactatgtcaaggtatatgtgtatttaaatagtcatttttttaagatctctccaaagatactatttcaattttgactcttatcaagagttcatgaggccaggcatgatggctcatacctgtaatcctggcactttgggagtcctagatgggcggatcgcttgagatcgggagttcaagaccagcctgggcaacatggcgaaaccgcatctcaactaaatatacaaaaattagctgggtgtggtggcacatgcctgtagtctcagctacttgggaggctgaggcaggagaacctgggaggatgaggctgc

SEQ ID NO: 19947 - DNA, 389 bp, Homo sapiens
ggacacctaccaggagtttgaagaaacctatatcccaaaggaccagaagtattcattcctgcatgactcccagacctccttctgcttctcagactctattccgacaccctccaacatggaggaaacgcaacagaaatccaatctagagctgctccgcatctccctgctgctcatcgagtcgtggctggagcccgtgcggttcctcaggagtatgttcgccaacaacctggtgtatgacacctcggacagcgatgactatcacctcctaaaggacctagaggaaggcatccaaacgctgatgggggtgagggtggcgccaggggtcaccaatcctggaaccccactggcttcgagggctgggggagagaaatactgctgccctcttttta

SEQ ID NO: 19948 - DNA, 568 bp, Homo sapiens
gaaccttttctctccaactgtaaacacagagacagctttgggaataagccaaaaacagggtgatctcattagattttgaagatatatgactcctttgggctacatttcatattgatcaatttctaggtatttttcactggcccaaagtattgcattcccttaacagcaagcacaagttctctatatcacttgttttttgttgttgttgttgttgtcgtcgttgttttgagacggagtcttgctcaggtgccccggagtgcagtggtgcaatctcagctcactgcaacctccacctcctgggttcaagcaattctcctgcttcagcctcccgagtagctgggattacaggtgtgtaccaccacgcccagctaatttttgtatttttagtagagaaggggtttcaccatgttggccaggctggtctcgaactcctgacctcaggtgatccacttgcctcggcctcccagagtgctaggattacaggcgtgagccaccacgcccggcctctcttggaacttttattccggtggagagaaacaaataacaaataaataaaattatgcagatc

SEQ ID NO: 19949 - DNA, 331 bp, Homo sapiens
cgcagtaccaggtgggcccgctactgggcagcggcggcttcggctcggtctactcaggcatccgcgtctccgacaacttgccggtggccatcaaacacgtggagaaggaccggatttccgactggggagagctgcctaatggcactcgagtgcccatggaagtggtcctgctgaagaaggtgagctcgggtttctccggcgtcattaggctcctggactggttcgagaggcccgacagtttcgtcctgatcctggagaggcccgagccggtgcaagatctcttcgacttcatcacggaaaggggagccctgcaagaggagctggcccgcac

SEQ ID NO: 19950 - DNA, 405 bp, Homo sapiens
gtcagtccctgtctctgtgtctcccactctcactgctacgcatagccccatctgcaactgggatccagctcttggctgccagcacagagttataaacatttcttatcttgaactcagtgttcaggccccagggagacttctttgtatctcttgaacaattctctcaaaagagaagttactgccttgcccatggtacaaagagttgtggctgtgccctgctcacatcagacacagacactacttggaagaatggagaggactggtggctgaggcacttgggaaggaggaaaagtgaattcatgagtcaaaacatcatcagatggcatggatgcttgcataaggaagtgctattttccaggagtcgtaaatgttcatttcccttgcggtcttcaaaattcagttccc

SEQ ID NO: 19951 - DNA, 324 bp, Homo sapiens
gggatatttgaatatcaactcatcttatttaatttatggtatttatatcctttttcatttattgttacacttatgacagaaaaacaatgatttatgccgagactagtagtctatttgaagaaatacagttgtttctacataatttatgactaactttgagtgttgtggcagatttaaagcttacatcaatgttcataatataagaagcaagaggtgatgttgctttgaaagaagtatcttaaaactcaatataagacattttgaaaccacataggaagcccaggagcaaataatttgaattggtatacttgaaagtaatttttc

SEQ ID NO: 19952 - DNA, 379 bp, Homo sapiens
ggtgggttcctgtaatcccaactacttgggaggctgaggctggagaatcgcttgaacccgggagtcagaggttgcggtgagccaagattgcaccactgcactccagcttgggcgacagagcgagactctatctcaaaacaggaaaaaaaaagtatattgtgttatgaaaaggaggtaggatggcatgagtgaaggagctcatgacttagttctgccttggtcgttctgcaggtatgagtgcttaacttccctgagcttctggcttctcacttgtaaaggtgctacaaaagctagaaaagaaagacagcgacggaaagtccctttattaggtaccttattcaggaaggattacattcaagagcttatttatctgatagtt

SEQ ID NO: 19953 - DNA, 516 bp, Homo sapiens
  misc_feature (1)...(516): n = a,t,c or g
gaaccgtagcatctgtcctgggaggctctgtatgctcttcattgttcatacatccatttatttcttcactcagccacatgaggcatgtgggatgtatgttatctctgcttgatacatgaggaaactgattctggttaaaggacttgtgcctgtcatacaggcagctaagagtgcctatagtcctttgtattgccttttcaactggtgagaacatcttccctattctgtggcgttctcttagccttatgcctggcacagaggaaggctctgggaatgtttgggcccggatggatctgggagcctcttttgcatgccaagctgcatacttatccctagcaaatgctggtctccttgatggatatgtgacatgggtggctgaatttacatggcacctggtggcttctcanatcctccggccaagcctctggggacaagataaggcagatggcacagacangattccaactctggaaatcaatttgggaaaagtaatttgtgcaanacaaaattttggta

SEQ ID NO: 19954 - DNA, 330 bp, Homo sapiens
gcacaattatatagtaaaccaaggaggcccctaggccatagaattcagaattccaaatattaatgattgtatttcaattttagaaaaactatgggctgggcaccatggctcatgcctgtaatcccagcactttgggaggccaagacaggcagatcacttgagtccagtattttaagaccagcctgggcaacatggcaaaaccccatctctacaaaaattagtcaggtatagtggtgtacacctgtgtagtccagctactcagggggctgaaacaggaggattgcttgagccaggagaccaaggctgcagtgagccatgattgcaccactg

SEQ ID NO: 19955 - DNA, 537 bp, Homo sapiens
  misc_feature (1)...(537): n = a,t,c or g
ttggananctctgnanaccntatgacatgatcacgaatttaatacgactcactatagggaatttggccctcgaggccaagaattcggcacgagaaaattcacattacttttgaaagccaagaagttggtcttatccagttaggtcttcttatgaagagttttcatccagggatataactccttggtcagtgattttattgtttacatcctgagactgttctacagtttctttgactcctggcatttgccttaaggacctatagcaagctgtttctaggatcagaaactcaagagaggcatttctctgctttttcactaaaggtcagttgttttaatttgaaacctgaaatgcctctttagcaaaagcctgtggtatggggtaaagccatgtaagaagagaatagtctcagtcacatatgaagaggaaaatttgcagctgcagtgctttccttgtggccctgccaaccagctcttccaggacgaactcagtccancatggttttgatgtaaccatncatgcttttattttgtaagctt

SEQ ID NO: 19956 - DNA, 343 bp, Homo sapiens
ctgtaataccagttatttgggaggctgaggcaggagaaccccttgaacccgggaggcgcaggttgcaaatgagccgagatcatgccactgcactccagcctcggcgacagagcgagactctgtctcaaaaaaaagaaaaaaaaattttaaaccacacaatggcacagtcaatctgttttgaaaaacctggctggctggtggcagtgtagaaaatgaattgggtagagaccagaggcagaaaaaacaattaggagactatgacaagcatttaaatgagtgttgaagacctagacgatgtgtgtgacaattagggatgagggggtaagttccacaggtatttgtg

SEQ ID NO: 19957 - DNA, 336 bp, Homo sapiens
ggttagacatgcaaattaagcagattaacttattttctgaaagagctttatagcagaaatccacatggatgtggagaaaagggggctcctgcttggaagactgctgacgtaagtggcctgcagtaggagggttgtggtgggccagagaaggggacggccccgtagggggatctgaagtgggagactttgattgcaggaatcttcatgtcattgttaacatctgaaagagttgactttctttggcaacttatttatagccttttcattacttcttgagaatggtcgctataaagatgggaaaagtaagatagtaaaatgggggaaaaattatttcct

SEQ ID NO: 19958 - DNA, 362 bp, Homo sapiens
cggggttcgttatgttatcctctctgtctttgtatttgttttagattttccactaaaaaagttaaaaaaataaatgcactactttgagaaaaaacattctaaaatctatagcctggaaaagataactgcaaatagagttaattgccaaaggtaacagctaaaacaatgatataaaatataaagggacagtcgacttgggtatttcatctggaaagactgacgaatatgtaagtctttactatcaagtacatgcaggagaatcttcaaaacaaacagactccaaataaattctaaaatgagaaatttgtagattccatatggttaatattttacatgaaaatcggggtgtaaaaactatagtc

SEQ ID NO: 19959 - DNA, 395 bp, Homo sapiens
aatttaatacgactcactatagggaatttggccctcgaggccaagaattcggcacgaggggatagaaaataaaataatcaagtaagatatgtacttaggctttcataaaaatacagcagggcaagaggaccaagatggaggcagtgatcagggaatctcaatgagggtgagactgcgacaaagacttgaaaaaggtggagaagcaagccttgtgggtatttagggtagcagtagtccaggcaaggggaacaactagtgcaaaggctctaggaggcaatgtgtttgaagtgttttaagaacagtaaggaggctagtatggttagaacagaatgagcaaagggggcaaagtggtagaaggtgagatcaaagaggtaatgaggccattgtggaggccc

SEQ ID NO: 19960 - DNA, 428 bp, Homo sapiens
cggacgcgtgggcgggggtgctggtgggagccgcgtgtccagcgggagggacctgaattgcgtccccgaaatagctgacacactaggggctgtggccaagcaggggtgagggccggacctccacgagcggaatgcggggtccgaactcggggacggagaagggcagactagtcatcccggagaagcaggggtttgatttcctctgcatgcctgtcttccatccgcgtttcaagagggagttcattcaggaacctgctaagaatcggcccggtccccagacacgatcagacctactgctgtcaggaagggactggaatacgctaattgtgggaaagctttctccatggattcgtccagactcaaaagtggagaagattcgcaggaactccgaggcggccatgttacaggagctgaattttggtgcatat

SEQ ID NO: 19961 - DNA, 565 bp, Homo sapiens
gccgggaacctctcctgccggaagccggacggcagggatgggccccaacttcgccctgcccacttgacttcaccaaatcccttcctggagactaaacctggtgctcaggagcgaaggactgtgaacttgtggcctgaagagccagagctagctctggccaccagctgggcgacgtcaccctgctcccaccccacccccaagttctaaggtcttttcagagcgtggaggtgtggaaggagtggctgctctccaaactatgccaaggcggcggcagagctggtcttctggtctccttggagaaaggttctgttgccctgatttatgaactctataatagagtatatagttttgtaccttttttacaggaaggtgactttctgtaacaatgcgatgtatattaaactttttataaaagttaacattttgcataataaacgatttttaaacacttgtgtatatgatgacacccgtctccattaagtactaatgatgctttctcgcacatggccgaattttgggagctttgggaaagtgaacttgcttattctacgagagggaaatgaaa

SEQ ID NO: 19962 - DNA, 354 bp, Homo sapiens
gcaaagcagtcagttcctttgacccagaaatagatttatccaatcagagtgggagagtttcaaagctgcgaaatgaaacccattttctgttttttggactgtatccggggaccacatactcctttaccatccgagctagcacagctaagggttttgggcctccagcaacaaaccagttcaccaccaaaatatcagcaccctctatgccagcttatgaacttgagacacctttgaatcaaactgacaataccgtgacagtcatgctgaaacctgcccacagcagaggagcacctgtcagtgtctatcaaatagttgttgaggaagaacgtcctcgaagaactaaaaagacgacag

SEQ ID NO: 19963 - DNA, 343 bp, Homo sapiens
gaaaaaaatgataaatctttttgtttaatgcctctcagattgggaaagattaataagtgaaaatatctagagttgcaaatgtaagaaaacaggcattcgccttccctataggagtgaaaattcagtctttatgaaggacagtttagtcatagctggttgctcttgagaagtgtatttaggtggagaacttttctacttttgctgtttagaatcttgaaataaacatgtttttaaaaaatacttatttctgttaacatgttctatttaactactataccagcagtacatgattttgagtttatgatgaaaaaactcaaatgattgacagatttaatagttagaa

SEQ ID NO: 19964 - DNA, 324 bp, Homo sapiens
  misc_feature (1)...(324): n = a,t,c or g
gtgagtgtctgatatttccaccgtttattcttgatgcaaagagtctagatataaaggtggctatatgcacaagaaataaattttgattgttttgagttctgccacctgtagaggtgtctgctctattcttgatgttgtaaaagttaagtgaaaaattcacttaaaacagcaatctgtaatatatctgtatagatttcttttgagcccataaatgaaaatatttttcccctgagacggagtcttgctctgtcgcccaggctggagtgcagtgcaccgatctcggctcactgcagcctccgcctcctgcttcanaggattntcctg

SEQ ID NO: 19965 - DNA, 356 bp, Homo sapiens
gagcaggtgtttatatggagtagcaaaggacttaaaattaccaaatgcttctaaatatgaaggagaggttggggacacgcaccctatgtgataccaagttttattgtcaagacagtgtcatggtgcagaggtaggcattctgagcaggggaacaaaataagggcctagaaactcacccgtgcatatgttgacctttgcaaaatgacctggtgacatggcaagtcagtggggacaggaaggaccactccctaagtaatcccagaacaatggctattcatgtgggaaaaaaagaaattttactttctctcaccttacctggtgataagttccaaatatgttaagggctttaatacaaa

SEQ ID NO: 19966 - DNA, 367 bp, Homo sapiens
gcagggttaaacgctgactaatctggccattgaaggcccaagcgccgggatatgcagccttgccccttggtcagggctgggctgggggtccgtgggcacaggtgggtgggcagggagtaggtggaggccgcccctcccgctgccccgcaggccctggttctggccaggctcaggaagtgagctccctggggacccaggccccatgtccagaagccacgctggacatagtgcccagattccatgcccagcagcctcctctgccaccctcagagacggagaacgtgagagcaagtaagaacccgccttccgggaggagccccgtctggattggatggcatcgccaaaactcacgtccacccagaacctg

SEQ ID NO: 19967 - DNA, 329 bp, Homo sapiens
  misc_feature (1)...(329): n = a,t,c or g
gataagcttccgatgtttcatcctttgctcttttgacgttatgaattgtctctgagagttcctttcatgtaaagttttttgccagtgtcacttccactgggacacttttcttcttcttgtcacaactgttttcctcatttgttttcagaggttcaccattacgtggtcccctcactacagacttaaagtgccagccagtgacagtagccacattccctgtattcccacagccagctctttcttctgtaactccctttaaatttgattcacatttttgttgttgcagttttatcttggtgantaagtctctggaaaataatccttttttg

SEQ ID NO: 19968 - DNA, 278 bp, Homo sapiens
  misc_feature (1)...(278): n = a,t,c or g
gtgagaatccgccatggagccagagagggaagggaccgagagacaccccaggaaggtcagggaaagcaggcaggccccaaataagctggtcggggcagctgaggcgatgaaagccggttgggatctcgaggagagtcagcccgaggccaagaaagcccgcttatctaccattttatttactgacaactgtgaagtaacccatgaccagctgtgtgaattgctgaagtatgcagttctgggcaaatccaatgttcctaacccatcgtgnttncngcttt

SEQ ID NO: 19969 - DNA, 391 bp, Homo sapiens
  misc_feature (1)...(391): n = a,t,c or g
gcaaaagcggagggtgatacaagatttttggttcgagtgtcttatttggaaatatataatgaagaagttcgtgaccttttgggcaaggatcagacacaaaggttagaggttaaagaaagacctgatgtgggagtttatatcaaagatttatcagcttatgtggtaaataatgctgatgatatggatagaattatgacgctaggccacaaaaatcgttctgttggtgcaactaatatgaacgaacatagttcccgttcccatgccatctttacaattactatagaatgcagtgaaaaaggcattgatggtaacatgcntgtcaggatggngaanctccatcttgtagatcttgctggttcananagaccggtnntncctggagctactgcac

SEQ ID NO: 19970 - DNA, 519 bp, Homo sapiens
aacagctatgacatgattacgaacttaatacgactcactatagggaatttggccctcgaggccaagaattcggcacgagcaaggtcatccatgacaactttggtatcgtggaaggactcatgaccacagtccatgccatcactgccacccagaagactgtggatggcccctccgggaaactgtggcgtgatggccgcggggctctccagaacatcatccctgcctctactggcgctgccaaggctgtgggcaaggtcatccctgagctgaacgggaagctcactggcatggccttccgtgtccccactgccaacgtgtcagtggtggacctgacctgcgtctagaaaaacctgccaaatatgatgacatcaagaaggtggtgaagcaggcgtcggagggccccctcaagggcatcctgggctacactgagcaccaggtggtctctctgacttcaacagcgacacccactcctcacttcgacgctggggctggcattgcctcaacgacactttgtcaagc

SEQ ID NO: 19971 - DNA, 452 bp, Homo sapiens
gcaggaaactctctcctcagctcccgggtaaccccaatttacatccaaagaaaggtgtttccttcctgaaccattatcagaatcgcaccttttttcatctctatttctctcttgaatatgtttttctgtgtctctcattcaaaggagattctgatgaccaaggtatatacacaggaactctgggggcctacggacctcaaagaagaaaaccatattatatctggctctcactgtactggtgatcacacttgtccctttgtggttacattggtgataatgatctgcatataaaatacagggcctttaactttcttttttctttctttttgttttgttttagagacagggtctccctgtgttgcccaagctgggagtgcaatggtgcgatcctagctcactgcagcctagaactcctgagctcaagcgaccctcctgcctcagcctcctgagta

SEQ ID NO: 19972 - DNA, 283 bp, Homo sapiens
gggatagatatgtatctatataaatgggagtttattaagtagtattaactcacacaatcacaaggtcccacaatagaccacctacaagctaggagcaaggaagacagtccgagtctcaaagctgaagaaagtctgacgttccagggcaggaagcatccagcgcaggagaaagttgtaggctgggagggtaagccagtctggccttctcatgtttttctgcctgctttatattctctggcagctgattagatggtgcccaccaagattaagggtggatctgcct

SEQ ID NO: 19973 - DNA, 335 bp, Homo sapiens
gaactgttctccccacggtcttcccaggttcattagtggcaaatccttccttccatttggccgcctgagatcttaaaagtaatccctgattccatacccaacatcccttgagtcaacaagttgttttgtttctgacttcagactagaacaagaaccttccacctctgagctcctcttctgcttccactgtagcgcaagacctctgaggtagaagttcagccccacagggcaagcacttctctctgtttcattcatcactgattctcctgtgccaggatcagtgcctggcacatagtagggatacaataaatatttgcccaatgaatgaattcaga

SEQ ID NO: 19974 - DNA, 396 bp, Homo sapiens
gcagagactgaagggaaataaaccaagggaaaacccggagaacaaaatccaggcagatatgagctagaatcctgggttggccacttaactaggcttggaggtgtgaagtggcacccctgaggacacacgagagtcccttcacctaactgtcctcatctttaaagtgggaatagtaacaatttctcctttgtccacttcctgggttgttgtgaaggttaaaggagatgaggcatttgtaaaatcaggtgagaatgtggttgctggtcatttttcagtccaaagctgcagttccgggtttgtgtttgtggtggtgggagcatttctgacagctcctctgttgagatgctttatccaggagttgtgctggagagaaccctaataataacaccaccgccg

SEQ ID NO: 19975 - DNA, 511 bp, Homo sapiens
  misc_feature (1)...(511): n = a,t,c or g
gtgnnnnnnattttgaaancngntntgacatgattacgaatttaatacgactcactatagggaatttggccctcgaggccaagaattcggcacgagctctgccatgcctcctgctcttgctgggatggggactgaggcatgcttattcctctgcagaagacaacagcagtgtgtgtagatggctgcagaagggagggcagggtggtgaaaatacagtgagagggcctgggaaggtggtccctgggtgtggtacccacacagcaggcaccgtgcacagctgtgctggggcgagaacagattctcgtgaattctgcctaaaaggcgtctctcggaattgcctggcatggtagcccttccagttggggaatggctgctcagcagggagtcctggctgttgggcttgtgtgtggtccagagcttgccacgttttagagaaactgcagagggccaggagattgaggtggctggagaagctttggggtgcatgggccacagatggaacccctcacat

SEQ ID NO: 19976 - DNA, 913 bp, Homo sapiens
ggtgctgtgttgtttcatactcatctctaatgtgctctaccctctagacagtttgtttattttttttgagatggagttctcgtcctgtcacccaggctatggcgcaatcttggctcactgcaacctctgcctcctgggttcaagcgattctcctgcctcagcctcccaagtagctgggacttcaggcatgcgccaccacacctggctaattttgtatttttagtagagacggggtttcaccatgttagccaggctggtctcgatctcctgacctcatgtgatccacctgcctgggcttcccaaagtgctgggattacaggcatgagctactgcgcttggccaatatattttgaaagagttagatattaactaaaaccttgctaatccttaagcctaataattcttgaccaagggtaaccctgggtttatccctagatttgtttagaatgctttgtaatttactttgcattcttaatttgaaattagacccaattctggcctctttggaccatctgagaattaaaagtctaagtactgcttcctagggagttcatgctagctggggaaagctttatgtgttacctgatagaatcaaagctaagctcttagcttgcattcccagcattactgatcagttctcctagctataaaatttaaaagaaactatagctttaaccatgtttctaacttatactaacaaaccatggcacagtgtgtagtaaattcctcttataattccaactaatttgccattgtaaataagtaaatatttggcttttcaaataatttcatagcagctgggcttatctgtagaatcctagcttttcttcactcttgattctaggctgttccaggaagaaaataattagggattaatacctaaaataattctccttctcaataatgtcacttt

SEQ ID NO: 19977 - DNA, 348 bp, Homo sapiens
  misc_feature (1)...(348): n = a,t,c or g
gctgaccatgtgtgggtgacacacttcaaaagacacacagggccagatacagtggctcacgcctgtaatcctagcactttgggaggctgaagcaggaggatggcttgagcagaggagttccagaccagactgggtaacatagggagaccctgtctttaataaaacaataaaaatataaaaaaataaataaaaggctcatagacccctgcagcacaccaaccagaggataacccaggatgcaggagtgggagtgagtgtcaatgaagactggaaactgacacagcaggacctgggaaatagatgcctggagagcagaaagccccacaggaaggtacacagcctntcagt

SEQ ID NO: 19978 - DNA, 343 bp, Homo sapiens
gtgtgtgtgtatacataaataaaaataaatataactttacaaaggcaaagtatagaacaatggtaacataccatttcgaatgaaaatggtatacaaaagaatgcctttatcttttagtttctatatttagcagatatttattaagcatctactatagggaggtactagcccagacactgggaaagttgagtaaaacagtcatgtgtcctgctctcgaggaaactgtagctgttaatggattgcagattaagagcaagaaatgaggctaggcatggtgactcatgcctgtgatcccagcactttgggaggctgaggtgggtggatcgcttggggcccggagttc

SEQ ID NO: 19979 - DNA, 533 bp, Homo sapiens
  misc_feature (1)...(533): n = a,t,c or g
gagagaagaatcagcttgggccatcacaaatgcaacttctggaggatcatctgacacacatcaagtacctaatgtcaactgggttgtatcaatccgctctgtgatctcctcacggtcatggactctaaaattgtataggttgccctaaatggattgggaaatatcctgaggcttggttcaacaggaagccaaaaggaatggcactggcattaacccttactgtgctttgattgaagaagcttatggtctggataaaattgagttcttacagagtcatgaaaaccaggagatctaccaaaaggcctttgatcttattgagcattacttcgggaccgaagatgaagacagcagcattgcaccccaggttgaccttaaccagcagcagtacatcttccaacagtgtgaggctcctatggaaggttccagctttgaagcaatactctgctttcacgttcctgtgtcaaaccaagctaccagtcnagtcctcctgtggagcccacagtcctcatggagctacttcccaaatgtttcca

SEQ ID NO: 19980 - DNA, 410 bp, Homo sapiens
gatggacagggctgcctttaatgagtgtgaaggtcactaagtcacttagacatctcaccgtggaagtttgtgagcctgcattaggagatagactgattaccatacatgacataaaaaggaacagtggatagctcatactttatggtggttcttctcctccgaaataatatactgcagaaatcccagacagagctccttacaaacctttaattgtaatatatttttgatgattattcacattgaatgcacagaccaagaattcagtgaatgtcattttttaaaaaactaatttgtattgtctgctctagtgatacaagttttactagtgataaactattataatcaaccatactattcttatggaaaataatatctattttggcaggtttctgtgcctttatttccctctt

SEQ ID NO: 19981 - DNA, 511 bp, Homo sapiens
  misc_feature (1)...(511): n = a,t,c or g
ttgganacnngctatgacatgattacgaatttaatacgactcactatagggaatttggccctcgaggccaagaattcggcacgagagctacatggcactcaggccaaatgtcaccagtggagcctgtttttgaatggcctacaggctaagaatggttatattttttgagaattttttttaaaaaagaagatgccatgataccaaatgatacctacaaggcctaaagtatttatgatctaactttacagaaaaaattatcaatccctgatttaaataaaaattataaaagttatattcttgtacataattcagtattcttggagttcttataaaaagagaaatatttgatacagagacaggaacacaggtagaacaccttgcgaaaaggaaatcagagattgagtgatgcttttgcaagtctagaaacaccaaacaaagactgccaataaaccaccagaaactaagggggaaacacatggaacaggtcttcctcacctcctnagaaagaacc

SEQ ID NO: 19982 - DNA, 478 bp, Homo sapiens
  misc_feature (1)...(478): n = a,t,c or g
gggaagatgatgagttcagtttgggtcatgttggctgcatagtgcctgtggaatttccagatgtggaaggaggcccagatgctggagggaggtcgaggcagggcagtcatcagggagatcatctacgcagagctgtctgcagggagtacaggggtggtctgaggtgcctggagtggaaggtggtggggattggggttgtggaggaggccttcatccacggggcaaggggcatcctgagacttagcagccactgaaaaggggagagggctgtgactgtgcatgtgacatggtgacaacagctgggcctgcttccatagccctaccctgggactgcaggtctacacagtgcancacaggcctttccaggattgcccggcccacatgggctggaacatggctntgattcgtganaaccttggggcctttgctggcctcctggtntnaaggnccatnaactttttgctntaccgnggcctta

SEQ ID NO: 19983 - DNA, 595 bp, Homo sapiens
  misc_feature (1)...(595): n = a,t,c or g
gatctcgccgtgagacagcaagtgtcggatccgcaggcgcagccgtgcgatgttgtcctctacagccatgtattcggctcctggcagagacttggggatggaaccgcacagagccgcgggccctttgcagctgcgattttcgccctacgttttcaacggaggtactatactggcaattgctggagaagattttgcaattgttgcttctgatactcgattgagtgaagggttttcaattcatacgcgggatagccccaaatgttacaaattaacagacaaaacagtcattggatgcagcggttttcatggagactgtcttacgctgacaaagattattgaagcaagactaaagatgtataagcattccaataataaggccatgactacgggggcaattgctgcaatgctgtctacaatcctgtattcaaggcgcttctttccatactatgtttacaacatcatcggtggacttgatgaagaaggaaagggggctgtatacagctttgatccagtaaggtcttaccagagagactctcaaggctggaagctcagcaagttgccatgctacagcccctgcttgacaaccangtttgtt

SEQ ID NO: 19984 - DNA, 387 bp, Homo sapiens
gtcagaatggtcccaaaatagcagtgcagttcggacctggcttttcctggattgcgaattttaccaaggcagcatctacttattcaattgacagcgtctcattttcctacaacactggtgataacacaacatttcctgatgctgaagataaaggaattcttactgttgatgaacttttggccatcagaattccattgaatgacctttttagatgcaatagtttatcaactttggaaaagaatgatgttgtccaacactactgggatgttcttgtacaagcttttgtccaaaatggcacagtgagcacaaatgagttcctgtgtgataaagacaaaacttcaacagtggcacccaccatacacaccactgtgccatctcctactacaa

SEQ ID NO: 19985 - DNA, 393 bp, Homo sapiens
cggacgcgtggggacttttaaatttttatttatttattattatttttttgagacagattctcactctgtctcccaggctagagtgcagtggtgcaatctcagctcactgcagcctcaactgccccaggtttaagcaatcctcccacctcagcccccaggtaactgggactacaggcatgcaccaccatgcctggctaatttttgtattttatgtagagacaggggtcttgccatgtcgcccaggctgatcttgaactcctgggctcaagcaatctgccagcctcagcctctcaaagtgctgggattacaggcctgagcaactgtgcctggcccaaaaccagaccgttaacacattaaagagtctgattttggtgaagaaaatatttgcaatta

SEQ ID NO: 19986 - DNA, 504 bp, Homo sapiens
  misc_feature (1)...(504): n = a,t,c or g
atttgaannctttgaancccctgctatgacatgattacgaatttaatacgactcactatagggaatttggccctcgaggccaagaattcggcacgagcaggccaatttaacctttgacccagctgctctactgcctggggcctcacccaagagtcctggactcaaggctatggtgtcgccatttcacagcccaccttctacccccagcagccctggtgtgcgatctaggcccagcgaggcagaggaggtgcctgtcagcttcgaccagccccctgaaggcagtcatctgccctgttacaacaaggtaaattctagctccagattatggcggtgtgtctgtggaaatgtgggcactggcacccctgaattttctctaccctgttgtcctggagaaaggaggaaacattcggagttactgtcagagctgcgtgttaacccaagtgaaatttctcctctcctttgcaaatgatccctgaactaggatnacctttttnctngactgac

SEQ ID NO: 19987 - DNA, 344 bp, Homo sapiens
aaaagatctgtataatagaatagatactctggagaaaaagcaatgaataaattaagatttacccaataaattattctctagcaattggttagctatttggaaaaagttaagttagagcctcactttacagtatactctaatgacttttgtataaacaataaattgtggccgggcacagtggctcacacctataatgccagcactttgagaggccaacgcgggtggatcacgaaatcaggagttcaagaccagcctggccaacatggtgaaaccctgtctctactgaaaatacaaaaattagctgggcgtggtggcacgtgcctttagttccagctactcaagag

SEQ ID NO: 19988 - DNA, 529 bp, Homo sapiens
  misc_feature (1)...(529): n = a,t,c or g
ttggnnnttgannnccaaagctatgacatgattacgaatttaatacgactcactatagggaatttggccctcgaggccaagaattcggcacgagctggaacaaaacaaaaggttctttcattacaatcaacatggcttcttgttaagctatccaggttaaaataattcatgccaagaagtaactggctaaaagacagccttctcggtggtggctgtggtttagggaaggactctgtgccttctcaacgacggctgaggtttagggtaggactctgccactccagatgatgccctagtgaggccagtggtcagggagctcttgatctggaaccttgagcactccttgctggctttctggtttgtggtggctttagagctcacttttgaaaggcacaaactttctcttaagcaggatacctganttcatgagatcctcccttttccaaactangagggaccaaaggatctgccaagtggcctggatatttgaattcagaagcacactgcacactgtgtgntgctaagagga

SEQ ID NO: 19989 - DNA, 354 bp, Homo sapiens
gaatagacttactagcaagtggctccttgacagaatctgaatgttttggaagtttaactgaagtctctttaccattggctgagcaaatagagtctccagacactaagagcaggaatgaagtagtgactcctgagaaggtctgcaaaaattatcttacatctaagaaatctttgccattagaaaataatggaaaacgtggccatcacaatagactttccagtcccatttctaagagatgtagaaccagcattctgagcaccagtggagattttgttaagcaaacggtgccctcagaaaatataccattgcctgaatgttcttcaccaccttcatgcaaacgtaaagttggtggac

SEQ ID NO: 19990 - DNA, 359 bp, Homo sapiens
ggaagccaacggagaactcaaggtcttcatagaccagaaccttagtcccgggaaaggcgtggtgtccctcgtggccgttcacccctccaccgtcaacccgctcgggaagcagctcttgccaaaaacctttggacagtccaatgtcaacattgcccagcaagtggtaattggtacgcctcagagaccggcagcgtcaaacaccctggtggtaggaagcccacacacccccagcactcactttgcctctcagaaccagccttccgactcctcaccttggtctgccgggaagcgcaacaggaaaggagagaagaatggcaagggcctacggcatttctccatgaaggtctgcgagaaggtgc

SEQ ID NO: 19991 - DNA, 322 bp, Homo sapiens
tcactgctcttgattcccatagattcatggagctgaaagagaggtagcagcatcagctgcaccagctgcactagcttccggatgcaggactccaactgggcccacgcctctcctctgagagcactggcaggggttcaacgtcaccagccctcctccttgtgttctcctctgtctgtcgccctctcccaggttgtccactctgtagcttgactaagaggcacttgataagggtcactgctgtgaagtgtgcctgagagctgatggtgcaggcagtcatcaggcccttggtggcatttcctcggtcgacgcggccgcgaattcc

SEQ ID NO: 19992 - DNA, 446 bp, Homo sapiens
gactcactatagggaatttggccctcgaggccaagaattcggcacgaggtgggtcttttaaaatcatggtagctaacaaaaaacattatcgtggccaggcgcggtggctcacgcctataatcccagcactttgggaggccgaggtgggtggatcacttgagatcaggagttcaagaccagtctagccaacatggcgaaaccccatctctactaaaaatacaaaaattagccaggcgtgatggcgggcatctgtaatcccagctactcaggaggctgaggcatgagaatcgcttgaacctgggaggctgaggttgcagtgagccgacatcacaccactgcactccagcttgggcgacagaacgatactctgtgtcaaaaacaaacaaacaaaaacaatattgtgtactgggtatttaagaacttgtttatggccaggtgcagtggcg

SEQ ID NO: 19993 - DNA, 335 bp, Homo sapiens
gaacaaacaaagaagtgctaagcttaaataacttgaggaggatttaggttggatacaaaaatgagagttattatgttacggaaaagagttaagggctgttaagtccccttctctaatgctctttaagatctttaaaatgaagggtgaattttgccagttggctttggagaaaggctatttattatggttataatcttgtatagagacaggctgtggactttcccagttttcagatgagagcgactcataattgagttgacagtgatgtctctcagactccaattccatgcccaggtagcttattggccaggcttgttactgctgttgctttcact

SEQ ID NO: 19994 - DNA, 339 bp, Homo sapiens
gtaaaacttcaattgcataaaattgaacctcttgagttgtttttttatcttttcaaaaggattgcatctgggtgtggtggcttatgcctgtaatcctaacactttggggaggctaaggcaggtggattgcctcggcctcccgaagtgttaggattacagttccagaccggcctgggcaacatggtgaaaccccatctctataaaaaattagccaggcatggtggggcataccccaccatgtagtcccagctattaggttggtgcaaaagtaattgcagtttttgccattaaaagtgatggcaaaacagattgctttcgcaccaacctaatgcttgggag

SEQ ID NO: 19995 - DNA, 358 bp, Homo sapiens
gcctgcaaatagcagaaataaaagaaaagattggaactaggtcagctgaagatcctgtgagcgaagttccagcagtgtcacagcaccctagaaccaaatccagcagactgcagggttctagtttatcttcagaatcagccaggcacaaagctgttgaattttcttcaggagcgaaatctccctccaaaagtggtgctcagacacccaaaagtccacctgaacactatgttcaggagaccccactcatgtttagcagatgtacttctgtcaggtcacttgatagttttgagagtcgttcgattgccagctccgttcagagtgaaccatgcagtggaatggtaagtggcattataagccc

SEQ ID NO: 19996 - DNA, 338 bp, Homo sapiens
gggttctcattgactggggaggacagatcatggtgtgtttttgagcctggtactaaaagtgccaacctgacttagacaaaggctttccattgcttgcctttcctttctcagccctgaaactctgtttgcatggctgcctgattttctttcttttttttaaattcgttcttgttgcccgcattcggctttgtctttgtagccacagattgaaaactaataccagtggttggatgaaagaaagagaagactttaatagaacttttaaacaattaagggaagttcagaaatagagtgaacagtcctgtgatttctccattactggaagtgctcacataaag

SEQ ID NO: 19997 - DNA, 517 bp, Homo sapiens
  misc_feature (1)...(517): n = a,t,c or g
tcccaggaataaccctatgagggagtatggactaaattctggggaaagaaatgttgctccagtttcaccaaacagtgttttaaagagaaatgtcaataatgtgggtgactctccgaatgtagtttggaactcttgccttttccaaaattatggtggagtttttttccccattattttctgtagtatttctaaataatgggatgaagcaaccattttcaggctattttgtaaataatacattgtacccacagatagtctttattacttatcacttaagtggtatctcagttcattagataccatactgtaagtggttgtatttcgtggcatagctgctgtccatcaccccatctcctactcatagaatggcacctcagactgttctgtaccttttcagtcacttataactattaaatagctcattttgcggcgcgatggtcatgcctgaatcccacacttggaggccgagcggcggtcacgagtcagaatgagacncagtgaacccggctntctaaaa

SEQ ID NO: 19998 - DNA, 463 bp, Homo sapiens
  misc_feature (1)...(463): n = a,t,c or g
gtggaagggttgtttacttttgagaactaataactgccccattctttgtgattgtctgcttacataatttgttataaaagaatgcttctaggtaaaccctctctccagaatgctggtggtttgttctattctgcttgggaagggttaagaggagacaacatcctgtcaaagaccttgtttttaattttgcttctcacactggcacagatcctgctaagagcagcccagattagttcggaaaacctttgaagagatttaagatgtccttcagccagtttgaaggtttttgtcttgcaaatccagtacaagggcgcctgcaggcatctcgacccttgctgtgctgctgatgcagctcaaggtcacactaacccgccctgtgacattcaacaacaacaaaaaaattatgcggtgaaactgctcagcgtcaaccaaccaacacttcctttatgaggaactgngggaa

SEQ ID NO: 19999 - DNA, 462 bp, Homo sapiens
  misc_feature (1)...(462): n = a,t,c or g
ggngntnnnnnnttgaanttngannacccgttatgacatgattacgaatttaatacgactcactatagggaatttggccctcgaggccaagaattcggcacgagtttcaaagaaaaggtgtcattggagcagtggtttgcagaatgagccagagttcaccaagcaggcaaggcaaggaagggtgttgcagagagggaacagcatatgcaaaggcatatcagttcatggcatcacatctttcactggggaagccagtttccacaggcagcatcccaaggttcaataaggccttatttaacaagcaagcaaaatgcaaaccaaaccattattcatttattggcttaagtatgctttctcctgaaaactttagcattgggtgcaaatattcagtatggttctcggagtccaaagggttttaagccagggcacaaccagaaaagtggctctctttggtagggagag

SEQ ID NO: 20000 - DNA, 523 bp, Homo sapiens
  misc_feature (1)...(523): n = a,t,c or g
tttganttcgaatnccancagctatgacatgattacgaatttaatacgactcactatagggaatttggccctcgaggccaagaattcggcacgagcggcacgagtgatgattagaaggaagtagggcgattaacacacagtgttaatcacagtgggggaagggagaaatatgtttggcacccaggtaatgcactttaatactggaaagctccctgtactaccttgccccattttcatagtaaatagataagtgcagtagccatagcctgagaggcacatggtgaccaggggctcagggatgaatgtctggatcatgccactgggaagccaccaagaccagcagaggtgccagtggaggttgaggggcacctggaatggacagcagaggacagcagcaatcactgtcaactgcagggttaagaccaactgcagtggggacggtggctgcagtccatcccttggcctcttacaagtttcttcctggaaaaagagacccaccaggatcctagagttgtttctccta

SEQ ID NO: 20001 - DNA, 352 bp, Homo sapiens
ggaagcctgcagtcctgacacgctctggggatccttcacagcctctgctcccccaacactcctcactggagacacagctcttctgtgagcagggagatgggggcacagaagggcactcaccatctggaattctggaaaagattcccccggattcagaggccacgttggtgctagtgggccgcgccgacttcctggagcagccggtgctgggcttcgtgaggctgcaggaggcagcggagctggaggcggtggagctgccggtgcctatacgcttcctctttgtgttgctgggacctgaggccccccacatcgattacacccagcttggccgggctgctgccaccctcatgtc

SEQ ID NO: 20002 - DNA, 325 bp, Homo sapiens
gaaagttttataacttgtgttatttaatgagtcagtcaatcggctgcagtacgggatctgataaggatctaggagaagggtctcatgcggaccctcacatgggcagaaaaatggtggtcattggccgacatcacagttttcctgtttcccacccagctaaaaaccgttgtttgctttaaattttcataaactggaatcctttcacccgctcctacagctaaccctcacaagcatgaagtgctgtggctgttccttatcctaatgatgcgcttttgtcccgtaaatgttaacactcatgaagcataccccggcctctcagtcttga

SEQ ID NO: 20003 - DNA, 465 bp, Homo sapiens
  misc_feature (1)...(465): n = a,t,c or g
ccctnnnatttgaaaacccctatgacatgattacgaatttaatacgactcactatagggaatttggccctcgaggccaagaattcggcacgagcaaagtgctggtattacaggcgtgagccaccgttcccagcctcagttatctttaatgctatccagggcttgagttatcagagaagcaaagagcctcttggccggagctctctccctagaggtgatggagagtgttgggatgtgctggagccgcctgccatctgaggcatgccagaagcccttagacatctccctgaggtcagtcgttggtggtttctgtttcagccccatctgtggggagtctctccccctcagcagtggctctggctgtgatcctgcctgtcctggtacttctcatcatggtgtgcctttgccttatctggaagcaaagaagagcaaaagaaaagcttctctatgaacatgtgacggagac

SEQ ID NO: 20004 - DNA, 1300 bp, Homo sapiens
  misc_feature (1)...(1300): n = a,t,c or g
cagctatgacatgattacgaatttaatacgactcactatagggaatttggccctcgaggccaagaattcggcacgaggtatggagattaccaggcagatgataccgaaatgcttaaaggggctgtggctgaggctgtagcatctctgctggaggtgagacactctgggaactgatttgacctcgaatgctcctaaaagagaacttgatagcctgacagcagagaagtattatttggaggggagtctgagaaagcctggcttgtattatctgtccaaaaggaagcctcttcatctcccggtgccttggttgactattttggaaataggcatatcaaggttcctgattcagcactttgctcttttaataacaaatcgtccaaagatctcaaagtaagggtttttttttttancttccactcttccgcanacttggncatcgacctatttttattgaanaatgaaaggcgatgacaantttaacatatacaaattcgtgaattcttgttcattttgcattcctgcagtcagtgctaatccgtcgttcttaatcaggagttctgccaggtttaaggtcacctgcactcccagccaagtggtgatgtatgcctcccactctctgcaaggttttcctcatttttatattcatttattcatcattcattcattcacctaactttcattaaatagctgcaccatcccaggccctgtgcggagcatcgggaatacaaagatgagataaaacattgtccctgcccccgggggctcacatgccactggaaacaacagactcttaaactaacaattcaagcaggcgccaagtgctacgacagaggtgtgaataaaagcatcaggaaatcggatggagaaccaccattcacccaagggtcagaggaggtttcaaagaaaaggtgtcattggagcagtgttttgcagaatgagccagagttcaccaagcaggcaaggcaaggaagggtgttgcagagagggaacagcatatgcaaaggcatatcagttcatggcatcacatctttcactggggaagccagtttccacangcagcatcccaagggtcaataaaggccttatttacaagcaagcaaaatgcaaaccaaaccattatcattantggcttaagtatgcnttcncctgaaaactttagcaatgggtgcaaatattcantatggttccccgaaccaaagggttttacccagggnanaaccaaaaaaatgggnccccttggnnnnngngganggccnnnntnnttnncccccnangggcannnnnnnnannnnnnnntttt

SEQ ID NO: 20005 - DNA, 485 bp, Homo sapiens
  misc_feature (1)...(485): n = a,t,c or g
ttgctttgaacancatactaatttatacgactcctatagggaatttggccctcgaggccaagaattcggcacgagtggtaacataggtattgttaaagtattgatataggacagtggaggaaggagactttcgatgaattgatcaagaagaaaaagaactctgtgttgccacctggttatggttcagaagtattgccctgaactgccatactaccactgagggtgaaataggaaaacatatcccaacattatcaagcacacacctctatgggaagactgcatatgtggcactcatacctcatctcccctcctgctgccaatacagacatagctaatccatcacaacactctttcctgcaggcctagatttgccatcaaaatccttctcacctcagtgcttcaggcaggtcctttcaagccatgacaagctgggtcatgagttgaaacctgtttactttctatgatcagcactagtaacgcaaaga

SEQ ID NO: 20006 - DNA, 348 bp, Homo sapiens
ggacagggtttcaccgtgttggccaggatggtctcgatctcctgaccttgtgatctgcctgccttggcctcccaaagtgctaggattacaggcgcgagccaccgtgcctggctggggtttggatttttattgtaaaggatttccatttccttgataataaatcatcttttagatcccttttaatttttaattttaattttttgtagagatggagtctcgctatgttccccaagcaggtctcaaattcctgagctcatgagatcctcctgccttgacctctcaaagtgctgggattacacgtgtgagccaccatgcctggtccatagatcctcttgattcgtttgttgg

SEQ ID NO: 20007 - DNA, 494 bp, Homo sapiens
tttgaatccctttgaatcccagctatgacatgattacgaatttaatacgactcactatagggaatttggccctcgaggccaagaattcggcacgagaaaactattgtaagctactagtacttgacaatgtatttgtgtaaaattgaatgagtgaatgaatatgtattatggctctcaaatctgataaattgcaaaatacaatagtaaaacaaactccagaaagacaaagcaccatgaaacgtgtcaacagagagaacaagaattttagaggaaattagctggacgtggtggggtgtgtcagtagtcccagcactttgggaggccaaggctggtggattcttgaggccaggaattcaagaccagcctggccaacatggcaaaaccccatctctaccaaaaaaatacaaaacaattagccgggcttggtgatgcgtgcctgtagtcccagctactcgagaggctgaagtgacagcactgcttgagtctgggaagct

SEQ ID NO: 20008 - DNA, 423 bp, Homo sapiens
  misc_feature (1)...(423): n = a,t,c or g
gcagttctttactgtcttcagaatagttctggataagcggccttttctgaaaggatatttaaaaatatatactatttaggctgggcccagtggctcatgcctgtaatcccagcactttgggaggtgaaggtgggtggatcacctgaggtcaggagttcaagaccagcctggccaacatggtgaaaccccgtctctactaaaaatacagaaattagctgggccctgtggcaagagcctgttatcccagctactggggaggctgaggcaggaaaatcgcttgaacccaggaggtggaggttgtagtgagccgagatcacaccactgcactccagcctgggtgacaagaacgaaactccatctcataaaataaaataaaatatatactatcttgctcctcanaaccagtggggaagaagagggaat

SEQ ID NO: 20009 - DNA, 441 bp, Homo sapiens
gataatatttaaacacagaatggtagaaaatttctattacaggaaaatctgggtttttgtcattttttactctaagtgactaatgtttgtaatttcttaggaataaccaaacccttgattcagtacacactatttaaagtgtttaatccagaatttaggtgcattgtagtgtgtattttgagatgcctgttctgtcccgcagtatacatgcttgttaacagatagctaatgtccaagttcagagaattatttgtggctattggaaacatttacccatccaagcaaggtaaatgtttaaaatgtagaaatgctgatgtaaaatataaaaataacatttctcattatacttattgaaactactggggtttaaaggtaaagaagtgttaacttctagaaggttattcgattttgcttccatacacaaccctgattcttttgctg

SEQ ID NO: 20010 - DNA, 551 bp, Homo sapiens
gattacgaatttaatacgactcactatagggaatttggccctcgaggccaagaattcggcacgaggtggctaagtgattttttattttctcccttttacttttttttctacatttttataaggaacatagatcacttttgtaattagaaggaaagccagtttaaaagatgaaatcttcccatgacgtgagcccagctatcccgattgatttattttcccatttccttgtagcaaaaagaatgtttccagctgctacatttaagagagagctggccgggcacggtggctcatgcctgtaatcgcagcactttgggaggctgatgcaggcggatcacgaagtcaggagatcgagaccatcctggctaacacggtgaaaccctgctctactaaaaatacaaaaacaaaattagccaggtgtggcggtggacgcctgtaatcccagctactcgggagactgaagtgggaaaatggcgtgaacccgggaggcggagcatgcagtgagctgagatcgcccactggtttcagcctgggcgacagagtgagactttgct

SEQ ID NO: 20011 - DNA, 394 bp, Homo sapiens
  misc_feature (1)...(394): n = a,t,c or g
gatcacctgaggtcaagagttcgagaccagcctggccaacacagtgaaaccccatctctactaaaaatacaaaaaattagccgggcgttgtggcaagtgcccctaatcccagctactcgggaagttgagacaggagaattgcttgaacctgggaggcggagattgcagtgagctgagatcgtgccattgcatctagcctaggcaacaagagtgaaactccatctcaaaaaaaaaagaaannnatgctgaggccatgcatagccttgcanaaggatatggtgttcatgtcttccaattgataatatanatnctgcngcccatcaaacagantaagtaatttttatagtttccanacagagctaaatattactatcccccataatgataaacaggt

SEQ ID NO: 20012 - DNA, 351 bp, Homo sapiens
gggactttttgttcaaatcagttctgaattgaacattcataaccagaggagcctctgtactttatgttaatactctagacacataataactcataaatacatacatcagctaaggtgctttattaggcaacgtttttagcccagaaaacaaagtcattctggtcaaatcccatttttctttttggtaatcaccatcacctgtggcaaatgcttcaggccaatgtttccattcagtctcaaacctccatcttttttattgataatatttccacccaggaaagaagcacatcttccaattacttgcacaaaggcaaagagtgaaaagccatggatattcctaaagaagaaagg

SEQ ID NO: 20013 - DNA, 394 bp, Homo sapiens
cggctgctcaccagcagcagctggttggcattgtcagtgagctgggcctgtgggcactcggctgggtcacggaagggcacgcagtcagggctgtcgattacagggccagtgacagccacggcctcgagctgcagctcggggctgagctggaagaggcggttcactgcgccgacatagagtgtgcctcggccaggtgccagtgccaagtggttgagagtggtattaggtgcggagaagcgatgggcccctgtcaagggcagtggcggtggggacagcagcagcaggaggaggcagaggccgaagggaggccagcgagccatcacgggggccatgaagtggtgcagcagaggggtctctggcggcgtggcacatacgctcagttcagctgcccaag

SEQ ID NO: 20014 - DNA, 409 bp, Homo sapiens
gtaagtggagaaagtaagaatacctgctttgttaagattattggtagtttgagtaaaatagtatatggaaaccactatgtgtgggacatagtagttgatactcatagttttttagttattactgatcactgggactgtttggcatctagtgtctttttaggtatcatttttaccatctcttttcatattttattccaacaaaggctatggataggactagtgtagacgtggaatcactagacttggcactgtgattttttgttgttgttgagatggagtcttgctctgtcacccaggctggagtgcagtaatgcgatctgggctcactgcagcctccgcctcccaggttcaagtgattctcctgcctcagcctcccgagtagctgggactacaggcacacgccaccact

SEQ ID NO: 20015 - DNA, 446 bp, Homo sapiens
  misc_feature (1)...(446): n = a,t,c or g
tttgaaggcntatgtaggncgatgtactatnctatgatanaacgatgcnnaananaccccaccaaacnagatctctnagatgatctccganganncgnanncgtggacnacgncgacntcnnctggaattcccaattaatctcccagctcaaggcaaccactgttgtgattttcttctgccaaagattgattctgtcctctaacttaatataaatggaatcatacgtgtggactcttgtataaggcttctctcacttgagcatgtttctgaggctcatccatacagtcgtgtgtatcagttgctcattcctttttattgcttagtaaacttcacctggagtatttctagtttttttactattatgaacaaagttgctttgactactcttgaacaagattttgtttgtggacattttttaatatttttttgaataaatacctaaagg

SEQ ID NO: 20016 - DNA, 456 bp, Homo sapiens
cttgacatgattacgaatttaatacgactcactatagggaatttggccctcgaggccaagaattcggcacgagatcatagaacgggccaaaaagaagatggtattagatcatctggtgattcagcgcatggacaccactggccggacgatcctggaaaacaactcaggaaggtccaactcaaatccttttaataaagaagagctgacagctattttgaaatttggagcagaggatctcttcaaagaactggaaggggaggaatcagaacctcaggaaatggatatagatgaaattttgcggttggctgaaacgagagagaatgaagtgtcaacaagtgcaacagatgaacttctatcacagtttaaggttgccaactttgcaacaatggaagatgaagaagagctagaagagcgtcctcacaaggactgggatgagatcattccagaggaacaaag

SEQ ID NO: 20017 - DNA, 395 bp, Homo sapiens
gagcagaagctcctaaaaaataatgagtccttggatgaaggcttgaggctacatacagtgaatgtgagacaactgggtaagtgactaatttttttataatatgcattttatacaactgtatattcaggtttacttgaaacaacagcagaaattttctttatgcgctatttgtttatgtaagttttttttctgatggggaagttcagtaacaaatgaatgacatagcagaaaaaaaaatcagctcagtgtctgtgaatccaagggaatgaaggaggtagatgaaagtttatattttactttaggaacatattttgaaaatactaacaatatgaacaaaatgccagaataatcttgatcatcactgttgtcaactttagggaaaagcaaagagtgtg

SEQ ID NO: 20018 - DNA, 456 bp, Homo sapiens
  misc_feature (1)...(456): n = a,t,c or g
gaggttntntnccncnnatacccttttgacatcnntacgaatttantacgactcactatagggaatttggccctcgaggccaagaattcggcacgagggtcgacccacaggagccagcatacttcctgaacatttagagtgttgttcgccgctgcccattcttatcccgagtcccccaggcctttctgcagaaagcaggcaaatctctgttgttctatgcccaaaactgccccaagatgatggaagttggggccaagccagcacctcgggcattgtccactgcagcagtacactaccaacagatcaaagaaacccctccggccagtgagaaagacaaaactgctaaggccaaggtccaacagactcctgatggatcccagcagagtccagatggcacacagcttccgtctggacaccccttgcctgcacaagccagggcactgcaagcaaatgccc

SEQ ID NO: 20019 - DNA, 452 bp, Homo sapiens
  misc_feature (1)...(452): n = a,t,c or g
ggagnnnnnnntgnnttnnnnntttngaanacctttgtttnngatcncgaatttaatacgactcactatagggaatttggccctcgaggccaagaattcggcacgagggctgctcccggacaagggcaacgagcgtttcgtttggacttctggacttgagtgcccgcctccttcgccgccgcctctgcagtcctcagcgcagtctttccacaggagccagcatacttcctgaacatggagagtgttgttcgccgctgcccattcttatcccgagtcccccaggcctttctgcagaaagcaggcaaatctctgttgttctatgcccaaaactgccccaagatgatggaagttggggccaagccagcccctcaggcattgtccactgcagcagtacactaccaacagatcaaagaaacccctccggncannnagaaagacaaaactgttaaggg

SEQ ID NO: 20020 - DNA, 353 bp, Homo sapiens
gcggcacgagaactggaggagacatcaattcgctatgtgacccccagagccctcagtgatccaaaaccaaggcctccccagccctctaaaacagtgcctccccactatcctgtggtgtgttgccccacttcgggtcctcagatgtgtagcaagcggccagcccgagggagagccacacttgggagccagcgaaaacgccggaagtcagtgacaccagatcccaaggagaagcagacatgtgacatcagactgcgggttcgggctgaatactgccagcatgagactgctctgcagggcaatgtcttctctaacaagcaggacccacttgagcgccagtttgagccgctttaacc

SEQ ID NO: 20021 - DNA, 1007 bp, Homo sapiens
tatgacatgattacgaatttaatacgactcactatagggaatttggccctcgaggccaagaattcggcacgagcgcatcttcttttgcgtcgccagccgagccacatcgctcagacaccatggggaaggtgaaggtcggagtcaacggatttggtcgtattgggcgcctggtcaccagggctgcttttaactctggtaaagtggatattgttgccatcaatgaccccttcattgacctcaactacatggtttacatgttccaatatgattccacccatggcaaattccatggcaccgtcaaggctgagaacgggaagcttgtcatcaatggaaatcccatcaccatcttccaggagcgagatccctccaaaatcaagtggggcgatgctggcgctgagtacgtcgtggagtccactggcgtcttcaccaccatggagaaggctggggctcatttgcaggggggagccaaaagggtcatcatctctgccccctctgctgatgcccccatgttcgtcatgggtgtgaaccatgagaagtatgacaacagcctcaagatcatcagcaatgccttctgtaccaccaactgcttagcacccctggccaaggtcatccatgacaactttggtatcgtggaaggactcatgaccacagtccatgccatcactgccacccagaagactgtggatggcccctccgggaaactgtggcgtgatggccgcggggctctccagaacatcatccctgcctctactggcgctgccaaggctgtgggcaaggtcatccctgagctgaacgggaagctcactggcatggccttccgtgtccccactgccaacgtgtcagtggtggacctgacctgccgtctagaaaaacctgccaaatatgatgacatcaagaaggtggtgaagcaggcgtcggagggccccctcaagggcatcctgggctacactgagcaccaggtggtctcctctgacttcaacagcgacacccactcctccaccttcgac

SEQ ID NO: 20022 - DNA, 482 bp, Homo sapiens
ggcctccggggcaccgaccgctataaggccagtcggactgcgacacagcccatcccctcgaccgctcgcgtcgcatttggccgcctccctaccgctccaagcccagccctcagccatggcatgccccctggatcaggccattggcctcctcgtggccatcttccacaagtactccggcagggagggtgacaagcacaccctgagcaagaaggagctgaaggagctgatccagaaggagctcaccattggctcgaagctgcaggatgctgaaattgcaaggctgatggaagacttggaccggaacaaggaccaggaggtgaacttccaggagtatgtcaccttcctgggggccttggctttgatctacaatgaagccctcaagggctgaaaataaatagggaagatggagacaccctctgggggtcctctctgagtcaaatccagtggtgggtaattgtacaataaattttttttggtcaaat

SEQ ID NO: 20023 - DNA, 350 bp, Homo sapiens
ggaactcttccaatccatcatggaacacaacgtagcctatcccaagtctatgtccaaggaagctgtggccatctgcaaagggctgatgaccaaacacccaggcaaacgtctgggttgtggacctgaaggcgaacgtgatatcaaagagcatgcatttttccggtatattgattgggagaaacttgaacgcaaagagatccagcccccttataagccaaaagcttgtgggcgaaatgctgaaaacttcgaccgatttttcacccgccatccaccagtcctaacacctcccgaccaggaagtcatcaggaatattgaccaatcagaattcgaaggattttcctttgttaact

SEQ ID NO: 20024 - DNA, 371 bp, Homo sapiens
gcatatccctttggccagaactgagtcatgtggtaatccttatgtgcaggagagactcagagcttgggaattcactattctagcctccgtggtagagattaccccagaagagagaaagtgatggtaatggattctggattaaccattatgagtcaagcccaaattatcacataatcaaaggaaaataatacatctaagcaccaaactacaaaaagctaaacagcagtttaaaaatgatcaaagattatgcagccagaggcagcaacatcagccaataaaggtaacaccaaccaaaagcgattgaccaacactaaagtgctttagacttgcttggctttcatttagcatctcatgaagtatttcttctctta

SEQ ID NO: 20025 - DNA, 461 bp, Homo sapiens
  misc_feature (1)...(461): n = a,t,c or g
gctgggttgtgggactaaatccaccgtcacaggcagtgtcagcatggagtagactctctcccgtccattctgccttttgttaggtgactgtcccttgaggatctctttgctggcggtgcactctgaggagccggcggggggtttcaggtgagggagcacaggctttggcatctcccgggtggaatcccagccccatcactcactgctggccacctgtgtgagtcacttcacttttcttggcctccgtttcctcgtctgcacctcctttttgggttatgctgaggatgaaatgaggaagcacccacctggcaccggttgggcctgaggcagatgatcaagaagtggatgcttctagaaagccaaacacaggaaagtgtggaccctgcttggcagcatgccgagtacgtgtttttcttggcaaaaccatgatcacttacctggganctctnttacngggaatt

SEQ ID NO: 20026 - DNA, 426 bp, Homo sapiens
tttgaacacttgactgattacgaatttaatacgactcactatagggaatttggccctcgaggccaagaattcggcacgagctgagatgatggctactatcaaaaaagataatagatagcacaagcgttggcaaagatgtggagaaacagcaaagattgccagaaaaccactagaaacaatgggaaaagcatgaaacaggttcttcctcacagcccttagaaggagccaaccccggtcccggcgcggtggctcactcctgtaatcctggcactttgggaggctgaggcagacagatcaccgaggtcaggagatcgagactatcctggctaacacagtgaaaccccatctttattaaaaatacaaaaaattagccgggcctggtggcaggcgcctgaagtcccagctactcgggaggctgaggcagga

SEQ ID NO: 20027 - DNA, 378 bp, Homo sapiens
gaacagatgtagagaaatgagtctcatgcctgtaatcccagcactttgggaggccaaggtgggtggatcacttgagcctaagagatcaaggctgcagtgagccatgatggtacccctgcactccagcccaggttacagagcaagggcctgtctcagcaaaacaaaacaagcacaggccaaggagtgagatagccagcgctgatggtatctgcctcgtagtgcatgaagtgcatgtcatacactaagcagccagccagtgttggctgtcagtgttattactcacatgctttattttatttaagactttgagatagttcatgaagtgggtattattatcaatttccattttataggtgaggaaactgagcccagtgaagt

SEQ ID NO: 20028 - DNA, 401 bp, Homo sapiens
gaagcaaagtacctcatcccctcagtgactaagaatcgcagtatttaagaggtagcaggaatgggctgagagtggtgtttgctttctccaccagaagggcacactttcatctaatttggggtatcactgagctgaagacaaagagaagggggagaaaacctagcagaccaccatgtgctatgggaagtgtgcacgatgcatcggacattctctggtggggctcgccctcctgtgcatcgcggctaatattttgctttactttcccaatggggaaacaaagtatgcctccgaaaaccacctcagccgcttcgtgtggttcttttctggcatcgtaggaggtggcctgctgagtggctgctgtggccatgaaaactgtggcaaacgatgtgcggtaccttctg

SEQ ID NO: 20029 - DNA, 348 bp, Homo sapiens
cccaaaagtaaaattagccagaggcataaatataacagtgtccccaagaactattaatacaacaagaaaatatgaagagtttcagtctcactggtaattaaggaagtgtaaattaaaataaaatactattttatacctttcaaactagaaaacaataaagcagtatagtctgagttatagggtagcaggtataattatttattttaaatttataatactgttgtgtaggcgagcaactacagtcaccatcaactgtgaacattcatgtggataattttgaaatagatggaaataattgcgacattaggataatagtataatgaaactagtataaataaataacaatat

SEQ ID NO: 20030 - DNA, 358 bp, Homo sapiens
gaaatggcacagatggagtttcttttcaggaagaacactctgacagctgcatggaagcccagacaccaggaaaccctcagattggaggctggtgtcccggagcagtgcaaggtaagggcctggctgggttggggcagtgggaatgggaggaggaggcctgttggagagaaatttcagaagcaggactgacaacatctttttgaaaaacagtgattgggattgtagctaatattcttagaagatggttaccactctggtatttgaattacttataaaacattgaagggatgaaattttaattgaatacacatattacttgaatacaatttttgaaattatttttaaaatacaacttaat

SEQ ID NO: 20031 - DNA, 319 bp, Homo sapiens
gaaactggaccatcaatattcaggacaaagatcttggcagggggaagggtactgggagcaaacattagtgtctttttattcctgggtcctgaatgccatgtagacctcagggattgcaggtgcacgacgccgtgcccggcccctctctcacttctcgggtgtcttctccgcatagcagccaaagcagtcgttgcagaatttggatgggaataacattacactctcacctcaggagagttagaagccttgggcatattaccagtggcagaccctaatttctataaagagctgagactagggcatgatggtgagaagatgg

SEQ ID NO: 20032 - DNA, 536 bp, Homo sapiens
  misc_feature (1)...(536): n = a,t,c or g
ggtgttnnnattggannttgganacngnttgacatgattacgaatttaatacgactcactatagggaatttggccctcgaggccaagaattcggcacgagctaatattgcaggaggggcctctcttccaagccccaccctaagggttagcccttggccaaatcttttgccgtctaggcccagccaggcttttctgactaaataagcaataagaggctctaagctgactgagttgcaaggaccctttccgccctcccttggatctccatgtttttccagatggcggaagagcatgtgccaccccctttcctaacagacttgtccaagtgcttggcgtgggacccatgaccaaagcccaggatggcttggtgggagtgtccctgctgcatctgcatgaagcccctgctttttaggcctcactcccatcagaaccctgcctgccacctgcaactcccccccaacaatgccattcccacttgcccagagaagctactcggccaaacctagccagggtctgttnttggggnccananccac

SEQ ID NO: 20033 - DNA, 441 bp, Homo sapiens
gacacgattacgaatttaatacgactcactatagggaatttggccctcgaggccaagaattcggcacgagcggtgcctatgggttcccggtgtacctaaagggagaaggaccccatgtgctagccagaaatatactgtctcttgaaggaaagcaggagctcagactcttagagccagctgtggcttcggacccaaggcctgacctaggctgctatcctaatattgcaggaggggcctctcttccaagccccaccctaagggttagcccttggccaaatcttttgccgtctaggcccagccaggcttttctgactaaataagcaataagaggctctaagctgactgagttgcaaggaccctttccgccctcccttggatctccatgtttttccagatggcggaagagcatgtgccaccccctttcctaacagacttgccaag

SEQ ID NO: 20034 - DNA, 357 bp, Homo sapiens
gaacatggcggatcggctcacgcagcttcaggacgctgtgaattcgcttgcagatcagttttgtaatgccattggagtattgcagcaatgtggtcctcctgcctctttcaataatattcagacagcaattaacaaagaccagccagctaaccctacagaagagtatgcccagctttttgcagcactgattgcacgaacagcaaaagacattgatgttttgatagattccttacccagtgaagaatctacagctgctttacaggctgctagcttgtataagctagaagaagaaaaccatgaagctgctacatgtctggaggatgttgtttatcgaggagacatgcttctggagaagat

SEQ ID NO: 20035 - DNA, 478 bp, Homo sapiens
  misc_feature (1)...(478): n = a,t,c or g
ttannngaagngncatnnanntntanannaagtagtanngangnnntgtgatnacantngaggtaccgctatgacatgatacgaatttaatacgactcactatagggaatttggccctcgaggccaagaattcggcacgaggatgcatgaatctttaagaaataactttgttttgtatatacttttccaatctctttaacaaagggcaagaacagaaaacatgctgatgacatgtgcatttgttacatgatcatgtcagctgtgttgagggcacatttgctcctagggaataaaatcagctcaagatagcttagataaagggggacgaacttaaagagtatagcaggcagtctcataaacatctaaagagaggcaaagaaagatcattaagaccacatgggactagaaatggaaagccagggactttcattgacattttttgcttctcaagaccatatggcctttcatttttgcattt

SEQ ID NO: 20036 - DNA, 579 bp, Homo sapiens
ggccccgggcggcgagacggtccccgccatgtctgcggccatgagggagaggttcgaccggttcctgcacgagaagaactgcatgactgaccttctggccaagctcgaggccaaaaccggcgtgaacaggagcttcatcgctcttggtgtcatcggactggtggccttgtacctggtgttcggttatggagcctctctcctctgcaacctgataggatttggctacccagcctacatctcaattaaagctatagagagtcccaacaaagaagatgatacccagtggctgacctactgggtagtgtatggtgtgttcagcattgctgaattcttctctgatatcttcctgtcatggttccccttctactacatgctgaagtgtggcttcctgttgtggtgcatggccccgagcccttctaatggggctgaactgctctacaagcgcatcatccgtcctttcttcctgaagcacgagtcccagatggacagtgtggtcaaggaccttaaagacaaggccaaagagactgcagatgccatcactaaagaagcgaagaaagctaccgtgaatttactgggtga

SEQ ID NO: 20037 - DNA, 492 bp, Homo sapiens
  misc_feature (1)...(492): n = a,t,c or g
gggcttggccacttaatagtaattccacttttctggaataaggctgagaagaaacagtatacagtaaccagttggtgacctgcatggagggaggcaagggcctcttagacctcgtggctctcttttgctgggtttgtcttctcagctaagggttccaacggcctgccctcacccaggcagcctgctgtcacccaggcgtgtgccaaacactgttcatctgtgtttcctttcactagtcacagcaaccccatgaggaagggtttagccccaatttataagccagaaacaaaggctctgtgagtgagctagtcacacagccctgatgaagtaaggccaggtctctggcccaggtctgcccagcccacattctttttcctgcatcaaaccgcctttactgggaggtgtacaaaaatggcaaaatcaccccattcacaattntcaaggcttcaaccgcaaggggcaaaccaantttggcccaattggggtcccgga

SEQ ID NO: 20038 - DNA, 370 bp, Homo sapiens
  misc_feature (1)...(370): n = a,t,c or g
ggccagcgcaaggtcatctgcctgctcaaggagcagatcagcaatgagggtgaggacaaaatcttcttaatcaacaagcttcactccatctacgagaggaaggagagggaggagaggagcagggttgggacaaccgaggaggctgcggcaccccctgccctgctcacagatgaacaggatgcctagggggacggcgatgggcctcacgggcccgcccagcaccctgagaccacactgttgcctcccagtgaccctgctgggacaccannnnnnggaagacagtttcgcctntcgaaagccgaactgcgcctaagcttgancttgaaaggtgggtgaaacccggtttngncattcccaanggaactttgcc

SEQ ID NO: 20039 - DNA, 486 bp, Homo sapiens
  misc_feature (1)...(486): n = a,t,c or g
agacctcccgggctctgcctggatgtgaatggaagctctccactctacaaagcatatcatattattgaagagctctgtgtgtaagaaagttcttatattaaatggaaatttgcttttatatgagttaaattcattggtcctagttgtgctttctaggagtcacacaaaatttaacaaaaatcaccatgcttccactcttccaatcttatgcttctattgaaataaagctctttattagagtagcaatacaatagagcaggaattaaagaaatataacacctgggcaaatttaagtgcctttgcatctcaaaccacacatctacttacccattcattcatctgtctttttcccacttcacccatctgcccatccagttagccagcacatataattagatatgtgctggctaacatgagacagagatgaataagaaatagcttttaaagctacttaaaaaagaaataattaacaacaacaacnacaac

SEQ ID NO: 20040 - DNA, 325 bp, Homo sapiens
gtcaataccctgctctggttctcagcatgaggctcagttgttggccatggaggctgagggcgatgccagaggactatgagctgttctgtgcaacagaacaataggcatcatcagccccaggacccacaaggcacccatgacccagagtgggtgctgtgggtgggccacagctgaaactgggcccagcgtgaggcggctgtgcttccaggcctggagtgactctccggatattttggccatgggatctgcggctctgcctgccccacagggcatagctgatttctctgctgtgaatcccaaccgctctgaccaaaaaaaaaaaaaa

SEQ ID NO: 20041 - DNA, 413 bp, Homo sapiens
ggggaaacgaaccattcagtccataacacccctcaaaaaaaaaattactgtcctgtgatctcctgtagactgagctattagcttgtggcattttccttctagatgttgaatgttttaaaggcagatttaggtctaattaatatttgaagtgttcaaaatgtaaatgcatcatacagacctaagaaaactattttctaagcaaatccaaattaaagcctgattcagaataatttattttaaactaaaaccaagtagtctcttgtgccaaagtagcaaaattttctgccaattcacagaaaagggcaaattattatttattcagatgcagtccagaatctaagaagaggtacagccagatggatggactggatgacttaactatagcagaaaaaagtataaattgaaggttttct

SEQ ID NO: 20042 - DNA, 448 bp, Homo sapiens
  misc_feature (1)...(448): n = a,t,c or g
gccctgaggccgctgaggtcgttcgtgtctgttgaacggctgtgggcgtcttgctgccttggaagtgagcttgtagtggacaaaacaaagaggaaaaaaagaagagaactgtctgaggaacagaaacaagaaattaaagatgcttttgaactatttgatacagacaaagatgaagcaatagattatcatgaattaaaggtggcaatgagagccttggggtttgatgtaaaaaaagctgatgtactgaagattcttaaagattatgacagagaagccacagggaaaatcacctttgaagattttaatgaagttgtgacagactggatattggaaagagatccccatgaagaaatactcaaggcatttaaactatttgatgatgatgattcaggtaaaataagcttgaggaatttgcgacgtgttgctaganaattgggtgaaaacatga

SEQ ID NO: 20043 - DNA, 369 bp, Homo sapiens
gttgatgaccttcgtcgcttatgcatactcaggatgagttttgtgaaaggctggggaccggattacccaagacagagcatcaaagaaacaccttgctggattgaaattcacttacaccgggccctccagctcctagacgaagtacttcataccatgccgattgcagacccacaacctttagactgaggtcttttaccgttggggcccttaaccttatcaggatggtggactacaaaatacaatcctgtttataatctgaagatatatttcacttttgttctgctttatcttttcataaagggttgaaaatgtgtttgctgccttgctcctagcagacagaaactggattaaaacaatttttttttttcc

SEQ ID NO: 20044 - DNA, 403 bp, Homo sapiens
gtttcacaattagtggtggttcttttccatgtttgttttgcactttaaaaaagagagaacacatgcaaatgaacttgcttgtgtgtatttgatggctccaagggctataaattacaaacaaaacacatcccagacattaggagttcataagtatatttaatgaaattggtggttttaggaagtcaactttagttttgctttgtttgcatgtccactaatttttttattttgatattagtcttttttaaaaaattttacagtagtcattgaaagttatgtttctttgtttacttcattttttcctctaaatattcaagactgggacaaaagtataaatattatttatttcaggtagaatttttttggtgtagttttttaatatatacttgaaggaaatgtttca

SEQ ID NO: 20045 - DNA, 388 bp, Homo sapiens
gcagctggacaaagccctattctccgcagccccagcctctatcctgaggcctctgggagccgcgtgacggccagcatggggtgctgatcatggtcaaggaggcaggtctttgccaggttgccccatgcagccacccatcctcagcatcctaacttgagggggcaggagagggctttgtttttataatccggattaaatttcccttccctgggcacaagtgcctcatgagggcccggggctgctggttgggagggaaagcatccccgtttttgcagtgaggaggccggccgagggctggggttccacttagacccttggcagaatggctgttgaggggcaggcgctgccagtgcccacgtctggaaagctaattcccgggtggacgctg

SEQ ID NO: 20046 - DNA, 47 bp, Homo sapiens
ccaggtggggcgaacagcacgtgctggcagggctgggcgctcagtct

SEQ ID NO: 20047 - DNA, 386 bp, Homo sapiens
  misc_feature (1)...(386): n = a,t,c or g
cccacgcgtccgaattaatccccttccccactcccaggcactactaatctttctgtctctgtagatttgtattttctggatgctttatagaaatggaatcatatagtatacagacctctgtgcctagcatattcttttttatttttattttttgagacagtgtctcactctgtcactcagagtggagtgcagtggcacagtcactccagcctcaatcttcctgggctcaggtgatcctcccacctgagtagctgggactgtaggcatgcaccaccatgcccagctaaagcatattctttaaaacaatattcagttactttgtcaacactaaataatttaccctctcccatctaaatcactgncatcttctcttcaaagttgttaac

SEQ ID NO: 20048 - DNA, 712 bp, Homo sapiens
gcagcgaaaaagaatgagccctaagcctgagcttactgaagagcaaaagcaggagatccgggaagcttttgatcttttcgatgcggatggaactggcaccatagatgttaaagaactgaaggtggcaatgagggccctgggctttgaacccaagaaagaagaaattaagaaaatgataagtgaaattgataaggaagggacaggaaaaatgaactttggtgactttttaactgtgatgacccagaaaatgtctgagaaagatactaaagaagaaatcctgaaagctttcaagctctttgatgatgatgaaactgggaagatttcgttcaaaaatctgaaacgcgtggccaaggagttgggtgagaacctgactgatgaggagctgcaggaaatgattgatgaagctgatcgagatggagatggagaggtcagtgagcaagagttcctgcgcatcatgaaaaagaccagcctctattaagatcagtgtcttctttttctactgcaagcacatgtaactagatttagtgcctgccatggtgtgaaatctggcttttgagaacacaaacttttcccccacggacctccctttatcactttaatagtgaccttgagcctattttagccgtttggaagtgttctttgatattacagttctttgtaaaatgacctgcgaattaccctaattctcaaaagcaaaacaagagcacacaag

SEQ ID NO: 20049 - DNA, 503 bp, Homo sapiens
cagctatgacatgattacgaatttaatacgactcactatagggaatttggccctcgaggccaagaattcggcacgagcttggattagaggtcaggcaggggtctcaggacaatcccatccgcatgagccctagggttccatgggcatttggtagaacccatgtcctggaaagttggttggagaaataccttagtggagaaatggagaatgaagaccttgtgttttatgatctgagcttggagaaccctgattggatggcactgctggtctagccactaccaggcatagaggaagctacagaaaatgtatagaaaaacactccaaagtgtgagatccttctagaactggaaatatgcaggcctatgtactatagtctgaatgcttttgtcctctgaaaattcaaagatggaaacctaatctccaacgtgatggtatcaggaggtggggccctttgggaggcaattaggtcatgagggctcctcagcatccagataaaaggtact

SEQ ID NO: 20050 - DNA, 432 bp, Homo sapiens
  misc_feature (1)...(432): n = a,t,c or g
tttgncccccccntcnatgacntgattacgaatttaatacgactcactatagggaatttggccctcgaggccaagaattcggcacgagatcacaacaactaacatgtcttgagcacctaatatattcacgaccctctttagaaatatttcttcatctaacatctagaaatgttattttatgtaatccccacactggtctgcaaagtaattattcttatctccatattgtggttgacagaaatcaagggctagagaagttgtatccatctttggctgctcaagagtctattcggttcaaacaaaagactttgacttcttccctcccctctagactttcctgtgggtttgatgaataaaacataatgatcctaaccacttgtcacccaaactagaggagttttacaatgttaaactaaaaagatgtttgttagg

SEQ ID NO: 20051 - DNA, 350 bp, Homo sapiens
ctttccttagaaatgtggaactcaccaaacctatgcaaatcctctacaagggcactttaagagtgctgctggttcttttgcatgatttcccagagttcctttgtgattaccattatgggttctgtgatgtgatcccacctaattgtatccagttaagaaatttgatcctgagtgcctttccaagaaacatgaggctccccgacccattcactcctaatctaaaggtggacatgttgagtgaaattaacattgctccccggattctcaccaatttcactggagtaatgccacctcagttcaaaaaggatttggattcctatcttaaaactcgatcaccagtcactttcctg

SEQ ID NO: 20052 - DNA, 357 bp, Homo sapiens
gctggaaaagttacagagggaaagcattaagacatggaaaacattctgagaaactccagtgaaatacgtctgtgggagacaggaactgttgtgaacttggagtacgtgtgatttgaagcctagagcaggaggcagctcatggggctctggagctctggctctaagccagcagggactgattcactttcaccatgtggcaatgcagaagcagctgggttgttctccaggttgtggatttaagcctggatccctgtaacttagggaaagagttgatggaattttctttctttgcttctttccttccttccttccctccattcctccctccctctcttctcttctactctcttctctttt

SEQ ID NO: 20053 - DNA, 226 bp, Homo sapiens
cagctatgacatgattacgaatttaatacgactcactatagggaatttggccctcgaggccaagaattcggcacgagcccaaattgcttggaaatagttagatcatttgatttaattttcacttttataaaataagtgtaggaatcctaaaattgattatttcatttgaaacacaaattcagtaggacgtaatgcatgaaataatttaatttttgacatgtacatc

SEQ ID NO: 20054 - DNA, 344 bp, Homo sapiens
gaccgatgttcagaagaagattatcccatggaacagtcgtgtttccgacttagacctggagctcctgtttcaggatcgtgctgccagacttggaaagtcaattagtagactcatcgttgtggcctcgctcatcgacaaaccgaccaatttaggaggactgtgcaggacctgtgaggtatttggggcttcagtgctcgttgttggcagccttcagtgtatcagcgacaaacagtttcagcacctcagtgtctctgcagaacagtggcttcctctagtggaggtaaaaccacctcagctaattgattatctgcagcagaagaaaacagaaggttataccatcattg

SEQ ID NO: 20055 - DNA, 464 bp, Homo sapiens
  misc_feature (1)...(464): n = a,t,c or g
ttgganaccgtttgacatgattacgaatttaatacgactcactatagggaatttggccctcgaggccaagaattcggcacgagggtaaccaacctgaacgactaccgagaaaatgtgttcaagctcctcccgcaactcacatatctcgacggctatgaccgggacgacaaggaggcccctgactcggatgctgagggctacgtggagggcctggatgatgaggaggaggatgaggatgaggaggagtatgatgaagatgctcaggtagtggaagacgaggaggacgaggatgaggaggaggaaggtgaagaggaggacgtgagtggagaggaggaggaggatgaagaaggttataacgatggagaggtagatgacgaggaagatgaagaagatgaagatgaagaagaagatgatgatgatgaataagttggttctagcgcagtttttttttttngnctntaaag

SEQ ID NO: 20056 - DNA, 415 bp, Homo sapiens
ggtttaagaaagcctcagagacaaacccccacttgaaagatgaatgagtaaaataacttacaaaagaggcatattctgcttctctctgaggcctccacagaagtgatatatactttatatgattccaagttgtaatcattagtgtttcatatatttagggatggcaatatatagtagaacatgtagtttggttattttctaaagatgttttgaataaagtccttccttccctgccaaccttaccactgctataggaatattgggtaaaatgcccattgtacggggtcacttcttttttttccaggccacccagaaagaagtttaccaaggcagctctaaagagcttcttagaccaagtccctttaagaaaaccaagtatcatcggggagaggcccttggaaaattttaaactgcc

SEQ ID NO: 20057 - DNA, 538 bp, Homo sapiens
  misc_feature (1)...(538): n = a,t,c or g
gtgntnaaatntgatnctncngnatacccttatgaatgactacgaatttaatacgactcactatagggaatttggccctcgaggccaagaattcggcacgagtttttagctagtgtttttcctcgcttttaatgacctcagccccgcctgcagtggctagaagccagcaggtgcccatgtgctactgacaagtgcctcagcttccccccggcccgggtcaggccgtgggagccgctattatctgcgttctctgccaaagactcgtgggggccatcacacctgccctgtgcagcggagccggaccaggctcttgtgtcctcactcaggtttgcttcccctgtgcccactgctgtatgatctgggggccaccaccctgtgccggtggcctctgggctgcctcccgtggtgtgagggcggggctggtgctcatggcacttcctccttgctcccacccctggcagcagggaagggctttgcctgacaacacccagctttatgtaaatattctgcagttgntacttaagaacctggggagggc

SEQ ID NO: 20058 - DNA, 373 bp, Homo sapiens
ggccagctgacttgagtagtaactgtccacctcatggactgatctcagctatgagaatggtagtggagcatggtgttttgcctgcgacacacaggagtcatccccagctgtttttagaagatatgttggtaaagttaagggaaaccacttggcagggaatggcaaacacagcagtcagtttaaaaatgcttatagccattggagagacctgcaactgagcatttttcttaatttgaaaggttctaggggcagttctgaaagacaaaggtggtttgttttgttttgtttttggagacagggtctcactgtgtcacccaggctggagtgcagtggtgcaatcacagctcactgcagctgtaacttcccaggctca

SEQ ID NO: 20059 - DNA, 523 bp, Homo sapiens
  misc_feature (1)...(523): n = a,t,c or g
ttggnattgcttcantgattacgaatttaatacgactcactatagggaatttggccctcgaggccaagaattcggcacgagttgtgctaagcactggaaaattgagatgtattatcacttctctgacgcagaggactggcaactccagtacatactgtgggggctccctaatcccagattcaatgtcacagtatcagttgaggaccttggagatcaaatcccttctataacctccccgacaagtggcagtctagactttgaactccagctaggagcccaggacagctgcttactcctgttaccatttccttgtcatgtcctcaggaactgggaccaatcacatacttctcactagtgataccttgggagccatctggggagaggctttaaaacctattaaaccagcagctcttcaaatgtggtcctcagacccctagggttccctaagaccttttcaggggtccataggtcaaaattattttcataaaaataccaagacattattttccttagctggggatgg

SEQ ID NO: 20060 - DNA, 939 bp, Homo sapiens
  misc_feature (1)...(939): n = a,t,c or g
ttgacatgattacgaatttaatacgactcactatagggaatttggccctcgaggccaagaattcggcacgagccgtgagtaacttggctccgggggctccgctcgcctgcccgcacgccgcccgccacccaggaccgcgccgccggcctccgccgctagcaaaccctttcgacggccctcgctgcgcaagccgggacgcctctcccccctccgcccccgccgcggaaagttaagtttgaagaggggggaagaggggaacatggacatgaagaggaggatccacctggagctgaggaaccggaccccggcagctgttcgagaacttgtcttggacaattgcaaatcaaatgatggaaaaattgagggcttaacagctgaatttgtgaacttagagttcctcagtttaataaatgtaggcttgatctcagtttcaaatctccccaagctgcctaaattgaaaaagcttgaactcagtgaaaatagaatctttggaggtctggacatgttagctgaaaaacttccaaatctcacacatctaaacttaagtggaaataaactgaaagatatcagcaccttggaacctttgaaaaagttagaatgtctgaaaagcctggacctctttaactgtgaggttaccaacctgaatgactaccgagagagtgtcttcaagctcctgccccagcttacctacttggatggctatgaccgagaggaccaggaagcacctgactcagatgccgaggtggatggtgtggatgaagaggaggaggacgaagaaggagaagatgaggaagacgaggacgatgaggatggtgaagaagaggagtttgatgaagaagatgatgaagatgaagatgtanaaggggatgaggacgacgatgaagtcagtgaggaggaagaagaatttggacttgatgaagaagatgaagatgaggatga

SEQ ID NO: 20061 - DNA, 400 bp, Homo sapiens
ccacgcgtccgaccgtcgcgtgcgcctgcagacgctccgctcgctgccttctctcctggcaggcgctgccttttctccccgttaaagggcacttgggctgaaggatcgctttgagatctgaggaacccgcagcgctttgagggacctgaagctgtttttcttcgttttcctttgggttcagtttgaacgggaggtttttgatccctttttttcagaatggattatttgctcatgattttctctctgctgtttgtggcttgccaaggagctccagaaacagcagtcttaggcgctgagctcagcgcggtgggtgagaacggcggggagaaacccactcccagtccaccctggcggctccgccggtccaagcgctgctcctgctcgtccctgatggataaag

SEQ ID NO: 20062 - DNA, 438 bp, Homo sapiens
  misc_feature (1)...(438): n = a,t,c or g
ggggaaaatttatttatttattgtttattagttatggggggagaggggagatttaaaggaccagggacatgggaaccaagccatagggatcagagggccttgtccttgaacactactggggtatattcaggctcatccacgcagctgctgggttcttgccctaacggccctcccctgcaacatccgtcttggaggagaggctgcagccacagcaccctactgccctttaaataaaggagggctgtgggcagggccatgtccctttctcctctcccctcaacctcttactgctgttctccctttctccgtccttcatggaagccctgggagataacctggcttcctggagttgatggaataaaggttggggtggccataatggtttgttgggggtgagggaaaaaacccacagggaccagnntgttttgttgttctttt

SEQ ID NO: 20063 - DNA, 527 bp, Homo sapiens
  misc_feature (1)...(527): n = a,t,c or g
tttgnnncctttgaannccctaacagctatnacatgattacgaatttaatacgactcactatagggaatttggccctcgaggccaagaattcggcacgagcggcacgagggggtcacggtgtttgccgtggggaagtacactcatttcatccagtccttcctggagtcagccgaggagttcttcatgcgtgggtaccgggtgcactactacatcttcactgacaaccctgcagccgttcccggggtcccgctgggtccccaccggcttctcagctccatccccatccagggtcactcccactgggaggagacatccatgcgccggatggagaccatcagccagcacattgctaagagggctcaccgggaggtggactacctcttctgccttgatgtggacatggtgtttcggaacccgtggggccctgagaccttgggagacctggtggctgcattcacccaagctactacgccgttccccgcagcagttcccctatgagcgcangcgtgttcactgctttgtggca

SEQ ID NO: 20064 - DNA, 246 bp, Homo sapiens
gtttttttttagcaaagatgattagagaaggcccaaccaagcagataacatttaagcagaggcctaaatcatataagtgagttatacaaatatctgggaaaagagttaagagtacagatgcaaaagcccttagacaagagaatgagcttggtatatctgaagagtggataagtcattttgactgaaacagagtggacaagaaaaccagtccaagtgtaaagacactagtgtgtgttcagcatagga

SEQ ID NO: 20065 - DNA, 621 bp, Homo sapiens
  misc_feature (1)...(621): n = a,t,c or g
gaaaatttatcaacagttgtctgctaccctggaaagagccctgcaagcaaacaagcatcacattgaagcccagcaacgtctgcttctggttacagtttttgccctaagtgttcattatcaaccagtagatgtttctttggcaatttccactggtctgctaaacgtattgtcacagttgtgtggtacagacaccatgctaggacagcccctgcagttgttgccaaagacgggtgtttcccagcttagcacagctttgaaagtggccagtacaaggttgctccagattctagccatcactactgggacctatgctgataaactgagtcccaaagtagttcaatccttgttggatctactctgtagtcagttgaagaatttattgtcccaaactggtgtactacatatggcctctttcggagaaggggagcaagaagacggtgaacaagaagaataaaaagttgactccagtggggaaactgagaanaaagatttcagagctgctcttaggaaacaacatgcagccgnaatcnancnaggggatttttagttttcttcgcagattgtcccttcaaangcactttnttcacaatgggttccccaanngngcccgngtgttttaag

SEQ ID NO: 20066 - DNA, 554 bp, Homo sapiens
  misc_feature (1)...(554): n = a,t,c or g
gtgnnnnnnnttttgaacnccttgacatgattacgaatttaatacgactcactatagggaatttggccctcgaggccaagaattcggcacgagggtgtctgctgtttttcagggtctcatttgctgtctaaggcaatatccgaatgctagttattattgcaatggcaattatgtcattcccattttataaaggaggcgaccctaggtgattggccaaaagttgtgaagccaagtgaccgagctggatctaaaactcatttttaatccaactttttatttatttgtttttagaaacagggtcttgctctgttgcctaggctggagtgcagtggcatgatcacagctcactgctgccttgaacttgtgggctcaggtcatcctactgcctcggccttccaagtagctgggactacaggcatgtatcaccatgctcagctaattaaaaaaaaattttttaagatggccgggtgtggtgtctcatgcctgtaatcccagcactttggagggccgaggcggcagatcacctgaggtcaggagtttgagattagcctgcc

SEQ ID NO: 20067 - DNA, 382 bp, Homo sapiens
gagctacttgggaggctgaggcacgagacttgcttaatacctgggaggcggagattgcagtgagccgagatcacgctactgcgctccagcctgagtgatagagtgagactctgtctcaaaaaaaagtatctctaaatacaggattataatttctgcttgagtatggtgttaactaccttgtatttagaaagatttcagattcattccatctccttagttttcttttaaggtgacccatctgtgataaaaatatagcttagtgctaaaatcagtgtaacttatacatggcctaaaatgtttctacaaattagagtttgtcacttattccatttgtacctaagagaaaaataggctcagttagaaaaggactccctggccaggc

SEQ ID NO: 20068 - DNA, 351 bp, Homo sapiens
gggcacaattcttcggatgactctcctggggtcaggcgattctcctgccttagcctcctcggtagctgggactactaggcatgagccaccagatccaactaattttttgtatttttagtagaggcggggtttcaccatgttggccaggctggtcttgagctcctgatctcaggtgatctgcccgtctcaccctcccaaagggctgggattacaggtgtgagccactgtgcccagccagaatattcacttctaaatgtgggtgtgtattcaggtgacttgggattaaaaaaaaaagaaaaaacccttatgggattttatatttagaaagtctgttgttgaaatatgaacctg

SEQ ID NO: 20069 - DNA, 352 bp, Homo sapiens
ggaatgtctaatggtgaaatgtaatctgtatctcccaaggccttagctctagcagctctgcccccttggcttgagttgccttggtaaccacagctggctctgagaaaccatgggaatgaagaatgggtcctattgatgaatcctgacccagaagggggcatgcagaaggcccttctaggcagggcagctgggcatggcctagtgctgccatctgtggtcttttgcctgcagagaacacaaaccagagagccagagcatggtgtgtgtgtatgttgggatcagggtaggggacacaaagggcagtgccagcagctggaatttaggccttgtttagggccagccagggtaggct

SEQ ID NO: 20070 - DNA, 438 bp, Homo sapiens
gactggatttactttaaagtagtaaaattcttaaaatttctgaatttctgaaaggctaaataagaaatagtttttgttgtcttttaagggcactgcaattcaatggcatatgatgtactcacttacaatgcaggtgatgcaattaagtggagaatgcacaattgaaaatttcatctactcaagtattgcaaaatgtgtatgaaaaaggaacatgggaaaatgaaaaaagctagttcataagcagggtagtagcatagattatttctgattaaagcttctattattttttcaaacactgttttgtaaaatagtaaaggtgataaactaaaacaaaaaaacacatacatgtcagcataccacatgtcctgaatatctgtttcccactaacctttccaagaaagagaaaaaataaatctggtatctttgagaaataaatcc

SEQ ID NO: 20071 - DNA, 335 bp, Homo sapiens
gcgcgctcttggaggacgacacctaccgatggtggctgaggctccagcgggagaagaagcccaataacttgaatgacaccatcaaggagctgttcagagtggtgcctgggaatgtggaccctatgctggagaagaggtcggtgggctgccggcgctgcgccgttgtgggcaactcgggcaacctgagggagtcttcttatgggcctgagatagacagtcacgactttgtcctcaggatgaacaaggcgcccacggcagggtttgaagctgatgttgggaccaagaccacccaccatctggtgtaccctgagagcttccgggagctgggagataat

SEQ ID NO: 20072 - DNA, 360 bp, Homo sapiens
gctcaatttaagcatctgaaacaaattacttagcaaaaaccattttcgttgtatccaaacccagtgtcttcagtttgagctctctgaaattccaaacacatgttcaaaccaccaggaaagagggaaagagagactgagaagagggggactgaagcagggaagtcactatgagattctccccaaaatcccgatgttcagcctctgggtgaaggacattccatcctgagacggagggattgctctcttcaccagcacctttctgaagtgtctgtgttagaggcagttcagtgctcacacagcagcctgaaattcttagtcctcccacacatctccagtcaaggagcactgtccatgcccctt

SEQ ID NO: 20073 - DNA, 420 bp, Homo sapiens
ctgagcgttctgaccatgaggacaatgacccctcagatgtagatcagcacagtggatcagaagcccctaatgatgatgaagacgaaggtcatagatcggatggagggagccatcattcagaagcagaaggttctgaaaaagcacattcagatgatgaaaaatggggcagagaagataaaagtgaccagtcagatgatgaaaagatacaaaattctgatgatgaggagagggcacaaggatctgatgaagataagctgcagaattctgacgatgatgagaaaatgcagaacacagatgatgaggagaggcctcagctttccgatgatgagagacaacagctatctgaggaggaaaaggctaattctgatgatgaacggccggtagcttctgataatgatgatgagaaacagaattctgatg

SEQ ID NO: 20074 - DNA, 391 bp, Homo sapiens
cccacgcgtccggaagatttctgaaactggaaagccatagcataactgaatcaaaatcgttgattccagtagcttggacatccctgacacagatgcttttggaagcacctggtattttcttattgggtcaaagaaaaagattctcaaccatgccagaaacagaaacacatgagagagagactgaattgttttcaccaccttctgatgtccgaggcatgacaaaacttgatagaacagcttttaaaaagacagtcaacattccagtgcttaaagtgaggaaagaaatagtcagtaaattgatgcgatccctaaaaagggcagcattgcagcgcccaggcataagacgtgtgattgaagatccggaagataaagaaagtagactaatcatgtt

SEQ ID NO: 20075 - DNA, 422 bp, Homo sapiens
gccaaaacacaaatctagaattgcaaagccagcctttatttccctggcaggcagccttgccagaaggcagagaggcagttctgaatcattctctcattcaccagtggtgacatccttcagtccctcacatctctgacagagtgggagagaatggatatttggctgaccttggtgagacctggagctgcctctttcttccctaggggatcaccacggctctagggcattctaggatgaggtcagaccccttggccattggtgttattttttgtatagcttcagactgggttccagaacttaccattgaaaacagagcttttaggccaggtgtggtggctcacacctgtaatcccagcactttgggaggccgaggcaggtggatcgcttgagctcaggagttcgagagcagcctgggcaacatg

SEQ ID NO: 20076 - DNA, 325 bp, Homo sapiens
tggactttcacttccactctcccgctacacttgttttcaccatccactagcctcagctccttgtctgttcctccaagagaactggtgacaaaacaggcactgagaagtaagaccacagtaatggtgaagggactcaagttgacaaaatgtcttctgaagtcagcagatccagagtcttcaagtagcaccattctgagtttgctcattccaaagatttataacttcaatgattcctaaatcttcttgtattattccctagaaatgttcgtcgacgcggccgcgaattccagatctatgaatcgtatatactgaaaaaccccgcaag

SEQ ID NO: 20077 - DNA, 360 bp, Homo sapiens
gcacccagaccgaaaaccccagagatcttcagggctctggaaggggaggctcaccgtgtgctatttgggtttgtgcctgagacaaagaagagctccaggtcatgccagggaacattgtctttgtcttgaagaagggcaatgataactgggccacggtcatgttcaacgggcagaaggggcttgttccctgcaactaccttgaaccagttgagctgcggatccaccctcagcagcagccccaggaggaaagctctccgcagtccgacatcccagctcctcctagttccaaagcccctggaagaccccagctgtcaccaggccagaaacaaaaagaagagcctaaggaagtgaagctcagtg

SEQ ID NO: 20078 - DNA, 458 bp, Homo sapiens
  misc_feature (1)...(458): n = a,t,c or g
tgacatgattangaatttntacgactcactatagggaatttggccctcgaggccaagaattcggcacgagcggggcaagtgagagccggacgggcactgggcgactctgtgcctcgctgaggaaaaataactaaacatgggcaaaggagatcctaagaagccgagaggcaaaatgtcatcatatgcattttttgtgcaaacttgtcgggaggagcataagaagaagcacccagatgcttcagtcaacttctcagagttttctaagaagtgctcagagaggtggaagaccatgtctgctaaagagaaaggaaaatttgaagatatggcaaaagcggacaaggcccgttatgaaagagaaatgaaaacctatatccctcccaaaggggagacaaaaaagaagttcaaggatcccaatgcacccaagaggcctccttcggccttctttctcttctgctctg

SEQ ID NO: 20079 - DNA, 41 bp, Homo sapiens
aaatgcagagtctgcaccccactgtgcatatgaccaaaagt

SEQ ID NO: 20080 - DNA, 375 bp, Homo sapiens
cttattttcattaaagagaatatgtcatttcctgaaaatgaaagatgtgggtttgaatagagagttggcaaaatttggtatttatttgaaattggcatttatttgggaagataatgtagggtaactaatccacttagatgatacctattaactataaactatgtaccaggtactttgctataatataaaggcaatggaaaaaccaagattcaatcttgatttgacatccttaacatttacagtgtcgtggtggaaactatgtaaagaatccagtgtgatagaaggtggtagatgtggaaacaggaggtttagaaaaagctccaggacacactgctgatacatctaactcaggatcagggcattaaagaaagcatc

SEQ ID NO: 20081 - DNA, 559 bp, Homo sapiens
  misc_feature (1)...(559): n = a,t,c or g
gccaatttccaccttacccactgagacagtcccaaagacaagggaggtatttgcccatgggtttagggcaggatacctacatttcctggcacccagctcactgttcttcccacaacagcagctcattccagctggaaggatggcatggtggaggtaataaagatggctcatcactggcctctgtggccaatgaagcggaatgctctctctattctccctgcttcaattaacaggaagaaggtcttggctgtagaactcttggctgacaaggggcctgggttgatctctatggcagatgccatgcctttgttaatgggcatggccacagcaggtagctgaatgatagcctgtgccaggcaggactggaaggatttaccccaggctttgacggactagctttctccatgagagatgcccccttcttnaccctcaccaggcatggacacagctcagtctgatcacggtcanaatctagtgagccagcaggcaagcatctntggcaccaatatatttgatgaactactttaanaccagccgaggangccagcacantngtcat

SEQ ID NO: 20082 - DNA, 358 bp, Homo sapiens
  misc_feature (1)...(358): n = a,t,c or g
gctgagatctcagatgagagaattgttgcagatttgctcactgacttgattggggaaatctcactacactgaacgtacacaccaatggtaagatttccactttcagaaatgctaagtctgggggagaaatgtgcctctaactggaaggtttcagtagcatgtgttgaccacagaattcacaaagcatttcactaggttgtatcttgcataacacacttcaaatgggcctggttttttttttncnttttaaaagtanatagatnaccttccntcaaaanactntgttnttcnaatnggctttatatagncaangttagtnccttnttccngaattttaattttttngttggtttttaaa

SEQ ID NO: 20083 - DNA, 386 bp, Homo sapiens
  misc_feature (1)...(386): n = a,t,c or g
gtttttataagtctttttatatatttagcctgtcacaacagtgctcaagattgtattgaagtttttctgcattatacaaccctaaaacacagagatctcactgacccgttgccctgtaaccactttctttccttcttttgcctaatacagctcagctaagtccttccataaagatgctaaataactttcatcatcacataaatgtcttcataaaccaaggactattaagtgtattaaaatgaaacagtggggtttagtactccaaatgaactcttaaagaaaaaaactaatcttggcatcctatcactatgtgatattttgnacatcttactgtatttacaagtttatttatcaaggattaatncatcttgctaatggcctataat

SEQ ID NO: 20084 - DNA, 390 bp, Homo sapiens
gagaagatgaagtggctgttgacatggaatttgctaagaatatgtatgaactgcataaaaaagtttctccaaatgagctcatcctgggctggtacgctacgggccatgacatcacagagcactctgtgctgatccacgagtactacagccgagaggcccccaaccccatccacctcactgtggacacaagtctccagaacggccgcatgagcatcaaagcctacgtcagcactttaatgggagtccctgggaggaccatgggagtgatgttcacgcctctgacagtgaaatacgcgtactacgacactgaacgcatcggagttgacctgatcatgaagacctgctttagccccaacagagtgattggactctcaagtgacttgcagcaag

SEQ ID NO: 20085 - DNA, 330 bp, Homo sapiens
cacccctccccccacccgggctcggcgggggagcgactcatggagctgccgtaagttttaccaacagactgcagtttcttcactaccaaaatgacatcattttccacctctgctcagtgttcaacatctgacagtgcttgcaggatctctcctggacaaatcaatcaggtacgaccaaaactgccgcttttgaagattttgcatgcagcaggtgcgcaaggtgaaatgttcactgttaaagaggtcatgcactatttaggtcagtacatatgctgctcctgctgatcataaagtatattgtggtggagatcttttgggagaactactggg

SEQ ID NO: 20086 - DNA, 266 bp, Homo sapiens
gctccctccatcatgggctgctttgcccataaatggcattcccatctttttctggtgaccaaacatttgttggtggctccagcactgccgatgtttgttccagattttctttcttccagttctcaaactgcatcagagtcccctgaagggcttattaaaacacacggtgctggaggttaaaacacagatggctgggctccaccccagaatttctgctacagcagggttgaggcagagcctgagaatttgcatttcttttttttttt

SEQ ID NO: 20087 - DNA, 330 bp, Homo sapiens
gtaattttttataaagtttgctatctaacccttaaaatatatgtttatgttcaactatacatacctctaagttacctgtgattaagattgcctgagcctgttcctttatgtgccccagtcataggggcatacacacccaactcttgaatttttattacttgttaaagaagagtactggactctgtgaggcctggtgtacctttctggaccattattctgtgaacctgtgtagcagatattgcaaagaactcttgacctggttacaaaatcaaattatatgacactcatttttatcaactggtttctagatattgtgtaatccttacccat

SEQ ID NO: 20088 - DNA, 986 bp, Homo sapiens
gagaggagggtggcaaagatggaagcgtcacgggaaccaagaggctgcgctgcatgccagcaccagaggaaattgtggaggagctgccagccagcaagaagcagagggttgctcccagggcaagaggcaaatcatccgaacccgtggtcatcatgaagagaagtttgaggacttctgcaaaaagaattgaacctgcggaagagctgaacagcaacgacatgaaaaccaacaaagaggaacacaaattacaagactcagtccctgaaaataagggaatatccctgcgctccagacgccaaaataagactgaggcagaacagcaaataactgaggtctttgtattagcagaaagaatagaaataaacagaaatgaaaagaagcccatgaagacctccccagagatggacattcagaatccagatgatggagcccggaaacccatacctagagacaaagtcagtgagaacaaaaggtgcttgaggtctgctagacagaatgagagctcccagcctaaggtggcagaggagagcggagggcagaagagtgcgaaggttctcatgcagaatcagaaagggaaaggagaagcaggaaattcagactccatgtgcctgagatcaagaaagacaaaaagccagcctgcagcaagcactttggagagcgaatctgtgcagagagtaacgcggagtgtcaagaggtgtgcagaaaatccaaagaaggctgaggacaatgtgtgtgtcaagaaaataagaaccagaagtcatagggacagtgaagatatttgacagaaaaatcgaactgggaaaaatataataaagttagttttgtgataagttctagtgcagtttttgtcataaattacaagtgaattctgtaagtaaggctgtcagtctgcttaagggaagaaaactttggatttgctgggtctgaatcggcttcataaactccactgggagcactgctgggctcctggactgagaatagttgag

SEQ ID NO: 20089 - DNA, 341 bp, Homo sapiens
gtcgtaatagccaagaatttaacatttgttttgttgagcaaggcaaccattttctgcagcccaccagctaaacgcactgccattttagctccttcttgatgtaataaaaggttgtggagagttgtaatggcataaaacaacacagaatccactggtgaaccaagcattttcaccagggcaggaatgcctccagacttaaagatggccagtaagccctcacgatgatgggaaaggttatgcaaggtcccagcggtacaacgagctgtttctacatcatttgtattctgcatggtacgtacaatagcagacaccatctgaggagaacgcatgatagcgtgtct

SEQ ID NO: 20090 - DNA, 307 bp, Homo sapiens
caaattgaaatgctatgtaagttcacataagtattttcaagtagaataatttggtaaggcttcatgaaacgcagtatctgaactgggctctacaggagagatgatgttgatgttgaatgcagacagaagtagagaagatgctgcaaacaatttaatttggttggagaaaagataactaggaaatagttttggaaagacagcaactatataagggaaaatctagaaactaaatgcagggatatgtactgtaaattaaggaaggatttttgaacaaaggagtggtattagaagaagggctagcaaatca

SEQ ID NO: 20091 - DNA, 389 bp, Homo sapiens
ctaaaaatacaaaaattagctggatgcgatagcacgtgcctgtagtcccagctactcgggaggctgaggctggagagttgctcaaacccgggaggcggagattgcagtgagccaagatcgcaccactgcactccagcctgggtgacagagcgaccctctgtctcaaaaaataataataataataaataaaacaacaacaaatgcatcagagagccaaaacattcagtattgcattttcacataggtgatgaaatgactttggaactttatctgtgttatagttatgagttgctttgggagacttggagctctctgtagctattgttcataacactttgctccataaccctgatgtccgcagtatctaagtatctcagccttcatccatt

SEQ ID NO: 20092 - DNA, 395 bp, Homo sapiens
ttaacgaatataaacagatgatggaaacaaaatcaaaaaaattaacagcatcacaaaatagaaaaaggaatgcttttagagaagaaaatgagaaacaattatatggatcgtcaaatacacttttgaaaaaaatagagggaatcccagaaaaaaaggaaaagacttcacagctacagctttcagtagaatgtggcacggatacattactgatccaagagaatgtgaatttacctccttcttccacgtcaaccatagctgatacatttcaagagcaactggaagagaaaaattttgaagactccattgtaccagttgtgctttccgcagatccaggtacgtggccccgaattttgaatattaaacaacgggacactcttgttgaaaatgttccgcct

SEQ ID NO: 20093 - DNA, 267 bp, Homo sapiens
tcctcccaccccagcctcccaaggagatgggactgcaagtacttgccccatgcttggctttttttttaaactttttgtagagacaaggtctcaatattgcccaggctggacttgaacaactaggatcaagtgatcctcccaccttggcctcccaaaagtgctgaggcaggaggattgcttgagcccaggggtttgaaaccagcctgggcaatatggtgaaacctcatctctacaaaaaatacaaaaattagccaggtacggtggcgg

SEQ ID NO: 20094 - DNA, 426 bp, Homo sapiens
ggtcaaacgaacaaacaaacaaacaaaaaaaacagagaggcacttctgatgcaggccgcaacatggatgaaccttgaaaacatcgtcagtgaaataaataaatacaaaaggataaacacgcccaggctcagtggctcacccctgtaaccccagcactttgggaggctgagccaggcggatcacttcaggtctggagttcgagaccagcctggccaatatggtctctattaaaaatacaaaaattatctgggcgtggtgacgcactcctgtaatcctagctactcgggagactgagacacaagaatcgcttgaacccacgatgcggaggttgcagtgagccgagatcatgccactgcactccagcctgggtgacagagaaagactctgtctccaaaacaaaaaaattaaacatggtatgattccact

SEQ ID NO: 20095 - DNA, 364 bp, Homo sapiens
gaactggaagttgctctgggtgagtttaagtgagtggtggtgagtaaatgtgaaggcctgggacattcctgtgcactaccgtagactttaaaaacactgtacacttaggctacactaaatttattttttaaacttttgctttcttccataataaattaaatttcaaggttgggcgtggtgactcatacctgtaatcctagcactttgggaggtcgaggcaggaggactgcttgaggccaagagcttgagaccacctggccaacattgcgaaactccttcactacaccaatttaaaaattagctgtgtggtggtgcgcacctgtaatcccagctactcaggaggctgaggagggaggattccttg

SEQ ID NO: 20096 - DNA, 85 bp, Homo sapiens
gggcagttcctccagatgtgcagaccttgcgcgccttcaccactgagctggttgtagaggctgtggtccgctgcctgcgtgtgat

SEQ ID NO: 20097 - DNA, 393 bp, Homo sapiens
  misc_feature (1)...(393): n = a,t,c or g
atatttctgaccttctctttcttcttatggggtcttccttctcttttcctctcttaaatatttctattcccaaggttcttttcttcatctcttcttatgctatgtattctacctaggttacttcatctacccatattttcagtttctacctgtagaataaggatgctcctatttatttttaatcaccagattactttgcaccttaaaccaaacaagtataaatggaacttatcttattcctgattactcccttaccacccacaatctgatcctctggcttcactactaatcttatctaaaggccaagccagacagctgaatgttaatggtaaagcaattaatatacaggttgagcatcctaattggaaacccaaaatagaaaatgntctaaaa

SEQ ID NO: 20098 - DNA, 498 bp, Homo sapiens
  misc_feature (1)...(498): n = a,t,c or g
gacgtgatagaggagatagagagcgagagagggagaaagaaaaggagaaggagttgcgagcttcaacaaatgctatgcttatcagtgctggattaccacctttgaaagcttcccattcagctcactcaacccactcagcacattcaacgcattcaacacattctgctcattcaacgcatgccggacatgcaggtcacacgtcacttccaaagtgctgggattacaggagtgaaccaccacgcttggccaagtttcttaatacaaggtactaaacactctttcaaaaataataagacttgttccatataaagttgagcatgaactctaaaaagaaaaaattaagcaacagatgaaaagtaggtatgtggaaataatggtatcaaatatgattttatacaaaatgtaccattcttcaaatgtgtaagtcttaatatgaatatttttggattgtgagtgttgctcancctaatttttaaagaattagtctcaaaccattca

SEQ ID NO: 20099 - DNA, 310 bp, Homo sapiens
  misc_feature (1)...(310): n = a,t,c or g
gtttctcgatatggaccattgagtggtgtcaatgtggtttatgatcagcgaactgggcgatctcgaggatttgcttttgtgtattttgagagaatagatgactcaaaggaggctatggaaagggcaaatggaatggagctggatggtagaagaattcgggtggattattctataaccaagagagcgcacacaccaacaccaggcatctacatgggcagaccaactcatagtggtgggggtgganncannangnnnnncnngngtcctngnnnatatnnnntntntannnnggntannnntnanncttttt

SEQ ID NO: 20100 - DNA, 365 bp, Homo sapiens
atgtgttttcatttgtcatattgttcgtttcataacatttaatcccattgggcttcaaggattatgtattgatttcatcaaatattttgttgtaagttaccgtttatagaatgacgcctgaattgatcccaagggatgccaccggtgggattgcaattgctgaattagcttactaggtttgaaaatgtcagttttccatgcttctttttagaagactttgccataacatgatgccaaaaggcaaactatgttgcattggctatataaactgtattattggctatacatgaatatttccaacaaagtttatttgtaaaaacaactgatgctaagaaagcaagagttagttgtttttacaaataaac

SEQ ID NO: 20101 - DNA, 332 bp, Homo sapiens
gcgaaagagggtgggggatggacttggcgtgaaccgggaggcaccgctctgtgtgacccaaagaggaggcttggcaggcgattccagtctccgcctttcaacctatgctgccaccgcaggccgattgaaacaaaacaaaacaaaccaggcgaagtggacagccaggtttttgtagctttaaatgctgcgtgctgtctagggtgtttcactctccgctgtgcactctacactcgagttcattcttagggagttttcagctacagtcgtttttaggtcgacgcggccgcgaattccagatctatgaatcgtagatactgaaaaaccccgcaagt

SEQ ID NO: 20102 - DNA, 389 bp, Homo sapiens
ggtttctagtatcaatggttaagttttctgtattgtctgtaagctgtttcttgctcaggtatcttataatcaatagtacatgatacagaattcctgagaagtaggaatagaaaatctatttgtagtctgtgtttctccataaggctttagaagtagacgagactaagcagctttgtttctaattcagtatttggaacttattgtatattcattcatttactctttcatttattcattcattcagtaaatatttgttgaatgcctgctatgcactgagcacttttctgggtgctgaagatgtagcaagaagacaagaagacaaaaaaaattccctccctcaaggaactgacattttactgagattaagctcaaattccaattcattaaac

SEQ ID NO: 20103 - DNA, 430 bp, Homo sapiens
gcgtgggaagagctcgggttttggagaagcagcgtggacattggactgtgaccctgaacgttgccttcaacttctctgaggctcagcctcctcctctgagatacgttcctcacgcagctgttgtgagtagatgaaataatgtatgtaaagctccacaaggcttcggcatacaggagaggctcaatgctgcttgttgaatgcatgaacaggtgaggaaaccttggtggagaaatcgagcagcttccctgaagtcacaccactgacaatcaatggagtcagcattcaaaagacccagctgatcaaacgggatgcaatcaagaagccagccaaaacctgagagtgggactccagagccggctcaccaacccctgatggtctgttaactcctgcctggacccgagcatgtcctttggtgggaaactatggagtg

SEQ ID NO: 20104 - DNA, 346 bp, Homo sapiens
gattacctgtagctattcagatgagtatttggatagatagttaggagagtacagttgtggagcttgagaaggcagatgagggccagaggtgtgaatttgggggccattggtctgtgggtgatgatgaagcaatgaacatttgcaagattacagagggagaaatgagaggagaagctgcctacagtgagctgggatagaagcatgggctgcacggatgcagggacccatgctctttgtgacttgtgagactgataacaaatatacacgcgccatgtttagtggagggttacgtggtctttgtaagtgttactgaaaatacatctatcagactggccatttcgtgcaa

SEQ ID NO: 20105 - DNA, 283 bp, Homo sapiens
  misc_feature (1)...(283): n = a,t,c or g
gttcacaattccatttccagttcatctatggcagtccagccagctcctgggcagcttgagagggcaaacccaaaacctcatgacagccagagcctgtctttcagcattcagtccgcctggccggctccagtttccccatggggctgcgggacagaggaccattaccactagatcaaggatcccagaaaacctgcactagcggacaacannncntnaccatagcctacnatancccntttttgancnaatctttntccctcatctngatnaacaagtctttaat

SEQ ID NO: 20106 - DNA, 380 bp, Homo sapiens
gggaagattgagttccccctgcctgatgaaaagacgaagaagcgcatctttcagattcacacaagcaggatgacgctggctgatgatgtaaccctggacgacctgatcatggctaaagatgacctctctggtgctgacatcaaggcaatctgtacagaagctggtctgatggccttaagagaacgtagaatgaaagtaacaaatgaagacttcaaaaaatctaaagaaaatgttctttataagaaacaggaaggcacccctgaggggctgtatctctaatgaaccatggctgtcatcaggaaaatggttgggagatttctcaatccctgaaagggatgaggttgggggagttgcccagaggaatccctgttcccactgat

SEQ ID NO: 20107 - DNA, 329 bp, Homo sapiens
gcggcacgagccactgggcaaaggtctgaggacaggggcagcctggggagttgtgaacagagggagtcccgtgggcagaggccccgaggccggacagtgtggggtgtttaagggcagaaagaaggcgacgtggctggaaggaaaggagtgcaggaggaagccaactcacagagcttaggagagcggctgaaatgccctaggccatgtgtgtggttttgttctgagtgagaggcgaaggctttggagggtttaagccggacatgtttgtaaagccccaaaaggtctgtgatgggtcaaaaggaagtgagcctgggggttcttcaaagagg

SEQ ID NO: 20108 - DNA, 402 bp, Homo sapiens
  misc_feature (1)...(402): n = a,t,c or g
gagcacctcttgatgatgttgagcagcagaggaagatcaaggtcatgacaggcagtggcaagagtttgtttttattgcctttgcccattactccatatgactgtcattcagaattaccataccatatattcacaactgaagtgaggatacttgtgactaaaaaggaaccagtaattgtggtagctgttgaagtggcttctggtgaagttgaccactttactgtttaccgaacagccctagtgatattgctggtaaccgttttaacaaagggtgtgacngcnaatgaatttgaaacnaatggaagtacttttggaaattgnnnaaactnaagggantttnancactggtggcattcntntngnaacngggttnttgnaagnagccaaatttattattttnaac

SEQ ID NO: 20109 - DNA, 374 bp, Homo sapiens
ccacactgcccagaggccaggcctggtgagctaggggagatgccggcaccccccaaccctggggctgttccctggctcaggatggtgtctcggggctaggattatggtcaggagtccatcggggcctcaagcacctcctgggaggaatcacccaccttgcccagatcccccaccccctcccagtgccaccctacggctgagtttccactctgcaaaccctaaggcagagacataagcccacagggttggttttcacgaatgtcacaagcccatgtgtctgggcagctgtccggcttcagtgcaagtctgtggtagcaatgaggttccaagtctcagtagctctgtttgcccagggtctgggcccttggggcagg

SEQ ID NO: 20110 - DNA, 357 bp, Homo sapiens
cccacgcgtccgcccacgcgtccggcacattttaaattcttaacactaatttatctgtataagtgttttatatgcatatttttggacataaacagtttatgtaaaattagtaatgaatgatggcaacgagggcactgttatcttcgtttgttttcaatgatcatttagcattcaatgatggaacagctcgtataacataagttgttggcatgaaatatttgagattggaaacttcttgccttgaacagaacttatatcttagattctctctcacattttcttggagctggggtttgaataggaaccagatgatgttcactgctgaaattccataatgcttcccattgaagggaagtt

SEQ ID NO: 20111 - DNA, 545 bp, Homo sapiens
  misc_feature (1)...(545): n = a,t,c or g
ggccactttctgctaccctagggaggccaggaggagcttcggaggaccatcgccccactggtctagccatcatgacacctctggaggtgtcaagctcctgaaacaagctcatttcagtttctggcaaccccgtgtatttccgttttccccctaaagaacatatcataatcattgcacaaataaccatgttctttggtaatgaagccagaaaagaaagcgcaaaagaatggtgactcatttggactcttatctgtcttggaatgtcactgcttcattgccttctctgattgccttttgcatgtaaaactatgtgtctggagtcttttgccatctggatcttagtacctctttattatgtgcaatttattcctcaggtgtggaaatttctactgcaattgactacgtttgattattttgagcttgtgaaagatttctgaacagtgattgtcccgttaatagcccctcanaagatgttcctgctgataacagcatcctattttactacttttatagcattactgtgcctagcgtggggnaagagatgg

SEQ ID NO: 20112 - DNA, 340 bp, Homo sapiens
gaactggatatttcacctgaagtcataagttaaaagcaaaaagtggagcataaaatcaattttcccaacaaaacagaagcattacatgggaagattggttggttaccttcaacctcctccagtttttttgacaggacttgttcaagctgaaagggaacagggcaagaggcttcgtgaagggaggccctggtgcacagcgcagcctctggggtgccccgtgggccccagggaccacaggctgctagaacttaggggtacgcagcgatggaggtggagctatgggcctgtgtcccccatgggaagaggtggcacttcccagagtctgtgtgaggggcatccc

SEQ ID NO: 20113 - DNA, 379 bp, Homo sapiens
ggggtcgtgggctcggagtttgtacagaagtatctgggtgagggcccccgcatggtccgggatgtgttccgcctggccaaggagaatgcacctgccatcatcttcatagacgagattgatgccatcgccaccaagagattcgatgctcagacaggggccgacagggaggttcagaggatcctgctggagctgctgaatcagatggatggatttgatcagaatgtcaatgtcaaggtaatcatggccacaaacagagcagacaccctggatccggccctgctacggccaggacggctggaccgtaaaattgaatttccacttcctgaccgccgccagaagagaatgattttctccactatcactagcaagatgaacctct

SEQ ID NO: 20114 - DNA, 399 bp, Homo sapiens
ggaaggactgaactccatcgccatcttcttcccttagctccaagaacttgggataagagtgtgagagagactgatggggtcgctctttgggggaaacgggctccttcccctgcacctggcctgggccacacctgagcgctgtggactgtcctgaggagccctgaggacctctcagcatagcctgcctgatccctgaacccctggccagctctgaggggaggcacctccaggcaggccaggctgcctcggactccatggctaagaccacagacgggcacacagactggagaaaacccctcccacggtgcccaaacaccagtcacctcgtctccctggtgcctctgtgcacagtggcttcttttcgttttcgttttgaagacgtggactcctcttgggggg

SEQ ID NO: 20115 - DNA, 398 bp, Homo sapiens
gagaagtgaccacattttaaaaacattaaaagaaacaggagccaccgcgcccggccaagatttaattttttaaaagaaaatattttgctaagggtttggaaactcttgttttagcaagaatggattaagactgattaaaactaaaggcaaagaggaggctcttatgtttggaattctttgctaatatttacacaatataattctctccacaaatatttaatggtaccagatattagatggttataatggcaaaagtgttcaaaggatgctatcatattcatgattcatgatcaaaatgaacattataaggctatccctcttcagaattaaatacgttactcctgtggaaaacttgcttttaatgtagaagttgtcccagagcctttcttcctttctca

SEQ ID NO: 20116 - DNA, 378 bp, Homo sapiens
caaagaaatggaagatggagtttgataccagagagcgatgggaaaatcctttgatgggttgggcatcaacggctgatcccttatccaacatggttctaaccttcagtactaaagaagatgcagtttcctttgcagaaaaaaatggatggagctatgacattgaagagaggaaggttccaaaacccaagtccaagtcttatggtgcaaacttttcttggaacaaaagaacaagagtatccacaaaataggttggcactgactatatctctgcttgactgtgaataaagtcagctgtgcagtatttatagtccatgtataataaatacatctcttaatctcctaataaattggacctttaaactacaaaaaaaaaaaaaa

SEQ ID NO: 20117 - DNA, 308 bp, Homo sapiens
gtctatgtagagaatacactaaaagggagcaagagtggaagcagggagacccaagagtgggctacagtaatatcccaggtgagagatgatggtggctcagacttgatcataatgaaggcaataagaagtggtcagattttgaaggtagagccaagggtctttgctgatagatgggatatagggtaagagagaaagagaaaaataaaggatagctctgaaatttttggactgagcaactggaattgccatccactgagatgggaaaagctaaaagtagaatagcttggtggagggtagggacatgagta

SEQ ID NO: 20118 - DNA, 619 bp, Homo sapiens
gcagggacaagagcggcaagactggtgaggaggctggtgcgggggccaggtgggaccccggggtggctttgaataatggggagagaggagaggtggggaggccagaggacttgctgcccaggcttggagtgtcatcaccccagatgtgttggtctcagcacacattttgccggggctccttacgcagcctgggaatgggtcattcttccagctagagcagccacatagcaatgggttggtaggttccatctcagctcaacagccactgtgaagacagccttgatccccatagcttgaagccattcctgcctttgtgatgtgtcagtacctctcttaaggctcaagcctagctggtcctactatgtggcttggtaacatcgagcaagtcttccctctcctggtgggctccaagccgcggtgaggcaaaacccatgattggggactctgtttctccacagcgcctggcataggatgtgtcctatggtagatactctggcatttgtcttaataaatggccacataattgtgcacagacccatattagcttcacatgctcagtttccagaattattgttagattaatatcaaatcaaaattttttctcatggagactatagca

SEQ ID NO: 20119 - DNA, 379 bp, Homo sapiens
  misc_feature (1)...(379): n = a,t,c or g
gaaaggatctagtttttctaacaaataatagacatgaaagaatgggaggagcaaatagaactggtattggttagaacagacttataaaccatttcaaaccaatggaagatggaccttctttggatcgtgatttaaactaattataaaaagacattctggaggctaggaaaacaacgacatttttgagaccgagaaatttgaacatggattgggccattagaagatactaaagaattgttaatgctgatagacaacagaatgacttcatggtatgttaaaaagtctccctatcagaaggatttataaataaagcgatacctgagatttgcttataatattctatacttcccactcccctgccccccaaaatgnccggaag

SEQ ID NO: 20120 - DNA, 895 bp, Homo sapiens
ctatgacatgattacgaatttaataccgactcactatagggaatttggccctcgaggccaagaattcggcacgaggacacaggaccttgagtactaaggtcctgagtcactctcaatccttgtgccagggtggtggtgtacggggcctaattggaggatagccttcaccttctttggcaatagtgattgccaaggacctgcccgcctctagatttagggtaacatcgttgctatcacttacactcaccgtttactgtcaggtcccaattgtttccgctgtcatccctaccccttgagacatgggaactgacatactgttgactcacggggcaggtggaggagaaaggacagaaccctgacatcacaccccgccttctctgttagcttattcaaatggagtgggggaaggggtgttgttggatgctgggtagtgaggttgggtggtcactgcttctacctgcaggccaggaatgagccagatgtttatgaaactagcgacctacctgaggatgatcaagcggagttcgatgcgtttgcacaagagctggaggagctgacaagcacaagtgtggaacacatcattgtcaatcctaatgctgcctatgacaagttcaaggacaagagagtggggacaaagggacttgatttctcagatcgtattggaaaaaccaagaggacaggatatgaatctggagaatatgagatgcttggagagggtctgggagtgaaggagacaccccagcaaaagtaccagcgcctactgcatgaggtccaagagctgacaactgaagttgaaaaaatcaagacgacagtgaaggagtcagccacagaggagaagctgacccctgtgttgctggctaaacagctggcagccctgaacagcagctggttgctt

SEQ ID NO: 20121 - DNA, 329 bp, Homo sapiens
ctatcccattcatcaagtaaacaaaagtaattttggtatcaagctctttagcaactaagctaacttgactcaagtgggctcgtactactccttgagtttgcatactttaatccaagtcaccttttttaaaaatatcagagcagttaggccgggcacggtggctcacgcctgtaatcccaggactttgggaggcccagacgggtggatcacaaggtcaggagatcgagaccatcctggccggcacagtgaaaccccgtctctactaaaaatacaaaaaattagccgggtgtggtggcgggcacctgcagtcccagctactcgggaggctg

SEQ ID NO: 20122 - DNA, 433 bp, Homo sapiens
ggaagtacatgggctggagacagcatttatgagcatgtgtatggcagtcactgtgtagcagttacctgttcactaccctttccgcagccctgggactcagctgtgtctggcacataagaagaaaaagttgcttgacccgagagtatagagctagaattctggaccattttattcatttatttttcataatagtttttctgttacaaagtaatgcatatttgctgtcaaatcctatcaggtgtaatttcaaaaagttgaaatcactggattgattctcgcctagtaacttaagaatagaaacggctgggcacggtggctcatgcctataatcccagcactttgaggctgaggcgggtggattaccttaggtcaggagtttgtgaccagcctgactaacatggtgaaaccctgctctactacaaaaatacaaaaa

SEQ ID NO: 20123 - DNA, 360 bp, Homo sapiens
gagagggacctcatctctacaaaaaacaataggtaaataaaagaaccagcggcatctctcctgtaaaagcagacttgccttcctgctttttctgctgctacctttaagggaaccacagatatttacccatgaacttaaagtaaccacacccgattccctgagaggtactgccagttgccgtgtgcttttctttctcactctgcctgactcctcattcctgactcgggtgacccagggatggactgggtccccccactaattactgccccccctccactcattacaccctcattgcctggagtttataagtaaaaatctttaaacatatttcctagcttgatggtgcattgaacttgcacc

SEQ ID NO: 20124 - DNA, 459 bp, Homo sapiens
  misc_feature (1)...(459): n = a,t,c or g
tnnnntnnnnnnatttganaccnttatgactgattacgaatttaatacgactcactatagggaatttggccctcgaggccaagaattcggcacgagggcgatccatagctaagacgccaggtcccccggaaacctagaaatggaaccattgaaatttagggatgtggccatagaattctctctggaggagtggcaatgcctggacactatacagcagaatttatataggaatgtgatgttagagaactacagaaacctggtcttcttgggtattgttgtctctaagccagacctgatcacctgtctggaacaagaaaaagagccttggactagaaagagacataggatggtggccgaacccccaggatctctttctgttacccaggctggagtgcagtgactgcagcttcaaccttcagggctcaagtgctcctttcacctcagcctcctgactagctg

SEQ ID NO: 20125 - DNA, 323 bp, Homo sapiens
tccagatctcattctaggtccccctcaagatgtagaacaaaaagtaagagttcatcatttggtagaattgacagagatagttactctccccggtggaagggaagatgggcatatgatggttggagatgtccacgaggaaatgatcggtacagaaagaatgacccagagaaacagaatgaaaatacaagaaaagaaaaaaatgacatccatctagatgctgatgatccaaattctgctgacaaacatagaaatgactgtcccaattggataacagaaaaaataaactctgggcctgatccaagaaccagaaatccagaaaagtt

SEQ ID NO: 20126 - DNA, 424 bp, Homo sapiens
ggccagaaagttcaagggtttctgtggacaattatttaaaaaatgatgagttgaataaatccagactatttcttcatattcatattatacccaaaggctttctcctgggagaagctgctgaagaatcaagtcattaaaaactatgtcagaagctgctgcatggatctcactgatactcatttgattacaaaaatattgtctttccccgcagctatgcttttgtcaggggtatgggaagataactaaactggcaggccaaaggctcagagaattcattaccaagataaatagaaaaaaaggaacttcaagagcctcttaggagatttacagggattgccagggcaattattcttcttggggctccagcacatcctgcttctgttcagaaaaatgaggacaatttgatagcccactgttaaggggg

SEQ ID NO: 20127 - DNA, 383 bp, Homo sapiens
ctctcattgaccggaaccaaaaatcagataataaacctgatcgggaagaaattcagatgagcaatatgggatcaaacacaaaatcactagataacaactattccacaccaaatgagagaggagaccacaatagaacactggatcgatcgggggatctaggcgacatggagccattgaagggaacaacacccttgatgcagaagatttagcaccactatctccgttccatctgggcttatatgtacttttattttttggtggtgaaattgactgatgattttcctttttcttcgctggactattgtgccaactgccaggctgctcctgcccttacagccctaagtggctgccttctttccatcaactcccaacttcttcctgtg

SEQ ID NO: 20128 - DNA, 376 bp, Homo sapiens
ggtcccagctactcgggaggctgaggcaggagaatctcttgaacccgggaggtggaggttgcagtgagccgagatcacaccactgcactccagcctagcgatagagcaagactccatctcaaaacaaacaaacaaacaaacaaacaaaactctgtttttgtacatatgtccttataatatccccactcttcatgactgtctttaatcatttcctcatgtttttctaaaaatttatgattgtatagagaaaattccactgccatatttcctcatgtttttctaaaaatttatgattgtatagagaatattccactgccatattcccaggtcttagaaaagaacctgacacttaatataaaactgtgaaatgtattag

SEQ ID NO: 20129 - DNA, 362 bp, Homo sapiens
gctggaatacagaatgatgtatgagttaagtatgccccctactgactgaataaatactttaaaagccaaaaaacaacattcacagagtataagaatatggtccaaacaaatgtaccacatgaaaaccaaatgtgcctttaccatgcaaatgggtttcataaaaagacctttgcagatcttaagtatatttaagatagaatttattggagaaaagagagacctgagaagaaagaagggcaattttgaattcactgcccagggtcaccacattaaacaactttaggaagcatcattcacattatagtatacatctgtggttcccaattggggcaattttgtcccccaggggacatttggcaatg

SEQ ID NO: 20130 - DNA, 582 bp, Homo sapiens
ctctggctgccgctggaactccgggtctcgtcttcactgctctgtgtcctctgctcctagaggcccagcctctgtggccctgtgacctgcaggtattgggagatctacagctaagacgccgggacaccctggaagcctagaaatggacaacctgaggtatggagtgtatcctgtcaagggggcaagtggatgccctggggctgagaggagtcttctggtgcagtcttattttgaaaaggggccattgcaatttagggatgtggccatagaattctctctggaggagtggcaatgcctggacactgctcagcggaatctatataggaaagtgatgttagagaactacagaaacctggtcttcttgggtattgttgtctctaagccagacctgatcacctgtctggagcaaggaaaagagccctggaatataaagagacatgagatggtagccaaacccccagttatatgttctcattttccccaagacctttgggcagagcaggctcgtgccgaattcttggcctcgagggccaaattccctatagtgagtcgtattaaattcgtaatcatgtcatagctgtt

SEQ ID NO: 20131 - DNA, 431 bp, Homo sapiens
  misc_feature (1)...(431): n = a,t,c or g
ggcgtggtatgggtatatgggtgtggatgtgtttttaaaggaaggtgaagggtaagagacatggctggggaccctaaactgagcttgggtgctccaaaagagcctgagtgctctaacagatcacaaaaaaatagttctatactgtggcgtcttcttttcactttcagtttcctgctttcctctttaactacagaaggttaaacaattacctagttatcttacatctgctctggagctttcttgtgggctgatcaaacttagcatgctgagtaattaagtacttaaacatcctaacacttgccaataaggattccttcttctggaaagtgccatgaactggagaaacctgtatttccgttgctcagcaatgaggaagccctctgtgttggtctctgcactganggtaattttttaaccaggggcaagccttt

SEQ ID NO: 20132 - DNA, 528 bp, Homo sapiens
gcggcacgaggtgagcatttctgttgttcatggaaatctttcagaggaagctgcaaaacaaatgagaagcagaggaaaagttctgaagactaaagatggtaaattgccattttgtgctatgggcgtgagctctgttatccaccccaagaatcctcatgctcctactatccatttcaactacagatactttgaagtagaagaagctgatggccacaagcagtggtggtttggtggtggatgtgacctcactccaacatacttgaatcaagaagacgctgtccattttcacagaactctgaaggaggcttgtgaccagcatggtccagatctctaccccaaatttaaaaaatggtgtgatgattacttctttatagcccatcgtggagagcggcggggcattggtggtatcttttttgatgatcttgactctccgtccaaggaggaggtgtttcgctttgtacagagctgtgccagggctgtagttccttcttacattccccttgtgaaaaagcactgtgatgactcatt

SEQ ID NO: 20133 - DNA, 345 bp, Homo sapiens
gtgagaacggagagcaaggaagagaagtctgggtaggggcttgatgttcagctgaagggtctaaagattgttctaattccatgaagttctagagcactgcagtgactgggtggccacttgggtggcaatatggcagctaggttgagtttagggggtagggaaggaatggaggctggagatctgaagaggccagtgcagagaccaggtgagagatggggaatgcagcaatggttgtcggagagctgggacagggcaaagataaggatagacattcctagggtggatgcccagaaggactcagcagtgagctggcttggaggagaagaaggagctaaagtttatgcc

SEQ ID NO: 20134 - DNA, 391 bp, Homo sapiens
gttatgctgagcacactacaaaactaacaatactaatgggaacagaaatgaccaaaaggttgttccatcctgggttgtaattctgcttcccctgtgggcaatactaaatgatcataacgaccactggagttgcaagattcacattttgaattgttctaagtagatggagtcaaacttaaatgtcttaagcggctgtatgaaaatgcaggttgatttccaactttgtcccaagtctgtctcttttagagaaaccctcgaactactaatgaattaggagtgttgatagcactttcaatctggacagtggggatttataaattgccaaatagcagacaagtattttagtctttcttataaaacaaaacaaaatcagatcttttgtcgacgcggc

SEQ ID NO: 20135 - DNA, 446 bp, Homo sapiens
  misc_feature (1)...(446): n = a,t,c or g
gctgataatnanangaggngatataaaagaagtaactagtttaatgttggngcttaatagagaatagctgtcccatgttatttcccaccacgatctccctctctgtctaggtgctcaggctctctagtagcccaactcagtcagtcattcacacctactgtagtctactgtcatcttactgnctttcactgtcctctcattcccctcataaccttacttccttctttatcctgcttcaactccatgagcaaccacgacagtcagtacacattccctcagcccccaccccattcccctcttgctgtcttatacaagaaatcacaaccctgattatatcancacagatgtgctgaccagcctcactctaaattatgttcnctagcctcgcagtcatggtcacttctacaggtcacactatacttccatantccatttcacttttctag

SEQ ID NO: 20136 - DNA, 352 bp, Homo sapiens
gaatataacaccgtaatttatgaatttgttcattgtcactgcctttattcatgaaactgtcaaatagagtgtctttcaagggttgcaggatcttagagatagaaagtaccttggtgatcatctccagcctaaatttcatcatcccttctatggtattcccaacaaattatcatccaacctatacttaaagacatatggtggccaggcatggtggctcacgcctgtggtgctagcactttgggaggccgaggtgggtgaacgcacctgaggtcaagagttcgagatcagcctggccaacatggcgaagccccgtctccactaaaaatgcaaaaaaaaaattaaccgggcgtgg

SEQ ID NO: 20137 - DNA, 845 bp, Homo sapiens
gagaaattgaattctgccccacatgttgacagtagagttggaactggattcttgggattacttatctaaaaaactggagcatcaggtccatttctgttctgctggtttggaatcttttccgtaatgctatttattgccaacaatggcctctctttgtgtccatatatgccttacaccgtgctgacctgggtatcatccatgtgctctgaagcatccaactttactttgcaggtgcatcaatgtagtcctgtccctgaactgagtaaccgtgttcctgaaaagtacactagggaaattcacctgcttgcttgtctttgtattggcatggcacttgtgattgcaccatggagcatgctcagagctattaaattggtctcccatctcccaccaggatatgaaaggtccatatgggaggccacgtaatcacttattacagtggttacataatacactggctcactgcagactctcttgttttttgatacagtttcgtgctggcttcatttgccaattgtgttgtttagttcggaagtaagagggtcttgagattgaggggtagggagggctacactgactgatccgtggcttaagacaggagattatctctgtactccagtggcatctccttagccaagatgtgaaattaaaatcatagttcgcctcatttaaaaattctaataaagcactcaaactttgaaaagcttttacttttccctcctactaaaagaaatgtatgtacctcatagccctgtgtcatttagtgttcagcacttttggggaacatcagttggtgaactttaaattttgctgtctactcactgggcacggtggctcacacctgtaat

SEQ ID NO: 20138 - DNA, 349 bp, Homo sapiens
gcggaaggaatcagatgggccgtcttgcagctccgatcctgatgaagaattgtagctgctgtgcctcaagacagataagcacaggtcgtcccagaggggatgccaccttggggactgtgaacctccgctgaggccaggccatgccctgccctgtgtctgtatctggaactgcgggatttctctgatctgccagggaaaggcctgccacctcgtggccacttcaggaactgctccaaaggcagtctgctcttgggaacctacctggtcaggtagctccttgaggtctggaactgcaccacagtgcaagttatcttcacggtgaggtgaagctgcctgtatggaagactct

SEQ ID NO: 20139 - DNA, 347 bp, Homo sapiens
gaaaagacaacttgcttcctttcttaaaacaagttattaaaatgcttgttaaaaatgaaaaaatgatggctgaacttaaaatatgttagtaaatatgtaacataattagaaacaatatacttctgtttgtaaacattactgattttttaaaacaatcttttagaaaatacaaatttttgtttctgtagaacattaattgagtcgtttaataattaaactgaatgagttccttcactctttgttactgtatttccataatttccagcagtagtcagctgtctggacagaaccattcctgggatcatgttacactgctgggagaagaatgtcttctcttcatccagttg

SEQ ID NO: 20140 - DNA, 333 bp, Homo sapiens
ggggattacaggcatgtgctaccacgccaagctaatttttgtatttttagtagagacggggtttcaccatgttggccaggatggtctcgatctcttgacctcgtgatctgcctgccttggcctcccaaagtgctgggattacaggcgtgagccaccatgccccgccccagatggattttacatttgctcttttgtgtttcgctctaaagggttgtcttcctcgccaaaaggagggagggactttgaatttgatatgaatctttaaaaccagaattggctggatatttcccatgattgggaaaagagtgaaatgaggacattctgtaaactgcc

SEQ ID NO: 20141 - DNA, 289 bp, Homo sapiens
gcccctgacctcaagtgagccgcctgcttggcctcccaaagtgctgggattacaggcgtgagccaccacgccccacctagagtagaattttaacttgcttatctttacatctcccatgctggcactgagaaggtgcacattcattcatttcacaataaagtttcaggcactatttcagcagtaaacagtccatttgttgatagttaacacagagaaaatagtactcattgggatgtgtttttatacttgtaaggtcgatctggatttgtttgtttgttttgatatgtaa

SEQ ID NO: 20142 - DNA, 529 bp, Homo sapiens
  misc_feature (1)...(529): n = a,t,c or g
tcncatttgnagcctatngaatacncgttatgacatgattacgaatttaatacgactcactatagggaatttggccctcgaggccaagaattcggcacgagagccattgcagtacattgagctccatagagacagcgccggggcaagtgagagccggacgggcactgggcgactctgtgcctcgctgaggaaaaataactaaacatgggcaaaggagatcctaagaagccgagaggcaaaatgtcatcatatgcattttttgtgcaaacttgtcgggaggagcataagaagaagcacccagatgcttcagtcaacttctcagagttttctaagaagtgctcagagaggtggaagaccatgtctgctaaagagaaaggaaaatttgaagatatggcaaaggcggacaaggcccgttatgaaagagaaatgaaaacctatatccctcccaaaggggagacaaaaaagaagttcaaggatcccaatgcacccaagaggcctcttcggccttcttcctcttctgntctgagta

SEQ ID NO: 20143 - DNA, 821 bp, Homo sapiens
  misc_feature (1)...(821): n = a,t,c or g
tttttgtcctcattccctttattgtactccacccctcgcttcccccagaccttctgttcagacagagccaggcaggccttgggagctggggctgagccacaggcagggagcccaggatttggctggggctcccaccccaacccgaggtagctgagtaaggattcatggctgggagggctgtcctggcctggcacacttggagagaagcctttccctatggaggtgacatggcacggaccatgtgtgtgtgcttgggggtgtagatgtgtgtaagatggttgtgtttgcagggcccaagctgttcacatacacagtgtggaaggatgctgtgtgcacgtaggtggtgtgtacactgggttgtgtgcatgagacactgtgtggcacgtgagcacacaacacacatgctgaaggtgtttgagaccctgttcagtgtctgcacctgaacaggaagtgcaggctcagggctaagtctgactcccgctcaggagcttagagtcagaaagttcgaggacggcacttcttaaacttaggtcccagaatggcctggggagtttgccatccacacagatcatacggccagccctggagcttttggttcaggaggtctgggggtgggcccaggagcttgcattgtcgataagttccccagggaaaccgaaggccaggaagaaacagggctcaagcagggctgtctaatagaactttctttgacagtgaaaatgccccgagctctccctcgtgccgaattcttggcctcgagggccaaattccctatagtgagtcggtattaaattcgtaatcatgtcatagcgntntccaaa

SEQ ID NO: 20144 - DNA, 349 bp, Homo sapiens
catcactctttacacaaatgttgatggagctgaagaatgttaaaactgtaaaatatgcctcattttgtgaaataacagatttatggaatttgactttgccttagtgattggctctaaaaggcagaagtcaacctcatgtgggcagctcaccaagggtacttgcagcacacaaaggcaactcaaaaaactttcctagagtgccctgagaacaaaaatggtacccacggctgggagggcttcccacctgccaccctgtctctgccttctccaactgctgagttcgcattcctgctgcgttttccaaggtcctaactcaaacgggcacattacacactgatttaatttactt

SEQ ID NO: 20145 - DNA, 314 bp, Homo sapiens
gggaacattccagagaagatcacaaggatgcgaataaaatcggagctgcacagggatctttgggctgttggagtgcagtggcacgatctcggctcagtgcaacctccgcctcctgagttcaagtgattctcctgcctcagcctccctagtagctgggattacaggacaaggagagggacaaattccttcttggcatccttatggccctgtgacctgctaatgaatgctgactctgagttgctactagaatttggtttccttgtggcttcccaggaattgtgagccatgttggataaggacctgcaagggaagaa

SEQ ID NO: 20146 - DNA, 320 bp, Homo sapiens
  misc_feature (1)...(320): n = a,t,c or g
aaattgtgtttggttatgaattctcccatgaaagctgcacctaggaatttctcttgtgccccttccttgtcactgctccctttttccttccgaaagacaaccaccaccttgacttctaacactgcagatgattttgcctattttgatttgtgtaaaatggaaccatgtagtatggttttgttttttgttttttgtttttttttttngaaactnnatcctngctntgncanaggctggancncncngccgnnntaaggctnnantncncntnnnccttcncttgantcnctnccnantccatanntatcaatnnngaccct

SEQ ID NO: 20147 - DNA, 366 bp, Homo sapiens
gaaaacttgtatctaaaaataattttcatcaagccctgtctgacatttttttcaaccgattaaattatatgtgtgtgtatattcattttcattttattcctcaacttctccaccgtcagttccttctctctaaacaatgagatgatgtgtataagacagtagagcacagtgtctgacacataagatggcaagcaaatgagagtggtttccacatcacctggattatatttattttttgtatcatttcatcaagtcatttaaaattctgtttgtgggctaggtgccgtggatcactcttataatcccagcacttcgggaggccgaagaagcaggatcatttgagcccaggagtttgagaccgacctg

SEQ ID NO: 20148 - DNA, 357 bp, Homo sapiens
  misc_feature (1)...(357): n = a,t,c or g
gctacctagtgggtcttggggaccttcgaaatcgccgccgctctcacaatggcttgggtccagactgcgccacagcctctcgggagacgtgggccctcggaacctttttagtgccggactccgggccgcaggcagtcccgcggcagcaggatcacagaacctctggatggactcttcctgggaagctttgctactttgcagcagctgtaccatgtgactcattaacatctgtctgagagcttantcatcacatnntntcactgtgctcttgaagcttgtgcgcctntnngcaagacgttnctgcccataannaatntatcaccgagnngtgnnaatatgnanaaanttnctnnaggg

SEQ ID NO: 20149 - DNA, 385 bp, Homo sapiens
  misc_feature (1)...(385): n = a,t,c or g
ggttgaccaaaggccctcctctgtaagagtgaattgcacgctcacttgaaactatcttgagggactaaggtgtacaatcctggtgcttatgcagtttggggctctaggtagacacgagctggctttgaaattgtagattcctacactccccctttctagagttctgggtctaagtgaattgactcctatttctgttgtgaatgttgtagtttcccttcccattctcttggtggccctggaagcttctaggcacagtgtgccaccctgattattcccactactccgtccaacttttctctctctgtggngctgcaccacaagctgcctaccttcaggtgcctnaatggccggccaccagttgtgcctnggcgccccccggccacat

SEQ ID NO: 20150 - DNA, 377 bp, Homo sapiens
  misc_feature (1)...(377): n = a,t,c or g
ctggggtcacccattagacgtggccattaataggttcttcatggaaaggggagatgggggagaggcttggcggaggaagaggagagtgtcactctgagttgagctgtgaaggggaggagagccatagggccatggctctaggtaaaggaggattgtccggtgggtttaacaggacagactcgggctttgggggaggcatgagtagagggagagtgggcttcttggagagcggtcgactgagggagggagacaaaaaanaaaaaaaaaaaaannnaaanaaaaaaaaaaaannaaanaaaanatanatnanntnnntntttttncncctnnnnatnttantnntcntgttcnnattnngnttnncnnnngnntttttc

SEQ ID NO: 20151 - DNA, 407 bp, Homo sapiens
aaacataaattgcaagtatcacagaaaattgtaacaacacatgcaacacgggatggctttcaacacacagagagcctaagcaagaagagtgagtactgaaggtctacagaggtcagactgggagcactaccacaggaagtttgaatctatccacgcagctctttcctcccacagtccaggctcaacacctcttcctattccaaggtggcttatccatatgcagaaatccaggctgttccatatacattaatacttgcccagctgtgtttcacgaggcatctccataagccaagccccgactcaaattctgtacaggaagttcccgttgctgtcaaagaactctcggcccctctgcactactttgctgctgaagttatctggctcctctgccttcaactcctccagct

SEQ ID NO: 20152 - DNA, 331 bp, Homo sapiens
tttttttattattatcatttttacatattttggaacctcacataattttgataaataactcttacaaaattatgcaaaaagtacaagaatgtctggtaaacaaacagtctgtatcttccaaaaagattttttacaacatgcaattcttaaggcagcatcctctttacaaggaaaggtaatccttttttatcaagaaatcttctgctgcaaagaatggctaagaaagcctggcttcttccattaacgccttttgtctttcctgtctgattttcggctctttcacttcttgaagatcttttgcctgatcgactactctctgaatagacctctt

SEQ ID NO: 20153 - DNA, 444 bp, Homo sapiens
ccgtgtaccagattctactgaagaaaggtagccatggaagagaatatggaagagggacagacacaaaaagggtgttttgaatgctgtatcaaatgcctggggggcattccctatgcctctctgattgccaccatcctgctctatgcgggtgttgccctgttctgtggctgcggtcatgaagcgctttctggaactgtcaacattctgcaaacctactttgagatggcaagaactgctggagacacactggatgtttttaccatgattgacatctttaagtatgtgatctacggcatcgcagctgcgttctttgtgtatggcattttgctgatggtggaaggtttcttcacaactggggccatcaaagatctctatggggatttcaaaatcaccacttgtggcagatgtgtgagcgcttggttcattatgctgacatatcttttc

SEQ ID NO: 20154 - DNA, 466 bp, Homo sapiens
ctgagcccaggttgatttcaggcggacaccaatagactccacagcagctccaggagcccagacaccggcggccagaagcaaggctaggagctgctgcagccatgtcggccctcagcctcctcattctgggcctgctcacggcagtgccacctgccagctgtcagcaaggcctggggaaccttcagccctggatgcagggccttatcgcggtggccgtgttcctggtcctcgttgcaatcgcctttgcagtcaaccacttctggtgccaggaggagccggagcctgcacacatgatcctgaccgtcggaaacaaggcagatggagtcctggtgggaacagatggaagagtactcttcgatggcggccagttttagggccagtgagcatgagaatgcctatgagaatgtgcccgaggagaaggcaaggtccgcagcaccccgtgtaaccttctctgtgggtcaacccc

SEQ ID NO: 20155 - DNA, 358 bp, Homo sapiens
gcggcacgagatttaacacaggcatttgattcaaaaagacatctttgattcatcaataaacagagattcactatatatctggtcacagaagagtggatcaagtattattcaatatattttcaatccatggaacaatttgaggaaaaatgggcttttaatgttaggatgtaccagggatctaatcttagacccccttctctctgccttccccacaaaaccccccctaggtgatttcaccctttcacacatctctgagctctgcccattgatatctctgtcctgaagttcctcaattacttcaaactcaacaggatccagatctaacacagtttcttgcttcataaatctgcttttctta

SEQ ID NO: 20156 - DNA, 350 bp, Homo sapiens
ttctggtgcattcatgactgataattactgctttggtagacggctgctcagtttccttggaggaactatttaataggtggtttacttgacccaataaatcctggtaaattttctggttatctgatggttgatgaagcaagggttgcattacatgctcaatttttggttcctctgatgtttcagaattgttactggcaccccctgttggtccagtctgtaaacacatgcttacactttctgccagctggccacttggaaagaacacaggtacatcaggttcttttctcacaactagagaagagctgttggatacagaaagtggctggttaaattcttcttccacagcaatg

SEQ ID NO: 20157 - DNA, 346 bp, Homo sapiens
  misc_feature (1)...(346): n = a,t,c or g
ggatccttccagctgaacaaagtcagccacaaagcagactagccagccggctacaattggagtcagagtcccaaagacatgggcttgttagagtgctgtggtgtttctttggggtggcactgttctgtggctgtggacatgaagccctcactggcacagaaaagctaattgagacctatttctccaaaaactaccaagactatgagtatctcatcaatgtgatccatgccttccagtatgtcatctatggaactgcctctttcttcttcctttatggggccctcctgctggctgagggcttttacaccaacggcgccantcaggcagancttttgcgaattacaaa

SEQ ID NO: 20158 - DNA, 386 bp, Homo sapiens
gaactggaatggattcaagaacaggagacccagtggaaaatctggcaaaatctcaatttggaatctggagtttggttggtagtaaggtacctgttggtttcttggttttgaaaaatgcacttggttttgtaaactgttattattatggcaagctgtgtgaggaatataaaggaatataaaactctttgtattatctttgtaactcttctatacacctaaacttctaccaaaataaaaaggttgtttttaatggtcaaaggacctgaatagatccttcaccaaagagaatataacaaaacatacgacaaaatgcgcaacatcactagctatcaggaaagtgaaaaatgaaactcattatcaggtaccactacaaatctattagaatg

SEQ ID NO: 20159 - DNA, 302 bp, Homo sapiens
ccagcttatttttctattttttgtagagacaggagtcttgctatgttgcccagactggtctcaaacgcctgggctcaagcgatctgcccggcctcagcatcccaaagtgatgggattacaggcctgagtccaaccataagtaagtttttgttttttgtttttgagtcaatctctctgtcccccaggctgaagagcagtggtgcgatcatggctcactgcagcctcacctccaggcgggagccaccatgccggtcaattaacttttttgtttcagtaatcactttaaatgtaaataatctgcc

SEQ ID NO: 20160 - DNA, 368 bp, Homo sapiens
gaatttccatttcacagatgagaaaactaagactcaaaaggattaagtaacttgccagggtcacacaggcagaactgagtttcagacccaaggtgtctcaactccaaagcccatgctgtcaatgactccaacatctcatgtctgtggtgttcttaccccagagtcaacatcactcttggcttgccctgcctgttgcagtacatgttaaatcctctcgaagggatgccttgagacaaaaccaccacagagagggacttgaaaaaacccagggccctgcacctgatgcaaactctactgggcccttactggtaggaactctaagattctgttcctttaaagaacttgcctcctgtagattctgatgctac

SEQ ID NO: 20161 - DNA, 382 bp, Homo sapiens
  misc_feature (1)...(382): n = a,t,c or g
gcccctacggaccaggtatagagaaaggtctatgcagaaataggttagagtttccctaacaaaaaagctaacccaggtcccctcattccttcaacttgtgcctgggagtgtgtggtgttagggtgcagccacagtcttctatgacccagcatgggttagtgctatggtgggagagtacattgaaggcctggaattagcttggggccagggaagggactgggaggggagagaagagaaggagggaaggatttaggatggtaaagttaggtacagagacctccctgttcaaggcccctgacagaagtgtgtgtggcaacaggcancggggaggggaggaacagggaaggggganctggggagcttgctgagggctgggaaatga

SEQ ID NO: 20162 - DNA, 362 bp, Homo sapiens
  misc_feature (1)...(362): n = a,t,c or g
gcataatcatcattaaatttcagaccagcaacaaagcaaggatcctaaaagcttccaaagagatcaaaacttagaatgctgtcacattgtccaaggcaacactggtagaaaaagtggaggaaaccttcaatttttgcttttttttttttcaaangannggncaaannaggcattttnannctttnaanatnncnttngcccntttttngggnanctntanaagganganttgtnccnaannantaacntaaaangggngataganantttaggaaccagggaaaccccttatgantagantntccgggannataatgttnaagggggatccangnatgacggttggncncatcnnttaaaaa

SEQ ID NO: 20163 - DNA, 334 bp, Homo sapiens
ggagctaatgagccaataccctgttactaggacaccccatggttccctgcggtctgtgttctttgctgcaatgagcaataaatccaacctgctctatgacaggtgtactcctagtggtctttaactgaagggtattcacacttgtaaatactaacagtgaaatgaaaatagactaaatgttctaggcttagaaaatgactctaaaactataattcacagggagggcagctttggatgatgctggtgtaagatttcttcagttttgcttttaatgtcaagaccatggtaaaatgttttaaatggctcaggtaaagtaaaaagcattaaaaactgg

SEQ ID NO: 20164 - DNA, 371 bp, Homo sapiens
atggaaaataccagggacctgtttttatgctgatgaaagtaaggcttgaaaagaggaagagcttgttgcaggagtaaactatgataaatgcaggggtattgctgaaaagtcaagaggggattggattcagatgacaagaagaaagaacagctgggaatatagaaataggtgcaggtagatttgtagatgtgcttggaaggtcgacgcggccgcgaattccagatctatgaatcgtagatactgaaaaaccccgcaagttcacttcaactgtgcatcgtgcaccatctcaatttctttcatttatacatcgttttgccttcttttatgtaactatactcctctaagtttcaatcttggccatgtaacctctg

SEQ ID NO: 20165 - DNA, 530 bp, Homo sapiens
  misc_feature (1)...(530): n = a,t,c or g
tttggannaccnttgtgacacgattacgaatttaatacgactcactatagggaatttggccctcgaggccaagaattcggcacgaggaaaggcagcggtggccacagaggcggttggagagatggccttcagcggttcccaggctccctacctgagtccagctgtccccttttctgggactattcaaggaggtctccaggacggacttcagatcactgtcaatgggaccgttctcagctccagtggaaccagatggagggtacgtggtgtgcaacacgaggcagaacggaagctgggggcccgaggagaggaagacacacatgcctttccagaaggggatgccctttgacctctgcttcctggtgcagagctcagatttcaaggtgatgggtgaacgggatcctcttcgtgcagtacttccaccgcgtgcccttccaccgtgtggacaccatctccgtcaatggctctgtgcagctgtcctacatcagcttccacctcccggcgtgtggcctgcaaccgggttccattac

SEQ ID NO: 20166 - DNA, 429 bp, Homo sapiens
cggacgcgtgggggcctcaggcgcctttgtctacctgcggcagccgtactatgccacgagggtgaatgcggctgacattgagaaccgagtgttggaactgaacaagaagcaggagtccgaggatacagccaaggctggcttctgggaggagtttgagagtttgcagaagcaggaggtgaagaacttgcaccagcgtctggaagggcagcggccagagaacaagggcaagaaccgctacaagaacattctcccctttgaccacagccgagtgatcctgcagggacgggacagtaacatccccgggtccgactacatcaatgccaactacatcaagaaccagctgctaggccctgatgagaacgctaagacctacatcgccagccagggctgtctggaggccacggtcaatgacttctggcagatggcgtg

SEQ ID NO: 20167 - DNA, 379 bp, Homo sapiens
gtccttatctaaaatcctaaacaaggctgggcgtggtggttcatacctgtaatcccagcactttgggaggacaaggcaggcggatcacttgagcccaggagttcaagaccagcctggccaacgtggtgaaacctcgtctttactaaaaatacaaaaattagccgggcatggtggtgcacacttgtagtcccagctactccggaggctgtggcgggaggattgcttgaacccgggagacggaggttgcagtgagccgagatctcgccactgcactccagcctgggcgacaaagtgagactctgtctcaaaaaattaaaaaaaaattttttaaatcctaaatattctcattccacaggatcctgcaaactgtagatcccag

SEQ ID NO: 20168 - DNA, 352 bp, Homo sapiens
gagaactgattattttgttgatcatgtttcaaaacccgtgccctttaaacaagttcccagagtaaattgaatgcaattgtgggaagtttaactttttaaaggaaatcttgttgtattttgagattgagggagaggatgatgggagagggtgactggaaacctgcccaaggactgaaaaatctaaggggatgggaggaaggatgaacagagaagagaaagactagaattctgggtcagaaactcttaccgaatgagtcatcccacaggacaaataaaacctcactcatcaccctgtcttccctctctgtagcgagagaagcaaacactggggccctggaaaaacatcagcaac

SEQ ID NO: 20169 - DNA, 424 bp, Homo sapiens
gggcagctgccaacctgtatgcccagatgcatgggctgcctggctcacaggactggactgcactcagggagctgctgaagctgctgccacagcctgacccccaacagatggcccccatctttgctagtaatctagagctggcttcggcttctgctgagtttggccctgagcagcagaaggaactgaacaaagccctggaagtctggagtgtgggccctcccctgaagcctctgatgtttgagaaggatgatgacagcaacttccatgtggactttgtggtagcggcagctagcctgagatgtcagaactacgggattccaccggtcaaccgtgcccagagcaagcgaattgtgggccagattatcccagccattgccaccactacagcagctgtggcaggcctgttgggcctggagctgtataa

SEQ ID NO: 20170 - DNA, 505 bp, Homo sapiens
  misc_feature (1)...(505): n = a,t,c or g
tgctgcctcagcctcccaagtagctgggattacaggtgcccaccaccacacctggctaatttttctatttttagtagagacggggtttcaccatgttggccacgctggtctcaaactcctgacctcaggtgatccacccgcctcggcctcccaaagtgctgggattacaggcgtgagccaccatgcccagcctaatacgttactattaaatgaaatctgcatgcctccttaggcccctttatctttgatagtttctcagttttgttttgatgaccttgacagttttaaggagtactgatcaaatattttgtaggaaatgtctcttttggactttttctcatgtttaaactagggttgtgggtctaaggaggaagatcacagaggtaaagtgccattgcnataanccattccagggttaaacnaagaatgtcattaagcctgttggngttaccctgacaactggcaaaagtaatgttggtaggttccccaccaaggtaaccttccc

SEQ ID NO: 20171 - DNA, 687 bp, Homo sapiens
  misc_feature (1)...(687): n = a,t,c or g
tgggtgtgaaaggcagcggtggccacagaggcggcggagagatggccttcagcggttcccaggctccctacctgagtccagctgtccccttttctgggactattcaaggaggtctccaggacggacttcagatcactgtcaatgggaccgttctcagctccagtggaaccaggtttgctgtgaactttcagactggcttcagtggaaatgacattgccttccacttcaaccctcggtttgaagatggagggtacgtggtgtgcaacacgaggcagaacggaagctgggggcccgaggagaggaagacacacatgcctttccagaaggggatgccctttgacctctgcttcctggtgcagagctcagatttcaaggtgatggngaacgggatcctcttcgtgcagtacttccaccgcgtgcccttccaccgtgtggacaccatctccgtcaatggctctgtgcagctgtcctacatcagcttccagcctcccggcgtgtggcctgccaacccggctcccattacccagacagtcatccacacagtgcagagcgcccctggacagatgttctctactcccgccatcccacctatgatgtacccccaccccgcctatccgatgcctttcatcaccaccattctgggagggctgtacccatccaagtccntctcctgnanncacttgactt

SEQ ID NO: 20172 - DNA, 404 bp, Homo sapiens
gtgactgacagcggcatagagctgctgacctgcgtgccccgcactgtggaagagattgaagcatgcatggcaggctgtgacaaggcctttacccccttctctggccccaagtagagccagccagaaatcccagcgcacctgggggcctggccttgcaacctcttttcgtgatgggcagcctgctggtcagcactccagtagcgagagacggcacccagaatcagatcccagcttcggcatttgatcagaccaaacagtgctgtttcccggggaggaaacacttttttaattacccttttgcaggctcccacctttaatctgttttataccttgcttattaaatgagcgacttaaaatgattgaaaataatgctgttctttagtagcaactaaaatgtgtcttgc

SEQ ID NO: 20173 - DNA, 358 bp, Homo sapiens
  misc_feature (1)...(358): n = a,t,c or g
ggtctatttggttttcagctcatgttcttttcatgatattttgctttctctcaatatttatagaatttaatttaattgactagaattaaactaagagaaaatgattgaatgaagagatgcagaaggcaagagatagcaaaggtcattctgggctgggcatggtggctcacacctgtaatcccagcactttgggaggcctaggcgggtggatcatctgaggtcgggagttcaagaccaccctggccaacatggtgaaacacccccgtctgctaaaaatacaaaaattagctgggtgtggtggcaagcgcctgtaattgcagctactcgggaagctgaggcangagaatcgcttgaactg

SEQ ID NO: 20174 - DNA, 443 bp, Homo sapiens
  misc_feature (1)...(443): n = a,t,c or g
gcgcctgtggtcccagcactttgggaggccaaggcaggcagatcacttgaggtcaggagtttgagaccagcctggccaacatggtgaaaccccgtctctaccaaaaatacaaccaaaaataatctggcaggataaaaccagaaaacatacacaatttgatgtcaagacctacttcaaaagctgtagtaggccaggtgcagtggctcatgcctgtaatcccagcactttgggaggccgaggcgggaagaccacctgaggtcagaagttcgacaccagcctgaccaacatggcgaaaccccgtctctgctaaaaatacaaaaatgagctaggtgtggtggctcatgcctgtaatcccagctactcaggagactgaggcaggagaatcgcttgaacccgggaggcanagcttgcagtgagccgagatcatgccactgcactccagc

SEQ ID NO: 20175 - DNA, 363 bp, Homo sapiens
gctgcctggaagaatggatagattgcattcctctaattccatctctgtcaaatatcagtttgctcaggaaggctctgggaagaagtagcaatggccaaataaatgttgacctctctggtaagcctggagagcagattttctctattgcttattaaggggatggctatgccttgagtaccacatatgcagatgacaaatttaactaaattcaagtagaggcgcctgttttgttttctgaacaggatgctatctcttcacaagggtgaggacaagcacctgcaggcatcctctgtccttggaaaaatgtttgaacttagtggctatcaaaaggatcttgccactgggtggcacttaagaagtgac

SEQ ID NO: 20176 - DNA, 387 bp, Homo sapiens
gggacgacatgatatgctacctcctttttcctgaagttttattccattatattgacaagatggagaaagcaagatcacgaaggtgtgcaaatgattcttaaggcatggacgaggatttttcaatttattttttaaactgtttccataccctttctttgtctttcttgctttttgtttttgccgttgtatttatgtttgagacacaaccagtcattggtggcaggggcatatagtggtcagtctgaaagggaggctctcttaagagctgtgtgccttccacccagagccttgtgggagacccagtagaaagaaacagcatcctgggaaatccagctaccatggccctcccagtggaggcatcttacatttaggatacttcaagtatcc

SEQ ID NO: 20177 - DNA, 448 bp, Homo sapiens
gatgagagtggcttaaaaacttccatccctacttttcaagagtgcagttgattctgaatctgaaagcccgcctctgtcctaaaatacaaacaagcacagacattaaacctggatactatatgataaagagggatgtaactattgaattggatacaaggatcagaatggaaagaaactcacgatgaaattgaacctggtttttgtatatttatcaaacttgtgctgagaatagtgtctgattatacgacttttaagcaaagttgggtgtaattaggtgaaaacagcccaggtcctcccgggagcacagaggggctaggggctggtccttctcgtttgctctagtcttgctttgctgtctggtgtaactcctctgctgctcccatctgcactaattgacccaaaacgtgggtatttcctgctacacaaaagccaaaagggttcatgtaga

SEQ ID NO: 20178 - DNA, 159 bp, Homo sapiens
  misc_feature (1)...(159): n = a,t,c or g
ctcttgtggttgcctgttgagttttttggttattgagaaagtcttatgatcaactgttgataaaggtttgcaatgntaggantcngtancagactcaggggaaggtanattcncnatatttctnttgtctgtncattttcgttgtatgtctaggtgtgg

SEQ ID NO: 20179 - DNA, 384 bp, Homo sapiens
cccaaaccaaatttattataatcttacctaagctctattgttttactaataatactagtaatctttatcccagtaactcaggtcaaaatctcacattatatttacagacactgtagatttaatctctaggaattaaatgtgggtcttttttatatcttccatgtttctttttgaacatatggaatacagttataattgttttaatattattttctgctaattctaacaactctgtcagttctgggttcaattgactgatttttctcttcattatgagtcatttctttgcacttttgcatgtctggtaattttttgattgggtgctggatatttttgtatttataaatatgcttgaattttggtttgggacacagtaaaattatt

SEQ ID NO: 20180 - DNA, 374 bp, Homo sapiens
ggtagggaggataagatggaaaagaatagatctttctctccaggggtttgatgtgaaaacaggagagaaatcggagggggatgatggaatggactgtggggacatggaaatattttaatttcattttttaaaatttaagttattgaatagattttaaaaagtacctgtttctaaattcacaaatgatagggcttagccatagacctcctatgatttgctgggccaaaccaggcaaaaaactttatgaaataatgctttagatgaaatgattcatagagttctagccctgaaattctctactgagttatgattaatcttgctttctaaataatgtagatacttgtcacatagatgtggccaataataattactgg

SEQ ID NO: 20181 - DNA, 291 bp, Homo sapiens
tccttattgtaaaatgatttatagcctctaaaacagtattctatgcctctcatctttgagttggagcctctcccatacccatgtggagagacaaaaggattattctaagtgcagaattagcaggtgagagctggtatgcataatttgagttgttgttagagaaggaaaaatgaagggagggggttgggagagaaagacaggatattaaataatttaaaatagcaagattgtgaggaaggaaaaaatgcagaatatttaaataaaaaattaacaaaattttagaagcattaa

SEQ ID NO: 20182 - DNA, 343 bp, Homo sapiens
cttaccgtggcgagttccgcgctcaatggagacgtttgcccccaccgagctgcccgagctgcttaaactttattaccggaggctctttccctactctcagtactatcgctggctcaactacggtggagtgataaagaattactttcaacaccgtgaattttcattcacattgaaagatgatatttacattcgctaccaatccttcaacaaccagagtgatctggaaaaggagatgcagaaaatgaatccatacaagattgatataggcgcagtatattctcacagacccaatcaacacaatacagtgaagctgggagctttccaggctcaggaaaaagaactg

SEQ ID NO: 20183 - DNA, 387 bp, Homo sapiens
gatttctgaagagtgcagctgcctgaaccgagccctgccgaacagctgagaattgcactgcaaccatgagtgagaacaataagaattccttggagagcagcctacggcaactaaaatgccatttcacctggaacttgatggagggagaaaactccttggatgattttgaagacaaagtattttaccggactgagtttcagaatcgtgaattcaaagccacaatgtgcaacctactggcctatctaaagcacctcaaagggcaaaacgaggcagccctggaatgcttacgtaaagctgaagagttaatccagcaagagcatgctgaccaggcagaaatcagaagtctggtcacctggggaaactatgcctgggtctactatcacatgg

SEQ ID NO: 20184 - DNA, 430 bp, Homo sapiens
gccactcctctgttcatgctttagactgtgtcattaacaaaataacgcacaacttccaaaatcttgatttcaagtttccctttatctgctgacctcctcctgtcattccagttctgttcccctctctagcttctccacttcagcacttccctgactcctcaggtaccttcagtctctcgaccctctcacttttgcatcttccatcaacatccctcgggtcctcattgcccttcctcctcacctcaggttctaaggcttctaattgtaatcactgccttaaccccgttgattctgtctctctctgttctcaacccagttaatccaccatttcacctatagtaacttgccagttaaatccactgttctgcacctgcacttggatagctgaatctggctggagaaaaatgcatagctttgttgacttgctcac

SEQ ID NO: 20185 - DNA, 342 bp, Homo sapiens
ggagcacaggtttggcctgagatagaagagacaccccttatgttacaagaagaaatgaatgtggatgttggtaggtttagtagcaggaaattaaagaaattcttgttttatggcttcagctttcattgtaaattaggaaatgtagttgcctgctaaaactgacatgggtcaaaaatttgagaaaagtagtgaagattcaaagcagtcaagaagagtggaaggaactttccagagaaacctagaaatcccaaacagtcttaaggataaatttgaacttggtgctcatgcttttatgacagtattaatctgttcagctttgggactttctctagcagtgcgttg

SEQ ID NO: 20186 - DNA, 379 bp, Homo sapiens
gctgtggggaccaacgcagatacaccagttttaagaaatattacaaatgaagttttgcagacaaaagcaaaacagcagttgactgaaaagccagctttcttagtaaagaaccttaaaccaagtcctgcagtgaaccttcgaaccgggaaagcagagttcactcaacatcctgagaaagaaaatgaaggggacattacaatttttcctgaaagtttgcaaccttctgaaacgctaaagcagatgaatagcatgaattcagtaggcaccttcttagatgtaaaacgtctcagacagttaccataattattttaacctttttaactccctgcccttttaatacagggacagggtgctcctgaagatacttagggaaaacagg

SEQ ID NO: 20187 - DNA, 457 bp, Homo sapiens
tagtagatctcttttgacatgaccacgaatttaatacgactcactatagggaatttggccctcgaggccaagaattcggcacgagccttaatatttttttggtgttcaggggttacaagctcatatggctacaagagccacgcagctgatagaaatgagtgaactggccaggagataagtggcagctgatcccactgtaattgcctgatggattctttctgcctgctgcacagacaaaaccagttcactgagactggtattgcagcagagaaaacctttcattaatgtgaggccagcccatgcagaacaaccagggttatcactccagtcaatctccctgaagactcagagtttagggtttttcaaggatagtttggtgggcaggcagggaggggttgggtgctgctgattggttgggggtgcaatcataggaatgtggaaaatagtcctcatgccg

SEQ ID NO: 20188 - DNA, 247 bp, Homo sapiens
gaacaaaagcgatgtcctacccttgccatgccagcaaatggagggtttaagtgtgtagatggtgcctactttaactcccggtgtgagtattattgttcaccaggatacacgttgaaaggggagcggaccgtcacatgtatggacaacaaggcctggagcggccggccagcctcctgtgtggatatggaacctcctagaatcaagtgcccaagtgtgaaggaacgcattgcagaacccaacaaactga

SEQ ID NO: 20189 - DNA, 319 bp, Homo sapiens
gcatttacaagcagaagtatttagcaggcagatggatagagaggtctggtgtttgagggaaagctctgagttgcagatactcatttgaactccagcagggataggctcttggataaacttgtcctaatgataacagagtcctcaggaagtctcctagtaggaaagaaagggagatagataaaacagcagttaccctggccttgtggtgtgctggcggcacacactgggagagagcccagcttgcaaggcgtgaaataattcagtgcaaacaaatcaggctgaacagtgacatatataactcgtgggcttgatgttgcta

SEQ ID NO: 20190 - DNA, 387 bp, Homo sapiens
cggacgcgtgggctggcatggattaatagagttaaacactataactaaaatttccaaataagcgcaaaaggagatgaagcagttagttaccttttttgcttgaacagtccaaaggaaaatggttactataaatacagcaggcaaactgttagactgacctatctagaacatagtgtactaaatttcagtctcaaattgtgctaaatgctcatcattagtatggcacatttggtaattttagttatagtgtttaactggcatggattaatagagttggagttttatttttaagaaaaattcacaagctaacttccactaatccattatcctttattttattgaaatgtataattaacttaactgaagaaaaggttcttcttgggagta

SEQ ID NO: 20191 - DNA, 364 bp, Homo sapiens
gttaaaatggcctgtaaatcgcaaaagtccatgggaaattcatgtacttacttttagaagcatgtcagccccttgacaccttaaaaatgtattttttagtagcagttaaactacatgcttcccagccagtggtatattgttgaggtagtgcagggtgatgataggcttgtataaataggtacagtgatggtatattagcaaaaagaaagacaaacactaaaatccagccaggtgaggtggtgtgtgcctgtagtcccaactactcgggagcctgaggtcgacgcggccgcgaattccagatctatgaatcgtagatactgaaaaaccccgcaagttcacttcaactgtgcatcgtgcaccatct

SEQ ID NO: 20192 - DNA, 452 bp, Homo sapiens
gtttgacattattacgaatttaatacgactcactatagggaatttggccctcgaggccaagaattcggcacgagggagatggggccgccctacgccgggcagcaggagcttgcctccttccactccacctccaagggctacatgggcgagtgcgggttccgcggcggctatgtggaggtggtgaacatggacgctgcagtgcagcagcagatgctgaagctgatgagtgtgcggctgtgcccgccggtgccaggacaggccctgctggacctggtggtcagcccgcccgcgcccaccgacccctcctttgcgcagttccaggctgagaagcaggcagtgctggcagagctggcggccaaggccaagctcaccgagcaggtcttcaatgaggctcctggcatcagctgcaacccagtgcagggcgccatgtactccttcccgcgcgtgcagct

SEQ ID NO: 20193 - DNA, 363 bp, Homo sapiens
ggaatggtaacagacagtttttcttaatgctattttgattcatggatccttgagaatcattaaaactatggacccatactccagaagagtgtccatatgcacaaaatatcacataccatttcaggggtttcatggatctcatttgttagcatttatgaatcctagttcaatgacccttccccaaagccaaagcctcaaacaaccgcttttgttaactttgtcaactgcttctaatgtaattgctcagaggcataaatatcacctgagcagtttttagctggtgatctttttatttattcatatttaaccaaggtaaaggggtccctaaagcttatttttttagttgcctaaaatttctaaggg

SEQ ID NO: 20194 - DNA, 330 bp, Homo sapiens
ggagtagttgacttatttggatgaaaaccactatcttctgtcagaaactcaaaaggaatcattgctggcatggtaacctaaagaaaaacaaccagacaagtgcccaacgacacttaaaaaggggatttattatcttgccaagtttaggctgggcatggtgactcatgcctgtaatcccagcattttggggggctgaggctggtggatcacctgaggcaggagaatggcgtgaacccgggaggcagagtttgcagtgagccgagatcccaccactgcactccagcttaggcgacagagccagactgtgtctcaaaaacaggaaagaaaaca

SEQ ID NO: 20195 - DNA, 478 bp, Homo sapiens
  misc_feature (1)...(478): n = a,t,c or g
ggtgccanntgctctttgannattgagatatnttaggacatgccacgaatttaatacgactcactatagggaatttggccctcgaggccaagaattcggcacgaggcggtgttcattgcgcaactcaacaacgtagagctcaacgcaggacagattttcaccattctagtgactgccacagcgtccagtgttggagcagcaggcgtgccagctggaggggtcctcaccattgccattatcctggaggccattgggctgcctactcatgacctgcctctgatcctggctgtggactggattgtggaccggaccaccacggtggtgaatgtggaaggggatgccctgggtgcaggcattctccaccacctgaatcagaaggcaacaaagaaaggcgagcaggaacttgctgaggtgaaagtggaagccatccccaactgcaagtctgangaggagacatngccctggtgacacaccaaaa

SEQ ID NO: 20196 - DNA, 302 bp, Homo sapiens
cataaactttacaacctttgaaattcaggtatttcattcttatctctttcctatgaacatttatttaggtcagccagctctatgaagtggaaatcaattgaacaaaccaaaaaaacctaaccctaccaccttctagaagaaaaacttactagatatcagatttcagagactattctgaaatttcacgacctagtttagttttctgtttattcaataatcacattatttacaaagatcaacaaaattatttgtgtacaaagtaattaataataataataaaaagttctggatctctaaagtgg

SEQ ID NO: 20197 - DNA, 86 bp, Homo sapiens
ggaagcagctgggataggtatgcacaggtgcacaagaacacagctgactggggtcctgagtcctgatggcgcctccccttagagac

SEQ ID NO: 20198 - DNA, 530 bp, Homo sapiens
  misc_feature (1)...(530): n = a,t,c or g
ggaaacccttnatgaaccggantacgaatttaatacgactcactatagggaatttggccctcgaggccaagaaattcggcacgagagcatttttagagtgtaaaggagggggcagaacagaaactacagaacttcgtaatgttaattataaagattatggaggaaaaaaacctgaaaggccaaaaatgggactttgtttacgagcacagataacctttttaattttattttgccaaatttttaatcagctgggttttagattcagtgagcacaagtcactgtaactttcattttaatttattatttcccttagaaacatctcctattctttgtgaccatatctccttttccagtatgttncttgaactagggtttcataaaatgcagctggtgaatctccctaagtatcccataaaaatcagagaaatggccaggtgcggtggctcacatttgtaatcccagaactttgggagaccaaggcaggnggatcacttgagggcaaaanttcaagaccagcctggccacaatgg

SEQ ID NO: 20199 - DNA, 393 bp, Homo sapiens
gggagaaagtaattttcctgcaatacttaataattggcaccgttgctttctaaagactccatggtgcattcaagagtatccaacttcaagggaatctctgcatttcaatgaaaggaggaagagtgtgctgataaacctaccagcacctattgagcaatgtctattatagtaattttgcatacatttttatttaagggaaaaaatataggtattgtgaaatattttgctaatcttatagaaaaggaaaaaatcccgttatttaaagggaaaagtaaatttaacagttgccttttttcttaatgtcagggcagatcttattttacagtacagtgggggaaatagaaacatgtgaaaggcaaaaggcaggctcctaaattaatgcagtgaagttca

SEQ ID NO: 20200 - DNA, 390 bp, Homo sapiens
gccatgtgctccctgacctgaaggaggaggatggcagcctcagcctggatggtgcagacagcactggcgtggtggccaagctctcaccagccaaccagcggaaatgtgagcgtgtactgctggccctattctgtcacgaaccctgccgccccctgcatcagctggctaccgactccaccttctccctggaccagcccggtggcaccctggatctgaccctgatccgtgcccgcctccaggagaagttgtcacctccctacagctccccacaggagtttgcccaggatgtgggccgcatgttcaagcaattcaacaagttaactgaggacaaggcagacgtgcagtccatcatcggcctgcagcgcttcttcgagacgcgcatgaacgagg

SEQ ID NO: 20201 - DNA, 279 bp, Homo sapiens
ggctaaagaagctgcgcgggacagctgacgtgacccatgacctgcaggagatgaaggaagagagtcggcagatgatgcgggagaagaaggtcaccatcctggagctgttccgctcccccgcctaccgccagcccatcctcatcgctgtggtgctgcagctgtcccagcagctgtctggcatcaacgctgtcttctattactccacgagcatcttcgagaaggcggcggtgcagcagcctgtgtatgccaccattggctccgtatcgtcaacacggcctt

SEQ ID NO: 20202 - DNA, 374 bp, Homo sapiens
gctcactcgtatttcccacccctagtggccagaggagggaggggcacagtgaagaagggagcccaccacctctccgaagaggaaagccacgtagagtggttggcatggggtgccagcatcgtgcaagctctgtcataatctgcatcttcccagcagcctggtaccccaggttcctgtaactccctgcctcctcctctcttctgctgttctgctcctcccagacagagcctttccctcaccccctgaccccctgggctgaccaaaatgtgctttctactgtgagtccctatcccaagatcctggggaaaggagagaccatggtgtgaatgtagagatgccacctccctctctctgaggcaggcctgtggatgaag

SEQ ID NO: 20203 - DNA, 343 bp, Homo sapiens
gcccagtatgttgtttttcaaagtgtttttgctcagatcacctgcctaggatgtttattaaaatgatgaattctcatgccgcacctcagactctcagactctgaattttaatcaggttccttgggtaattattaggtacagcaatcttagggaactactaccctgagagatgattaagacccgtgaggagggaatacctacatttatgaccattgccatacgccaacaaaatcacccagagatgcttttccatgtactcttgcctatgcagtactcatcccttaactatactcatttaactggcttggaacagggcccctctttgtgtaggctgggaagagaa

SEQ ID NO: 20204 - DNA, 418 bp, Homo sapiens
  misc_feature (1)...(418): n = a,t,c or g
gggctgcgtctggctcccgctctcacagccattgcagtacattgagctccatagagacagcgccggggcaagtgagagccggacgggcactgggcgactctgtgcctcgctgaggaaaaataactaaacatgggcaaaggagatcctaagaagccgagaggcaaaatgtcatcatatgcattttttgtgcaaacttgtcgggaggagcataagaagaagcacccagatgcttcagtcaacttctcagagttttctaagaagtgctcagagaggtggaagaccatgtctgctaaagagaaaggcaaaggcggacaaggccccgttatgaaatgagaaatgaaaacctatatcccttccaaagggggagacananaagaagttcaagggtnccatgnccccannaggcttcttttgcctt

SEQ ID NO: 20205 - DNA, 522 bp, Homo sapiens
actagttttagcatctgagtcttaccttcccccccactgtattgaagaatgttggtgatcttttaagaggtactctgtatagtttgtcattcatacctacaagaaaacaaactttagattttttgttgttgtgttgttaccttcagctactctttggttatttcatgtctggtttcaaaattcccatgtcctgtgaaaccctgtcaagcaataaataattggtactgttaaatttcataatggaaaaaattggaactcaaagtattaggagtttggcattgattttaaaggacaaagaaagaggctatgaattctcaaagatactaaacctgtaatgggatggacttcttgctctgttgaaaaggcctggtctctggaagatgaacttaaaaccagcttctcaaagtggttcatttaccacacatacttcagtgctcttttctgatttcatgtcccttatcaaggtttatgatttggggaccctcaggatttaagtgatcatggagaagggaccataggtat

SEQ ID NO: 20206 - DNA, 337 bp, Homo sapiens
  misc_feature (1)...(337): n = a,t,c or g
gacaggaacattcaaaggcatttatggtgaatgggcagaaattcatggagtatgtggcagaacaatgggagatgcatcgattggagaaagagagagccaagcaggaaagacaactgaagaacaaaaaacagacagagacagagatgctgtatggcagcgctcctcgaacacctagcaagcggcgaggactggctcccaatacaccgggcaaagcacgtaagctgaacactaccaccatgttcaatgcttcggccaatagtagcattcggcctatctttggagggacagtctatcactcccccgtgtntcgacttcctccttctggnantangccagt

SEQ ID NO: 20207 - DNA, 188 bp, Homo sapiens
ctcaaattagaaattcaacaagaatcaacttcaaagctgaaaaatgaattgtacacataatatatgctattgccatatggcagttagtgtttccctagtaaacaaacacacccttgccaaggtgaggctggaacagtgagcggcaggaccttatcccttttataaaatgagattgctctacacctgcc

SEQ ID NO: 20208 - DNA, 406 bp, Homo sapiens
  misc_feature (1)...(406): n = a,t,c or g
gaatttttcttgctggtactcatgaagaaaacatcttacttcatatttaaaggtatttttaatgtgaatagagtcaaaataatttataaaagtggtctttggggtccagattgatgtgttctaattatgagcctctgtgatcggacttaattcaaagatagatttttgaggggctagaggaatggattgaactttaggaatttctctatggatattgtttctcttctctgtgcttttgaaatggcagtgagtgagtctggcattggtaggtgatgctcacacttatgcattccagtgataactttcgtcaagttcaagactgttttggaaaatttctgcataactttgttgagttttagaattatatttgcagtnaaaatttttattttaattgtgaaatacccaa

SEQ ID NO: 20209 - DNA, 301 bp, Homo sapiens
  misc_feature (1)...(301): n = a,t,c or g
ttaaaatcgtttattttaaaggaaactttaaataaccaatggaaatgaaaaaccagccccacttgccatgaacagccccaactgttcggatttcattcgggcaggcggggtccacaagaggctctcttggcttaaagggagcccagcttgggccagatcaggtgttaaggacacgtgagcaccaaattgagcctttctgagtgatgaggtcaaaaaatgagagcacgcaggaagggttctccccaggggattctggggtgtccccaagtcatccggggccccgcacgctttngccntgctg

SEQ ID NO: 20210 - DNA, 330 bp, Homo sapiens
  misc_feature (1)...(330): n = a,t,c or g
gctctgatgataaaagcattaccttattttgcaggttcttgatatcagttgtagattctttggttttggtgtaaacatctgcaaagtatttactttttcagacataaagcagccactcatattgtgtgacatgggaggtaaaaatatatatattttgcattaatttttggttttctcacaganttcacccttataatctaatcaggtaagctaacagcaattttctctattttgtagatgaatagaggctccaaaggatttatctgtcagggtctcatggctgataaatggcaaagctaggattaggttgtagttctcttttgtctgtca

SEQ ID NO: 20211 - DNA, 409 bp, Homo sapiens
  misc_feature (1)...(409): n = a,t,c or g
gacgacagcacatcctcagatagacacggttgccccctggccacctgcctacccacctgtcacctcctacccacccctgagccagccagacctgctccccatcccaagatccccgcagccccttgggggctcccaccggacgccatcttcccggcgggattctgatggtgccaacagtgtggcgagctacgagaacgaggaaccagcctgtgaggatgcggatgaggatgaggacgactatcacaacccaggctacctggtggtgcttcctgacagcaccccggcactagcactgctgcccatcagctcctgcactcagcacccctggcatccgagacagtgccttctccatggagtccattgatgattaccgtgaacgttcgganagcggggagancncanaacgtct

SEQ ID NO: 20212 - DNA, 775 bp, Homo sapiens
gtggcaacgcggggttacccgctgttattgaggagtaacggcccagcggaccacccaggcttgaggcagcggcgggaaccactcggtttgctgcgataccatggaaggaggcgggggaagcggcaacaaaaccacagggggattggccggctttttcggagccggcggagcaggttactcgcacgcggatttggctggcgtcccgctaactggtatgaaccctctgtctccttatttaaatgtggatccacgatacctcgtgcaggatacagatgagtttattttacctaccggagctaataaaacccggggcagatttgagctggccttctttacgattggaggatgttgcatgacaggggctgcgtttggtgcaatgaatggtcttcggctaggattgaaggaaacccagaacatggcctggtccaaaccaagaaatgtacagattttgaatatggtgactaggcaaggggcactttgggctaatactctaggttctctggctttgctctatagtgcatttggtgtcatcattgagaaaacacgaggtgcagaagatgaccttaacacagtagcagctggaaccatgacaggcatgttgtataaatgtacaggtggtcttcgagggatagcacgaggtggtctgacaggactaacacttaccagcctctatgcactatataataactgggagcacatgaaaggctccttgctccaacagtcactctgaagattttgccaactcatgaatggaggacacttcagtagtcatcta

SEQ ID NO: 20213 - DNA, 398 bp, Homo sapiens
  misc_feature (1)...(398): n = a,t,c or g
gtatgattattatacttgctcaaaaatgctttcaatgtgattttgtttatttcatagatgtagaatacaggtattttgtctaatttttctatttttttctgtaatgtgcttattatgtttataataaccttataaattaatatagagaatagggcagataaatatttgaaaatgcattttgaaatgattttgaaaatgcattgttctgtgggttgctgttcttcctcctacattgtgaaaatacctatttttgggctgggcacagtggctcacacctgcaatcccagcactttgggaggccaaggcgggtggatcatttgaattcaggagttcaaaaccaacctggccaaaatggcgaaacttgtctctactaaaaatacnaaaattagccaggcatg

SEQ ID NO: 20214 - DNA, 161 bp, Homo sapiens
gcccagggaagtatgggcagttatgcagtaacttaaggctgctgtaatacggagatacattgaagttcattagtaacttttcagtgacccaaaatggatactttaatggttatataagtataaattaagtatattaggtaagggaaagaagttaatgccct

SEQ ID NO: 20215 - DNA, 506 bp, Homo sapiens
ggaatgggtagaagcatacagttagcagcaataagttcgaatgttcaatagcagagtagggtgactatagttaacaaccatgtattgtatatttcaaaatagctagaagagaggacttgaaatgttctcaacacacacaaattataaatactcaaggtgatggacaccccaagtatcctaacttgataattaccatatttgcgtgtaacaaaatgtcacttttacccaatacatatgtacaaatattatgaaatgataaaaacttttagaaagtaaagtgcttggttgggaggctgaggcagatggatcacgaggtcaggagtccaagaccagcctggccaagatggtgaaaccccatctctactaaaaatacaaaaattggccaagcacggtggcaggcatctgtatcccagctactcaagaggctgcggcaggagaatcacatgaacccggggggcggaggttgcagtgagccgagtccgcctctgcactctaacctgggtgaa

SEQ ID NO: 20216 - DNA, 771 bp, Homo sapiens
gggaaattacagacaggagttttaacattgtggatatcaagcctgccaatatggaagagctaacagaggtgattacagcagcagaatttcatccaaacagctgtaacacatttgtatacagcagcagtaaaggaactattcggctatgtgacatgagggcatctgccctctgtgatagacattctaaattgtttgaagaacctgaagatcccagtaacaggtcatttttttccgaaatcatctcctctatttcggatgtaaaattcagccatagtggtcgatatatgatgactagagactatttgtcagtcaaaatttgggacttaaatatggaaaacaggcctgtggaaacataccaggtgcatgaatacctcagaagtaaactctgttcactgtatgaaaatgactgcatatttgacaaatttgaatgttgttggaatggatctgacagtgttgtcatgactggatcttacaataatttcttcagaatgtttgacagaaacacaaagcgagacataaccctagaagcatcgcgggaaaacaataagcctcgcacagttctgaagcctcgcaaagtctgtgcaagtggcaagcgaaagaaagatgaaataagtgttgacagcctagacttcaataagaaaatccttcacacagcctggcaccccaaggaaaatatcattgccgtagctactacaaacaatctgtatatatttcaagacaaagtgaattagggttggcattcctagcagaagaacccacttcctgcttagt

SEQ ID NO: 20217 - DNA, 379 bp, Homo sapiens
aattcggcacgagcggcacgagttacattctagtttggggaagacaaataataaacagtaaacaaaaagaaggaagttataggttggaagtacatgagtaccataggaaaaaaatacagcgaggtaagaggcatggggaatgcaagatgcaatcttaggtaggcttcactgagaaaatgacatttgagcaaatattggaaggaggtgaaggagttagctgtgctgacagctggggaaagagcattccaggcagagggaccaccaatgcagaaagacctttgtcttggaatgtgcttggtgtcctcagtgaacaccaaaacggcctgtttggctggagtactgagtaagggactactaataaaaattaggtggcaaccca

SEQ ID NO: 20218 - DNA, 426 bp, Homo sapiens
  misc_feature (1)...(426): n = a,t,c or g
gaggaatactattgatttttgtatttcattacaataactgtgatgaaaatgatgtaaaaccctcaaaaccctcaacaaaatactagcaagtaaaatcaagcaatgtttaaaaaggattatacattataaccaaatgggacttatttcaggaatgcaaggttgaattaacatctgaaaatcaattaatgtaatacaccattatcaacagaatacaagacaaaacaccacgatttctgtcagtctgttcagactgttataacaaagtatcacgaactggtggcttataaacacagaaatttattttttgcaattttacaggcttggaagtccaaggtcaaggcactggcagattcagcatctggagaggactcgctttctgggttcatgaacagttgccttcttgtgtnctcatatgacggangaaag

SEQ ID NO: 20219 - DNA, 419 bp, Homo sapiens
gagcttgagaatttattgctttgttatagaagtaatttgctttttatacttattgttattatgtactcaatttcatgagggatttgacttttgatgaattttactatactttgtataggttactgaaaacttcaatacttcttttttgttgttgttggagcatttgatttttaccttccctttggcatgtaaaatgtttagttatgaaggttaaatattttgttttttgatatttctttgaaaacccagagatgagcattcttaagaaaaatgcaaagccctctgatctgttttaatcatttcgtaatttaagattctttattgtacttgttaaaattgtggttactgaaaggataatttctcgttgacaggataaggtatttgaaatattttaaaatctgacagtgaatttaaaatgg

SEQ ID NO: 20220 - DNA, 403 bp, Homo sapiens
gcctttgcatattaataattaaattcagactctcataatccccaaatctctgtcatatgtgagtctggttctgactctttgactctttagattgtgatttttgcatttgagcatgcttcgtattttgtgggaagccggatacgatgtagataaaagggattgaggtaatttggcctttactgttagattttatgtttatgtatgtgtgagttaggctgcttactgtttgaagtagctacaggtttcagagggtataatttcccctagtgttcttgtttttatctcttctgttgtctttggtttcccctagagactacttcttaaatagaatttgagccttgcagttcttttagctgtaatctcctgttattatactccagcctgattgaggggaacattttgt

SEQ ID NO: 20221 - DNA, 354 bp, Homo sapiens
gaaggtttattgtttcactttgtgcaccttctgtcatgcatacttgaaagcaatttctctagttggagtatataagttgccttgaaatccgaagttaaagtgactctattaaatacattttgagggaattttatttggcattgtgataagtgactccagtagagattttctttcgtatgtataaataaggtcaacacagagttacacaaggaaagcattcttaggtcatgtgtgtatgagagggcaggcaaataaacatctccttgtttgctgagagggagaaattgctatttattggcttaccataactacactctactttcatgaaagcattttgtaggaaagcagtctaat

SEQ ID NO: 20222 - DNA, 325 bp, Homo sapiens
ctgaattgcctcatcgcacctttctccttttccccgatatccaatcagacacccactctgtcaccgatactccacttgaaagccccaaggggtgatctattttgtttgctgctgtattcccagtgcctagaacaatgcctgacaccagtaggtatctactcaatcattttgtttgctgctgtattcccagtgcctagaacaatgcctgacaccagtaggtatctactcaatcacttattgaatgaattaatctgtcctctcctctttgctgacataaatgtagtccaaaccttattacctctttggcaaatcatgttcataccct

SEQ ID NO: 20223 - DNA, 506 bp, Homo sapiens
gggcagacaggccctggatgtgctggatttggtacccgtaggcctcattaatgctccggagctcagccagcaggcctagcaacttcgcatacagaaacctttggaggaagtagtggggttgccaggaaaacaggagggaaataaggcagttgggagtcttgtctctaggccctgatcccctgaactattcctcagtgaagccaggtctgaacattagagaaaatcatgctctggtatgacagactatcagaggttccaaaggtcctccagggggcctcggtctgacactgtcttctctcaccatgctcagttttttctgaacccagagctctgagagccgagtgtgaagaaagctccagacttggccagaactccaaccatgtggaatctgagggcctggccttctagagcaggttctagaaggtggatgtgttctatggtataaagcatcccctttctggccaaactagctcttggaggaacgagcaaaacagaagcggtgcatc

SEQ ID NO: 20224 - DNA, 346 bp, Homo sapiens
  misc_feature (1)...(346): n = a,t,c or g
gagcggagggagaagtaggttgcgagctcagcacaggctccggcgctggctcccgcagctgagtttgggagatgtctaagtgatttttttttttttcncgtaaggcaaaggnctgangcgaataccnancccgnttnnntttttcaaatttgngctnagntcttttnttganccttgcnactcgtnccnantnngctgagatntntcccaagggaggaattggcnntnatcactnnntnggatttaccnnagntngantttnatngnngttttccatnggnccnnaaantattgncnangntngatcaaagtgnnancnntgtnttntaatttagggccntatagt

SEQ ID NO: 20225 - DNA, 429 bp, Homo sapiens
ggaaaattaaaatatactccactcaagggaattctgtactttgccctttgggtaaagtctcatttacatttctaaacctttcttaagaaaatcgaatttcctttgatctctcttctgaattgcagaaatcagataaaaactacttggtgaaatgacttcttgtcacattgctgaagaacatatacaaaaggttgctatctttggaggaacccatgggaatgagctaaccggagtatttctggttaagcattggctagagaatggcgctgagattcagagaacagggctggaggtaaaaccatttattactaaccccagagcagtgaagaagtgtaccagatatattgactgtgacctgaatcgcatttttgaccttgaaaatcttggcaaaaaaatgtcagaagatttgccatatgaagtgagaagggg

SEQ ID NO: 20226 - DNA, 354 bp, Homo sapiens
cttctcaaggctcctgttattcccccaagaaaggcctaaacaccttaacctggcatctgaggccttttatgatctgtctgtccaacccacctctttaacacatctaactctttcacttcaaatgtgatcctgtagcaaaaccaaaccatctctgtgcccttggagggctttgaacactcattgtcgacgcggccgcgaattccagatctatgaatcgtagatactgaaaaaccccgcaagttcacttcaactgtgcatcgtgcaccatctcaatttctttcatttatacatcgttttgccttcttttatgtaactatactcctctaagtttcaatcttggcatgtaacctctga

SEQ ID NO: 20227 - DNA, 419 bp, Homo sapiens
ctcttgcctctcttcttgcgctgctcagctgggaacatcgtctcaccaggggcagcagcgacgcgctgcacagccagacaggagctggctgcggggcatggaagcagcctccttggcagccgggagaggagcaagcgcacgccactgcccgtgacccaggcgtccggctgctgtcccctgccggggagctcatccacgcagaggtctctccctgtcctccctgcgagcttttcctctgcagagcccagtggagccagtccccacaggagacaaccctgacgggagcatggagctgctgtccacgccccacagcattgagatcaacaacatcacctgcgactccttccgcatctcctgggccatggaggacagtgacctggagagggtcacccattacttcattgaccttaacaagaagg

SEQ ID NO: 20228 - DNA, 421 bp, Homo sapiens
gaggttttgtaggcatattgaaaataatctgtgagtacaacagttgatcccttgatatggtgactgccgttatcattcctaggtttcagatgaggtgattgaggcctagggagattaagaaacctttgcctggttgacacaggtagtaaggggtggatttggggatccagccagtcatgtgtgatgtcagtgctgggtgcttaactcctgccccttttggtgtgccctcttcaacactgcagtttatttgagacctttctacatgaggccttgtcaggaagcccccagcagtgttagaggaggtttctgccttttctgttattatgttctgtatccccagttggaggagttttgtttctctcagacagttggaaacacatgacaagaacttcagaggctgaggcctaatgtgcagattaag

SEQ ID NO: 20229 - DNA, 359 bp, Homo sapiens
ggggcttcccgttatccacgaggatttgtgggtgtcagagcccataggcatcactcttcagcacctggtctgttcgctgcagggcatggtggacagtaatgctgagttctgtctcacactgatcaggctcagggccagagaggcaacaagagagcaagacccagggaatgggcccagggcaggaccctattcccttggggtcaagtgaaagggtagggggatagtcctgatcaagtgtgataaatttttatagacatatataaatgtcgacgcggccgcgaattccagatctatgaatcgtagatactgaaaaaccccgcaagttcacttcaactgtgcatcgtgcaccatctcaattt

SEQ ID NO: 20230 - DNA, 358 bp, Homo sapiens
ggtgggtagtagttttgtacagcattttatagatgggaagacaggcttggaagggttaagtaactaacttgctgaaggtcacatagcaagtaaatggcagaactaggatttcaaccttgtttctgacttcagagctcaagtgttttgaggtcttgcttttctgtttccatttgcaaaacagatttaggtgaactgctctagaacagcactgtcccagtaggactttctgttatgatagacctgttccttatctgccctgtccagtacagtggccactagccatatgtggacatcgagtatttgaaaggtgactagtgcaactaaataacctgatttttaattttaatttagatccaat

SEQ ID NO: 20231 - DNA, 387 bp, Homo sapiens
gaaaatacaagataattaatgggaaaaatgagagtttattaggagagagagagactaggaagtactacagtctttaaaacaaccagatctcgcatgaactcacagtgagaactctgtcattaccatggggagagcaccaagccattcatgagggatccacctccatgatccaaacacctcccaccaggccctacctccagcactagggttatgtgttttcttgggacagggtctcactctatcacttaggctggagtgcagtggcacgatcatcgcttgctgcagcttccacctcccgggctcaatcagtcctcagcctgccaagtagctgggactacaagcatgtgccaccatgtttggcaaatttttctattttttgtagagacc

SEQ ID NO: 20232 - DNA, 324 bp, Homo sapiens
cttttcaatacagactatgttgtgaattggtggccttcaagtcaggtgctaacctgtgttgaatcagctgtaggaatggtggtaattataaaatacaaaataccctgctggtacaaggatagtctgggtctcacttctttcggtaggggcaatgtgtgaggcagtttctcctaggaagggttggcagttaaccataattgatctgaagcttgggagagaggtctaggtcgtgactgatttaggagtcacttgtaggtggtagttgaaactcagagtatttgaaagagagagggagaatagagtgagaaaaagcagtgggccaaa

SEQ ID NO: 20233 - DNA, 487 bp, Homo sapiens
aaacccctatgacatgattacgaatttaatacgactcactatagggaatttggccctcgaggccaagaattcggcacgagcagaaccccatctctccaaaaatacaaaggttggccaggcatggtggtgcacacttgtagtcccagtaattggggggctgagacaggaggatcacttcagcctatgagtttgaggctgcagtgagctgtgattgcgccactacactccagcctggatgacaggacgaaacctgtctcaaaaacaccaaaaaacaaaaaccggtctcctggggtcatggtagcacaaacgcacatgactgagtgctcaggggttctgaggcttgtccgctgacctggggctctggccctgggagatctgggggacctgctgtcctatatgtgatgctttgaaagaaaggggcatcattccaagccaagaggccccagagagggcaccgtgcggtgttcaagcttctgtgaggccccag

SEQ ID NO: 20234 - DNA, 375 bp, Homo sapiens
gaatttaatgatttttatgagttgtacaatcatcaccataatctagtttggggacattttcatcatccaaataagatccttcttgttcatttacagttactgcacattttcatcaccagcctcaggcagccactaatttattttctatcttgatagatttgcttattctggacatttcatataaatggaatcctatgatagatggtcttttgtatctggcttttttcacttaacataatattttttggttcatcgatgttgtggcacatatcagtacgtcattcttttttattgctgaatattctgttgtatggatatatcatgtattttggttaaatattaagccagttgatagacatttgagtggttttcact

SEQ ID NO: 20235 - DNA, 456 bp, Homo sapiens
accttctatgacatgattacgaatttaatacgactcactatagggaatttggccctcgaggccaagaattcggcacgagacttgaacccaggaggtggaggttacagtgagccaagatcacaccactacactccagcctggatgacagaatgagaccttgtctcaaaacaaaacaaacaaacaaaaaaagcatagcaagtccttttacatgaggatgagttactgtttatcttgagagcatgtatgcaatggattgtatctgccaggctatacaaaaaggaggctttgaccaggcgccatggctcatgcctgtaatcccagcactttgggaggccgaggcgggcaaattatgaggtcaggattttgagaccatcctggctaacatgacgaaaccccgtctctactaaaaatacaaaaaattagccaggcgtggtggcatgcacctgtagtcccagt

SEQ ID NO: 20236 - DNA, 324 bp, Homo sapiens
cctgtctctactaaaaatacaaaaaaattagctgggcgtggtggcaggcgcctgcaatcccagctacctgggaggctgaggcaggagaatcacttgaactcaggaggcagaggtttcagtgagccaagatcacgccattgcactccagcccgggcaacaagagtgaaactccatctcgaaagaaaagaaaagaaagaaaaaaagaaaaaggaaaaggaaaaaaaggaattcaaatcagataatgtctcctctccttaacagtctccaatgatttcctattaaactctgaataaaagccaaagtccttaccttacctacaaggct

SEQ ID NO: 20237 - DNA, 396 bp, Homo sapiens
ggaggaacacctccgcagctccagcctcctcatcccgcctctagagacggccctggccaacttctccagcggtcccgaaggaggggtcatgcagcccgtgcgcaccgtggtgccggtgaccaagcacaggggctacctgggggtcatgcccgcctacagtgctgcagaggatgcactgaccaccaagttggtcaccttctacgaggaccgcggcatcacctcggtcgtcccttcccaccaggctactgtgctactctttgagcccagcaatggcaccctgctggcggtcatggatggaaatgtcataactgcaaagagaacagctgcagtttctgccattgccaccaagtttctgaaacctcccagcagtgaagtgctgtgcatccttggggctgg

SEQ ID NO: 20238 - DNA, 383 bp, Homo sapiens
aagatgtgacttgctcttccttgctttccaccatgactgtgaggcttccccagccacatggaactgtattcaagtgaaacctccagggattcctcaaggcctgccatttcatttcacatcaattttctcaaattttatgggataatcactgtgaaaaaaacattttaaatggtccattttcaaggcatgataaatctaactactggcagccagcctaaggatgtaaaaaaccacacagcttgtgcacctggaaagtcacgataagcgaacagactgtaaaggagaggtcagcccataaaagggaagaaagtttcattattgggaaatcaaacttaagctgggaaggcgatgggagggtataaccttataaggggggtaataaa

SEQ ID NO: 20239 - DNA, 330 bp, Homo sapiens
ggttctgtgacacatgccccccagattgctgcaaagatcccaaggcattgattgcacttgattaagcttttgtctgtaggtgaaagaacaagtttaggtcgaggactggcccctaggctgctgctgtgacccttgtcccatgtggcttgtttgcctgtccgggactcttcgatgtgcccaggggagcgttttcctgtctcttccatgccgtcctgcagtccttatctgctcgcctgagggaagagtagctgtagctacaagggaagcctgcctggaagagccgagcacctgtgcccatggcttctggtcatgaaacgagttaatgatggc

SEQ ID NO: 20240 - DNA, 359 bp, Homo sapiens
gcaggcctaagatgcatcacacagatctgaccatgcaactacctttctacaagtgtctgagctccggggtgcccgagtaccgacagccaaagaagcatttacactttgccagataaggaatcggctctgcgaaggtgcgaagaaccaaatcctagcgattaatgtcccaacaacgtgaacacttcctgcaactcgaaatcctcaagggaaactctgtcgaatccccaccaagtgaacgatgacttgtttctacaaaggctactgatttcaggaaactaacgtataactcgtcgccttaaagtgcctctaaaagcatccacgacggttaaagtcgctgctactacgggacgctatttatt

SEQ ID NO: 20241 - DNA, 328 bp, Homo sapiens
aggagatgtaaaagcttttcaaaattgttatttagtatttcagcttgtggaaaacacattaagatggcaaataatcttaaaataaattagtggagttaatgatttccaagtagggggaaccctaatgatttaaatatgtcccgatgctgtattaacttacagagtgtagcatagtgcctgagttcagatttaggagcctactggctggactcagcacttattagctgtgtgaccttgggcaagtgaattaatctctctgtacctcagttttattatttatacaacgtgggtagtattagcacctagagtcgacgcggccgcgaattcc

SEQ ID NO: 20242 - DNA, 394 bp, Homo sapiens
cggacgcgtgggcagctgtagtcctgaccttcctcttctttaaccctttagccctaggatggctttggtgggagaggggatagaagcccatgacttcagacagactttctcttggcagatgcaggcgggcctcctcccaggctgctccagacatgggggttggggatggggggcaccttgcagccccttcctgctggggctccctccttgtagcaccccccttgcggctcagctctggtttcctctcccaggctcacccaggctctgctcaggctgggaggcagagggcacaaaccttataattttttaaatgaaaaaccgctgctgctggctgtggctagagccccctggggctgctggagctgctgcctctgttctggaggacgagccttct

SEQ ID NO: 20243 - DNA, 626 bp, Homo sapiens
ggcggtgtttgcagatttggacctgcgagcgggttctgacctgaaggctctgcgcggacttgtggagacagccgctcaccttggctattcagttgttgctatcaatcatatcgttgactttaaggaaaagaaacaggaaattgaaaaaccagtagctgtttctgaactcttcacaactttgccaattgtacagggaaaatcaagaccaattaaaattttaactagattaacaattattgtctcggatccatctcactgcaatgttttgagagcaacttcttcaagggcccggctctatgatgttgttgcagtttttccaaagacagaaaagctttttcatattgcttgcacacatttagatgtggatttagtctgcataactgtaacagagaaactaccattttacttcaaaagacctcctattaatgtggcgattgaccgaggcctggcttttgaacttgtctatagccctgctatcaaagactccacaatgagaaggtatacaatttccagtgccctcaatttgatgcaaatctgcaaaggaaagaatgtaattatatctagtgctgcagaaaggcctttagaaataagagggccatatgacgtggcaaatctaggcttgctgt

SEQ ID NO: 20244 - DNA, 358 bp, Homo sapiens
ggattacaggcatgcaccaccatgcctggctaattttgtatttttagtagagacggggtttctccatgttggtaaggctgatctcaaactcccaacctcaggtgatctgcctgcctcggcctcccaaagtgctgggattagaggcgtgagccactgcacctggcctgtagcaaataatttttaagcattctcaagatgtatgatgttgggtttaacatcatatgttcacagtgttttaaataagaaataatctgtctttagtatacaggatggttctttgtttgcctgaaaagtataagaatacaatttacttttcccaaactctttttccttatttttttctttcaaataactttaa

SEQ ID NO: 20245 - DNA, 214 bp, Homo sapiens
gagcagcttaatgtcagtccacagatctctaaatacaatttggaactaacatatgaacactttaagtcagaagaaatcttgagagctgtgcttcctgaaggtcaagatgtaacttcagggtttagcaggattggacatattgcacacctaaaccttcgagatcatcagctgcctttcaaacatttaattggccaggttatgattgacaaaaatc

SEQ ID NO: 20246 - DNA, 397 bp, Homo sapiens
aaagaatttaaaaagtaaccctgatcagccagccgttatcttacttttgagacaagttcagtgtaaaccactcctggagtcacaaaagccactcccagatgctgtacttgaagaactacaaaaaacagtcatgtccaactcaacctctgttccagcttggcagtggctggcacatgtgtatcaatcccaaggaatgatgagagctgcagagatgtgttacagaaagagtctacaattggcatcccaacggggcagttggagtgggaagctctcaagtctgttgagactagcactacttgcattaaaagtctgtatggctaacatttccaatgatcactggccatctttggttcaagaggctacaactgaggccttgaagctttgcttttgtccactg

SEQ ID NO: 20247 - DNA, 414 bp, Homo sapiens
  misc_feature (1)...(414): n = a,t,c or g
gctggaattttaaaacacttatgaattctacttaaacatggtgcgcccattacacttcccttccctctttaaataaagtattatttcactctccttggcagaatgctcagaacaggattatcagtctccacaactcatttccctctgcacgcaagagcttaccagattctatccaaaggaccttaagtttaaatgaaaaagcagagaatcttctttaaataaacttcttgaaaagattcctgcagtggctgtcaaagagaatcagagctttgaaacatgtctgtgcattcaaactgtctcacagcacgaatgtcatgaaactgaaaatctctggaaagtcanaatgaaggaagtgattcagangattttggaagatatttntagccctanaacatctttgagngattnaaaacc

SEQ ID NO: 20248 - DNA, 355 bp, Homo sapiens
ggtagaatcaattttcaggtgaagactcggtgacaaagaacacaaagacatagtgtaattcttctaacacatgactggatcatttctggaaggtggctggggacatggatactgggccacagaacaagcatgcatgggatggaaaagacacagcgctcaattcctaatttgaccactcaatcttgcagagcctccacctccttatttttaaaatcaggttttcattatagttcctcccagcaaggattttaaaagtgccttataagctgaccatctccaggttccttattccaaaattaggattttatatgtcactttatattatggggctcatctcaagttccactttacactg

SEQ ID NO: 20249 - DNA, 332 bp, Homo sapiens
ggtttctcttgcccatagactgagtctcaagctttctgggactgggtctgtcttgttcattgcttggacactcaatacgtatttgttgaatggatgaaaaaaacccactctgtcctaccttgatccccgtcacatagcaattagaagataggtgtccacaccaagctgcctctgcgacccaagctgaaatgcggatctctcaggaaaatcaggagatttcactcgacaccccaaccccagctcccacacactgtggaccacttttcatgccttccctccaggttcctgagccccacccccatcacaggaagatcattttctgtccattaaac

SEQ ID NO: 20250 - DNA, 320 bp, Homo sapiens
gggagcctgaaattgaatggagagcctgagtgctacaaaggtgaacaatgttgccccaagctcgagaattggaccttacttaaaaggaaggggaaaggagcagacatattctctgtctgtacatggctgaattagggccccatcatggtgaggacaagccactaggctgaagcccaaactataagggggggctttccagacagccacagtgatgagttcttgcatggcaggacagggccacaagctatctctcctctgacctcgaaggcagagcctagagggagagggctagggtgacttaagggtacaatgacagacat

SEQ ID NO: 20251 - DNA, 687 bp, Homo sapiens
cggtcatttctgcttgacctcctaaatgcaacaggcaaggattcactgaccttagtgtttgtggagaccaaaaagggtgcagattctctggaggatttcttataccatgaaggatacgcatgtaccagcatccatggagaccgttctcagagggatagagaagaggcccttcaccagttccgctcaggaaaaagcccaattttagtggctacagcagtagcagcaagaggactggacatttcaaatgtgaaacatgttatcaattttgacttgccaagtgatattgaagaatatgtacatcgtattggtcgtacgggacgtgtaggaaaccttggcctggcaacctcattctttaacgagaggaacataaatattactaaggatttgttggatcttcttgttgaagctaaacaagaagtgccgtcttggttagaaaacatggcttatgaacaccactacaagggtagcagtcgtggacgttctaagagtagcagatttagtggagggtttggtgccagagactaccgacaaagtagcggtgccagcagttccagcttcagcagcagccgcgcaagcagcagccgcagtggcggaggtggccacggtagcagcagaggatttggtggaggtggctatggaggcttttacaacagtgatggatatggaggaaattataactccccaggg

SEQ ID NO: 20252 - DNA, 548 bp, Homo sapiens
  misc_feature (1)...(548): n = a,t,c or g
ntgtattgatnccatttgtgaacgattacgaatttaatacgactactatagggaatttggccctcgaggccaagaattcggcacgagagctgacccacagagtagggaatcatggctggagaattggatcgcccgagtagtgtttgacctctggaaacactcattctcaatgcaagatcctccgctgcaatgctgagtacgtatcgtccactctgagccttagaggtgggggttcatcaggagcacttcgaggaggaggaggaggaggccggggtggaggggtgggctctggcggcctctgtcgagccctccgctcctatgcgctctgcactcggcgcaccgcccgcacctgccgcggggacctcgccttccattcggaggtacatggcatcgaagacctgatgatccatcacaactgctcccgccagggccctacagcccctcccccgccccggggccccgnccttccaggcgcgggctccggcctccctgcccggacccttgggactatgaaangccgggtttcccggttgcattggtcgtccccg

SEQ ID NO: 20253 - DNA, 535 bp, Homo sapiens
  misc_feature (1)...(535): n = a,t,c or g
ttgaannctntgnancccaacagctatgacatgattacgaatttaatacgactcactatagggaatttggccctcgaggccaagaattcggcacgagggttttttgatgaggattctgactccatttttctgtgattatttttgtcctgccaccttcttgagtcagctttgttctgaatcttgctttcctcatggaggtaaagtgactccagtgattgcaagattccatcagcaagctgcatattgtaggagagagcatctatgttcctgaattcctggctgaagtcctaagctttgagctgattaatcagttttgatgtagggcattgttaccaagcaaaagagatccctctaattggttaagaccagtcaggggttatccatgaagatgggttagtctaaccaaaagggcatggctgctatactaggaggagangtgatgtttgcaaggaaagcacaaagttcactcttatctatcatccatcataaaggaaagagccagtgaaaaacagggaaatggtaagagagattaaaa

SEQ ID NO: 20254 - DNA, 77 bp, Homo sapiens
ggtgattgaaactatggaaaaaaaaactgaggaactctctgaatacacaaagggccagtttatttgcatgagacttt

SEQ ID NO: 20255 - DNA, 450 bp, Homo sapiens
cgctatgacatgattacgaatttaatacgactcctatagggaatttggccctcgaggccaagaattcggcacgagacctcgttacatttgcaaactctgcccaaactgttgatccttaggctgaatctctcccattgaaatgatgctaggctgaacacagcagaaacaggaaaatagacattgtcagaatgaagtaaaaacagaaaatgttggagtacatcacatactaagggtatcatcaatttgtgaaaaatttgtatgcattttgggtatttgcatatacacatgtatgtgtatgtgtgcgtttatggtcacggtgtaaaacgtacttcttattgagaaatgagggcagaaaaataaaatcaaaagccataggattagctgctactttggatcctcaatatgagcatttactgcctttaaaaatgaactgctacttctttcttaaag

SEQ ID NO: 20256 - DNA, 348 bp, Homo sapiens
gtgtttgtttgcaatgttactgtaatactatttgccattgtaaaaggccagctcagattgtgagccctttctattgggacagtcctcttctatatgttttaagtggccagtaatttaatgaatttctggtttgtattaaatatgtccttccaatggataagttctaaaacatacgctatcattggcccatgttgctgaggtgcattgtgaacaatacctttagtgactgtggaactgctgcttctatcagaagacctaggatacaagcagccactgtttcctccgttaacaatcagcttttagtaacctgctgtggtcagcatagctacaggaaaagtcagcccttgc

SEQ ID NO: 20257 - DNA, 356 bp, Homo sapiens
ggtttccccaatggagaggtggtgtcatatggtgggtaaagcacatgctctggtgtcagccccctgctctctggggtcagagtccaccactctcacttaataggtatgtggctttgggcaagtcacttaacttctctgtgtctttctctgtaagtgtgattgcgatattgcctatcctaaaggtgttgggtagcataatgagcaaacactggttatatttcagggcaagcctacaaataatgcctgtggcaggtgatttttcagatgaggtgctaggatgttaagatgcggcatttagttccaaggagtattgtggattcttttcatctacttaatctgtatttcctaacacagct

SEQ ID NO: 20258 - DNA, 428 bp, Homo sapiens
gcttggaatcagacacaaatggatttaaatctcagccatttcatttgatagctttgtggctgtcaccaaattgcttaacttctctgtacctatttcttcccctataaaatgggaatcatagaatctgtgtcacagcaacactccagtgattaaatggagtaatgggtgtaaaacatgccctctccttcctaccccgggtcacctgtgagcaggtctctgcgttgactgctttgatgtgttacctgcctggcccttaacgcctgccttccttcctgaactctactgactgcgccccaacccctgccctctctgcccacattttcaacctgcgtcttcttctcatcaccagcttgctgtttacgcaccttctgttctttctactctagcacccagctggtaacttccctttcctgcttctactaccctgg

SEQ ID NO: 20259 - DNA, 78 bp, Homo sapiens
gcaccaaccacccatattcaggagaagaggacagacacggcacctctgagtcacccctctcctgtggagcggcgtccg

SEQ ID NO: 20260 - DNA, 390 bp, Homo sapiens
ttataatgcaaaagcaagaagagtttagtgtatgaactgtacagctgagtttgtagctctatcttggtttctgttgattatgaacaattagcatagttatatataatctttctttagtagacaacctgcatccatttaaattaaataatactttctacaatagtgtgatatataaggccacaatatttattttggacaaaccccttaaagtagcgattttattatcaatgttattcattcttttgaaatataaagtacttcagctgaattaaggttgcagataatttttaaaatacaacacacatcatgactagtatattaaaattatttatattcagatatttatatctaatatcaaatgaaaatttactaccaaatcggacgcgtggg

SEQ ID NO: 20261 - DNA, 375 bp, Homo sapiens
gtgctcttgatggaatatctaatgccaaattgtattacagaatggtttgtcataacaggccctcaagggagtgaaaattggttcttgggaggagggcttaaaaaaaattctatatattacaatggttagtggtcctccaaagactcatagaatattaatatgtagtgtatctgtggtattaaaattggggatatggaaatgaggaaaagatgtctaaaaaggctccttagtgtctgataaaaatttgagaaacactctaatatagtaatagcagttttaaaagattggtttttatcctcaaaacttgatattatcagatttcatctttgccaagtattgtgggaaatggtatctttttgtggcttttaatttgca

SEQ ID NO: 20262 - DNA, 438 bp, Homo sapiens
gctggaattaatttttgccttcccaaagttcatatctagcatatttaagtttgataaacttgcatctttattaaagaaatctctcattggcctaatagcaatattatccaatatcaacttcagatttaaccagcctcaactggttaagagcttcagatggcattatactaaatggagagtttcctcagattctaaatctgtgctgtccaacacaataaccactaatcacatgcgactatataaatttacattttctcctttgggaggctgaggcctggagtccagaccagcttgggcaacatagagagaccccatatctacaaaattttttttttttaattagccaggtatggtggtacatgcctgtaatcccagctactcagaaggctaaggcaggagaatcacttgagcccaggaggtcgaggctgcagtgaacta

SEQ ID NO: 20263 - DNA, 101 bp, Homo sapiens
catggaccgcagcatgttggagagcatgctcaatcgcatcctggctgtgcgcgagatttatgaggaactgggtcgtcctggggaggaagacctggactgac

SEQ ID NO: 20264 - DNA, 439 bp, Homo sapiens
  misc_feature (1)...(439): n = a,t,c or g
naccgntatgacatgattacgaatttaatacgactcactatagggaatttggccctcgaggccaagaattcggcacgagcccacccaaccaactacccagctcccaacagattctcctacccagcccactactgggtccttctgcccaggacctgttactctctgctctgacttggagagtcattcaacagaggccgtgttgggggatgctttggtagatttctccctgaagctctaccacgccttctcagcaatgaagaaggtggagaccaacatggccttttccccattcagcatcgccagcctccttacccaggtcctgctcggggctggggagaacaccaaaacaaacctggagagcatcctctcttaccccaaggacttcacctgtgtcaccaggccctgaagggcttcacgaccaaaggnggcacctnagtct

SEQ ID NO: 20265 - DNA, 355 bp, Homo sapiens
ggaaataatgcaatttctaattatctggatgtttgttgaaaatatattagacattctccctgaggttaaaaacaaaaagtacgtgaccagtctggtaagaagtattaatgaagtagctaatattacagcttcattttctactagcacctatcataatggtcttagtcatttcacacaaatcagaacttccttccccaccagggaggacaacatcttcatgctgtgattgaagcatccattcagaacacgaggcaatattgtagtccacagggaatggatgcttcacttgatctccggaccttggctgcagaggccatcgcagcttttgaaaagtgaaggggttaattcccattgg

SEQ ID NO: 20266 - DNA, 470 bp, Homo sapiens
aaaccttttgacatgattacgaatttaatacgactcactatagggaatttggccctcgaggccaagaattcggcacgagggctggtcttgaactcctgacgtcagatgatccacccaccttggcttcccaaagtgctgggattacaggcgtgagccactgcgcccggccggcatttgagttttaactgactagcaggggagtagaaaggacacaggacaaacagaagatatggcagaaatgagaatgaataacggcaaggcttccttctcccacaagaggaaaaggtgccttggactgctaaggcagcccagaggggtgaaaggaagaaccagagggagaatgccagagcttaagtattttggggtcttggagactctcttagacacaaggcatagaccatacacccgaatgggggaccaggaggggcaccggccatctgaacaggtgccttcctggatagacatagaaa

SEQ ID NO: 20267 - DNA, 371 bp, Homo sapiens
gtggagggaagaagggaagaattacaatggttagaaaagagcaactaaagattatttctattatacttctgaacggtaaactagcaattttagtaaatattggggtccacttaaatctattaaagcagaaagtgtaaagctatctccattagtgaagagatgaagtgacaaaaaccaatcagtttttgtagcaactgatttagaaaatcttgtactgaaatcaacaattagacttgcacatcatagattttcaaatgtttgctgaattgaaaaagaatattcacaggaattatttcccccgaaggtgtcttatatcaaatagatgaacttcaagttgtggaatggaaaacctttaattaaaccagttgtct

SEQ ID NO: 20268 - DNA, 227 bp, Homo sapiens
ggtttctaaagtgtttaccagatgctgaaggcaaggggagggagcagaagcacttatgtttacggatattttaaactctgttagagagcagcctttgaaaatccccaatttggttctgctttttgacctctctctaccttttcagggtaatctttgtggcacaaacgatagcatttccaagctttaaagttttctgaattcctgcgccttcctgacgtgagccctga

SEQ ID NO: 20269 - DNA, 920 bp, Homo sapiens
gcggcacgagcagaagtttggagtccgctgacgtcgccgcccagatggcctccaggctgaccctgctgaccctcctgctgctgctgctggctggggatagagcctcctcaaatccaaatgctaccagctccagctcccaggatccagagagtttgcaagacagaggcgaagggaaggtcgcaacaacagttatctccaagatgctattcgttgaacccatcctggaggtttccagcttgccgacaaccaactcaacaaccaattcagccaccaaaataacagctaataccactgatgaacccaccacacaacccaccacagagcccaccacccaacccaccatccaacccacccaaccaactacccagctcccaacagattctcctacccagcccactactgggtccttctgcccaggacctgttactctctgctctgacttggagagtcattcaacagaggccgtgttgggggatgctttggtagatttctccctgaagctctaccacgccttctcagcaatgaagaaggtggagaccaacatggccttttccccattcagcatcgccagcctccttacccaggtcctgctcggggctggggagaacaccaaaacaaacctggagagcatcctctcttaccccaaggacttcacctgtgtccaccaggccctgaagggcttcacgaccaaaggtgtcacctcagtctctcagatcttccacagcccagacctggccataagggacacctttgtgaatgcctctcggaccctgtacagcagcagccccagagtcctaagcaacaacagtgacgccaacttggagctcatcaacacctgggtggccaagaacaccaacaacaagatcagccggctgctagacagtctgccctccgatacccgccttgtcctcctcaatgct

SEQ ID NO: 20270 - DNA, 366 bp, Homo sapiens
gcaacagggaacagtaggagctggagtgggatctccaagtcccagtttgagtgtgggatgtgcttccagcagtgccttccctttatgaaagacatcacatggcatccagggccaggcaggcagcttgaggtgcctttacgagaaaaccgagctggggctgggagaggacagttattgacactgatgtgcaatgaagtgacaagatgagagcagaatcgtaagagctttgaatttgaagtgagtttttttccccccataagttatttattccttttttctgtgtaaatatatttattttactgtggagcgctaacatctggatcgtaacatgtgcagaatgtatggtaggaatgtattctcttgtag

SEQ ID NO: 20271 - DNA, 338 bp, Homo sapiens
gccaagctatagctaagcttaaatcaccacaactttccccacattaggaagagcttcttgaaaatacagcaagggcaaggtgcaggaaagcaaaaggttacatcatatcaggcgcagagagagcctagatcttcctggaatctaaactgatcatcctagtctcagaggactccttaataatcacctggtaaccaaatatcatccatcttgatcataatcactgtctgaacccaggactaactccaattcaactgaacctaatcatttaatcagcaacatcaccaccaccacctgcccccacaccctccaaaaaagtactaatataagggagaattcga

SEQ ID NO: 20272 - DNA, 440 bp, Homo sapiens
  misc_feature (1)...(440): n = a,t,c or g
ggaactcatgcaccctcagccagcaccaggagtcacttagttctccttttgaccttgcctttcaaaagctgatccttattaaccatcaggatgcggtggggagttgctgagacaatcctcagcagcagcagggtgacccccgagttgtgtctgctctgagacaatataacccctaagctccagggctccgagggtagtgatttaacaaatcgtgtgtttaaacaactgatggcacgacgctgttggaggggtctttgaagcacatttctaaataatgggggaaataatgaacacctctcacaagggtatttaaatgacatacacattaggaggttggggggaggctcttctcttcttgcataatggacactttttcctgntctttcatcctgntttcacttcatgcttcaaaaatagttgttgagtgacnaacctcttgg

SEQ ID NO: 20273 - DNA, 344 bp, Homo sapiens
gctagagtgaaacaccactccctttactgttaaattcccacacctgactgtgaggctttcataccgcttagaaggagaggggacagccttgtgataagggtggtttggggccttctggcattcctcaaactatactgtgcagagagctgcttactccatctgtgtctaggactggtaacttcttctacatcaagatatttttctactgtgttctcagagcacaaaatacaccaaaactcaggatgtgggtcctgcttcttcacagacgacacagggttggcttagaatttgaacttcgcagcaccatttcttgtagcgtgtggtacagtgaagtctcaagtcag

SEQ ID NO: 20274 - DNA, 331 bp, Homo sapiens
aataagttgcaaaatcatcaggctgcagactgctgatggtgagagtgaattctgtcccagattgactgccgctgaaccttgaggggaccccactttgtaaagtagacgcctcatagattaggagttttggggcttttcctggtttctgctgataccaggccaaccagctacgaatattctgactggcccggcaagtgatggtgactctgtctcctacagatgcagacagggtggaaggagactgggtcatctggatgtcacatttggcacctgggagccagagcagcaggagccccaggagctgagcggggaccctcatgtccatgctgtg

SEQ ID NO: 20275 - DNA, 348 bp, Homo sapiens
ggaaaagagagagagagagataaaggtctttgaaaggagaaataagaaggaatctgtctctttccagaaagctaaactatacattaaatacaagcttgcttttacctgtgcagatcttagatcttatcacctgttaattgggcccagtgacctgccataaaaccctttagtcatttggcatttacttttggaccacattgagcagctgcacatttacccccttcctgcatcttgctagaatgcctaataaggcatgttattcccaaacaacctgttaaactggtgataggcaaaagaggagcggaaaggcagcacagaaacattctgggtagcagaatgcttatcccc

SEQ ID NO: 20276 - DNA, 336 bp, Homo sapiens
cttgtgttcctgctattgactgcaatgctcagtaaatgtttcaggcatccacgaatgaatgattgaacaaatcaacaattaatcaattaataaatgaaagctatcatcatcaggtggaaataatgcttttaagtaagactaagggcttttatcactacagagcataatagaaaggaaacaagccaattaataagaaataattttgcttaaaaaataatttttcaggcctggctcggtggcctcacatctgtaattccagcactttgggaggccaaggcaggaggatcacttgagcccaggagtctgagaccaccctgggcaacatggtgaaacccc

SEQ ID NO: 20277 - DNA, 334 bp, Homo sapiens
gcaaagtgctgggattacaggtgtgagccatcacacccggccttttcaaaatatttcacaccaaatcggtttcaagttcactattttcatggcgaaaagggctttggccccgcccaatctcggaggtctcccttggggaagagcagattctttaagatgcatactgagccgtgtatacgtcattctttttttatttgcattttctattttcttaaacagaagacacagaacataacttttttcagagctggatgtgatctcaaatggtgatcttgaccgctcattttttagagagaagaaaactgaggcacagacaggtcccaaccaggcatgg

SEQ ID NO: 20278 - DNA, 309 bp, Homo sapiens
tgatgtacctacactggagggtagacaatttatgaaagaagttggcaaaattttaataaggaatgttggagaaataatcctaaagagcatcatattcttttatttttagaaaattaactaaaatgaagtattataaatattactctgttgaaaaaagttgcattagataataaaaagtcacacatggataagaaaatctcaaaacatttggaaatgaaaccacatacttctaaataattaatgggtctgggcacagtggctcacgcctgtaatcccagccctttgggaggccaaggtgggtggatcacc

SEQ ID NO: 20279 - DNA, 373 bp, Homo sapiens
ttccttttctctctctctctgtgtcctagacttccattgcatttatatttaatgtttatttctgagaatcaagcagtatatttttcctaaatgaaacataaattatattcctattcattagataggttcctaggaacaatgccaattaatccattgtttaagtagtaacttgaatgtttttctatatccctccagctttgttgatagtggcgggttttgtacaattggagggagccctcagagccttctgggggaggagaggaactgtccttaatccatcaccactaccatagggcaaagccagcaggtgtggccctgtgaggggctgtacagacgggatgtggccaggagaacagagccccacctggaccac

SEQ ID NO: 20280 - DNA, 366 bp, Homo sapiens
tctccctcttcaaaagatcattttctccttccaatctctctttctggctctgcagagcattacatataatttcgttctcactcagtctttttgacaggtcaaagttttcatccattaattcctgttgtttcttcattgcagtagtttcattctgcttcatttgctccactgtctgctcgagcttcttctggtccttcctctgttcagttaaactgagaaagaggtggtcattttcctttttcagctgctctaactgctctgtcttatcttgatctccctgaacaagcttctccatttctttctcttgagttgacagctgggcctgaagctgatccactctgattcccatcttctcattttctgagg

SEQ ID NO: 20281 - DNA, 393 bp, Homo sapiens
gaaagaatagagaaggaagggcttcagtgaccggctgcctggctgacttacagcagtcagactctgacaggatcatggctatgatggaggtccaggggggacccagcctgggacagacctgcgtgctgatcgtgatcttcacagtgctcctgcagtctctctgtgtggctgtaacttacgtgtactttaccaacgagctgaagcagatgcaggacaagtactccaaaagtggcattgcttgtttcttaaaagaagatgacagttattgggaccccaatgacgaagagagtatgaacagcccctgctggcaagtcaagtggcaactccgtcagctcgttagaaagatgattttgagaacctctgaggaaaccatttctacagttcaagaaaagc

SEQ ID NO: 20282 - DNA, 425 bp, Homo sapiens
  misc_feature (1)...(425): n = a,t,c or g
gatcaatggcaaatctcattttcagcaacacagcttttgggctagatttgccatgatccatatatactgtgttttgtaacctggtagtcagggtatattctttatgttgaagaggaagaagatagaagagatgaagatcatgggatgcggatttgtcctagactatgctggtcctactatccagaacaaagttgcaaataagcagtttttcttatatgatgtataatttatttcccctcatcattattcattaaattagtgccttatatcatcaccagttaattttccacaaactaggcttgttctttgaaagttaatttaccagttaatttcaaaattcttattacaggaaatgattttgtntaatataaagtcttgagattagaagagagtttttttccctggtgaaggaaaatgcaaacatt

SEQ ID NO: 20283 - DNA, 337 bp, Homo sapiens
gtggaatgtttaatctgtaacatttatatattaattaggtataatattacatatagttgacaatattgactgacttgtggagtggcttgtggctgtgcagctgtgactaccaagtgaccggaaagttctaaggaggactgcctcctagaaaactccatgcagttcatggccttttgctattgaaatagcatcaacagaagtctgacactatggaaagacgcaaacgtgaatgaatctggttatctctgaccttgcactgctcatgagactaactttcatattttcaaaagtatttactcacatggggaaatggttattatagaaaaccatcttttaa

SEQ ID NO: 20284 - DNA, 599 bp, Homo sapiens
cgaacactctttaatggaccagatcaggatttgagcggaagaacgaatgtaactttaaggcaggaaagacaaattttattcttcataaagtgatgagcatataataattccaggcacatggcaatagaggccctctaaataaggaataaataacctcttagacaggtgggagattatgatcagagtaaaaggtaattacacattttatttccagaaagtcaggggtctataaattgacagtgattagagtaatactttttcacatttccaaagtttgcatgttaactttaaatgcttacaatcttagagtggtaggcaatgttttacactattgaccttatatagggaagggagggggtgcctgtggggttttaaagaattttcctttgcagaggcatttcatccttcatgaagccattcaggattttgaattgcatatgagtgcttggctcttccttctgttctagtgagtgtatgagaccttgcagtgagtttatcagcatactcaaaatttttttcctggaatttggagggatggtcgacgcggccgcgaattccagatctatgaatcgtagatactgaaaaaccccgcaagttca

SEQ ID NO: 20285 - DNA, 413 bp, Homo sapiens
  misc_feature (1)...(413): n = a,t,c or g
gtggcatcctagaatcggggaataccgttgattgtttgggtaggacctttcccttgctcctttgcagggccaggcgcttctgaaaactgggtgcaaatttgggaatgctgcataggagactcataggaaatagataggtctagggcaaaacataaattggggggcataaaggatgaaagagtcagtaaaccatttcactatgatgaatcccactttacctggaaaaaataatcttttttttttccttttnggttnctgtaattngttngttnattancgcataaatactttgcttttctccccctgaattattttctcaaattccgaaaccttntttaggggngcatttcctaanataccaatggcttaatttacatggggctgnggttttcngncatctttaaaaanggccg

SEQ ID NO: 20286 - DNA, 343 bp, Homo sapiens
gagtttttacttttttggggatacagtttgctttttaaagctatttgaggagattgttttgcagtgtctttactatgtgttggacatttgcctcccaatataggtgtaacttcaaagtataataacttggatgtttatgatgggaaaaacactgagtaacttttttacatgctagcttttctcctggtgtacacagaggctgttatttagaattctcatttatttaatagaaggagttttagcggctttataagactataggaagagacttgataataaaccttggtattgaaagagagaggacttgattccaaatagcaaggtatgactaaaatgaaattcc

SEQ ID NO: 20287 - DNA, 106 bp, Homo sapiens
gggttttgtttttgtttttgtttttaggttgaagattttcttttaatattcagttttttgaaaaaaaatggatctacactgttaactgattgagactccactgtga

SEQ ID NO: 20288 - DNA, 407 bp, Homo sapiens
gtgatgagacggaccaggactctgaagtacagtaccaagatgacatatctgaggttcttcccacctttacagaagcaggagtcagaaccatgataaactgactgttggcaagaggaaacgaaatgaagatgatgaggttccagtgggggtggagatggcagagaatactgacaatccactaagatgcccagtccgactttatgagttttacctgtcaaaatgttctgaaagtgtgaagcaaaggaatgatgtgttttaccttcaacctgagcgctcctgtgtcccgaatagccccatgtggtactccacattcccgatagaccctggaaccctggacaccatgttaacacgtattctcatggtgagggaggtacatgaagaacttgccaaagccaaatctgaagact

SEQ ID NO: 20289 - DNA, 434 bp, Homo sapiens
  misc_feature (1)...(434): n = a,t,c or g
ggtgaagtatacacacttcatagggaaacattttatcttgcacaagacttttttgatagatttatgttgacacaaaaggatataaataaaaatatgcttcaactcattggaattacctcattattcattgcttccaaacttgaggaaatctatgctcctaaactccaagagtttgcttacgtcactgatggtgcttgcagtgaagaggatatcttaaggatggaactcattatattaaaggctttaaaatgggaactttgtcctgtaacaatcatctcctggctaaatctctttctccaagttgatgctcttaaagatgctcctaaagttcttctacctcagtattctcaggaaacattcattcaaatagctnaggtactgacatttttattgatccaggggaangttataaancccnggttnaagggatataa

SEQ ID NO: 20290 - DNA, 311 bp, Homo sapiens
gtttgatccagtaattggcttaaccaagatcatatgccaaaccctggatccatggtggaatcagtttcctaaagttatgtggacagaaagtgaggggatatgatggttccctaagaaataggagtatattcgagatgaactgggtgctgatcaggaaaacaaagacaaacaatgaataaacatcttactatttgttgaagagcgcttagagtccaaatttcttccccccacctctccccatgaagttgcttttggtttcttcaagtaacacttcacaccattccagaattttgaattcatttctctaatgg

SEQ ID NO: 20291 - DNA, 699 bp, Homo sapiens
  misc_feature (1)...(699): n = a,t,c or g
gtgttatgactcgggagacagggttagggccccaggagcaggatctaagtcgtcctcccccaccatcctgacaccactgttgccccaggcctgggccgaggccactggtgcatatgttcccgggagggataagccagacctgccaacctggaagaggaatttccgctctgccctcaaccgcaaagaagggttgcgtttagcagaggaccggagcaaggaccctcacgacccacataaaatctacgagtttgtgaactcaggagttggggacttttcccagccagacacctctccggacaccaatggtggaggcagtacttctgatacccaggaagacattctggatgagttactgggtaacatggtgttggccccactcccagatccgggacccccaagcctggctgtagcccctgagccctgccctcagcccctgcggagccccagcttggacaatcccactcccttcccaaacctggggccctctgagaacccactgaagcggctgttggtgccgggggaagagtgggagttcgaggtgacagccttctaccggggccgccaagtcttccagcagaccatctcctgcccggagggcctcagtcacactgcaaaaccttggantgtccttgaananaggggattgatgaanctactnnagggangttcntaactgcntgntggggaactngnnttttg

SEQ ID NO: 20292 - DNA, 558 bp, Homo sapiens
cgtatccgactggaagaaaccctcgagcagctggggaagcagcataatcacctggagagggccttccgaggagccacggtgctgccggcaaacactcctggcaatgtgggttctggtaaagatcagtgctgctctggcaagaggggacatgagcgatgaagatgatgagaatgaattttttgatgcacctgagatcatcaccatgcctgaaaatttgggccacaaacgtactggcagcaatatcagtggagccagcagtgacatcagccttgatgaacagtacaagcatcagctggaggagaccaaaaaggaaaagagaaccagaataccatacaagccaaactatagcctcaatttatggagcatcatgaagaactgcattggaaaagaactctctaagatccccatgccggtaaactttaatgagcccttgtccatgcttcagcgccttactgaagatctggaataccatgagctgttagaccgagctgcaaaatgtgagaattctctagacagctctgtatgttgcagctttcaccgggcctctacttcactact

SEQ ID NO: 20293 - DNA, 436 bp, Homo sapiens
  misc_feature (1)...(436): n = a,t,c or g
ggaggcctgcccccggtggacttcgtgcccccaatcggggtggaaaaccgggagcccgccgacgccgccatccgcgagaaaagggcaaagatcaaagagatgatgaaacatgcttggaataattataaaggttatgcctggggattaaatgaactcaaacctatatcaaaaggaggccattcaagcagtttgtttggtaacatcaaaggagcaactatagtagatgccctggatacactttttattatggaaatgaaacatgaatttgccatttaaattaactcattttcttttcactttgatttgaaagctgataagtatttctgcngcagatagaatattaaaatcaggttgtgtgtacacactgcactatgangtaccttggtgtccnggtgtgaatanacaagaaactgtactatatgttgctctctcagtg

SEQ ID NO: 20294 - DNA, 367 bp, Homo sapiens
aattcggcacgagatatggtcacagagtaatgtgctgcttttatgtcctctatgattttgaaatatttaccctgggatagtgatttcttcttatagctccaatcatgtttttgaatatgaaagaatcattgtattttaaaaagatagccagtagattttatttttaaatctgtttctaaatatccaaagactccagtgattcattaaaatacttttgtttccctaggaaaaaaagtttccacatatgcacggtaatcatttggcattttgtaggcttaagccttggggagttagtggtatttggctcctgacatggaagtctttctcttgtcagacaaatccttcccctgcacattcctgctgaaaa

SEQ ID NO: 20295 - DNA, 373 bp, Homo sapiens
gaggatccccagggcatacccaacaacctcatgccttatgtctcccaggtggcgatcgggcgacgggaggccctgaatgtctttggcaatgactatgacacagaggatggcacaggtgtccgggattacatccatgtcgtggatctggccaagggccacattgcagccttaaggaagctgaaagaacagtgtggctgccggatctacaacctgggcacgggcacaggctattcagtgctgcagatggtccaggctatggagaaggcctctgggaagaagatcccgtacaaggtggtggcacggcgggaagggtgatgtggcagcctgttacgccaaccccagcctggcccaagaggagctggggtggacagca

SEQ ID NO: 20296 - DNA, 392 bp, Homo sapiens
ggtaaaatgacattaatcactatttaacttctaaaattatttctgaatacagttgcagataggctggttttcatgaggaagctcgcttggctttagtcttacatttaaattctttgaaagtggctcccagtgctattcagggtcctttcttgaggccagactcatcaccatctactattgattttacagtgcactgacagtttacaggaaggagaagaacagaatttctgcacactacacaacatgtgggcttcctgtagctccagggacatgtagctttggtgaaactggggttttgtaacctctgaatgatatggacttagtgaattctaaggaactcagggggcacgtggtcaggctccaccgcacagaagagccacagtctccagact

SEQ ID NO: 20297 - DNA, 401 bp, Homo sapiens
  misc_feature (1)...(401): n = a,t,c or g
gtcgttcaatcacctgcaagacgaaggaggcaaggatgctgttggcctgggtacaagcattcctcgtcagcaacatgctcctagcagaagcctatggatctggaggctgtttctgggacaacggccacctgtaccgggaggaccagacctcccccgcgccgggcctccgctgcctcaactggctggacgcgcagagcgggctggcctcggcccccgtgtcgggggccggcaatcacagttactgccgaaacccggacgaggacccgcgcgggccctggtgctacgtcagtggcgaggccggcgtccctgagaaacggccttgcgaggacctgcgctgtccagggggaaggatttgaaagaacagcatgatcagaaagtatgtgagagggagatgcancgaa

SEQ ID NO: 20298 - DNA, 350 bp, Homo sapiens
  misc_feature (1)...(350): n = a,t,c or g
gggcgtggtgtcgtatgcctataatcccagctactctgaagactgaagcccaaggatcagttgaaccgggggtgggcggtggggcaaaggttgcagtgagccgagatcatgccactgcactccagcctgggcaacagagcgagacgctgtctcaaaaaataaataaaataaaaaactgttaaatttggggaggagtcaaagttacatgcagattttcaattattaggggagtcagcacctctaaccaccatgctgntcagggaccaattgtaaaactattattttatagcctnttcacattaaaataatgtcttcataaattactanncagccaatcccttccttttgag

SEQ ID NO: 20299 - DNA, 337 bp, Homo sapiens
gcggccctaatttttgtatttttagtacagacggggtttcaccatgttggccaggctggtctcgaactcctgacctcaggtgatccactggcctcagcctcccaaagtactgtgattacaggcatgcgccattgctcccagccaggaatacaatttttttaaaaaattcaaattctaccacataggcattaaccatgattaacatttgcaaatatctttccagtctattttccactcaattacacaaatattggtaaaccgcattagtaattcttagtattaagtatattgccagtatttcctcacagggggaaaaatgttacttttagcaactttc

SEQ ID NO: 20300 - DNA, 370 bp, Homo sapiens
ggatggaggcaggctctccattctaagggaacctctcaggccagtagggaaggcaagattcagacaccagggacaggcagcctgggatgacaggtggaacaaggaggagacacaagaacccccaccccaacccaggaacccacatcacaggccagacctgcatgatcgccaggcacccgactcgggttatgaaggtgtctctcctaagagagtggcagaggcaaactttagccttggcagtggcctcaagctgctcaggggagaagtcacggccaaagccctggagtgcatgggttctttagccatggttctcctgcagcttcctctgatattatgaagcgcctgccgcaccaggcttgttctgactccc

SEQ ID NO: 20301 - DNA, 414 bp, Homo sapiens
cgtcagacttcaggtctgcaggcgacatcttcgtggcagaatttagatgccaaagtcccgactgaacgaagtgctgtcttagtcaacctgaaaaagggggtgacttatgaaattaaagtacggccatattttaatgagttccaaggaatggatagtgaatctaaaacggttcgtactactgaagaagccccaagtgccccaccacagtctgtcactgtactgacagttggaagctacaatagcacaagtattagtgtttcctgggatcctcctcctccagatcaccagaatggaattatccaagaatacaagatctggtgtctaggaaatgaaacgcgattccatatcaacaaaactgtggatgcagccattcggtccgtaataattggtggattattcccaggtattcaatac

SEQ ID NO: 20302 - DNA, 445 bp, Homo sapiens
  misc_feature (1)...(445): n = a,t,c or g
ggagactgcatagggctcggcgtgggggaggaagggtcctcccttagagcctttggaggaactgtggccccactgacacctcgatttcggacttttggcctccagaactgtgagagaataagcttgtgttgtttaagccacccagtttgtggtcacgtggcattgcagccctaggacactaatacagatacctgttagacattggcgtgtccatgttgaaatgacaagtgagcttggatttcatggaaaagattgctgttggggttacaaagttgagagtctttagtttanagatggtgtttaaagtagtgagaatggctgaaatcctcagggacagcgtctggagaagagaataagtttatggacccagtcccgggactctcctgtctgcagagattgggccantgagaangganacaactcatgactcatcctgggagttacc

SEQ ID NO: 20303 - DNA, 406 bp, Homo sapiens
gcggcacgagggtggggggcctacttcgggggaccggtggacagctgggccagactgttggttggccttgtggggccctggggcctgggccccaccgctgggtaagaggctagggagcaggtccccaaggggaagaggctgagggagacttcagagggtaaaaggacaggaggggtccagaagggccaggtgatcccatgtcctcccctccttatcaaagtatatctcttgcagggaccatgtggaggttcttgggcccaaaagttttaccaggatgggcctgggagaggcctgggtgaggaggacattcgcagggcacgggaggccccgtcccaggaagacaccccggccccaggtatcattacccccacccacccaagcaacaccccacgaatactgctggccc

SEQ ID NO: 20304 - DNA, 453 bp, Homo sapiens
accctatgacatgattacgaatttaatacgactcactatagggaatttggccctcgaggccaagaattcggcacgaggcaaaagtctttaaaccaactactgcttttacagtgtacagactgagttttcaatgtgcagatttgctatgaatttatagagtgttttgattctaaattcacaatgtgcatctttaatggctccaagtttggataattttatgctgtttatatcctagcagcaatggtttatgcatatctcccaagttattaccctcctaggagaagagcgaacagcctccttttacaaaagacagtcccatatgtcctggtttagtgcatctctcttcaaagatcactttgcattgagatgtcaggaaagcgtgacagctggatgaagcacctaccccagtttgcaagcaggtgggttttcggttttctggaccctcttacccag

SEQ ID NO: 20305 - DNA, 349 bp, Homo sapiens
ccaacagctatgacatgattacgaatttaatacgactcactatagggaatttggccctcgaggccaagaattcggcacgaggggcattttctgattgcacttccttaagttatgaatgtactagaaagggactcatccagaatactatgcctccctttgttaatgcttaatcatttaaagtaaacacaattgaagcctctctgaagttaaacccaactatgtttattaaaatgtgtgaaactgaaagtgggctaggttctaccaaggctgtggaactctcctacgagttctgctgatcaggaaatttaagaatttatcttaaaaatgcaaggaaaaaagactgccttgg

SEQ ID NO: 20306 - DNA, 1013 bp, Homo sapiens
  misc_feature (1)...(1013): n = a,t,c or g
aaaggcaaaccgatgtataaatgaaagaaattgagatggtgcacgatgcacagttgaagtgaacttncggggtttttcagtatctacgattcatagatctggaattcgcggccgcgtcgacgagataaaccagttcacgccggagccccgtgagggaagcgtctccgttgggtccggccgctctgcgggactctgaggaaaagctcgcaccaggtggacgcggatctgtcaacatgggtaaaggagaccccaacaagccgcggggcaaaatgtcctcgtacgccttcttcgtgcagacctgccgggaagagcacaagaagaaacacccggactcttccgtcaatttcgcggaattctccaagaagtgttcggagagatggaagaccatgtctgctaaagagaaaggaaaatttgaagatatggcaaaagcggacaaggcccgttatgaaagagaaatgaaaacctatatccctcccaaaggggagacaaaaaagaagttcaaggatcccaatgcacccaagaggcctccttcggccttctttctcttctgctctgaacatcgcccaaagatcaaaagtgaacaccctggcctatccattggggatactgcaaagaaattgggtgaaatgtggtctgagcagtcagccaaagataaacaaccatatgaacagaaagcagctaagctaaaggagaaatatgaaaaggatattgctgcatatcgtgccaagggcaaaagtgaagcagcaaaaaagggagttgtcaaggctgaaaaaagcaaagaagaagaacgaaccagaagatgaggaggaggaggaggaagaagaagatgaagatgaggaggaagaggatgaagatgaagaataaatggctatcctttaatgatgcgtgtggaatgtgtgtgtgtgctcaggcattatttgctaanaatgtgaatcaagtgcagtcaatactanctcagtataaaaactgtcagatttttgtatanctgataagatcnctgtanagaaatactt

SEQ ID NO: 20307 - DNA, 902 bp, Homo sapiens
  misc_feature (1)...(902): n = a,t,c or g
gtccccgtccaacagcactgacgtctatttggagcccatggagattgctacctttcgcctccgcttgggttagggcttcttgtggcctgaagagaaagttcattcacagagactgcctcttaacatgaagatcattggacaagccacacgggtatcccatcccgatctgcctcccagaactgtgacacactgggctctgccctcattttctgtttattgctgctgctgtgttttcggcgcaacccacaaacccagtgatgggtaaatagggcagacgccagtgagatcagggagagaaggcccttggtcagagtgggcagtgccaggctctgctttgggttgtgagtggacacccaactgggcacaggctcaggcacccatcctttttccaaacagggatatagaagaggtggaagcagacagaagaggtaagggaggctaagtgggtaacagcccagcatcagggtcactgtggcaacagcaggctctaggggaatcctgtggttatgtagagactccatgtcctggtgtgatgagcaggatcagagtgactctgggaggacaggggtggggacccagagttagcagtggggatggagcagtagaaggaatcactgtttctcctaggagtctgaaggcctcgctgctttctgtgatggctttgcagtaagtgccgcctggcctgcatgcattggctaacaggctgcagaatggcaggaaggactcgctagagattgtcatggccagagatcataggtcacttcaggtagcaagacccctggcaaactgggcacttggcctatgtactgatttgtgggaatgtggcaagggtgtggggtccttcaccctgcctgaattctctttgggttccgtgcnccgtnnnnngngnncccaaaggggga

SEQ ID NO: 20308 - DNA, 320 bp, Homo sapiens
gatgaggttgccttttgccttgaagccatttgggtttttataagtcacttagtgtagacagtctcacctagcatcttccagttggggaaaaaaatgagaaggatctgattagaaaatggaagaacacatacatacttttgaaactcattttctccaatttgtcatgtcatgtaataaaacctggaaattactttttcaaaaatatgtcataattatatgaaaaggcaagaaacaactacactttgaaaacacaacacagtcctgggactacaggcatgtgcctccatgcccggctaagttttgtatttttggtagagtcg

SEQ ID NO: 20309 - DNA, 429 bp, Homo sapiens
tatgacatgattacgaatttaatacgactcactatagggaatttggccctcgaggccaagaattcggcacgagctaggcattgttaccttaattatagcagaaagtattctctttttattcataggattataaaacaagagatgtgactgacgatgtgaaaagtattgtaagatttgttcaagaacatagttcatcacaaggaatgagaaatataaaacatgtaggtccttctggaagatttactatgaatatgctggtcgacattttcttgggtaagtcatctgttttgaatgtttgagttacttcaattgaaattgaacatctaaagaatttattacaagtacatagaaaaactttttgtctattttcttataaaacttgagtttctgaataaaacttttaagtaacaaaagaaagtcaattattat

SEQ ID NO: 20310 - DNA, 329 bp, Homo sapiens
ggtcattgtaccgtatatccttttgtatagctaaaatggctattctgtgcattttggtttaattgctatagtgaaaattacatttttgaagagctagaaaagcttttcaaaacttggaaatgttgttatccttcatattatgaaaagtactagttttagtcttccaccatgcaaagacctttttaaaaatgatcttttaaatattattttcatgataaataatttaccatttgtctgtggaagagaaatactgctttctgcacacacttgtgtatgtgttccaaaatcatgtaataagatttttggctgttagagtgacatgtgactgg

SEQ ID NO: 20311 - DNA, 403 bp, Homo sapiens
ccctggtggcctcgaggctcgctgcggcatctgcattcacgtccctgtcccccggcggtcggacgccttcccagcgcgcagcccttcacctctccgtgccgcgccccgcggccagggtcgcgctggtgctgtctggatgcggagtctacgatgggaccgagatccacgaggcctcggcgatcctggtgcacctgagccgtggaggggctgaagtccagatctttgctcctgacgtccctcagatgcacgtgattgaccacaccaaggggcagccgtccgaaggcgagagcaggaatgttttgaccgagtctgcgaggatcgcccgtggcaaaatcacagacctggccaacctcagtgcagccaaccatgatgctgcatctttccaggaggctttggagcggct

SEQ ID NO: 20312 - DNA, 219 bp, Homo sapiens
gcgtgggtgctgcagaagcaagactgtaggccagtgggatttgtctaataattgatgataagatgattgatagcacagagggcaacgtactcagagaggaaggcagccttaagaaatgatgcagaaatagccaagcaagatttttccaagcactggttaaatcaccagcaaaacaaagcatttatgtgagtacctcaggcctgggcacctctttgcttg

SEQ ID NO: 20313 - DNA, 376 bp, Homo sapiens
ggagacacacaggaagatagcagctgtgtgaagtgcagaagtcagtgaacaccttcttagaaagtgctttaaaccagaggcaggattgtatactgctcaggccatggcctttggaccagtggttctgaagaagaagcaagccttcgctgctattgtttgtagctgtgccaaccttatgcaaattactcaacatctttgaggtttggcttctttgtttgtaaaatggtataataatctttatatatctcttgagaatttttgaatgaaatgaaatgtgtatcacctagcacggtgcaaggcctgtaaaataaatgttagcctattttagaagtagagttttccactattaatctccaattaagatgaggacctctgt

SEQ ID NO: 20314 - DNA, 359 bp, Homo sapiens
  misc_feature (1)...(359): n = a,t,c or g
gtggaagaagactattactttagtaaactgtccattgaattacaacaggcagtcagatgagtgatgggtcctacccctacagctcctgcattttcaccaggtgaacctgtatctgtaaatcctcagatcaagatggggggtcatgatcacctccaggggctgccctcagaagccaccgtgtagaagggtgggtgggggagccatgtagaagggggggcagaatgcaatggggcagtagtccctttgcagacccatctaggggcctgcgccagggcctgccantgggcagggganactaactgggatgtgtgaagggtggncttcnnctgntctttctcctttcttcccanggctgtgca

SEQ ID NO: 20315 - DNA, 551 bp, Homo sapiens
gatatgcctatatttttcctcaaagattctgcattttaaggatgggcataagcaaactatattttaataatttatagttaatgttaaaatattggctgatttagaccaaaagattcaaatctcctctttgtgaaatcccatctgcatttgattttttattattttatgttcccccgttagattgttttaagtgtttgcttttcatcttttatagatgtaatctgattttcaaaaatcattaacactttttaattagtatcgactaagactttttccccctggaatcgaggctgtgtgtccgtcatcccagcccccggttggagcctgctctttgaactccgctgccttcctcagcagcttctgtcctcttctgtgagtcagtcagcgagtgcttgggatccgcatccagccgtgctgagcacacaacaggctgtgtgtggaaatggccaccaccattctccttccccaccccaccacaaaaagagaagctgtgtctttagacaaccctgaggtatctgtgttacaatcgttctgtgtttgatatttgtgta

SEQ ID NO: 20316 - DNA, 400 bp, Homo sapiens
gggctttatgccatgtgaatgcaggcatgctggctcccagggccatgaactttgtccggtggaaggccttctttctatcagagggaattctcttggctggcttccttaccgtgggcactgaaggctttcagggcctccagccctctcactgtgtccctctctctggaaaggaggaaggagcctatggcatcttccccaacgaaaagcacatccaggcaatggcctaaacttcagagggggcgaagggatcagccctgcccttcagcatcctcagttcctgcagcagagcctggaagacaccctaatgtggcagctgtctcaaacctccaaaagccctgagtttcaagtatccttgttgacacggccatgaccactttccccgtgggccatggcaattttt

SEQ ID NO: 20317 - DNA, 248 bp, Homo sapiens
  misc_feature (1)...(248): n = a,t,c or g
gcagtgctttatataattatgtaattctgatacacgttttctctttcagaacttaggatcttcaagataaatatttctcttttgaacatttgaatgtttccctttgtcttaaggaggagggatgatagaaaatctagggagcagggaccttggcttatataagccttattgcaccaaataccacaggaaatcccttcagtgatgaatgttctatggaataaagatcnccnggatangnnngnccttta

SEQ ID NO: 20318 - DNA, 408 bp, Homo sapiens
ggtcagcgctctcgcggggcgcgggagtcacaagctcggattcctgggcaggccaagctctccaagactgggctccacgttcccagctttgcaggcgtctccttgggacactggtggtcgaatctaggagtaatgaccaggagatactgagtagtgacgacaacaacgatgttaatgataataaacgggtctcagtctttataattttggtggtccgtgtttgttggccgtttactttttatcagtcaccgagtgttgtagtgttgttttaccgctctgcaaaacgggcttgtcattggggacctctgatcattttacagatgtggaaacctagggattgaggaactttgccacagtcacacacaagtaatggcagagctgggattcaaattcggtctgcctcgtgtg

SEQ ID NO: 20319 - DNA, 486 bp, Homo sapiens
  misc_feature (1)...(486): n = a,t,c or g
gcagcgggggctgatggaagtgcagtgggggctggagagggcaccctactgtatccagcatgctccaaggccacagctctgtgttccaggccttgctggggaccttcttcacctgggggatgacagcagctggggcagctctcgtgttcgtattctctagtggacaggtcatgttggcagcttcctattggtctcttctggccccagcagttgagatggccacgtcctctgggggcttcggtgcctttgccttcttccctgtggctgttggcttcacccttggagcggcttttgtctacttggctgacctcctgatgcctcacttgggtgcagcagaagacccccagacgaccctggcactgaacttcggctctacgttgatgaagaagaanttnnancctnaaggtcccccnnnngnccttccctaaaagngaacttcnanccggnnnncannnttgnaanggtaaggcatatcagnaanaaggc

SEQ ID NO: 20320 - DNA, 428 bp, Homo sapiens
  misc_feature (1)...(428): n = a,t,c or g
ggcaggaagtgactgcgggagtggagccggccgagagagtggcagccgggggctgatggaagtgcagtgggggctggagagggcaccctactgtatccagcatgctccaaggccacagctctgtgttccaggccttgctggggaccttcttcacctgggggatgacagcagctggggcagctctcgtgttcntattctctagnggacanaggcngatcttanatggaagcnttggcttnnctgcatgggtcatgntnccngcttcctattgnnctcttctggccccagcnntngnnatggncacgncctctggngncttcccgnctttgcctncttccctgtgcctgccgcaccnggattngngtnncnnncacnttncccnnnttnctncccccnncactcncctcnnnntnnncatcctnatcccg

SEQ ID NO: 20321 - DNA, 334 bp, Homo sapiens
gacagtgtttattattgttctgcttcttttatctattttaatccagtgtgtcatttaataatgattggagctaggtatgcagaaggttacacaaaagaatttaatagctgctagtagttcactggaggaaacaaatggatgtgaacatatgttgaagcaaatagaaaatttaattacatacttaataagctactaaattgtatagtagagactctaagagttgtaggtgttcaaagaagaaagatctttgtagggctgttgtaatcaaggaaagtttcttgaaagaagtgggttttgaaggatgggcaggatttagattaaatgagaagaaaga

SEQ ID NO: 20322 - DNA, 334 bp, Homo sapiens
gcgttatggccatgatgatgaccgcctgtgatctctcagccatcaccaaaccctgggaggtgcagagccaggtagctctgctggtggctgctgaattctgggaacaaggtgacctggagcgcacggtgctgcaacagaatcccattcccatgatggacagaaacaaagcagatgaactccctaagcttcaagtcggcttcattgactttgtttgcaccttcgtctacaaggaattctcccgtttccacgaggagatcaccccaatgttggacgggatcaccaacaatcgcaaggagtggaaggcgcttgctgatgagtacgatgccaagatgaa

SEQ ID NO: 20323 - DNA, 471 bp, Homo sapiens
  misc_feature (1)...(471): n = a,t,c or g
ggatatttcctaaggcatgtggcctttatctcaacggaagccccctcttcctccctgggggccccaggatgggggggccacacgctgcacctaaagcctaccctattctatccatctcctggtgttctgcagtcatctcccctcctggcgagttctctttggaaatagcatgacaggctgttcagccgggagggtggtgggcccagaccactgtctccacccaccttgacgtttcttctttctagagcagttggccaagcagaaaaaaaagtgtctcaaaggagctttctcaatgtcttcccacaaatggtcccaattaagaaattccatacttctctcagatgggaacagtaaagaaagcagaatcaactgcccctgacttaactttaacttttgaaaagaccaagacttttgctgatcaagtggtttacagctccaccttaagggnaantggnattaccctggagaaaa

SEQ ID NO: 20324 - DNA, 291 bp, Homo sapiens
tttccttatgtatataaggctttgcgttttgagaggggtaatttggaagtacagcatcttgatattttctcttgctttcacagaaggaagaatcctgctcaaaaatgaggtgaattaatacttgggcgctcaggaaccctggacagctacatgaggtgtttaaaaactgccctgaccatcttgccaaacaagtctctgctcatgaggccccacaggatgaacgagccgaggcaggacagtgtcctgccctgtcggaacagtgactgctgacctgccaagagagagctgggg

SEQ ID NO: 20325 - DNA, 374 bp, Homo sapiens
gagttaaacgtctggggctgcttctgaggaatcagcttggctggccagcaagttcagctccggcaagtcatttgattcacccggtgatgaaatgggggtcaaccagtctgtgggctttccacctgtcacaggaccccacctcgtaggctgtggggatgtgatggagggtcagaatctccaggggagcttctttcgactcttctacccctgccaaaaggcagaggagaccatggagcagcccctgtggattccccgctatgagtactgcactggcctggccgagtacctgcagtttaataagcgctgcgggggcttgctgttcaacctggcggtgggatcttgtcgcctgcctgttagctggaatggccccttta

SEQ ID NO: 20326 - DNA, 481 bp, Homo sapiens
  misc_feature (1)...(481): n = a,t,c or g
gtgtatgagttcagagacaagctgtgtggaccatatgaaaaatttatatgtgagcaggatcatcaaaattttttgagactcctcacagaaactgaagactggctgtatgaagaaggagaggaccaagctaaacaagcatatgttgacaagttggaagaattaatgaaaattggcactccagttaaagttcggtttcaggaagctgaagaacggccaaaaatgtttgaagaactaggacagaggctgcagcattatgccaagatagcagctgacttcagaaataaggatgagaaatacaaccatattgatgagtctgaaatgaaaaaagtggagaagtctgttaatgaagtgatggaatggatgaataatgtcatgaatgctcaggctaaaaagagtcttgatcaggatccagttgtacgtgctcaggaaattanacnaaaatcanggaattgaccncacatgtgaccccgtgtaaccaacg

SEQ ID NO: 20327 - DNA, 428 bp, Homo sapiens
gggcacagcctgggtctgagtcagctctctgtgagccctgccctgtgacttcactcccgctgaaggctcagtcaactgggggagaccgttccatgaagagtgagggcgcatctaccccaccatacatgcctttggtcaaagttgcagaagcctgtggttgggcgtgaacccagcactttgcagaagtgtgaattcttaatttacctcccccacagccacacacacaggagtgaaggcagcagagccaagcaggaacccgtcctgccccaggcctgagctttcttaagaggctcatggggcagaaagatcccaaactgagctctgacgagatggagaagcaaaggacacggttcctgccccaaggagctcccagacaagcaggagagaaggtggctccagacaagcaggagagaaggcagctccaaact

SEQ ID NO: 20328 - DNA, 440 bp, Homo sapiens
gtgaatgaatgacaaacagtgattgttcatacttgggtatttggcagacatcttgaaaatgaactgagaacctgttacttcagtgtaagctgttggtatttgttgccagtgatgaagtagaactttccagtgaaaattaaaattttgggccggcgcagtggctcatgcctgtaatcccaacactttgggaggcgaaggtgggtggattgcttgagcccaggaatttgaggccaacctgggcaacgtggtgaaacctgtctgtacaaaaaaatacaaaaattagctgggggtggtggcacatgcctgtggtcccggcaactccggaggctgaggcgggaggatggcttgagcctgggaggtggaggtgggagtgagtcttgatggcaccactgcattccaacctgggcaacagagagataccctgtcaaaaaaaaaaaaaa

SEQ ID NO: 20329 - DNA, 368 bp, Homo sapiens
gaaatatttgatgggctagttctgtaaagtgtatattccacttgtgtctcaaacgctaaaataccaggcttggattttttaattttggtttggattttattttgaaattcttacttgtataaaccaatcccttatcaaaatagaaaattttcaaaagttgcttaactttgtcactctcctcgtctttcatgctggtgaaaaccagcctggccatttgacattgagggtttctttctccatattcatctccaggctctgagttcattattccagtgaaaccacgctaaggaaaaaagactttcctaccctcctctcatctggtgaactttggcttccttcactctcccttgctctgcacaccccagctt

SEQ ID NO: 20330 - DNA, 365 bp, Homo sapiens
gctggatttctagttcttcaaaagcatcactctcccgcttccccgcctttgcacagctattcttgcctggaatgcccttctgctccctcgtacagatgcctctgatctcagctataccccaggttaagccacatgtcttcacagagaaagagccactggggcagggttctgaggcatgcataggagtttattgggtggaaaaggaaaacaaacagcctcggagtgggtttgtctctcccactgactgggagcccagaagggtagggctggggcctttcctcccactcctgacagattcctattggtcctttaagtctcagcttagacatttcctcctccaggaagcctctctgttctccccggcc

SEQ ID NO: 20331 - DNA, 368 bp, Homo sapiens
ggtctgggatctaatctaggatcattagtggcattcagttgtcatgtctcttgagcttcctttaatcgaaaacgatctccttggccgggcatcattgcttacacctgtaatcccagcactttatgagactgaggtgggaggatcacttgaggccaggagttcgagaccagtctgggcaacatggcaagaccctgtctctacaaaaaaaattgaaaactagccaggcatcgtggtgcctgtctgtagtctcagctacttgggaggctggggtgggaggattgctcaaacctgggaggtcaaggttgctgtgagccaagatcggcaccactgcactccaacctgggtgacagaccaaaaccttgtctcaa

SEQ ID NO: 20332 - DNA, 333 bp, Homo sapiens
ccgtgatattgtacagaagctattgcagtacaaggcagacatcaatgcagtgaatgaacacgggaatgtgcccctgcactatgcctgtttttggggccaagatcaagtggcagaggacctggtggcaaatggggcccttgtcagcatctgtaacaagtatggagagatgcctgtggacaaagccaaggcacccctgagagagcttctccgagagcgggcagagaagatgggccagaatctcaaccgtattccatacaaggacacattctggaaggggaccacccgcactcggccccgaaatggaaccctgaacaaacactctggcattgactt

SEQ ID NO: 20333 - DNA, 558 bp, Homo sapiens
  misc_feature (1)...(558): n = a,t,c or g
gagtgnnnnnnntttgaacnccttgantgattacnaatttaatacgactcactatagggaatttggccctcgaggccaagaattcggcacgagaaaactcatcaagtatcaactaaatgtcagacattcagtaatgactgagatactgccctgatgtcaaggagcttgcagtaaagcaggggagccaaataattgcaatatctgccttaagtgtggtaacagagcatcacagttgggatgatgcattattggtaccatattgttgtatgtataggctgttttggcagcacagaagaggcatctgcctcaccctaagatcagaaaaaacttcccaaagaggccaggcacaatgtctctcacctgtaatcccagcaccttgggaggcctaggcaggcggattgtttgatctcaggagtttgagaccagcctggccaacatggcgaaaccctgtctctacaaacaatacaaaagttagctgggcgtggtgccgcatgcctgtagtcccagctattcgagagactgaggtgggaggaacgcttgagcctggaagggcggagg

SEQ ID NO: 20334 - DNA, 570 bp, Homo sapiens
  misc_feature (1)...(570): n = a,t,c or g
tttgaaaactttgnanaccgttatgacatgattacgaatttaatacgactcactatagggaatttggccctcgaggccaagaattcggcacgagaatttttgaaaaccctataattagccatgttttgagagcaacagcaacagactgtataatctccccatatctttttatataaacacagaatttagaccctgccaatctgccacttaattattttaatcatatggaagggaatgaacttgaagatgatcttgccagatgtcttctgtttgcctcttaagacccactccaccatttccctgcccctgccctggaggttcacctccgtggacaacattcagagtctctcttgcccctggcttttggttggataagccaattggcagtctcagcaggagattacagggaaaaaaagagagttcatggtatgtattctctgctccctactgtgggactctccttcatttggctgggcttcactggtcccttcatggccgctgactcattcctgaagtcccacacctcagcctcagtgctaacagtatcactgtcactggcccatgaccacc

SEQ ID NO: 20335 - DNA, 332 bp, Homo sapiens
gtgataagcgacagctacgtttataccaagagaggtaccttgctgatggggatctgcacagcgatggtcctgggcgaatgaggaagtttcgatggaaaaacatagatgatgcttcccagatggacttgttccacagagactctgatgatgatcagactgaagaacagcttgatgagtcagaagccaggtggaggaaggagcgaattgaacgagagcagtggcttcgggacatggcacagcaggggaaaattacagctgaagaagaagaagaaattggggaggacagtcagtttatgatactggccaagaaagttacagccaaagcactgcag

SEQ ID NO: 20336 - DNA, 423 bp, Homo sapiens
gctcagcaaccggccgcagtctcttctgcaccattttctacaccagacctgcttggcaccacagggagctcttttcctgccctgcacaatgacattccaaccaccaccagccagacattacagccaaccttgctgattgtcacaagcaggaccttggggccactggcactgtcagatagtaagccatttcttgggtagaggaggaaactcctctccacaaatccacttgggcctgtgcaaatggcacttgaaagagtccccatgcacttggagtccatgagccaatgggatatgcaaagacgcttaaacatttcagggctggtttctctgttcatatccaattctggtgcttaggaacagggacccatgctgatgcccaagggcaaaaagccccacttcctttaaggaagtgaacaggcctgc

SEQ ID NO: 20337 - DNA, 378 bp, Homo sapiens
cgagcaggagaagttcctaaaccttttccaacacattataaagatttgtgggataacaagcatgttaaaatgccttgttcagaacaaaatttgtacccagtggaagatgagaatggtgagcgaactgcggggagccggtgggagctcattcagactgcacttctcaacaaatttacacgaccccaaaacttgaaggatgctattctgaaatacaatgtggcatattctaagaaatgggactttacagctttgatcgatttctgggataaggtacttgaagaagcagaagctcaacatttatatcagtccatcttgcctgatatggtgaaaattgcactctgtctgccaaatatttgcacccagccaataccactcctg

SEQ ID NO: 20338 - DNA, 365 bp, Homo sapiens
gtggatgactggaatgtaaggctgtgtggctctaaaccttggcatttagactactagcacctatacgtcagttagcttcctgccacttcttgttttctgcctggataggactttataaagagtttggaagaagggagagttccgacgaggtacagaaatcagaacttccccttcttccaaactatatacaaataatcagttaatcagattaaaggactcttagtaacattgaaatcaaacctttgtgtttccaggagctctgagaacaacaatttttttggagcattgcaatctcttgagtatccaaaatgattctataatgatgtctgtgaggtcagaattggagcagcaaatggaattccttt

SEQ ID NO: 20339 - DNA, 529 bp, Homo sapiens
  misc_feature (1)...(529): n = a,t,c or g
gcatccaattctcaaactgaagctcgcactctcgcctccagcatgaaagtctctgccgcccttctgtgcctgctgctcatagcagccaccttcattccccaagggctcgctcagccagatgcaatcaatgccccagtcacctgctgttataacttcaccaataggaagatctcagtgcagaggctcgcgagctatagaagaatcaccagcagcaagtgtcccaaagaagctgtgatcttcaagaccattgtggccaaggagatctgtgctgaccccaagcagaagtgggttcaggattccatggaccacctggacaagcaaacccaaactccgaaagacttgaacactcactccacaacccaagaatctgcagctaacttattttcccctagctttccccagacaccctgttttattttattataatgaattttgttggtgatgtgaaacattatgccttaagtaatgttaantctatttaacgtantgatgtttaagttatctttcatggacnangtttttagataca

SEQ ID NO: 20340 - DNA, 818 bp, Homo sapiens
ggatgcctgtggacaaagccaaggcacccctgagagagcttctccgaggtccatctccccatcccctagcttgtgtcctctcgtcccttcccacctgtcttctccctctgtaccacagcttaggttgtttttcttccctagagcgggcagagaagatgggccagaatctcaaccgtattccatacaaggacacattctggaaggggaccacccgcactcggccccgtgagtcaccactgtgggaagaagggttgtaaaaggaaataatcctggcctcttggggctgggttagggtgaagctgggtacctgacctgcccacactcttaggaaatggaaccctgaacaaacactctggcattgacttcaaatagcttaacttcctgacgaagctcaacgagaatcactctggaaaggtgacccctgcccttcttgcccttccctcactaaacccccataaattacttgctttgtacctgttttaagtttttcctccagttagtgggcaaggaagtggcagcaacatttcaagcctcctaacccctacctgtcctgcagctatggaagggccgctggcagggcaatgacattgtcgtgaaggtgctgaaggttcgagactggagtacaaggaagagcagggacttcaatgaagagtgtccccggctcaggattttctcgcatccaaatgtgctcccagtgctaggtgcctgccagtctccacctgctcctcatcctactctcatcacacactggatgccatatggatccctctacaatgtactacatgaaggcaccaatttcgtcgtggaccagagccagg

SEQ ID NO: 20341 - DNA, 349 bp, Homo sapiens
ggtacatactctcttggcaggaggctcaggagcaattgtgtctctatcaaaactattctcttctctcctgtagaagaagcagaagtgcgtatctgatcctgtcaacaagtgttcatgcagacatttcctgagaacctactatgtattaggtattttgctacatgctggcataaacaggaagcctctaaggaaaggtgtgacatgaggcatgagctgaattgtcttcaagggccaggcacctcatgtaaattgctgacttataccagcatgaaaaaagaggtcaaatccatccataaccagacagaaacattaacccttataaagcaaaggagagactaaggagatgacc

SEQ ID NO: 20342 - DNA, 369 bp, Homo sapiens
cccgggtgtggtggtgggcgcctgtagtcccacctacttgggaggctgaggcaggagaatagtttgaacccgggaggcagagtctgcagtgagccgagattgcaccactgcactccagcctaggcgacagagcgagactctgtctcaacaacagcaacaactacaaacaaacaaaaaacagggttaacaaaagtatggaattcaattctttttatatgctgcagccatgttcctgccctagatttggctgggcatggtggctcacgcctgtaatcccagcactttgggaggctgaggcaggcggatcacgaggttaggagttcgagaccagcctgaccaacatggtgaaaccccgtctctactaaaaat

SEQ ID NO: 20343 - DNA, 531 bp, Homo sapiens
  misc_feature (1)...(531): n = a,t,c or g
tgaannccacatctatgacatgattacgaatttaatacgactcactatagggaatttggccctcgaggccaagaattcggcacgagctgcataacaaattgctccaaaacttagtgtcttaagacaacaatagccttgtattatttcttatagtttctatgggtgcagtattcaaccagggtacaacaggaatgacatgtctcctccatgatgactgtggcccttgatggaagacacccatgccaggggctgaaaacttctctgaaggcttgttcactcacatgtctggcaattggtgctgtctgtcacctgggagcttttctggggctgtcaactggaacaccgcaggatttctccatgtggcctgggtttcctcataccaatggtggctaggttcccaaggcaagtgtcccaagagagaaagaaagggagagacagagggccagccaagttgaagccatattaccttcaatgacctagcctcagaagtcacacagcattgccaggcacggtggctcacgcctgtaatcc

SEQ ID NO: 20344 - DNA, 434 bp, Homo sapiens
ttgactccgcttccatgattacgaatttaatacgactcactatagggaatttggccctcgaggccaagaattcggcacgaggactagcagttgttaacagagtggtgtgccataaagctaatgataaatgattcctcaaaaaagaataatgtaacagactaatatcagggatctacaattatagaatgtttctcaacaattaggcaggaggaagacaaaagagtccaaggagagtaaaaaatggctgttttataattagcattgattagaaaaatacaggataaagaaagttcaaagttgagcagtagcagagtaaaaataggatgaataatttcctaagttactcattctgttcattaaagagaggaggggaaaaaacttaatcaatatggctaaggggagagggaacttcttaacctatatggctaagggag

SEQ ID NO: 20345 - DNA, 441 bp, Homo sapiens
  misc_feature (1)...(441): n = a,t,c or g
atttgaatnccgttacgacatgattacgaatttaatacgactcactatagggaatttggccctcgaggccaagaattcggcacgaggatacactcagtaaatattaaatgagcaaatggatgaataacaggatattaaaattaggcagaaggcatgtaatttggaggggcttgggcactgactatatgtccttctgtctcgatattttttccttcttgaaatattcatttcagatacactgtctggagtttagttttcagttatttttacaaagcagttttatagttgaaaaagcagatataaggcaaatcaatctagatgtgtagagtaattggactgggtttgtggtgtgatgatggagggttttgaagacttcttttagttagtagaggattaatcggtgatcattagggagaattaacttgttgacaaattgcaaca

SEQ ID NO: 20346 - DNA, 146 bp, Homo sapiens
  misc_feature (1)...(146): n = a,t,c or g
gatggagatgggcttatccttggagaggcacctgccaccctgcggccattcctgttcgggggccgtggggaaggtgtggacccccagctctatgtcacaattaccatctccatnatnattgttntcgtggccactggcttcatctt

SEQ ID NO: 20347 - DNA, 361 bp, Homo sapiens
gggaagaacttatagattgaaacagccatatgaaaagtggagtcaaaaactgagccttaaattattagtatgaaagacatcacagtctgtgaccaattcatcaaattatctcctgcgtatagcaacaattctaataccaagaaaaacaaaaactgcatagattttctccacttgtttccgtgtaggtgggctatatgtggtgatgtgaactgctctctcatatcctgagatcatttctacttttaatttttgcagtgtctaaatcttattttatagatttctcatcgacatgtcttactttaggtttctcaattgaattctgttataaatcctcttaggttactttagtagtaaaatctta

SEQ ID NO: 20348 - DNA, 776 bp, Homo sapiens
cgatgccatgttccctgtcactcacatcgctggggagactgttatacagcaagggaatgaaggagacaacttctatgtcgttgatcaaggggaagtggatgtgtacgtgaacggagagtgggtgaccaacatcagcgagggaggcagcttcggggagctggcgctcatctacggcacccccagggctgcgaccgtgaaagccaagacggacctcaagctctgggggatcgaccgggacagctaccggcgcatccttatgggcagcacactgagaaagcggaagatgtatgaggaattccttagtaaagtctctattttagagtctctggacaagtgggaacgtcttacggtagctgatgcattggaaccagtgcagtttgaagatgggcagaagattgtggtgcagggagaaccaggggatgagttcttcattattttagaggggtcagctgctgtgctacaacgtcggtcagaaaatgaagagtttgttgaagtgggaagattggggccttctgattattttggtgaaattgcactactgatgaatcgtcctcgtgctgccacagttgttgctcgtggccccttgaagtgcgttaagctggaccgacctagatttgaacgtgttcttggcccatgctcagacatcctcaaacgaaacatccagcagtacaacagttttgtgtcactgtctgtctgaaatctgcctcctgtgcctcccttttctcctctccccaatccatgcttcactcatgcaaactgctttattttccctactg

SEQ ID NO: 20349 - DNA, 329 bp, Homo sapiens
ggtcagagtcacaggatctctggatgcagtgggctgcttaggccaacaactgcctggaagtctactcctgcacagggcctaggcttccccacggctggccgggaaggcggggcacatggaagctctaaactgaagggaaactgaggctcagatcacgggtccaggaaagccctgagtcaggagggtaaacaactcgaagcccagcaatgggttcttaggtcctggcggcagtgctcaaccttcacggcctcagtttttccatctgtaaaatgggaccctcccactgctgtagctctggggagtggagccatatggaacacagcccagtt

SEQ ID NO: 20350 - DNA, 464 bp, Homo sapiens
  misc_feature (1)...(464): n = a,t,c or g
gaggnnnnnnnnngnnnngntttgacgcctgcggtacttgganngcctgcggtaccgntccggaattcccgggtgatgaggaaatgaaggctcagagagcctaagagacttgcttaaggttgcatagctagtaagtcaagaagcaacatttaagttgaggcaactgtaacctcagaacctgaaattctaaccactttgctgaacagcctctgtatccaatagaatagccgatgctaagacacacagaatagcttagacaattatagcacatttcagttttcaaacatgactttatttggtatattaaaatcttaagtgaaaaagattatttttttcttgtaccattctctggaattttatcatcattatcttttcagattcaatatagtagaatttcaaattaaaccacataaaactaattttatgtcttaaagccttaattactacagnacttatatntggtt

SEQ ID NO: 20351 - DNA, 372 bp, Homo sapiens
ggttcaacgttaataggaagatacagctatgaaaaggtagcttaaattaaaatgaatttttgccttaccaatttctttttcagtttgcagttttctttataaaccagtatgacggctctcttaaaaactaaagaaaggaaaagagaaagaaagtctttattttatgcaaactcttccaaggttaaactagagctgaacgtcttaacagagtaacactcttcaaacgtatgagtctctaagacctcactctgccaacatgagtgaataaatggtacttccctttcgctcatatttgaactatgcagaagcacctgcttatttaaaagctactattagaagttgatcttggcttttttaaactctttgttttat

SEQ ID NO: 20352 - DNA, 533 bp, Homo sapiens
  misc_feature (1)...(533): n = a,t,c or g
ggcatgtttaatgtaggtgttgctaacgtccaggtggctcctataagttaagggtccattgatttaaaagttctaaaagagacggggctaaggganaccaataacagatatttttaaagaatttcatagaggagatacacattagaaacccagaactctaagatgtgcatttgctaagtcctgtaaacagacaagaaaacacatttacattagtttgccctttaaagattatttcctccttgtctcttatcaatgtgagtacataaaagagaccttattacaattaaaaacaatgatggtttagcagcagatttagataccttacattctctctttaanagagagaatgtaaggcctgttgcggtggctcacacctgtaatccagcactttggcaagccgaggagggtaaatcacctgaggtcaggagttccagaccagcctgggcaacatggtgaaacccctctctaccagaatacaaaaattaccgggngtggtgggcatcctgtaatccacaacttgggaggtgagtagg

SEQ ID NO: 20353 - DNA, 600 bp, Homo sapiens
  misc_feature (1)...(600): n = a,t,c or g
ggggnnnnacntttatgntnccattaccaattttatacgaatcantacnagggaatttggccnacgaggccaagaattcggnacnaggaattcagaactgctgccanctgggtggaacaacaataaagacctgtatgtcctccggtatgantataaggatgggtccagaaagcnccttgtgaaagccatcaccgtgganagcagcatgatcctcaatgtgctggaatatggctcacagcaagtggcagacttgaccctgaacttggatgattatatcgatgcaggaacacctgggtgacttccacaggacctacaagaacagtgaggagcttcggtctcgtattgtgtctggaatcatcacacctatccatgancattgngaaaaggctaatgtaancantccccaccggggagttcccccctgctaccgccagagagtggacccactccggttcctccacacnacccacacaccantcgggcagcctccctggtgtgatcccctgggcccgtttgttgtcngggggagangactttagaaccttttgggcctccgganaagtggcntgttgntgggtcccnnnaaatcggggttcccag

SEQ ID NO: 20354 - DNA, 373 bp, Homo sapiens
gggcatgctcctgtagtcccagctactcaggaggctgaggcaggaaaatcacttgaacccaggaggtggaggttgcagtgaactgagaccgtgccactgcactccagcctgggtggcagagcgagactctgtctcaaaaaaaaaagaaagttgtgaatttgatgtaagcttaggaaatgaataaaatttataggcatctgtataatgtacaacttgacacggactttcttttatccttagtttctttcacggactctaaaacttttatcagaatatactggtaaaacattgggggagggatcctgagtaggtgattggtcaaaaagatgccttcagttttgtcagtgtctaaaagttaagtctgtttaggcca

SEQ ID NO: 20355 - DNA, 449 bp, Homo sapiens
ttaatacgactcactatagggaatttggccctcgaggccaagaattcggcacgagaaagatgttcagatttgctgcatttgttttggaatgagtgcctggtgttgcttgtgcacaccccaagcctcctggcctttccaggtttccctgttgaacaggcagctctcctgcggttgggtggcacagggctgtggtgagggccccagcatccctcctcacctgggtgctcagttcctttcttgtcatcctttctctgtttgtaaagcagaaacagtcctgctaacatcacccccttcaaagatgtatgcagaatttgattttttttcctggaaaatatacttttttagtgtttaagaaaaaactcgtgctgggcatggtagctcatgcctgtaatcccagcactttgggaggctgaggcaggagaattgcttgagcccagaagttcgagacc

SEQ ID NO: 20356 - DNA, 363 bp, Homo sapiens
gttctttcaaaggataccccttctttcttttttaaactagctgttgtttactgataaatggaaagcttaaaaaatggattatggaggcaggggtatttggttttgccctgtacctgccttagggaagtttgactttgtatatttgccaagcctgctgatagctttaccctgggcagaacctgacagtcaaataattactctttgattgtactgattacctactgtttgtatgcattttatagttcattggtttctaattctatcttcggttactttcttttgcctactttcttggtcctatttttttgttctttctctaggatctggaatgttattcttatctcagtttttcctaataattca

SEQ ID NO: 20357 - DNA, 331 bp, Homo sapiens
gaacagaggaaccctagttactgattccagactttgacctcatccaaaattaacagcagccaatttgcattcttctgggttatatattgttggccaaatattcagaattattgtgtgcctctgggcagagaactcacagttcaaaatatcttttttgttttcctttggtacagggtcttgctctgtcacccaggctggagtgcagtagtatgatcatagcttactgcagcctccacctcctgggttcaagtgatcctcccacctcggcctcccaggagctgggactacaggcacaaatcaccatgcccaaatatatatatatttttcaatc

SEQ ID NO: 20358 - DNA, 373 bp, Homo sapiens
accagatagactctggggacctgatggagtgtctgatacagaacaaacaccagaaggacatgaacgagaagtgtgccatcggagttacccacttccagctggtgcagatgaaggattttcggttttcttacaagtttaaaatggcctgcaaggaggacgtgttgaagctttgcccaaacataaaaaagaaggtggacgtggtgatctgcctgagcacgaccgtgcgcaatgacactctgcaggaagccaaggagcacagggtgtccctgaagtgccgcaggcagctccgtgtggaggagctggagatgacggaggacatccgcttggagccagatctatacgaagcctgcaagagtgacatcaaaaacttctg

SEQ ID NO: 20359 - DNA, 1126 bp, Homo sapiens
cttgactgattacgaatttaatacgactcactatagggaatttggccctcgaggccaagaattcggcacgaggtggactcggcaagaaccagcgcaagagggaagcggagttatagctaccccggccgcggagccggctcactgcactacccccgcccccttctttcctccagacgccgaagtcgcgggcgctcatggcgggcctggaggtactgttcgcatcggcagcgccggccatcacctgcaggcaggacgcgctcgtctgcttcttgcattgggaagtggtgacacacggttactgcggcttgggtgtcggtgaccagccgggtcccaatgataagaagtcagaactgctgccagctgggtggaacaacaataaagacctgtatgtcctccggtatgagtataaggatgggtccagaaagctccttgtgaaagccatcaccgtggagagcagcatgatcctcaatgtgctggaatatggctcacagcaagtggcagacttgaccctgaacttggatgattatatcgatgcagaacacctgggtgacttccacaggacctacaagaacagtgaggagcttcggtctcgtattgtgtctggaatcatcacacctatccatgagcagtgggaaaaggctaatgtaagcagtccccaccgggagttcccccctgctaccgccagagaggtggacccactccggattcctccacaccacccacacaccagtcggcagcctccctggtgtgatcccctgggcccgtttgttgtcgggggagaagacttagacccttttgggcctcggagaggtggcatgattgtggatcccctgagatctggcttcccaagagcacttattgacccttcctcaggcctcccgaaccgacttcctccaggcgctgtgcccccaggagctcgctttgacccctttggacccattgggaccagcccacccgggtacgtagtcactcaggtatgctgagaagtaggacctgatggcagcttggttcagtgtggcagcaatgaaggtttctagccccaggcacagagctgccgctgccttcacctgttgctgccaggagagtggagcctcctccagggccctgcctgatttctccctggagc

SEQ ID NO: 20360 - DNA, 503 bp, Homo sapiens
ggaattggggatgccaaggagtaggtggtgaattgatgcaaattgcttcttagtgcttattaggagctgaagaaatggaaaagcagtctccaatttcacatcttgaaatagaggttttttcccacatgttactaaagaaaagtcagcaaagagatttaaatcttatatttatcttaaaagtccctgatttatgataactatacattgtatgtaaattcagggatatgtatatgtatgtttgtgtgtgtgtgtgtttgtgtgtgtatacctgacatatatagtagatatatatacctattgaaattctctcactctgtgtatgtatatatacctatggaaaactagttgttgggaaaggagtacgtgattccctccctttcacttttcaaagtgagccactaaacagaaagtctaagagttcagaaatgtcccattctcctaaggactttcccttcaccatttttccagggtatagtgccactggacctacatagcctagatgg

SEQ ID NO: 20361 - DNA, 388 bp, Homo sapiens
  misc_feature (1)...(388): n = a,t,c or g
ggggcactgtcccaccgggatccagttgcaaagtttgtcttgacagttgaaggcctcgcttagttgtactggattctcagggagccctctgtggccttttgctttgcgtgctgtttcccttgtaccagagggcggaccgtggaaatctgttttccctgaaccatattgggttgaatngcnttactggcaaaaaaaggacaagggcctttaangcctaaggggggcttcaanntgcctaataaagaccnaaggcntttgggtnatgaacttgaaanctnccggaaaaaanggggnccngtttanttgaaaactttanatcctggaccntttaacnaaatctcaaaaaatttttggggncntgcnacttnaattgggcactgggtttctg

SEQ ID NO: 20362 - DNA, 189 bp, Homo sapiens
attctcccacacatggagttctgggtggcaccatcccacactatttgcatcactgagctacacactctgccaagactgcatcttaaatttaaacacattttgatgaaaatagagaaaggtcgacgcggccgcgaattccagatctatgaatcgtagatactgaaaaaccccgcaagttcacttcaactg

SEQ ID NO: 20363 - DNA, 316 bp, Homo sapiens
gaaaatgcaaaagccaaatgggcagcccgaaagactcaaatctttctccctatgaattttaaggataaccatggaatagccctgatggcatatatttccgaagctcaagagcaaactcccttttaccatctgttcagtgaagctgtgaagatggctggccaatctcgagaagattatatctatggcttccagttcaaagctttccacttttacctcacaagagccctgcagttgctgagaaaaccttgtgaggccagttccaaaactgtggtatatagaaccaagccagggcacttcatttacatttggagggcta

SEQ ID NO: 20364 - DNA, 500 bp, Homo sapiens
  misc_feature (1)...(500): n = a,t,c or g
tttnnnncatcanatatgacatgattacgaatttaatacgactcactatagggaatttggccctcgaggccaagaattcggcacgaggccccgggggtgacccttgcaggcccttttgtttactgctggtgcgttggtcatgtgtgtccagggccgctgggaggtcgtggcttctgtttgctgggtcccgtcttccttcttgactgacagcccttcaggcagacctgagtggggtgcaggtcccattccagccgcagcccccgcatgcggtctcggggaagtgccgtggcacctgctcccccttcagggcaccgtgcagtggtgctgtcccccgggcccccctcgcctggtcgtcttggcgcctggccttgttgtttgtgctcagccctgctgctgacgtcaccactcagctccagaacgatctccggagccgaggtgaggctgagtgaggctgctggctgattattccccgtgctcactcccctgatggtggcatggaa

SEQ ID NO: 20365 - DNA, 404 bp, Homo sapiens
gttaggcctttaactcataaagagagggtagggcttttctttttccatatgtcaattgtggtgttcccagaatgtatagcagttataaaaataggtgaaagaattgttagcttgtaaatactgagagattggtgatttatataaggtaatctgttagtcttaaaatagttaaaagtttgtatttttagattattatgtagtaggttagatccctcttgttttgacttccactgactcattctgaaccccctaagcacccaggccagaggcaagaacctgggctgtaactgccacctgacaccgctgactggctaaatgctttgcagaaagtgatgaccttacaccacaaccagcttctccaggtcatatgtgccttacctccagagagtctttttttttttttt

SEQ ID NO: 20366 - DNA, 601 bp, Homo sapiens
  misc_feature (1)...(601): n = a,t,c or g
tgaanccctntgacatgatnacgaatttaatacgactcactatagggaatttggccctcgaggccaagaattcggcacgagcaggtgccccccttcccccgcacagtttgctgatagttcagaaatctactgctcgtgaagagaacacgtacgcattcagagatcgcattctttttttgcatccagttgtcctcactggcctgtgacgcaggttgccctacttgatggatggatgagaagagaaggagagggatgggaagcttgggtcgtacttcagggttaaggatcccagccaaagggctttcctagaaagactctctggtccgtcaccgcttttgtcaatcttcagtgttacatgttcttcatctttttttccttgtaaagtaatgatcggcaggtacttctaatttgcctgcagaatatgtattctagactctttcatatatgaatatttctaacagaagcaaaatctgntaattattctttatcttagtactaagcatctttattagctagcactcaagagctaacctttaaaaaagtaagaagccaggcacagtgctnacgcctattatcccccactttgggaaactgaaccagg

SEQ ID NO: 20367 - DNA, 419 bp, Homo sapiens
  misc_feature (1)...(419): n = a,t,c or g
gctgggcacggcgactcacgcctgtaatcccagcacattgggaggccaaggcaggcagatcacgaggttaggagttcgagaccagcctggccaacatggtgaaaccctgtctctactgaaaatacaaaaattagctgggcgtggtggtgggtacctgtaatcccagctacttgggaggctgaggcaggagaattgcttgaacccaggaggcagaggttgcagtgagccgagatcatgccattgcactccgactctgggcaacagagcaagactctgtctcgggggaaacaaaaaaaaagtgtgctttgtcaagagaagcaccagcagacctntaagaactgctctctaaggctgcggtagcaaattatctactattgcaggngccttattggtagaaggctntgaaaagccnaaactgt

SEQ ID NO: 20368 - DNA, 343 bp, Homo sapiens
ggctatgagaaaggggaggagagggatggagtcagcaagaccagataaaggcggaatgacataattaatgtgtagcactttcagcatatgaaaacagcacttccttcatcttcccaaagaccatcagcgttgatcatattttattattaagaaaatacaggctgggcacagtggctcggcctgaagtcccagcactttgggaggccaaagtgggtggatcacttgaggtcaggagttcgtgaccagcctggccaacatggcaaaaccctgactcaactaaaaatacaataatcagcatggtgtggtgggggatgcctgtaatcccagctactcatgaggctga

SEQ ID NO: 20369 - DNA, 391 bp, Homo sapiens
cgataatctacaacagacagcgggctctggaagaactcccccactggaaaggattctgaaagaaatgaagtcagccctcagaaatgaagttgactgcctgctggctttctgttgactggcccggagctgtactgcaagacccttgtgagcttccctagtctaagagtaggatgtctgctgaagtcatccatcaggttgaagaagcacttgatacagatgagaaggagatgctgctctttttgtgccgggatgttgctatagatgtggttccacctaatgtcagggaccttctggatattttacgggaaagaggtaagctgtctgtcggggacttggctgaactgctctacagagtgaggcgatttgacctgctcaaacgtatcttgaagat

SEQ ID NO: 20370 - DNA, 390 bp, Homo sapiens
  misc_feature (1)...(390): n = a,t,c or g
cccacgcgtccgcccacgcgtccggaaattgaaccacctaaacatggcagaatctcaaaaacataattttgagagagaaaatacaagtatgtcactgcttagctaaaattttaaagcatattaaaaatactgtatactgtttatagacatagctatgtgacaacagtataaaaagaagcatagtaataataaacacagcttaggatagtggatcagctgggaaaaaggatggaattttgatacataagcacttcaactgtatatgtaatttttctaatttaaaatataaagaaaaactgaaaaatcttaacgtttaataaggctggctgacaaaaatacattctttataactttacgaatgataatgatatttcgttttaaaanggcgtc

SEQ ID NO: 20371 - DNA, 336 bp, Homo sapiens
cggcgatttgtgtggaacttcttccgcctggagaatgaacatctgaataactgtggtgaattccgtgctgtgcgggacatctctgtggcccccctgaacgcagatgatcagactctcctagaacagatgatggaccaggatgatggggtacgaaaccgccagaagaatcggtcatggaagtacaaccagatcatatccctgcgccggcctcgcctcgcttctcaatccaaggctcgtgacactaaggtattgatagaagacacagatgatgaagctaacacttgaattttctgaagtctagcttaacatctttggttttcctactctacaatcctt

SEQ ID NO: 20372 - DNA, 400 bp, Homo sapiens
gtaaatatatgtcagcctattattccttcacaaaacactcccttcacccaagtaaataggcttgtttgaggctacaatggccatctttgtctaagaaacattcattcaatttgtagatacatgttgtttgcttgaagcaccagttcacacaaaactctttatacctgggaaaaaacaacagtgattccttatcagaaatgtgatacatctctagaactgttggaagtgttgctggaaagtacagtcatgagttgcttggtctttcagcagctttcagaaaatcaaactgactgtacactgtcttataaagatgaagttctagcaggacaaattgagctcagtatcaaggtaattttgccacctaatagtgagtgaggcggctctgaaaattaaatgtcct

SEQ ID NO: 20373 - DNA, 421 bp, Homo sapiens
ttttgacatgattacgaatttaatacgactcactatagggaatttggccctcgaggccaagaattcggcacgagctggaaggctgaggtgggaggatcacttgagctcaggagtttgaaaccagcctggccaacatagtgagacctcatttctacaacaacaacaaaaagtactgcacatttcaaaatcactgagtaaatttcagatgttctcaccagaaaaaatgataattatttgcaattgtttccagtggtgaacaggttaatcagcttgacttaattatgtaatgttgtattcataaatcataaaattactttgtacctcataaatatacatctacaatttgtcaatttacaatttaaaaaataaaaaaattgaaaggctttccagtcagatgaggcccacagaaaaaaaaaaaaaa

SEQ ID NO: 20374 - DNA, 457 bp, Homo sapiens
  misc_feature (1)...(457): n = a,t,c or g
ggagtccacgacacttggactggaggtatcttggagtcctgagacttagaatcagttcagctgcagaaaacccaccttttgagttcacaccattagtgaatagcaccatgctgaaacatttcacagcttccaactctgggaaataatggagagagtttaaaaatgtaaaacttcagttagtttggggctgaacttgcttacttgaaaaatctggtgctaggcacatatatctgcctctcctttgtaaataccactccaatattattctttactattcagatccaagcttcatgttctacttgttcttcatgttctttaaatcatttgaaagttgtcaactgagagaaacatttcagaggggggaggcttttggcactggtgataaacatccctccaagagaaccgtctggggttctcttctatttgtggntggtggttttattcttttaaaaacagc

SEQ ID NO: 20375 - DNA, 342 bp, Homo sapiens
gggccgcgcctgctgagccctgcgcggggcagggggtctggaaccagacagagcctgaacctgccgccaccagcctgctgagcctgtgcttcctgagaacagcaggggtctgggtaccccccatgtacctctgggtccttggtcccatctacctcctcttcatccaccaccatggccggggctacctccggatgttccccactcttcaaagccaagatggtagctgccatccctgggagcctggaaccaggcaatggtggggggaggcaggggacaggctggaacctggtgaagtcttaaagtagactcctcctatcggggtgtagaagggaatctgttaat

SEQ ID NO: 20376 - DNA, 345 bp, Homo sapiens
ggtggagagaagaggggtttggggagcactgtcctggaggaatcaataagcaaacataagctggatgtgggggctcacatctgtagctactcaggaagctgaggcgggaggatcacttgagcccaggagttcaagactgcagtgagctatgatcacaccactgcactccagtccgggtgacagaacaagaccccatctcttaaaaacaaacaaccaaaaaagagctgggtgcagtggctcactcctgtaatcccagcactttgggaggccgaggtgggcgaatcatttgaggccaggagtttgagaccagcctggccaatatggtgaaacctcgcctctaccaaa

SEQ ID NO: 20377 - DNA, 257 bp, Homo sapiens
gaggctttacaggcaagctaatgaggggccaccgttacagaaacttgttgggaacacctggatagtggaacaagaaagctttgtcacaaagtcatgaaggggaaaactgttgacggacctggagaatcttcctgaagaactttaaagttgattgaaagaatcattaaatcctggaaacctacattaagactttgcagagatatgcggatgggtcatataaatcagagaaggtaaagagtgtaggccccagaggtggg

SEQ ID NO: 20378 - DNA, 615 bp, Homo sapiens
gctggacaaacacctcattccagcagctaacactggcgagtccaaggtttttctattataaaatgaaaggggactaccacaggtatctggcagaatttgccacaggaaacgacaggaaggaggctgcggagaacagcctagtggcttataaagctgctagtgatattgcaatgacagaacttccaccaacgcatcctattcgcttaggtcttgctctcaatttttccgtattctactacgaaattcttaattcccctgaccgtgcctgcaggttggcaaaagcagcttttgatgatgcaattgcagaactggatacgctgagtgaagaaagctataaggactctacacttatcatgcagttgttacgtgataatctgacactatggacttcagacatgcagggtgacggtgaagagcagaataaagaagcgctgcaggacgtggaagacgaaaatcagtgagacataagccaacaagagaaaccatctctgaccaccccctcctccccatcccaccctttggaaactccccattgtcactgagaaccaccaaatctgactttttacatttggtctcagaatttaggttcctgccctgttggtttttttttttttt

SEQ ID NO: 20379 - DNA, 491 bp, Homo sapiens
ccacagctattacatgactacgaatttaatacgactcactatagggaatttggccctcgaggccaagaattcggcacgagcggcacgagcggcacgaggagagagctagcaccatgagcttcaataccctgtcatctcctgcctggaccaacacagacactttctatcctcactatagcggccagagacatctgtgcacacctaagtcaggacacatccctgctctgctcagaaacctccatggttcccacctcattccgaggaaaaagcccagctcttcgccacagcccacaaagccttgcatgacctgccctgtcacctccctgccctcacctcctccctctctctctccatggcttactctgttcagcctcactggcctcctgggtacgtcccacgctcagcaggcatggtctgacctcagggcctttgcactagctgctcggtccctctgcttagaatgctcttctctcagacatccatacagctcg

SEQ ID NO: 20380 - DNA, 165 bp, Homo sapiens
  misc_feature (1)...(165): n = a,t,c or g
gcaagttcattagccagtagtccttcattacctattagttactacaacaataactaccagtccaagttgagatagaacatgtctcaaggcaattacttcctttagtaaataactntaactgnggngaannttntgttanctggggnncctagtactgagtgnctt

SEQ ID NO: 20381 - DNA, 350 bp, Homo sapiens
ttttagaatagtaactggattagagcttgggttattctaatataattgccttctgtatgttaaaccaatttgaatggaggacgtctactgatgaatccccagtcaattctcttctgtaaagtggaggctgactggaaggtgtgagtccgagtcagttgaaggagaagtgctttgggatgggactgagatgtagccgtgctttagatggaactcataagcacttgggggtgggagagtattttttgccatcgttgtggaaaccggaatatgtgtaatgttatgcattcagtaaaggtcgacgcggccgcgaattccagatctatgaatcgtagatactgaaaaaccccgcg

SEQ ID NO: 20382 - DNA, 444 bp, Homo sapiens
  misc_feature (1)...(444): n = a,t,c or g
atccagtagaaaactggtcaaggaagctgctgtcattatttgtatcaaaaacaaagaatttgaaaaggcttcaaaaattttgaaaaaacatatgtccaaggaccctacaactcagaagctgagaaatgatctcctgaatattattcgagaaaagaacttggcccatcctgttatccagaacttttcatatgagaccttccagcagaagatgctgcgcttcctggagagccacctggatgacgccgagccctacctcctcacgattggatttatggccaaaaaggctttgaaatctgagtccgctgcctcaagtacagggaaggaagataagcagccagcaccagggcctgtggaaaagcccccaganaacccgcanggagctcggntcctncaccaccattggaatgatgacnntgaaagcnctttcaagactctgtctggngc

SEQ ID NO: 20383 - DNA, 413 bp, Homo sapiens
gcaggaattctagaacagcctgagcaacatagtgagaccctgtatctataaaaataaaaaatttgccaggcatggtggtgcaaggctacagtcctggctacatggaaggccgaggtgggaggattgcttgaatccagaggtcgagggtatagtgagccatgattgtgcccctgcactccagcctgggtgacagagtgagaccctgtctcaaaaacaaaaaaccaagatctctctgacttctgtgaagagggaaagaagcagagaggctctttaggaaattgcagtacacagaataatggcctcccaaacatgtcaatttcctaattccctaagcccaggaatgtatcacctcacatggcaaaggggactctgcagggatgaataaattaaggatctttagatggaaagattat

SEQ ID NO: 20384 - DNA, 495 bp, Homo sapiens
  misc_feature (1)...(495): n = a,t,c or g
tttgaannnaatagccatgacatgattacgaatttaatacgactcactatagggaatttggccctcgaggccaagaattcggcacgaggtgtgtgtctgtgaagcttgggaaacactgggctacccttctcctgtggcaacaactgactgtcgctacatgatgcagctcagggctgggtgcgctctctgaagccccaccacagcctgtagctctgatgttgcactgctgttctctgttatgcctctgcatggcccctattggagtttgcggcttccggtctttcatatgcctcagttacataagccttttagccagaagaatttttatcattttggcattatttttcttcagtgatcctatcatagcccttagtagttacacattattttccaagtgttaaaaaactgtttaatgattcgttccacaattttgtttagaaattaacattaaggattcctggttggctcgtaatccctaaaatttcctttcatcct

SEQ ID NO: 20385 - DNA, 320 bp, Homo sapiens
gaattttggcattccatgtgaacttcgagtaacatctgcgcataaaggaccagatgaaactctgaggattaaagctgagtatgaaggggatggcattcctactgtatttgtggcagtggcaggcagaagtaatggtttgggaccagtgatgtctgggaacactgcatatccagttatcagctgtcctcccctcacaccagactggggagttcaggatgtgtggtcttctcttcgactacccagtggtcttggctgttcaaccgtactttctccagaaggatcagctcaatttgctgctcagatatttgggttaagcaacc

SEQ ID NO: 20386 - DNA, 381 bp, Homo sapiens
  misc_feature (1)...(381): n = a,t,c or g
gggaggcttgacatggtccacatccaaaatgcagcgctggctggaggggttgtggtggggacctcaagtgaaatgatgctgacaccctttggggctctggcagctggcttcttggctgggactgtctccacgctggggtacaagttcttcacgcccatccttgaatcaaaattcaaagtccaagacacatgtggagtccacaacctccatgggatgccgggggtcctgggggccctcctgggggtccttgtggctggacttgccacccatgaagcttacggagatggcctgganagtgtgtttccactcatagccgagggccagcgcagtgccacgtcacaggccatgcaccaagctcttccgggctgtttgtcacactga

SEQ ID NO: 20387 - DNA, 336 bp, Homo sapiens
  misc_feature (1)...(336): n = a,t,c or g
ggagaacaagggtggcatattaaggataaggattaggaaagcagaatcggagatttgtaaggaaactggttatttatttgatctcacttctacttgattatctttagtaatgtggaaatagctacttcaggttgtagcctttattatgttagaaagttctttttttttttttnnaaanannntnnnttngccccccggnnngggggcnngggccccantttngcctnntggggccnttnnccccngggnnaangcnattncncnnccctggccntttgggnaaccggnannaanggnntgnngnnnccnnccngggaaaattttttngnnttttaa

SEQ ID NO: 20388 - DNA, 336 bp, Homo sapiens
gcggcacgagaacatgggtaagctggaatttgaactggggaatctttccactggattcacagaacaagtgcctggatttatagcttcagggtaaacacctgaggctcaatcagtagcacagttgtgtccaaggaaagcacagccttgccttcctctcctttgatgggaataccaagagtctgcctgtgccgtccaggacagcagccactggcactatgtggcaatttaaattaaagttaaataaagtaaaagtttcagtttctcaaaggccccattttgagtgctcagtagccatcacatctgtaacatttccatcattgcagaaagttctgttgg

SEQ ID NO: 20389 - DNA, 364 bp, Homo sapiens
gagtatgtgcatataacttacacacatcttcccgtgtgcttcaaatactctttagattacttaaaatacctaatacaatgtaaatgttatgtaaataattgttatgctgtattgtttaggaaatgacaataagaaaaatgttcagtatagacacatccattttttaaaagaaaatattttagattcacagttggttgaacctgtgaatgcaaagagataatcaatgtcaaggcacttcagaaagttgctaaattaatacataatgtaagaagtatttattattactttacacctgaatgtttgtgtcccccccattcatatgttaaaatcgaaacctcaaagttgatagtattaggagatgggg

SEQ ID NO: 20390 - DNA, 449 bp, Homo sapiens
  misc_feature (1)...(449): n = a,t,c or g
tttgaatncccttnacntgatttgaacacctttgacatgattacgaatttaatacgactcactatagggaatttggccctcgaggccaagaattcggcacgagtggtcccacaaatgaagatttatatatcagctgcaccatgccatctatagagataggaacggtgggtggtgggaccaacctactacctcagcaagcctgtttgcagatgctaggtgttcaaggagcatgcaaagataatcctggggaaaatgcccggcagcttgcccgaattgtgtgtgggaccgtaatggctggggaattgtcacttatggcagcattggcagcaggacatcttgtcaaaagtcacatgattcacaacaggtcgaagatcaatttacaagacctccaaggagcttgcaccaagaagacagcctgaatagcccgacagttctgaactggaacatgg

SEQ ID NO: 20391 - DNA, 410 bp, Homo sapiens
  misc_feature (1)...(410): n = a,t,c or g
ggaagcttagggaatttgaagctcaaagtggcagtgcctagacccagacctacttctgactctaatccatttgttcttctgattatgtagttttgctaaacatagtaaatataggttcatacctgaaagtgaatttttgatttcagatataagaattttagcttgattgaagatgatttcttaatgttttagatgggatacttaaatctgaggaagtttaacagagatgtgattattaacttacatttttagtttctctggtggcttgtgtataactgttcattaaagatcttgctattggcctttttttggtggtgttgnttttttgtancgatgggacattgctcttttacccaggcttggcttgaactcctannttcaagtgatcctctccatggctcctaagcacg

SEQ ID NO: 20392 - DNA, 381 bp, Homo sapiens
gcacttatcccgagggaccccagaagcaagtgtcacctctccgtaaacctatgtaaaaccaggtgacactgggtatgatcgcagtgtgttgcaacccccatgactgacaaggaggagctgtggggaggatggaggcaggagctggtctggggagcattgactgcctgggaggtccccaagagtcctggcctgacaggcagggctctgactctagggcctcagcatggcctttaccacctctgagtccccagtccttgagcaggatttgggtcctggtgaccaccaaggatgggggttcttggaccagagctaacagacaacaggcttgcctgactctccagagcccgctgggggccccgtgcacattgttcccctacccac

SEQ ID NO: 20393 - DNA, 340 bp, Homo sapiens
ggtggttttgataatgggaaaggaaatgctccttaggttgagtgtttagccttagttggcgacccaaaggtttacgttcttattagcatgcccaggaggggtgggaacgcctgccatgtttgatggcccatcatgccagggccaggctggtgtttgtgctgggcccaactgcttgccgagaattatcattagtactttttctctgttctcccagagatggttttcagttctgtttgggtgtgatcacagataatgaagtgaaatgcggcttccttgtcatgaaccaccatcatgctcatttactgacttgaaataatattgagatctcaatatggaaagg

SEQ ID NO: 20394 - DNA, 366 bp, Homo sapiens
ggacagtatggtggccgagtttttaaagaacagtaggatccttgctggggacgtggagacccatgcagaaatggtgcacagtgctttccaggcccagcgggctttccttctgatggcctctcagtaccaacaaccccacgagaatgacgtggccgcacttctgaaacccatatcggaaaagattcaggaaatccaaactttcagagagagaaaccgggggagtaacatgtttaatcatctttcggccgtcagcgaaagcatccctgcccttggatggatagctgtgtctcccaaacctggtccttatgtcaaggagatgaatgacgctgccaccttttacactaacagggtcttaaaggactacaa

SEQ ID NO: 20395 - DNA, 378 bp, Homo sapiens
gaactgggactatcatcatctatttatctaccaaccacacattgaatgagtgcctagtatgcaggagataccatgctggagatagtacaagtattagagtcaatgtccttgccctgcagatcacagaaattgctaggttaaaggcacataaatacacgtttataatttagataactattttaacttgctcattattttatcttctgtctacgtcttctgcactcggtctgctgcctgccatctcgcttgtggctatcacagccactgtttttctctttcacatcattccaaagcagagcatgggagcatggtacattgggaaaaactgtagagagcaaagatcaagcaaaataggtagggcccaaatcatgaagtgct

SEQ ID NO: 20396 - DNA, 373 bp, Homo sapiens
gcgttaatcacattctaagaagcaggaaaaaaacaaaaaggtaagtaatccaggaagtggcaaatgtcttgagtgaaatcacagagacattggagtgcagggcttctgtggtgagcagtgagtggctgcaggctagagcattggaaaggtgtggccagagatgaggctaaacaagtatgttcgtgtcagttagtgaagggccttaaataacacattctctctgatcattcctagtctgatttttctcagtctcggcccttctcacatccctaacccacccccaattctcagataaaaattttcaggtttcctgctatgtcatgtgttgatatatgccagagatttggtcatacagttttaccttagtgctgaa

SEQ ID NO: 20397 - DNA, 869 bp, Homo sapiens
cccacgcgtccgggctatgattgaggtcaacattaacaagaatttagtgggctctgccatggctgggagcataggaggctacaacgcccatgcagcaaacattgtcaccgccatctacattgcctgtggacaggatgcagcacagaatgttggtagttcaaactgtattactttaatggaagcaagtggtcccacaaatgaagatttatatatcagctgcaccatgccatctatagagataggaacggtgggtggtgggaccaacctactacctcagcaagcctgtttgcagatgctaggtgttcaaggagcatgcaaagataatcctggggaaaatgcccggcagcttgcccgaattgtgtgtgggaccgtaatggctggggaattgtcacttatggcagcattggcagcaggacatcttgtcaaaagtcacatgattcacaacaggtcgaagatcaatttacaagacctccaaggagcttgcaccaagaagacagcctgaatagcccgacagttctgaactggaacatgggcattgggttctaaaggactaacataaaatctgtgaattaaaaaagctcaatgcattgtcttgtggaggatgaatagatgtgatcactgagacagccacttggtttttggctctttcagagaggtctcaggttctttccatgcagactcctcagatctgaacacagtttagtgctttacatgctgtgctctttgaagagatttcaacaagaatattgtatgttaaagcatcagagatggtaatctacagctcacctctgaaggcaaatataagctgggaaaaaagttttgatgaaattcttgaagttcatggtgatcagtgcaattgaccttctccc

SEQ ID NO: 20398 - DNA, 369 bp, Homo sapiens
gtaccagagtatcaattctgctaccagacagagatacttacgtcaaatgatatgtccacatattcagtaggatagctgcaccagggaaagattacattaggaagaatgtctggtaagtatggtcttggagaagtcctagttggatattcttaatataactggttatctttaaggttttgacattgctgcctatggaactgagataattgagtgtgcatgacacagacattctgataaaatttcactctctggaactcttatgggatctgtataggatgtcacacttataacactttttttttcttctcctagagagagggtcttaccctgtcactcaggctggagtacagtggtgtggtcataactcct

SEQ ID NO: 20399 - DNA, 179 bp, Homo sapiens
gctggaatcaagagtaggtccccaaacccatggcttctcttttcattcatgtgatgtcccttttatgatagcattcaccacactataaggacaaagcatgcagagatcaggcatctgatctcccaatcccaattctactcccggccagcaattctgtctccttgctgggccttaatttt

SEQ ID NO: 20400 - DNA, 463 bp, Homo sapiens
  misc_feature (1)...(463): n = a,t,c or g
gggnnggnnnnnnnntnnnnnnnntnttgnnntnttnnnaccgctatgacatgattacgaatttaatacgactcactatagggaatttggccctcgaggccaagaattcggcacgagaggaagaaaccagaaacaagataggcatagtgtgaagcccagagagggcttttacaattgtgggtaagccaccatggttttgtttgtttgtttgtttgtttttgagatggagtcttcctctgtcttcctccagcactcaggctggagtgcaatggtgcgatcttggctcactgcagcctccacctcctgggttcaagcgattctcctgcctcagcctcctgaggagctgggactacaggtgcacaccaccacacctggctaatttttgtatttttagtagagacggggtttcaccatgttggccaggatggtctcaatcccttgacctcatgatctcttgaccttg

SEQ ID NO: 20401 - DNA, 364 bp, Homo sapiens
ttttgagctataagacacataggagaaattttaagttcattttttttggatgagacatttattagtctcaacaagactgaatgattttcttttaaggtcacacatttaaatagttaacaggagaaataccaaccagaatcatagtcaaatacccacctactccctttccaagacaactaaggtctcaaattgcgcccatttttctcaaattatttctagaatatttagcaaaagaggcttttaatttggcatatctttgtctacaattttgtagtttgtgtaaagaaaggtagattaagggaatttcattttaaaggtgagaatcagaatgacatttgtgaagctatgatgcctgtgccatctg

SEQ ID NO: 20402 - DNA, 348 bp, Homo sapiens
  misc_feature (1)...(348): n = a,t,c or g
gattaccatggatgttgcataagccaatacatcagggtgggttttgagaaaagtgtgccataagctgctctacagctttaaatcactttaaaggtcactgatggaatttttcagtcgatcctaatatagatttcacagcaagtacccattgctgtaagtgacagtgaacccaggaaaggcagagatctgctcaccagcatagaccagaccacgtgaatgggaaggggctcaaagcatgttaactgaatgaataggagtcaccatctgggggccgggcgcggtggctcatgcctgnattcccancactttcngaggctgaggtgngcagatcacctgangtcangactt

SEQ ID NO: 20403 - DNA, 459 bp, Homo sapiens
  misc_feature (1)...(459): n = a,t,c or g
ttggaatcctgctatgacatgattacgaatttaatacgactcactatagggaatttggccctcgaggccaagaatggtgtgggagagggatgatgaagagagagagggcctgctggagagcatagggtctggaacaccaggctgaggtcctgatcagcttcaaggagtatgcagggagctgggcttccagaaaatgaacacagcagttctgcagaggacgggaggctggaagctgggaggtcaggtggggtggatgatataatgtgggtgagagtaatgaggcttggggctggagaggacaagatgggtaaaccctcacatcagagtgacatccaggaggaataagctcccagggcctgtctcaagctcttcttactccaggcactgtcttaaggcatctgacatgcatcatctcatttaaaccttcctttcttcctattacctaaganatggtttttg

SEQ ID NO: 20404 - DNA, 387 bp, Homo sapiens
  misc_feature (1)...(387): n = a,t,c or g
gttggaccctgtgctctgaagtattaagtaagaattttgttttttaaaaaagagtgctttccttagaagctgcaggtcttttgagaggtaacaggcacgtgagctctgtgaaacatacacagattctttgataactttatacataggaaactcatgctccataaatagcacttgtatcctagtgttttccatagttaagaaatccaaagttagtctccttttgtctctggaatgtagatgatgctgatttcccagcagttttcagtttctcctcttgcctggcgcaagcgagagtcaggcagccagccgccatgggcttggggatgtgccgagaggcagaaggagctggccggggcagaccgcaggtgacgggctcagcttnttcat

SEQ ID NO: 20405 - DNA, 358 bp, Homo sapiens
ggccaaagagatgatcttacaaataatggattatgctgttacgtgcactggaagtgcttacgggcatgggcaatgagggaaagaaaggtgtcttggtgtggcagccagggaaggcccacaggctagaagtactgtcacctgtgggagtcagccaggtgcagagaggaggaagagtttcaggccaagcaagcagtgcaagtaaaggcccaggtgggtgaggagcttgtggcatggaggctctggccgaatgccagggcatgggctgagagagtaataaaaaagggagaccaaggggctaccaaagaccagactagatctggccaggtttcagacgccaccctgcaccaggggaagccac

SEQ ID NO: 20406 - DNA, 409 bp, Homo sapiens
ttgacatgattacgaatttaatacgactcactatagggaatttggccctcgaggccaagaattcggcacgaggtgcactatacagatagcctccggatgcaatgttctggggacatttagctaagttacttctgcaccaatgcattgtttcaagtggcattgctccaatcaatatccagaattcctgagttatacacgcgcttgtgtgtgtagagcacagtgcagttgtatcacatacgtgcagccttgcataaccaccacagtcagagatactctgctccaccatcacacaagccaattgcatttcgtttgttagattgacactgattttagtactcactaggtcaggttcgttaaagggcgtgaacatctttaggaacatagggaagtacatcttccccactggggg

SEQ ID NO: 20407 - DNA, 416 bp, Homo sapiens
gttggcacgtacatgttggatagtattattttgttattactaagcttctcctttcacactcctagtttgatagcttgggaccaatcacagcttgatttttgaaagtctaatttaaaaagtcttccttgtctttactgtttcttattaattagataatttggtgattgaaaaggtctaagtttttttggtttgttctttttgaatttaagacttttgaaagttttaagcatgttcctactttggagccagctttctccatccacgcatccattttccaggccgtgtgggtactgaggggctgcggtggatgagtcagacaagtctctgtttctatggagttttcattcccattttcctttcaactgtactaaaacaccgttacacattttttaaaagtccgttaaatggtgaaaatt

SEQ ID NO: 20408 - DNA, 375 bp, Homo sapiens
cacaacagcgctctctgtccagtccatctcctagtccctcagcctccatcccctgaggcagggtacaaagatgaatgagacacttggtcccatcctttaattggtcactccagtggaggcactgggggtgtgttcactgactggggctttgtgtccagtgatgggttgtgtggaggtcacgtgagcaactgtcaccccattgctccttccagctgccttaatcctcctctctgcctgttaggtgctgtgcacatgaaactttatgctatgttatttgtgagcttgtctgaatatttctctaaatcatacaccccacagggcatggtctggttatgtctatattctcccaaaggccaataaaatggcttatacccc

SEQ ID NO: 20409 - DNA, 402 bp, Homo sapiens
  misc_feature (1)...(402): n = a,t,c or g
ccaggactttgggaggctgaggccagcagatcacaaggtcaggagttcgagaccagcctggccaacatggtgagaccccgtctctactaaaaatacaaaaattagctgggtgtggtggcatgtgcctgtagtcccagctactcaggaggctgaggcaggagaatcgtttgaacctgggaggcagaggttgccgtgagccaagattatgccactgcactccagcctgggcaacagggtgaggctctgcctcaaaaaaaaagaaaaaaaaagaaaaaaaagacatgagttgcagttacattattctgtctcctccactgcctataaataaagtaattctataaaattataatttcacctgatagcattacaatctgngaggntatctnnnagaaatctggatat

SEQ ID NO: 20410 - DNA, 494 bp, Homo sapiens
gggagcctgcattagagaaattggttgacattcagacccatgtccatcaatcactcaacagggaagtctacctaattctcaggttccaagcagtagtaggttaatccaagggggaaaaagtgaagtgtgcttttactgaaatctacatggaatattaggagcttagggcatcagcagcatatagctggcagcttcaggagcaaccagtgcaggagccagccagctggcagcagtaggggctttagcagtgttaaaccccagagcccatgagatggagctcagtatccttatcatcagccaccagtggtgggactcaaactgggtaggcagtggttgtgaggtcctttagacaggacctgtttctatcagcaggaacaggaggcatcactacagagccctgggaaatgacaggcattattcagtagccaagggaactgctcgagtaattagaaaagcactgaagtctccaccatgtggaatgctgaaaagcccta

SEQ ID NO: 20411 - DNA, 509 bp, Homo sapiens
  misc_feature (1)...(509): n = a,t,c or g
tttnnnnnntttgnnnccntaacagctatgacatgattacgaatttaatacgactcactatagggaatttggccctcgaggccaagaattcggcacgagggcgttcttaccaatagtctatttccagactactggaaacgttggggtttcttcctccagtgacagcagcctcagtagctttcctgggctccaggcggctggctgcacaccctgcctgccatcacccttgcccctgcttgtcctggaccacttttaaaggggaagtcccttatttggaagagagaaaggatgtgtgtagcacacactcatcatggattgctcagagttcctttagggcagagctgagggcctgggatccaggaaccagtgggattggatgggagaagaaggaagggggtggccgtcacccccgcaagacttgcatccaggtagcctaaggactcctggtcactgggtagggtgctgctgagatgcaggtcggaagaagcaggggaagcttcaggcctaac

SEQ ID NO: 20412 - DNA, 528 bp, Homo sapiens
  misc_feature (1)...(528): n = a,t,c or g
gctcaagcgtttcagggtgtctaaattaaggcattgaactgaggaagtttggattacctacaagtacaataaacagttcttgtacttgaggagttaaaattctaggcagggagaaatgacattaacatggcactaagcagaatgaaggataaataaggggtaaaagagtaagtgaagcactattgcaaggcagctcttgagtacattaataaatgaattctataaacagtaaatgccaatgaataatgactccaggtttgggaaattaagaaagtgtttacaggaagtttcagtaccaaggttgattggattgaaacctttgtcaggacagcaagaggacattgaaagaacagaagtacgggagcaaaaatttaaagacaggaaagacaacgtgtggtcctgggacattagttcanccttacaatgttttgggtttaaaacgagcaacacanagctagtaatancaatatccaaattcaaagaatcncatgtttatcatgatctttcacaanagtagacgggntgacc

SEQ ID NO: 20413 - DNA, 396 bp, Homo sapiens
ggaactcctgacctcaagtgatcttcccgcctcagcctcccaaagtgctgggattacaggggtgagccaacgtgcatggcctcagaaatgggatttcttgagcacagaggaaagaccacgtgaggacattgccaaagggcagccatctgcaagccaaagagagtggcctcagaagaaaccaggcctgccaaaaccttgaccttggccctcagcctccagaactgtgagaaaacacatttctgcttaagccacccagtctatgcttgttatggcagccctagcacatgaataccccttccatccaagtgcctctgaggtcagagaactgttcaaagtgcctgagagccagagcccctggaagcagccttggccaatggcaagcaggaggacggggtg

SEQ ID NO: 20414 - DNA, 540 bp, Homo sapiens
  misc_feature (1)...(540): n = a,t,c or g
gggatgctaaatctatatgttggatggaacttccattggggaaaaaacttcttgttaggagcagactcctaattcgcctattgattgattgattaattgagacagagtctcctctggcccaggctagagtgcagtggtacaatctcggctcactgcaacctccgcctcctgggtttaagcaattcttgtgcagcttcccaagtagttgggactacgggcacataccagcaacgcccagctaatttttttttgtatttttagtaggcacggggtttcaccatgttggccaggctggtctcgaacttctggcctcaagtgatccacccgcctggtcctcccgaagtgctgggattacaggtatgagccactgcatccggccttaccttattattaaaaagttttgtgccagccatggtgttgtgcccttgtagcctagtactcaggaggctgaagtgggaggattnttgacccaggagttcaaaggcnatgtgaacacagtgagacctgttnttaaaaataaaaaaagtttctgntatttgc

SEQ ID NO: 20415 - DNA, 358 bp, Homo sapiens
  misc_feature (1)...(358): n = a,t,c or g
tagggaatttggccctcgaggccaagaattcggcacgagaggtcgccgctctcttctttgcgccccctactctagcacaatagaggctgttagagggcgaggctcacacacagccttcggccatcgggcgaccccccacctctaggcgctgcggccctgaaatcgccccctggaggaggcctcgccaccccgtgcaccctccacatgcttatagcccgtcctctcctccgatgtaaccctaggaccccccatgatttgcctactgctggggacntncnaanctngccaggcgttgcggggatgggggancctttccgnnggncntntggccnggctntaacctggacctnanttcctg

SEQ ID NO: 20416 - DNA, 459 bp, Homo sapiens
ggcagtcttcgccaccatgccgccctacaccgtggtctatttcccagttcgaggccgctgcgcggccctgcgcatgctgctggcagatcagggccagagctggaaggaggaggtggtgaccgtggagacgtggcaggagggctcactcaaagcctcctgcctatacgggcagctccccaagttccaggacggagacctcaccctgtaccagtccaataccatcctgcgtcacctgggccgcacccttgggctctatgggaaggaccagcaggaggcagccctggtggacatggtgaatgacggcgtggaggacctccgctgcaaatacgtctccctcatctacaccaactatgaggcgggcaaggatgactatgtgaaggcactggcccgggcaactgaagccttttgagaccctgctgtcccagaaccaagggaggcaagaccttcattgtgggagac

SEQ ID NO: 20417 - DNA, 432 bp, Homo sapiens
  misc_feature (1)...(432): n = a,t,c or g
ggcaccatgagcttcaataccctggctaatttttgtatttttagtagagacggggtttcgccatgttggccaggctgatctcgaactcctgatctcaggtgacccgcctgcctcagcctctgaaagtgctgagattacaggcgtgaaccaccacgcccggcctgattttatattaatataaacaaagattcatctcccagctctgccactttgtgaaggttaaggtgtcacttagcctctccaagtcacagtaaaatggaacaatggcacctgccctcacagagctgctgtgaaggtaatagatcatttgctgctaggacctggcacatgcagccttgcccaaatggtggctgttattactggaagtttccaggccaaggaaggctggcatccacagcccttnacccaaagcccaccaggaacacacttgta

SEQ ID NO: 20418 - DNA, 423 bp, Homo sapiens
ggactgctcctgccgctcccgctgccgcgcctcctgcggagaaggcccctgtaaagaagaaggcggccaaaaaggctgggggtacgcctcgtaaggcgtctggtcccccggtgtcagagctcatcaccaaggctgtggccgcctctaaagagcgtagcggagtttctctggctgctctgaaaaaagcgttggctgccgccggctatgatgtggagaaaaacaacagccgtatcaaacttggtctcaagagcctggtgagcaagggcactctggtgcaaacgaaaggcaccggtgcttctggctcctttaaactcaacaagaaggcagcctccggggaagccaagcccaaggttaaaaaggcgggcggaaccaaacctaagaagccagttggggcagccaagaagcccaagaaggcgggtggcg

SEQ ID NO: 20419 - DNA, 347 bp, Homo sapiens
gcggcacgagcggcacgagcggcacgagcccagacacaagtcttcactccttcctgcgagccctgaggaagccttctttccccagacatggccaacaagggtccttcctatggcatgagccgcgaagtgcagtccaaaatcgagaagaagtatgacgaggagctggaggagcggctggtggagtggatcatagtgcagtgtggccctgatgtgggccgcccagaccgtgggcgcttgggcttccaggtctggctgaagaatggcgtgattctgagcaagctggtgaacagcctgtaccctgatggctccaagccggtgaaggtgcccgagaacccaccctccatggt

SEQ ID NO: 20420 - DNA, 338 bp, Homo sapiens
gtttttttaaaacttgatttacagtcagcttagagaaaatgattaggtttatagtacaggtggtacatagctttggctaaatcatcaaatgatagtcaatgactaaggtttaggaaatgtttcattttcatgcattccataaatattcaaaggtctattatgtacaaaatctatgattggattgaccttggtgaacaaaatagttataactgcctggcctcatataatttacatttgaatgggggagacggacattaagcaaaactcaaaacaagcaaacaaatatatacacaattttgagttagtttcattgctttaaatcagagagaattactgag

SEQ ID NO: 20421 - DNA, 309 bp, Homo sapiens
atcggaattaaccagacaaatcgctccacccttaataggaagataccatattttgtgtctcagaatgtccagtatattggaatacaatgataaaaccactttcgccccacagaatatctgagtcacatgtgtacatcattccttatattccacttgcccatcttggtaaatttccacatcactgtcaaaattaacaacatcattcttacaatactagattgacaatttaggcaaaatcagtatatcctctcttgtgttgtctccaacattaaatcacaaagttctgtcaattctctcagcagtctctga

SEQ ID NO: 20422 - DNA, 360 bp, Homo sapiens
gcggcacgagacgaacaattattgaaggcacaagaagctccggctcccaccttgtctttgtcccgtcattgagagatgtgcaccatgagcctgtgtacccccagccgcctttcagctactccgatctgtctcgagaggacaaaaagcaagtacagtttgtgtccgagccctgcagcctctccataaacggagtgatcttcggcttgacatccacagatctgcttttccacctgggggccgaggagatcagtagttcttccggaacttcagacagattcagccgaatactcaagcacatcttgacccagaggagctactacccactctacccgccccaagaagacatggccattgactatg

SEQ ID NO: 20423 - DNA, 404 bp, Homo sapiens
aacctctcttcctccctcccatgcagccacctggacagccaccggaggatggcgcccactcccatccccacgcggagcccgtctgactccagcaccgcctccacccctgtcgctgagcagatagagcgggccctggatgaggtcacctcctcgcagcctccaccactgccaccgccacccccaccagcccaagagacccaggagcccagccccatcctagacagtgaggagaccagagcagcagcccctcaggcctgggccggccccatggaggagccccctcaggcacaggcgcctccccgggggccaggcagccctgcagaggacttgatgttcatggagtctgcagagcaggctgtcctggctgctcccgtggagcctgccacagctgacgccacggagat

SEQ ID NO: 20424 - DNA, 398 bp, Homo sapiens
gctattagtctgaaacttgagtttttaaatttaatctctatgtaaaagaggaataaattgaatgcataattaaaatatatgttgtcaattatcacacctttttgcctagactataagcttcatttttcctgttatatccactaaattaatttatgcttgtttttccattaaaacaagttactttggctgggtgcagtgactcccgcctgtaatcctagcactttgggaggctgaggtgggcagatcatgaggtcaggagttcgagaccagcctgtccaacatggtgaaaacctgtctctactaaaaatacaaaaattagccgggcatggtggccggcacctgtagtcccagttgcttgggaggctgaggcaggagaattgcttgaaaccagaaggcag

SEQ ID NO: 20425 - DNA, 437 bp, Homo sapiens
gctggtgagtttataaggggaattctggacacacacaagagataccagggatgcggagcacagaggaaaagccgtgtgaggccacagcaagaaggcggctgtctgagagccaaggagagaggcctcaggagaagccaaacctgccaatggcttgatctgggacttacagcctccagaactgtaagaaagtacatttctgctgcttaagccactcagtttgtggtattttgttatggcagccctagcacaaatacacctcccaaggcccttgtctctccattcctgaaagtgtgcatgtgacaccatcaacaaggcaacctggggaggggaggtgctggtgggcctgggttctgttgcacttcttggggaggagcatgacaacagcagtgccagcgtaggtgcagagaggcagaaggtggggccatgctgcagatggg

SEQ ID NO: 20426 - DNA, 399 bp, Homo sapiens
gcagctactcgggaggctgaggcaggagaattgcttgaaccggggaggcggaggttacagtgagcagagatcacgcccctgcactccagcctggcgacagagcgagactcctctcaaaaacaaaaaaaaatcttcaaatgattacaagaggccacagccaggttttatctgtggtaccatcactgcagggtaatacagggccctgggagctgcaagagaatacatcattaactgctgcttgggctccggggtcaaaaagccatgggtttgagtcctgcatctgccatccctgctctgtgaccctgggcaagtcacttcacctaagtcacagatgcctcctctgtaaggtcacaacagtacctgccctcacgggtctgcttcaagcagtacaagaccctg

SEQ ID NO: 20427 - DNA, 407 bp, Homo sapiens
cgactcactatagggaatttggccctcgaggccaagaattcggcacgaggaaaaggaattacagagcgcttccgtgagggcagacgcgcgctgcgggtccttggccctgctatgatctcattaattccatcccccttctcaatgcagttcgtttccaaaggccatcctctccattagggtcacaatttactggagtgctgtgacacccacggccgtgaaaagctacaaggccctcgccccatgccctcccagcaccctcctgctgtaggttccaaagccagccaggcagccagggcgagggcaggggtgagggcaaccctagacagctctccgtcacccccgccaacctgcacaggcccgacgttctgccacagcatcttcccaggatgcagcttctcggaatgagg

SEQ ID NO: 20428 - DNA, 444 bp, Homo sapiens
ggtaaattataagtgctttttttttgagacagggtcaagtgttcctcctgtctcagccctgcagtagctgggactacaggcgtgcactaccacacccggcttatttttgttttgttttgtattgttttttgtggagacagggttttgccatgttgaccaggctggttgaactcctgggctcaagtgatctgcccacctcagcctcccaaagtgctgggattacaggcatgaactgagccaccgtacccagccaattatagtgctatagttgattatcaacctaggaaactgagaagctttaggttgaaatcagattagattggtatttaatgaaggactcagattgtgataatgtatatagtataaagtttcaggaataatcaattagtaatgacctgtagtaacagtaacatcttacccccaagatatctctctttactgcaa

SEQ ID NO: 20429 - DNA, 395 bp, Homo sapiens
ggatggctcaatatttaaagcacatctaaattcaatcagcttatgggtaactgctcacaatttcagagcgctgtgaagataaaaagatgtgtataaaagcatcagttcttcctctggagagcttagagtttcatatgcagtttctcagaaggtgatctgatgatgcctaccagagaatcatctgagggacttatggaaaatgcagattctatatcagtgctgtccaagggaaatacaatgcaaaccatgtatgtcatattaaattttctagtacctacatcaaaaagtaaaaagaaacaggtaaaattaatgtgactaatgtattttgtttaggctaacatgtctaaaatatcttgccgacatgtaatcaattttaaaaaggtattaatgagata

SEQ ID NO: 20430 - DNA, 350 bp, Homo sapiens
gcagaggtgacaaatgtgagggacactggggcctttcttctccttgtaggggtctctcagaggttctttccacaggccatcctcttattccgttctggggcccaggaagtggggaagagtaggttctcggtacttaggacttgatcctgtggttggccactggccatgctgctgcccagctctacccctcccagggacctacccctcccagggaccgacccctggcccaagctccccttgctggcgggcgctgcgtgggccctgcacttgctgaggttccccatcatgggcaaggaagggaattcccacagccctccagtgtactgagggtactggcctaaccatgtgga

SEQ ID NO: 20431 - DNA, 350 bp, Homo sapiens
gctcaggcagaggatgccacctcagggactccagccttgcccgtggccccctcgatatcctctgatagccctctcggttgtcctggggggcttgccctctcccaacagcccgagctggccgaagttggcttccctagctggttccagaggttcctcggctcccccaggtgtctggggcttagtggcaacaggggcttagcctctgcagagacctagtgcgccgcctccttgccccagacctgcccgggcagagagccgtgtatgtgtcccagtgcacaggcgctgctgggccctgccaaaaggccacaagcccactgtcaccgtcacattgcttctcgcttcccggccaa

SEQ ID NO: 20432 - DNA, 350 bp, Homo sapiens
  misc_feature (1)...(350): n = a,t,c or g
ggttgatgctgtgaaaatgaatggtattcaaaacttgtaaaaagtgcagggtaaagaagtggtggagttttttcgaaacagagtctttgctctgttgcccaggctggantgcagtggcttgntctcagctcactgcagcctctgcctcccaggttcaacggattctcctgcctcacnctcctgantnactgggattacaggctancnccaccatgctcgactanttcttgtatttgtanncgagacagggttcaccatgttgnccntcgcctggtctcaanctnctgatntcnngcgnnctgtncnccttacttcccccnatctnccnnntnctntnnggngctnacccc

SEQ ID NO: 20433 - DNA, 453 bp, Homo sapiens
  misc_feature (1)...(453): n = a,t,c or g
ctttgaanccctattncatgatnccgaatttaatacgactcactatagggaatttggccctcgaggccaagaattcggcacgaggcaaaaaccctgcaggaaaggagaaaatgatatgatatattcaaagtagtgaaggagaataaaaacctgccaaccaagaatattgtaccaagcaaaggtattcttcaaacataaagaaaagataaagtctgcagataaaccaaagctgaggggattcatcaacactagacctactaaaatgctaaaggaagttttttaatctgaaagaataggatgctaatatgtaaaaagaaaacatcttaaggtatacaactcattggtcatagtaagtaaacagattcagggcactcaaaaactaattgggccaggtgtggtggctcatgcctgtaatcccaacactttgngagaatgaggtgggcgtatccctgg

SEQ ID NO: 20434 - DNA, 740 bp, Homo sapiens
gctgacgctccgcattgcagactgcggagtcagacggcgctatgtacgccctcttcctcctggccagcctcctgggcgcggctctagccggcccggtccttggactgaaagaatgcaccaggggctcggcagtgtggtgccagaatgtgaagacggcgtccgactgcggggcagtgaagcactgcctgcagaccgtttggaacaagccaacagtgaaatcccttccctgcgacatatgcaaagacgttgtcaccgcagctggtgatatgctgaaggacaatgccactgaggaggagatccttgtttacttggagaagacctgtgactggcttccgaaaccgaacatgtctgcttcatgcaaggagatagtggactcctacctccctgtcatcctggacatcattaaaggagaaatgagccgtcctggggaggtgtgctctgctctcaacctctgcgagtctctccagaagcacctagcagagctgaatcaccagaagcagctggagtccaataagatcccagagctggacatgactgaggtggtggcccccttcatggccaacatccctctcctcctctaccctcaggacggcccccgcagcaagccccagccaaaggataatggggaccgtttgccaggactgcattcagatggtgactgacatccagactgctgtacggaccaactccacctttgtccaggccttggtggaacatgtcaaggaggagtgtgaccgccg

SEQ ID NO: 20435 - DNA, 382 bp, Homo sapiens
gggcaccaacgttattaaagccctcttgactttaagattgacacaaaattgtggaaatcttcctaaaatggtgttggaggttcctcctttccccaaactcttttctataccatgcaacaacggatagtgctgggatatattttcaggaattcacgaagaccgtgaaaatgaatgaaatagctcttttaattgcaaagagctaataaacatacatctcatctctggagcaccttttgtgaaaagcctgtgttctgagtagtctgataattcagcagatatctctgagttcccactatgtgctagtcacggttcttggtgctgggaatttaataatgaaccagacaaggaagaaccctgtccttgggagttgacattcttatag

SEQ ID NO: 20436 - DNA, 188 bp, Homo sapiens
attagagaagagttctaagttttctaaaccttaactgttccttaaggattttagccagtattttaatagaacatgattaatgaaagtgacaaattttaaattttctctaatagtcctcatcataaactttttaaaggaaaataagcaaactaaaaagaacattggtttagataaatacttatactttg

SEQ ID NO: 20437 - DNA, 475 bp, Homo sapiens
  misc_feature (1)...(475): n = a,t,c or g
ggccaacttcgctgagcagattggctgtgtggagttgcaccagcgtgcccgggagtacatctacatgcattttggggaggtggccaagcaagaggagttcttcaacctgtcccactgccaactggtgaccctcatcagccgggacgacctgaacgtgcgctgcgagtccgaggtcttccacgcctgcatcaactgggtcaagtacgactgcgaacagcgacggttctacgtccaggcgctgctgcgggccgtgcgctgccactcgttgacgccgaacttcctgcagatgcagctgcagaagtgcgagatcctgcagtccgactcccgctgcaaggactacctggtcaagatcttcgaggagctcaccctgcacaagcccacgcaggtgatgccctgccgggcgcccaaggtgggccgctgatctacaccgnggcgggtactttcgacagtcgttnantacctggangcttacaac

SEQ ID NO: 20438 - DNA, 384 bp, Homo sapiens
gggcaatgaggagagcctgaggaaagtggactcggcagtgttctgtctctgcctagatgacttccccattaaggaccttgtccacttgtcccacaatatgctgcatggggatggcacaaaccgctggtttgataaatcctttaacctcattatcgccaaggatggctctactgccatccactttgagcactcttggggtgatggtgtggcagtgctcagattttttaatgaagtatttaaagacagcactcaagacccctgccgtcactccacagagccagccagctaccactgactctactgtcacggtgcagaaactcaacttcgagctgactgatgccttaaagactggcatcacagctgctaaggaaaagtttgatgccc

SEQ ID NO: 20439 - DNA, 328 bp, Homo sapiens
  misc_feature (1)...(328): n = a,t,c or g
ggtaaaagtacgacatagaaataggagtggcctcatacaattgtatttctagaactccagactaggagactataaacagtagtctattggaacaccattagcatgacttttaagcacagtaatagaggtgagtattattagcatccaacccaaaaacaaatctttggcctgtcatcctgaaagcccactgctggcttgaagggaaggtaaacctggtaaacaaactaaatctaaatgttcttgtatgccaaaagtttggagtgaccagcaagaggccaatagatgntggggtgnggngnatattctcattcctgtggtatgntgcagt

SEQ ID NO: 20440 - DNA, 325 bp, Homo sapiens
cagtttagtagttggacttagggaacaaaggaacctttaatagaaattggacagcaagaaagcgagcttagtgatacttgtgggccagggcattagccacaccagccaccactttctgataggcagcctgcactggtggggtgaattctttgccaaagtgatgggccagcacacagaccagcacgttgcccaggagcctgaagttctcaggatccacgtgcagcttgtcacagtgcagctcactcagtgtggcaaaggtgccgtcgacgcggccgcgaattccagatctatgaatcgtagatactgaaaaaccccgcaagttcac

SEQ ID NO: 20441 - DNA, 474 bp, Homo sapiens
  misc_feature (1)...(474): n = a,t,c or g
ttgggnaccnntttgantacngctatgacatgattacgaatttaatacgactcactatagggaatttggccctcgaggccaagaattcggcacgagaattcaaaatgctgtcaacggggtgaaacagataaagactctcatagaaaaaacaaacgaagagcgcaagacactgctcagcaacctagaagaagccaagaagaagaaagaggatgccctaaatgagaccagggaatcagagacaaagctgaaggagctcccaggagtgtgcaatgagaccatgatggccctctgggaagagtgtaagccctgcctgaaacagacctgcatgaagttctacgcacgcgtctgcagaagtggctcaggcctggttggtcgccancttgaggagttcctgaccnnagcttgcccttttacttntggatgaatggtgaccgnattnnctnccttgctggataangancgcnanagnngcac

SEQ ID NO: 20442 - DNA, 409 bp, Homo sapiens
gactttatttagagcagaatatttctttcacagtaatttccggtttggtctccagcactactgtgggattttcattggccattcattacctgggagaatgttccttgtgactccctgtagtgatcctgcacctttggcaacagcctctccctaatcttacccattccatgtttcacgacttggtccccttggatcccaccttgctcttcaccctccctgacctaccctgacaatcagaaaatggtaaactttgtgctcttggacttccaggccaaatatctctagaatttaatttaccagggagtggtcacttgggaataagctgaatggatagggaaatcaaatcaaacgtacttctcaacaggtggtaacttttccatcacacatatatccttattggcaggtacct

SEQ ID NO: 20443 - DNA, 374 bp, Homo sapiens
  misc_feature (1)...(374): n = a,t,c or g
cgccgctttgtttctcaagagactgggaatctgtatattgccaaagtagaaaaatcagatgttgggaattatacctgtgtggttaccaataccgtgacaaaccacaaggtcctggggccacctacaccactaatattgagaaatgatggagtgatgggtgaatatgagcccaaaatagaagtgcagttcccagaaacagttccgactgcaaaaggagcaacggtgaagctggaatgctttgctttaggaaatccagtaccaactattatctggcgaagagctgatggaaagccaatagcaaggaaagccagaagacacaagtcangatggggaaatttcttttgaggatcccctaattttcagcaggaggatgc

SEQ ID NO: 20444 - DNA, 375 bp, Homo sapiens
gggagagcaagcctgagctgaccagacaccacctgccacccactgctcacccgtcacagatggactgtgctggcagggacctgcctctggtgtgggctgtggaaggagagatgctctgggcttccaggggagccgcctgctgcagcagcagcccaggccatgctgcctggcacagagctcaaggtcccaagtgcccccgctgggtgctgggctgcctgccctggcttgcagtcttctcccaggtccgcactcttctgcaggggccatcactgcccttgtcctaccaaggacaactaggtctcagtgagcggcaaatagaagccaactccctgcataactcaggaaactgactccgagcattccctcaaccaggga

SEQ ID NO: 20445 - DNA, 422 bp, Homo sapiens
ggacacctcattcttgtgttgagcaacccgttatttgcaagatctttttcttctgatgagacagaatagacctcctaatttgtgttctctgaagcagaaaaaaaaatacatctatgccccatcccatgtgacaagttttcacaaatatgaagaaagctgccatggatcccgagagctttgtctttcccaagttcatcattcttagccttttcagcagtcttcatgcactgttgtttttagatcccttcccaacctcctgtgcttttcagaacccactctcatttgtcaatctcccttttaactgtggtccagcccagtggtgagccccagggcagtgtgggttactttgctttgagaaggcacatgtggcaaagtgatgtgggccaacatagctggcacatcacactcatgacaggcacaga

SEQ ID NO: 20446 - DNA, 341 bp, Homo sapiens
gccacattcattctgccctttcactctcattgtcatttaaaggtcagattgtgtcaaatccgtgctcatttgttttaccatatgctatttgaaattgcacaagcctgaaaatcctgaagcccagcacataaagagacagttgaaaacttaaatatatatatatacacataattttcatgaaactcatattcaaatatatatatattcaatttgatgtcaagataaaaatgaaaaatggatatttatttcttattaaataattaatgttaacacattttaaatgagatagactcattcacttatgtatttaataaatgtagagagcctcctgtatgccaatc

SEQ ID NO: 20447 - DNA, 381 bp, Homo sapiens
gcaggttgaaactcagcccattttttgatgccaagaggtggatgcagcaaagcctggaggcagggtgagagtcttggtgtgagagttgttcaggagacagggtctgggaccttcttagcactgcacctccagaagcagctgcacaggctgtagctgtgttgccccagccccccataggcagggtgggttgctcgctctctccacctgggatgcattcttgggcttgcagagatgcacacctggaggctttctttgttcttactgtggctggagaattgcagatgtgtttctccgcagtgcagttctcagcggaggtgaatcacaccttcagaggccttccaagggttaagattctagctctcaaaggaattcattcagctg

SEQ ID NO: 20448 - DNA, 448 bp, Homo sapiens
  misc_feature (1)...(448): n = a,t,c or g
gctgggagaaataagaatggctgtagaggaacttcagtctataataaagagatgtcaaatcctagaagagcaagactttaaagaagaggattttggcctatttcagttagctgggcaaagatgcatagaagaagggcacacagaccagctattagaaattattcaaaatgaaaagaataaggtcatcatcaagaatatgggctggaatctcgttggtcctgttgttcgatgccttttgtgtaaagataaagaggatagtaaaagaaaagtttattttttgatctttgatttattggtaaagttatgcaatccaaaggaattattgttgggtttgcttgaactgattgaaganccccctggaaaacaaatatcccaaagtancctcctttgcntcaaccnttnaaaananngttccnaacntcannncagganttccaattgggttagc

SEQ ID NO: 20449 - DNA, 371 bp, Homo sapiens
  misc_feature (1)...(371): n = a,t,c or g
gtactacaagcgctgccgtgctgcccggtcctatgaggcagtggcagctgcagctgcctccgtgtataattacgcagagcagaccctgtcccagctgccacaagtccagaatacagccatggccagtcacctcacctccacctctctcgatccctacgatagacacctgttgccgacctcaggagctgctgccacagctgctgctgcagcagcagccgctgctgctgttactgcagcttccacttcatattacgggcgggatcggagccccctgcgtcgcgctacagccccagtccccactgttggagagggctacggttacgggcatgagagtgagttgtcccaagcttnagcagccgngcggaattctc

SEQ ID NO: 20450 - DNA, 527 bp, Homo sapiens
  misc_feature (1)...(527): n = a,t,c or g
acccctttgacatgantacgaatttaatacgactcactatagggaatttggccctcgaggccaagaattcggcacgagcgcttgaacacgacaggtggaggttgcagtgtggcgagattgcaccattgcactccagtctgggcgacaagagggaaactccatctgaaaaaaaagagaaattcttttattttctacttctcttcagatttgtcttatgcattttccaactatgtatgcatcacagctattctttttctgagttatagctacagttttcttactgttgtcttcatgccatttcatttcacatggtactttgtagattttgatgaggaagttggtatttttagtgcacacaaaaattggttttaactgtagagtttgcttatcagaacagttaaaaggcagccaggtgtggctcacgcctgtaatcccagcactgagataggtcaaggagggtggatcacttgaggtcaggagtttgagaccagcctgaccaacatggtgaaaccctgtgctactaaaaa

SEQ ID NO: 20451 - DNA, 361 bp, Homo sapiens
gctgaaatatacacttccctgaaggtgctgcctttggctttctgatttttcttctcactctgagccacctcatccacttcttcagctgcaactatcacctctgtgccaaagaccctcaagtctgtggctcgtgttctagctctggccttgctcttgaactccagacccagacttccaattgtctgctggatgtccccacatgaactccagcccctaactcaggatgccgagaatcactcaaacccccatgcccatctcacccccatttccacccaagccactcttctttccatgttctaattattatcctaggtcagtcacaagctagaagccccaattatcatcaatgcctcctttacca

SEQ ID NO: 20452 - DNA, 426 bp, Homo sapiens
gaaactgaggcacaatgagatttaggggacttgcccaagattgtgtagttgtatcattattactccaagtcagggcttaagcctgatgtagggtcaactgtgaagtgcaggcatgtcacaaagactttggattattcattatgggtagtcacacattgatgtttgcagggcagtgaggtattgtctcactctcttgcatcaccataagctccctgctgtggaagagaaggcgtgggcacacacagctagctacaggaagtcccatcaaacctgggacatgcccacagaagcatggctcacctgggagcatcacctgtcctgcctatcatggtggacaatatctgagaactgctgcttaaggaaaagtgggatgtgtggagcatcacttatgttcctgatgccccccaccccaaagtcagtcaggcc

SEQ ID NO: 20453 - DNA, 388 bp, Homo sapiens
gcggcacgagtccccctccttctcccccttctccttcttgctggaacaagttccatccatctatttccactctattcctttctgtttcttcttcccttctgaatcctttccattcccactgtgaggatcttagtctgggcatacacaattgtgttgtctctagactgtaacctctctttccctttcccctccacatgcatttctatcttcctcagggctgtcagagtggtctttctttaaattgaaagccgaacatatcacccccatgatttatatgtaaaaagcaccatggctagcaaagtaggtctcaatcaatatttacccaatgagtccagcagaaaacaagtacatctttcaaatgtagatagtggaattcagctttagaaag

SEQ ID NO: 20454 - DNA, 410 bp, Homo sapiens
cgttttagaaacagtggtcctgatcaacccttctgatgaagcagtcagcaccgaggtgcgcttaatgatcactgatgctgcccgacacaagctgctcgtgctgaccgggcagtgctttgaaaataccggagagctcattctccagtccggctctttctccttccagaacttcatagagattttcaccgatcaagagatcggggagttactaagcaccacccatcctgccaacaaagccagcttaaccctgttctgtcctgaagaaggggactggaagaactccaatcttgacagacacaatctccaagacttcatcaatattaaactcaattcagcttctatcttgccagaaatggaaggactttctgagtttaccgagtatctctcagaatcagtggaagtcccatctc

SEQ ID NO: 20455 - DNA, 359 bp, Homo sapiens
gggatacattactacatttggaatggaaaggaacccacaggagttcaaagttgacaccagggtctctgcacatcccctctgtctgtctgaagcgccctccatctcactctccgtgagacaagcaccttctcaactctcagctcttggtttaactgtctcagtccttggccaccaaatccagtgatttttccagcagaagagttcattcttttccctcatatcacctacctctctgtgaattacacttacagttgttcaattaatttacttgttgtctatctccttcctaaaactttaacctccaagaggacaagaaccatgttcagtgctgtatccccagcaacaagcatagtacctag

SEQ ID NO: 20456 - DNA, 306 bp, Homo sapiens
cacttggggttctgggagttccctgaacatctgtgtgtgtccccctatgctccagtatggaagaatggggtggagggtcgccacacccggctccccctgcttctcagccccgggcctgcctctgactcacacttgggcgctctgccctccctggcctcacgcccagcctcctcccaccaccctcccaccatgcgctgctcaacctctctccttctggcgcaagagaacatttctagaaaaaactacttttgtaccagtgtgaataaagttagtgtgttgtctgtgcagctgcaaaaaaaaaaaaaa

SEQ ID NO: 20457 - DNA, 350 bp, Homo sapiens
  misc_feature (1)...(350): n = a,t,c or g
caaatatgagagctgcaccagcgccggccgcagtgacggaaagatgtggtgtgcgaccacagccaactacgatgatgaccgcaagtggggcttctgccctgaccaagggtacagcctgttcctcgtggcagcccacgagtttggccacgccatggggctggagcactcccaagaccctggggccctgatggcacccatttacacctacaccaagaacttccgtctgtcccaggatgacatcaagggcattcaggagctctatggggcctctcctgacattgaccttggnaccggcccacccccacgctgggccctgtcactcctgagatctgcaaacaggacattgtatt

SEQ ID NO: 20458 - DNA, 368 bp, Homo sapiens
cctcatcttaaaatttaaagaatccatctatgtacccacgtgtgtgcctgtgcacacgtgcacacttccacacatattctagtagtcatgtggagttagtgatgaaattttttttcatccccattttacagacaggagatgagccatatggtgctcattttacgatagtgatagaatgatggatttagacagaaggaaaggtgtgtgaacagagacacattatcgattctcattcaaatcggattcattctgctatgctgtgttgccttcagctgagtgtccagcggtttgaaacatttctaaattttgatttggggccatcatgcagctcagtgcttgtgcttcggtgcaaggtctcttgggcagag

SEQ ID NO: 20459 - DNA, 543 bp, Homo sapiens
gcctcatcttgcatctcttgcaacctgcccttcctcagtgtctggtgaagtaagtgcagatggggtaaatatgctacctttgtccactcctgttgtcacaagtggcctcacctacataaaaattcagcttgtaaaagccgaagtagcttctgctgtctgccttagactacatcgtccacgggatgccagcacattaggcctttcacaaattaaattattggggctcactgcttttggtaccacctcttctgcaacagttaataatccattccttccatctgaagatcaggtatccaaaacaagtattggatggttacggttattacatcattgccttactcacataagtgatctagaaggaatgatggcaagtgcagctgcacctactgctaatctgctgcagacttgtgcggccttattgatgtcaccttactgtggaatgcattcacccaacatcgaggttgtgcttgtaaagataggactgcagtctactagaattggcctgaagctcatagacattctcctgagaaattgtgcagcatc

SEQ ID NO: 20460 - DNA, 470 bp, Homo sapiens
  misc_feature (1)...(470): n = a,t,c or g
ttggacctttgacatgattacgaatttaatacgactcactatagggaatttggccctcgaggccaagaattcggcacgagattccttaaggctcatttaccattgtaagagattgaacttgtgttcaaaatactgacctacttctggcatagtggctgccaaattctcaggtactttaccatgcaactcttattcttttttttttngtttngttaaatttttttcgnanggagnctcgntntgtngcccaggtngaagngctatggntgnnatctnagnttcntttnacctccgcctccngggttnaagcnattntccngngtnancctcccaagtacctggnattacaancntgngccaccntgccnggntaattttngggtttttagtaaaaacagggtttnnccatatnggccaggntggctcaaactccngacctcangggatcnaccngcctnaantttccatag

SEQ ID NO: 20461 - DNA, 364 bp, Homo sapiens
gtgctgttaaattgttgctggagtcactgtagtcatctgttttgaaatgcacagaggtttttcccttgctgggggccagtgcttataaagagtggaagaatgccaaaacctggtctttccttttcctcaaattgaagtttagttactggcttctagtgccttatttcccagagatttttagtggaacaaaatgggatgtcttgatagtatcttttagagtggatattggccgggcgaatggctcacgcctgtaatcccagcactttgtagggccaggacaggcagatcacatgaggccaggagttgaagacgggcctggccggcatggcaaaaccctgtctctactaaaaatacaaaaaaatta

SEQ ID NO: 20462 - DNA, 333 bp, Homo sapiens
gaataccctgcttattcaacgaagacttgcacatatcttccctctcttagaattaattcatctttgtgatattttgttattaataaaggtaacaatccatttttttcattttttttcatctactatggtagtagatgctattagtaataggagagaaggaaaatgaaaaaatttagtgaatgtccacaacattctaggacttcatactctatcattcatagtcatgacaactctgagatatgcattaccatactaattttactgataaactaaagttcagaactttaacagctcgttaaaggttctatattgtagtattcagtctatggagcc

SEQ ID NO: 20463 - DNA, 352 bp, Homo sapiens
ttaaaagtatgatatgtttctccaacgcttaaattccttcagtggctcttatgtttcaagatcaagtgaaatattagacatggttctaaatgagttacctgcttttctaatcttatgtctcaccacattcttgggtctgtttatttcagtacctagctcagtgtcacacagttggcatttctcgccttcccttcatgaatgaatatgtgataggtagagagtaatttgtgtttgtaaatgtcctggtatcacatgagaaaaagaagttggcattttggtgactggcagagacccacggactgtgtgctttcatatgtgccagtcattacatgtactttacatgtattggctt

SEQ ID NO: 20464 - DNA, 379 bp, Homo sapiens
  misc_feature (1)...(379): n = a,t,c or g
gtgttctggaaaaaatttctttcacagtaaaaatcagaatgaacaaaattaaaattttatgtattttataagtattgttattttagtattcatggaaataaaacctcaattcttaaagcatacatattaaatttatattaaatctctaatatgtatgttacttaagaatttctatttttgctggggttttgttgagaagggatttttaagccaagttgtagaatggggggggtgtaatttcagcagtgaaggggaccatgggtgttngaagtcncnagtgagacnctggaaanaagactnagaatgggaaaaagtggactgagctatnccncntngcnnngctaaccnttgntttnagtgaatgcccanagagtccttt

SEQ ID NO: 20465 - DNA, 351 bp, Homo sapiens
gattcctcaaagccagtatgatgttgtgagtgatcatgttagcaaagttacttttttcaatctgaatgaaaccaaacctcgaggaaagtttacctatgatgcagtgtactgctgcaatgaacatgaatgccatcatcgctatgctgaattatatgtgattgatgtcaatatcaatatctcatgtgaaactgatgggtacttaactaaaatgacttgcagatggtcaaccagtacaatccagtcacttgcggaaagcactttgcaattgaggtatcataggagcagcctttactgttctgatattccatctattcatcccatatctgagcccaaagattgctatttgcagag

SEQ ID NO: 20466 - DNA, 321 bp, Homo sapiens
caaaaacatctggttgttagtggggttttcttagcttccttttgagggcacctattgtgcctgactcacttcaacacaatctttattagaaaatctgtgtaccgcaagatttgcttttgttttgttttttatttgtttgcttgtttttgctaaatctgtgagtgagctctgtccccatttggttcttcctttgctggatgctggatccaggaagctgtcaactaaaagactgctggaagactcttcccagctagaccctggtgttaattgatacaatgatgattcccaggttgaaaacctgttttttttccatttcccagg

SEQ ID NO: 20467 - DNA, 336 bp, Homo sapiens
gcggcgtgggggaggagaaggagtcctaggaaaaagatacataattaagctgaaaggctcaacaaaatacagaaacaggatgaaaagtaatcagtaggtttggctatactgtagttagcactaggcaaagggaatatatttataagtgaacatgctatctttatattctcacttaaatatcaataaaacttgtttatctcagctgactgcaacacaggacactgtctgcaggactaagtacaaaaaagaaaaaaagacattttgattaacaaaaatttgcaattttcagaagatgtgaatttgtcaatcttttaacatctatacaaaattaacgtt

SEQ ID NO: 20468 - DNA, 511 bp, Homo sapiens
  misc_feature (1)...(511): n = a,t,c or g
gcgcgtcacagccgggatgaagccgatcctactgcagggccatgagcggtccattaggcagattaagtataaccgcgaaggagacctcctctttactgtggccaaggaccctatcgtcaatgtatggtactctgtgaatggtgagaggctgggcacctacatgggccataccggagctgtgtggtgtgtggaccctgactgggacaccaaagcatgtcctcactggctcagctgacaacagctgtcgtctctgggactgtgaaaacaggaaagcaatctggcccttctcaagaccaattcggctgtccggacctgcggttttgactttgggggcaacatcatcatgttctccacggacaagcagatgggctaccagtgctttgtgagcttttttgacctgcgggatccgagccagattgacaacaatgagccctacatgaagataccttgcaatgactctaaaatcaccaaatgntgttggggatntaatngcaanctggaaagggttggg

SEQ ID NO: 20469 - DNA, 370 bp, Homo sapiens
cggaggactgcaggggcctgagccgctgctgccgccgccgccgcgcagccccacatcaactcaccggggtcctgtcaccgccaccgccaaaaaagtcaccgccgctagggtcgccgttgcatcggtgcagggcaagatggcatccgccacagactcgcgctatgggcagaaggagtcctcggatcagaacttcgactacatgttcaagattctcatcatcggcaacagcagcgtgggcaagacgtccttcctcttccgctatgctgacgactcgttcacgcctgccttcgtcagcaccgtgggcatcgacttcaaggtcaagaccatctatcgcaacgacaagaggatcaagctgcagatctgggacaca

SEQ ID NO: 20470 - DNA, 258 bp, Homo sapiens
ggcccttcagagctcatgggccatgtcggggcttgtagaaggagtgacagctcaatatatgaccctcgaggcagcttacagatgtagtccacgtgctgtcagagcagcaggccttctttacgggggtgcctcagtccaggtactggcacaggcaggatgccttcagagtgtacagctatgtaggaactccagctcctaagttgagagggctgtggtgatattaacaaatttgtgtgtgtgtgtgtgtgtgtgtgtgtg

SEQ ID NO: 20471 - DNA, 429 bp, Homo sapiens
ctgtgttaatttggaaaagatacgtgtattaattttattttctacatatgttaaacaaataaaaaattgagcttgttttgtttttcaaagcactttgtagttttcttgtccctaaaaagtatttactaaaaatctgtgaccgaaatcaaacttttcattttgaagtatttgaggtttaatccagaggcatagtatttagcagaaacatcttctcaagcactattaaaaaattaaagtggggccaggcacagtggctcacgcctgtaatcccagcacttttgggaggctgaagtgggcagatcatctgaggtcggaagttcgagaccagcctgggcaacatggtgaaaccccatctttaccaaaaatacaaaaattaggtgggtgtgatggtaggcacctgtaatcccagctactcgggaggctgaggca

SEQ ID NO: 20472 - DNA, 351 bp, Homo sapiens
ggtaaagagaggtctttttagagaaaggagttttacttttggtacctgatggtttgatagctggagtttctgctgcagtaacacaaaggcccctttgacttggaacaaagacgaggttcatcagttgggaggtgagcagttcagccttttgttcctgtggagcttgtattttgaacaaaatggggccatgactcccaccagcctcttaactacttgcctgaggaggagagatgaaatttccgttccactcacagaaaagaattctgattcttactcacctgaccagtgggtaggggctggttggaggcagtgctgttagatgtgtctgtatgtgacgctcatactcttttc

SEQ ID NO: 20473 - DNA, 342 bp, Homo sapiens
gcaagacctcatccagctcgtccaaaggcttcagggatggaaacaaaccagctcgtctcaaaggccagcaagctggggcctgtccgccacggtgccctgtgcacctttgggctgccctggcccccactctcccgggccgcccaccacaggctcttaatggggccgggtcagtcctacatgtgagatgggttagggcaagtctttgccatcccccagatggctctgtcttcttgtgtatggcagggctgggactgctgtcccttgtacagttttctgtcactggtgggcactggacaggcatagcagactctcttgtggccacactaggttgtcgcctttcag

SEQ ID NO: 20474 - DNA, 339 bp, Homo sapiens
gagcagcaataaatatggatttgtgtaaagaaagcagaagagcgaatagggtttaggccttatattgagggaaatttgatttcattctttctccatgttaaattctttcctgggtcatatttgtggtttcatttttcttgaagtcaaacttacattttatactttttttccatgatatctgtcttactttactgaaggtattactataagaaattcacaataaaattttgagaggaaacttatgaattccaaatgcttattggtagtttattttggattttaagcatgaaagattcattgctttctggataaatcagtaaactccagggtgacttgcta

SEQ ID NO: 20475 - DNA, 358 bp, Homo sapiens
gccgcagaccctgaccgaaccagtggccaccaccatgacaagggaccagaatggaacctgggagatggagagtaatgaaaactttgagggctacatgaaggccctggatattgattttgccacccgcaagattgcagtacgtctcactcagacgaaggttattgatcaagatggtgataacttcaagacaaaaaccactagcacattccgcaactatgatgtggatttcactgttggagtagagtttgacgagtacacaaagagcctggataaccggcatgttaaggcactggtcacctgggaagggtgatgtccttgtgtgtgtgcaaaagggggagaaggagaacccgcggctgga

SEQ ID NO: 20476 - DNA, 352 bp, Homo sapiens
ggctgagtctacgtatataacaggtacttctaaaccatcagtgagaataaggaggctattttattgaatacaggaatttgaattaaaggctgcattcatgagaccaggctctgaaccctgtggggacggcctggctgcatctgtcaccttgagaaacaagtgattcagaggaaagctagacttgagggaggacaaatgtcctgcgtgtttttactattctttgattaaactgctccccacgtttgcaagaagaggaaggtgaaggagagaaggtttatatttcaaagttgaatcaccaacaatatccaataaatggttacattctcataaacagaaaattccaaaggaaaaa

SEQ ID NO: 20477 - DNA, 349 bp, Homo sapiens
ctttcaacaacttttattgaacatgtagagagagaaggggaggttattaactctcctgctcgtactgggataaatgaagaagaaggcataaggacaataaacatggaactccactgcaaatggattttatgcagctgaggaaagtttgggcttattagtatttgctccagcgaacctccaagttttctccattgcggacaacgtaactaccagctccttggctcagtggttcgcctccactcagaagttcccagtaggttctgtcattattgttggcacataggccctgaatacaggtgatatagggcccccatgagcgctcctccattgtgaaaccaaatatagtatc

SEQ ID NO: 20478 - DNA, 370 bp, Homo sapiens
gcccatctcagcctgtacataagccacagagacattctcactgttctctgaatgtacttggctcattcatatttccaggctttcttgcacacacattgtctgactctgggcacctaaggaaagctcagctccaatgtcctctcctcttccgtgaaacctttccctgtcaagcccaccttcactactaagtcactccttgctcctagatcagatggaagaatgctttggcatatctctactggagcccttctcactttacattaaagataactgtatataggttagcccactcctcctccctaatagcatgtggaccctttgtagtttcagcagtaagcacagggcttggtttctatgaatacttattgag

SEQ ID NO: 20479 - DNA, 357 bp, Homo sapiens
aagaggtcttggggaccccactccatacattgtgctgtcaggtgcaggcctttttggggattccctgaatgttcgtgtgagtcgggggtctctaatggaggagtccagcttcacatgtgttcttgacagggctgtattttctttttagagtgagtttttctcaggtccttgattggaactgcctcagagccaagggtccttttactcagtggcagcaacaaacgcagtctgttggctagtgatcctcctgtctcagggacacgtagtccagggagcagccaattgcttggcacttggggaccccgttctggggagtcctgaaagctttcacctcttggattgccgaatacatgggtg

SEQ ID NO: 20480 - DNA, 531 bp, Homo sapiens
acccctttgacatgactacgaatttaatacgactcactatagggaatttggccctcgaggccaagaattcggcacgagcgtttttcaggtttctctggaacccccttggctgagagggggtccattcagtcatctggggggcttggaattttatttttgtttacagaacccagtattctccccgttcacagttaagacctgaggaatgaagggcatccagatactgacgctgtgaacacagcttctactcaacccctaatcccagttgtctccctcctgactgaatctcagggacacggcaatgtgtaatggtagctgttgagaggcctaggaccaaggaaaggcttgagggcccttggctagatcagcatgctcttgagactgaggagaaccgaaagctcaagggaatatgtcactatctatctcaccttgagcctcagtggctatttgggatcctcttgcttggctcagaggactctggatgtcaaaggacttaaaggctctgccctagatgaaaacttgcattctctg

SEQ ID NO: 20481 - DNA, 429 bp, Homo sapiens
gaattgctcctgctctggtgttctgcctggcttctagcatcatcatttattaaacagtcccctgctgtgtgctttgtcccctgccgtacacccctgctatcttttgtgcacgtgagcaagtgtgtccctgggcttcacacctagaagaggaacctctaggtgagagaccctgagggcagccagctcatccttgaaacagccccagaggagagtgctgtgataaccctggtgttttagcatagggaactgaggctcccagaggggcaggagttctgtggaggtgacacagccgggcagtggtggagtcccaagcccatccctggtctcctcctagattggggcccagctcccctacatcctagtttggtgaccttggagagtcacctcttcttaaagcctcagtttcttgatctgctaacaggaacatta

SEQ ID NO: 20482 - DNA, 573 bp, Homo sapiens
gttgggagttgcttggaggttggcggcgcggggctgaaggctagcaaaccgagcgatcatgtcgcacaaacaaatttactattcggacaaatacgacgacgaggagtttgagtatcgacatgtcatgctgcccaaggacatagccaagctggtccctaaaacccatctgatgtctgaagaggagtggaggagacttggtgtccaacagagtctaggctgggttcattacatgattcatgagccagaaccacatattcttctctttagacgacctcttccaaaagatcaacaaaaatgaagtttatctggggatcgtcaaatctttttcaaatttaatgtatatgtgtatataaggtagtattcagtgaatacttgagaaatgtacaaatctttcatccatacctgtgcatgagctgtattcttcacagcaacagagctcagttaaatgcaactgcaagtaggttactgtaagatgtttaagataaaagttcttccagtcagtttttctcttaagtgcctgtttgagtttactgaaacagtttacttttgttcaataaagtttgtatgttgcat

SEQ ID NO: 20483 - DNA, 461 bp, Homo sapiens
  misc_feature (1)...(461): n = a,t,c or g
anatccgntatgacatgattacgaatttaatacgactcactatagggaatttggccctcgaggccaagaattcggcacgagaactctaccgtgccacgttttatgccgctgagataatgtgtggactgcagtttctacagcaagggcatcatttacagggacctcaaactggacaatgtgctgttggaccgggatggccacatcaagattgccgactttgggatgtgcaaagagaacatattcggggagagccgggccagcaccttctgcggcacccctgactatatcgcccctgagatcctacagggcctgaagtacacattctctgtggactggtggtctttcggggtccttctgtacgagatgctcattggccagtcccccttccatggtgatgatgaggatgaactcttcgagtccatccgtgtggacacgccacattatccccgctggatcaccaa

SEQ ID NO: 20484 - DNA, 474 bp, Homo sapiens
  misc_feature (1)...(474): n = a,t,c or g
tttgataccctaacagctatgacatgattacgaatttaatacgactcactatagggaatttggccctcgaggccaagaattcggcacgagcctgttctttgtgatggagttcctcaacgggggggacctgatgtaccacatccaggacaaaggccgctttgaactctaccgtgccacgttttatgccgctgagataatgtgtggactgcagtttctacacagcaagggcatcatttacagggacctcaaactggacaatgtgctgttggaccgggatggccacatcaagattgccgactttgggatgtgcaaagagaacatattcggggagagccgggccagcaccttctgcggcacccctgactatatcgcccctgagatcctacagggcctgaagtacacattctctgtggactggtggtctttcggggtccttctgtacgagatgctcattggccagtcccccttncatgg

SEQ ID NO: 20485 - DNA, 386 bp, Homo sapiens
ggaaaaatggatgtagtggggacaggacaatgtcacaatatcccctgtgaagaaggagataagctccagcttttctgctttcgacttagaaaaaagaaccagatgtcaaaactgatttcagaaatgcatagttttatccagataaagaaaaaaacaaacccgagaaacaatgaccccaagagcatgaagctaccccaggaacagcgtcagcttccatatccttcagaggccagcacaaccttccctgagagccatcttcggactcctcagatgccaccaacaactccatccagcagtttcttcaccaagaaaagtgaagacacaatctccaaaatgaatgacttcatgaggatgcagatactgaaggaagggagtcattttccagg

SEQ ID NO: 20486 - DNA, 371 bp, Homo sapiens
  misc_feature (1)...(371): n = a,t,c or g
tgcgaaaagacttgaaaacaaattgtgtagttgagaaaaattttaaaaagaaaaagatgtcatgaatgcataaagtatatgaagatactagcctattttattatttactatcataaaatatatacaaaacttacccacataaacacggaccctgcatggcaccatttgtagtagagaaaaatgtaaacagatgtaaagatacattaagtcacaactgaaaaaaactgcagtacatactgtactactgccataattttgtagccacctcttgttgctactgtggtgagctcaaatgtatctgcttaaaatgccatgtgatgctacttatctccaggtgagcagntgttgctgcagtaaattgcatatcacag

SEQ ID NO: 20487 - DNA, 538 bp, Homo sapiens
  misc_feature (1)...(538): n = a,t,c or g
ggtgcataaagatcatccttgatcttatatctgagtctcccatcaaaggacgtgcacagccttatgatcccaatttttacgatgaaacctatgattatggtggttttacaatgatgtttgatgaccgtcgcggacgcccagtgggatttcctcttcctccaccaccaccacctagagggggagacctcatggcctatgacagaagagggagacctggagaccgttacgacggcatggttggtttcagtgctgatgaaacttgggactctgcaatagatacatggagcccatcagaatggcagatggcttatgaaccacagggtggctccggatatgattattcctatgcagggggtcgtggctcatatggtgatcttggtggacctattattactacacaagtaactattcccaaagatttggctggatctattattggcaaaggtggtcagcggattaaacaaatccgtcatgagtcgggagcttcgatcaaattgatgancctttagaaggacccaagatcggatcattacattac

SEQ ID NO: 20488 - DNA, 390 bp, Homo sapiens
ctacctctcactgtgttatagtgtctgcctcataggattgttgagagctcaaatgagatcatgtattttatgggaagagctttgtaaactttattacacactcactgatttcttcagtctaaatagaaagacatcttgaagtctaataactttgcttctaaaagtatatttagctcagtattcgagcattgaataagaaagtacccactggaatattgactaacccattcccttttaaaaattaatttcatttaatttatatacctttattacaattttaattaaatggtaaatacaatgtgacctttttttcttaccttttcatctaacttgtgtccccttctttccatttccccaaatgcaaccctgaatttcaggactttgtaaacc

SEQ ID NO: 20489 - DNA, 306 bp, Homo sapiens
gggcgcctgtagtcccagccacttgggaggctgaggcaggagaatggcatgagctgggaggcggagattgtagtgagcccagatcgcaccactgcactccagcctgggcgacagagtgagactctgtctcaaaaaataataataataataataatgtctacaattagttttcatcaactccttcattaatgtaaccatcaaaattgttgaggaaaagtgttttatcatttgtcgacgcggccgcgaattccagatctatgaatcgtagatactgaaaaaccccgcaagttcacttcaactgtgcat

SEQ ID NO: 20490 - DNA, 370 bp, Homo sapiens
gggcagcgcttcagatggagggagataggaagagggctgtgagtatctgtgaaagtcctaggacagatgtggccttggcctgttcctggaacagcaggagtttctggctgtcagaatatagcagaggctcgctgaccaaggcctttgggccaaatcaaggggacccttgcttcctgtctttgtaaataaagacttattggaacccaggcgctcattcgtttgcatattttccacagttgcttttgcagtacagtgacagagctgagtatttgcacagagatcctagggctctcgtactctctggccctttacagaaaaagtttaccatcccctggaatagagtaagcgaggggagaagttaggtgagggg

SEQ ID NO: 20491 - DNA, 574 bp, Homo sapiens
  misc_feature (1)...(574): n = a,t,c or g
gacaatacactgttaactctaggtcaccctcctcttctgtggaacaactgaatttatacctttcatctaactgtatgttcgtacccattaactcaactctcttcatctgtggttccgctcacccagacctttcaatccactagttcctgtcattctactctctgcctttaggaggtgaatttccacagctcccatgagtgaagacgtgcagtttctttctgttcctggtggtttcacctgacacggtcacctcccattccagccacgttgttacaaatgacaggctctcattctttctttttttttgagatggagtcttgctctgttgccaggctggagtgcagtggcgtcatcttggctcactacaacctctgactccctggttcangtgattctcctgcctcagcctcctgagtaactgggattacaggcgtgtgccaccacgcctggcaattttgtatttttagtaaaagatgggttcaccatgtgggcgggctggtccgaantccggnctcctgatcaacngcncngnctccaaacggtggattanagggtaggcaagggctcggccact

SEQ ID NO: 20492 - DNA, 353 bp, Homo sapiens
gtggagatggggtttcaccatgttggctaggctggcttcaaactcctgacctcaggtgatccgcccacctcgccctcccaaagtgctggaattacaggcgtgagccaccgcgtctggccatcagcagagtttttaatttaggagaatgacaagaggtggtacagttttttagatggtacctggtggctgttaagggctattgactgacaaacacacccaacttggcgctgccgcccaggaggtggacactgggtttctggatagatggttagcaacctctgtcaccagctgggcctctttttttctatactgaattaatcacatttgtttaacctgtctgttccataattccc

SEQ ID NO: 20493 - DNA, 1021 bp, Homo sapiens
  misc_feature (1)...(1021): n = a,t,c or g
gattgaaacaattggagaaattctgaagaaaatcatccctaccttggaagagggcctgcagttgccatcacccactgcaaccagccagctcccgctcgaatctgatgctgtggaatgcttaaattaccaacactataaaggaagtgactttgactgcgagttgaggctgttgattcatcagagtctagcaggaggaattattggggtcaaaggtgctaaaatcaaagaacttcgagagaacactcaaaccaccatcaagcttttccaggaatgctgtcctcattccactgacagagttgttcttattggaggaaaacccgatagggttgtagagtgcataaagatcatccttgatcttatatctgagtctcccatcaaaggacgtgcacanccttatgatcccaatttttacgatgaaacctatgattatggtggttttacaatgatgtttgatgaccgtcgcggacgcccagtgggatttcccatgcggggaagaggtggttttgacagaatgcctcctggtcggggtgggcgtcccatgcctccatctagaagagattatgatgatatgagccctcgtcgaggaccacctccccctcctcccggacgaggcggccggggtggtagcagagctcggaatctttctcttcctccaccaccaccacctagagggggagacctcatggcctatgacagaagagggagacctggagaccgttacgacggcatggttggtttcagtgctgatgaaacttgggactctgcaatagatacatggagcccatcagaatggcagatggcttatgaaccacagggtggctccggatatgattattcctatgcagggggtcntgggctcatatggtgatcttggtggacctattattactacacaagtaactattcccaaagatttggctggatctattattggcaaaggtggtcagcggattaaacaaatccgtcatgagtcgggagcttcgatcaaaattgatgagcctttagaaggatccgatcttcg

SEQ ID NO: 20494 - DNA, 412 bp, Homo sapiens
  misc_feature (1)...(412): n = a,t,c or g
ctgattacgaatttaatacgactcactatagggaatttggccctcgaggccaagaattcggcacgaggatgtttgcagaaacatcatctttagcatttctgccctgttacaccagacaggcctggcttgtgaatgcgaccctcagggttcgttaagttccgtgtgtgatcccaacggaggccagtgccagtgccggcccaacgtggttggaagaacctgcaacagatgtgcacctggaacttttggctttggccccagtggatgcaaaccttgtgagtgccatctgcaaggatctgtcaatgccttctgcaatcccgtcactggccagtgccactgtttccagggagtgtatgctcggcagtgtgatcggtgcttacctgggcactggggctttccaagttgccanncctgc

SEQ ID NO: 20495 - DNA, 460 bp, Homo sapiens
tttgaatacccgttatgacatgattacgaatttaatacgactcactatagggaatttggccctcgaggccaagaattcggcacgagcctggactggccatgtgcacacttagcccaacatggaataaccattgcttgcttaccatgtcgggcattgctgtgagtgctttttgagagctaacactttcatccttacggcagccctgtgacttaggtagtgtcattgcgtccactaatagagagtgtaaatgacttgtgcagaatcactgccagtaaatggtagcgcatgcgttcttattcatgcaagtatatgcagcttgtatttcctgactgctcctttgggcccgacacagccctggccctgagaaactttcggttcaggaggaggaagacatggagaaacacatcaagtaggaccataccctaagaatggagtgatgcagccatgacggcttccagcc

SEQ ID NO: 20496 - DNA, 476 bp, Homo sapiens
agctctgacatgattacgaatttaatacgactcactatagggaatttggccctcgaggccaagaattcggcacgagcgcagcgtggggcaacggccagtgcctggtgtgggccgacccaagccccagcctcggacacatggtcccaggtgccgggccctataccagtacgtgggccaagatgtggacgagctgagcttcaacgtgaacgaggtcattgagatcctcatggaagatccctcgggctggtggaagggccggcttcacggccaggagggccttttcccaggaaactacgtggagaagatctgagctgggccctgggatactgccttctctttcgcccgcctatctgcctgccggcctggtggggagccaggccctgccaatgagagcctcgtttacctggggctgcaatagcctaaaagtccagtcctttggcctcagtccttgccaggcctgggtcaccaagtcactg

SEQ ID NO: 20497 - DNA, 399 bp, Homo sapiens
  misc_feature (1)...(399): n = a,t,c or g
gcggcacgagctggaagctatttgcatatattgagcttactgatttctgtatattaacctaaatccaattatctaaccaaatcctatgtgcaaatgtgatatcataaataagactcaactattcaattagcactgtacgatgcttcggagtgtttctcatgtcttaaaatctgtaatcatctttccaaagttatgtgaatttactgatgtacaactttatccttgtttagaatcagtgaaagctgatacatgtgaatggtcatataacttaactgggaactcatgaaatagcattgcactgttgttgacatgnaaacaatgtctaggataaggataatagtgggataaaatcataaatggatccatttggctatggtagtggtcatatngaaaccatat

SEQ ID NO: 20498 - DNA, 448 bp, Homo sapiens
  misc_feature (1)...(448): n = a,t,c or g
gggcaggaacagtatgaccatccctgtgggagaggacaggttgtggcacagactcttgccccctgtggcatgtgtgctaaccccgctgtggggtgacaaggctgaggatcaggttcttttgtggttggaggttagggtttccctgtgtctccccctttcattgtcatgggagcctgtttaatcagaaacttcagccctcctggggtctggaactatactggggtgggaaggcctggcaggcagccagaggtgctttcaggactctgtgggcagtcatagaggtgtgcaagggctgggatgtgtcatctcagcagcaggaccatgttagctagggccacagcggggacacaggctctgtctcaggaaacagctgcttctcatctctggatctcttaantttaagaaagaatccagaaatccagggttgtatgtgaaatctccaatttca

SEQ ID NO: 20499 - DNA, 453 bp, Homo sapiens
  misc_feature (1)...(453): n = a,t,c or g
ttggaancctntaacngntatgacatgattacgaatttaatacgactcactatagggaatttggccctcgaggccaagaattcggcacgaggcaacctagaagaagccaagaagaagaaagaggatgccctaaatgagaccagggaatcagagacaaagctgaaggagctcccaggagtgtgcaatgagaccatgatggccctctgggaagagtgtaagccctgcctgaaacagacctgcatgaagttctacgcacgcgtctgcagaagtggctcaggcctggttggccgccagcttgaggagttcctgaaccagagctcgcccttctacttctggatgaatggtgaccgcatcgactccctgctggagaacgaccggcagcagacgcacatgctggatgtcatgcaggaccacttcagccgcgcgtccagcatcatagacgagctcttccag

SEQ ID NO: 20500 - DNA, 255 bp, Homo sapiens
ccaaatgttattatgcactttttaatgtttgtaaacttttactaataattagtgtgaattgcattctgatacaataatgattatcattagaagctaacaaaattctcattaatactgtgtttgatggcctctgctgtgttttaacatcgtgcttcttatatggaaagtttttgtgagctgtgtaatccctctggtcagtattatgaaatcatttgtcagtggtaataaataaggaaccagtaaaaaaaaaaaaaa

SEQ ID NO: 20501 - DNA, 546 bp, Homo sapiens
  misc_feature (1)...(546): n = a,t,c or g
gtgtgaatggtcttcacctcagcatccaccttccgggacagtcccagccctccgacctgctctacatcctggatatacagccccaggggggccttcagtgcttcccacagcctcctgtcaaccctctcaaggtggactgggggctgcccatccccagcccctcccccattcacccggcccatcacaagcgggatcgcagacagatcttcctgccagagcccgagcagccctcgaggcttcaggatccagttctcgtaagctgcgactcggcgccctgtactgtggtgcagtgtgacctgcaggagatggcgcgcgggcagcgggccatggtcacggtgctggccttcctgtggctgcccagcctctaccagaggcctctggatcagtttgtgctgcagtcgcacgcatggttcaacgtgtcctccctccctatgcggnncccngctaanctgcccgaggggaanctcagtgtggacacagntgttccggccttgaaganagggcattcaatctggtgggtgctgttggttctggaggctnttttcc

SEQ ID NO: 20502 - DNA, 240 bp, Homo sapiens
ggagagctaccatgagcttcaataccctgtcttaagtagttccctctgtatgttatcagcctccttagtgcaacttgctcatagttgattatccaaggctgtattgaatgtttcctaacatcttaaagaatgactctctatcaagcccaaggccttctacaatctggaaggcttatctaaatgttctgctttgatcaatcttcccttggctcaattgtccttgagtcttggatcactgtg

SEQ ID NO: 20503 - DNA, 340 bp, Homo sapiens
gggtttacaggcatgagccaccgcacctggcaaaataatttttctatagatatcattgtttaaattaatttaattctcagcctattataacaacacaagcatgagcctaggatatcattaacatctgatgttgtggtagaaattgtctgtgttccgtgactgtggtccagaagcattacctcctaaggcaatttaacaaagaaaaagagtctaattcctttgaatggggaactctgcttaagcccgagctgggactcgcaggtctggctaacaccgagacttaaccagccatgactatatgaattccgccagagaagaagcagctggatccagtaatgaa

SEQ ID NO: 20504 - DNA, 372 bp, Homo sapiens
gtttggagaggccttatggtaatgtcggccattgagaaattgttgaggcaggtagattggggtcaactggactacttagttgtagacatgccaccaggaactggagatgtgcagttatcagtctcacagaatattcctataacaggtgctgtgattgtctccacgccccaggacatcgcattgatggatgcacacaagggtgctgagatgtttcgcagagtccacgtgcccgtccttggccttgtccaaaacatgagtgttttccagtgtccaaaatgtaaacacaaaactcatatttttggtgctgatggtgcaaggaaactagcacagacccttggtcttgaagttctaggagacattcccttacacctt

SEQ ID NO: 20505 - DNA, 355 bp, Homo sapiens
gaaatgtcctagccctggggcacctggggatgaactggctgggagctgacttggtaaagcccatttccgaggattttagggagacctaggtggggcagacactagaagtgtccagcctccaagcccaagagatgtggccggcagggctgggcaggtccttgctggctcagcctgctctttgctccttcatgggaccccagtggatcctgcagttctgctcttggctggaaccacgccagcttcgctggagctggactgagccgccttttacattattggactctctcgggttgagagctgcccaggactcctgcagtttcaccacccttgttcctttgactcttgactcatcatt

SEQ ID NO: 20506 - DNA, 355 bp, Homo sapiens
ggctgatggaagaggactacagacagtacacataaatgaaaatttcgccaaattggcagaagccctctacattgctgatcggaaggctcgtgaagctgtggaaatgcgtgcccaagtagagagaaaaatggctcagaaagaaaaggaaaaacatgaagagaaacttagagaaatggcccagaaagccagggagagaagagctgggatcaaaactcatgtggaaaaagaggatggggaggcacgtgagagggatgaaatccggcatgacaggcgaaaagagagacagcatgaccggaatctttccagggcagctcctgataagaggtcgaaacttcagagaaatgaaaatcgggat

SEQ ID NO: 20507 - DNA, 503 bp, Homo sapiens
  misc_feature (1)...(503): n = a,t,c or g
cttgganntccngaatnccccntnctatgacatgattacgaatttaatacgactcactatagggaatttggccctcgaggccaagaattcggcacgagtcttacagctttattagtatgtaagactttttataatcctgtttctactaacctctctagattcttctcaagccattcatttctccatggatacctttatgttatagctttctttatgcaatacttgcagctctgagaaaaaatcatggtgacctgtacatctgtattaacagtgttgagtttgcacttttctatgtactttacatatgttattttttttatacagcctggcgacagagtgagactctatctcaaaataataataataataataataataataacagtatatttggtgtcaggagagggctcaattctcatttctgcctttcctgtgctggctcatggtagctgggcatgacttgcttcctacataggttgcttcatacatatgcactgggaatc

SEQ ID NO: 20508 - DNA, 346 bp, Homo sapiens
ggcttgtagtatcactcctgccatgtcatgtcaggctctattccgtgtctcagaagtgagagccacaatgttttaatgactttgtttgcctttcccaggtgaagcctgagacaggcgcattggcttcaacctagtgcctgtgaccttgctccattattatagtgcagcgtgtacttgacttttccattgggccgctctacaaaaaaaggcttggttgttgaagcctcagtcagcttccttaaccggttctgtcaccaaaatcagcttgtatggacagctgctgccctgtcctttttatttgaaaattttccatttaggttgtttcagatctctttagataagccca

SEQ ID NO: 20509 - DNA, 328 bp, Homo sapiens
gacaccccctgaagcaatctgggcttccagcaggcgcattccggtttctgtatcaatcaaatttttcttgatggcttctgaaacagatactgtcttgcctgaaaatggatcatcaaaaccagtgatagctttttctgctgcatatatctgctgacggtcatcgaagtcaatgaggtcccgagctatggcactgtcgacagtcagcttctcattccgatggggatcaattataccacctgtagctgcctgggcctccagaagcatgactgtggattctgggctgattaatttctttctcttggcctctaccaaagagtatttttcctta

SEQ ID NO: 20510 - DNA, 368 bp, Homo sapiens
gggcttgttctcataacaacattctcttgctctgatttgtgggagaggtgggtccacctgaggcaggcgggacacaagtgctcaaagtcgaaggaggcaaatttattcttccctcgcctgtaggcttgggaagcacagctccgcacaaggccgccccacagatgggatggatggagcaacagggagcgcggctgtggttgcagcctgcctggaattctcaggacttccctgtcttgtgcgccaccacacaccctggtttccctaatgcctttcagccgtttaatatggctggtgagaccacaagagcagatgtgactcaccttgaccctcagagcggctctgcacaaggtgtgatggaatgagaaaag

SEQ ID NO: 20511 - DNA, 422 bp, Homo sapiens
  misc_feature (1)...(422): n = a,t,c or g
acngcttgattgattacnaatttaatacgactcactatagggaatttggccctcgaggccaagaattcggcacgagagagatcccaagtgtccttcaagatatcactgtgctcatgaagctggtgtacatagtgttgggctaacttggattcataaacttcacaaatttcttggatcagatgaagaagataaggatagtttacaggaactctctacagaacagaaatgctttgttgaacacatcctttgtacgaagccattgccctgcaggcagccagctccaattcgaggattttggattgtacctgacattctgggacccacgatgatctgcatcaccagtacctatgaatgcctcatatggccgttattaagtacagtccatccagcgnctcctcccctgctttgnactcgagaagaag

SEQ ID NO: 20512 - DNA, 544 bp, Homo sapiens
  misc_feature (1)...(544): n = a,t,c or g
gtttaaacttaaatctgtacgttcattaccaacttttacaaaatcaaggccttttctttgactatgcgtccccagattggcattcaactgcaggttnngtatatccccataaactgtggttttgcttaaagcggagtgggaacttagatatttgcaaagcgatctgcatgcaaaaccttattgatttttatgattttcccctgaaacttttataattgtcttattccaacctaacttgacagtagatgtttttaagcatttacctttattaagtttctccaaaacattcaatctagttttatgagatatatccatggaccttttttttttttaagccccancagcnacggttagngtnagggtttttagncagggcccagannaattctccaagttgggcccaggggaaccaanggntcannnacttcngnnccaaatagntantagttttaaaggggaaatntgaaaaactggggnnaaccangannctggnanacgnntntngggangggtttgaaaaaagnangggggggnaaaacccccc

SEQ ID NO: 20513 - DNA, 339 bp, Homo sapiens
ggacacccttaggctagtctagcaattctgaactgcctggcttgaagagttgattcccatgggatgttgaggaggggccagaggttctggaagaatagtaaaaaacctacaaccaagtggtagcatctcagtattcctcttccacaaagtagcccatccccccccatcaccaagggaagcccctagtggtggcaggcatcttgggaatttaccttcattactaattctcccttgtctaccagtagcacttcttaacctgctcactgcccatcagaacagcctccgacaaagctgcatccaaattctttaaagggcaattcattgccccaagtaatctgc

SEQ ID NO: 20514 - DNA, 536 bp, Homo sapiens
  misc_feature (1)...(536): n = a,t,c or g
ttgtctgaccaccgttatgacatgattacgaatttaatacgactcactatagggaatttggccctcgaggccaagaattcggcacgagagcatgagtttctgagcaaaagattatcgaaagccaggcatagtacctgcaaggacagtggccatgcaggagctagagacattgtttccattcaagagctaattgaagtggaagaagaagaggaaatcctcttgaactcttacaccacaccttcaaagggttctcagaagcgagctatctctcccccccccccccnnnnnnnnnggngggggtnaactcgtancccccatcagntactntnaccgncaagtttntntccaagggctactccntcccaaaaatncaactcncgaagtanccgnggaaaaggggttncctccttnggnttancncagggngtntcttggnctgggaaaggagganctggaaacatcagccngaaggtcttgggatgccaaaggccctaacngggagctcaaatccatgtttnaaaacncccaaacattca

SEQ ID NO: 20515 - DNA, 567 bp, Homo sapiens
  misc_feature (1)...(567): n = a,t,c or g
attgganacngntatnacatgacacgaatttaatacgactcactatagggaatttggccctcgaggccaagaattcggcacgagggtgaagtaaaaccctcagtctgagcctgagaaatcctggcatttgtagcccagggctgcgaggaagccacagggcggtccgcagggcggtatcgaggctctgggacccaaggaggggcaggacgtcgtgcacccctcgcgcacgcacctgtcgggaccggccgcctcctcctgcctacctgtcctgcctccttcgccccgaatttcaccttaaaccatgatgaaccaagcccagtggattctgaagcccgggacgatggcaggttcgagagagaattgggcagctgggggcggggcacaatattatttaggcgcctccaccccaccttcacagaaatacatctggaaagcatgggctgtcctagggctggggactgggggttacggnctcatcgatgactcagagggagagaaaaccccctgggtcccaagccnaaaagaataaaatcttcagaatagccacaaactcctctnagctggtgg

SEQ ID NO: 20516 - DNA, 541 bp, Homo sapiens
  misc_feature (1)...(541): n = a,t,c or g
tttgnataccgtttgacattttgacgaacctaatacgactcactatagggaatttggccctcgaggccaagaattcggcacgagtgcttattccctttaaacatttctaaagtagcacacactttgaagaacctgcttcttgccaagtgaattcagaaaccttggcttccgcttgctggggagactgtcagcatgggcacagatgtgcatgagtttcccactctttgggattctgtgtgttttggtacagccctttgtgcagccgtgggaaccctctgaaccatcccaacctatttgaaaatatttctagagggctgaattttgtcatgggggcaaccccaaagacccaggtttgaagcctggctctgcctcttgctgcctcttgctggttgtgatcttgggaaagcctgtgtcctttcagagaccatttttgtagctataaatggctttaataatctcaaattccttcactgagttatttaaggccacctgagatatttgacactctttgaaatgnggnggaccaaacagatgatttttt

SEQ ID NO: 20517 - DNA, 376 bp, Homo sapiens
ggtgatgatgggttgctctttaaactaggatggtcagtgtaggccacatctagaaggtacgatttgagcaatggcatgaaggaggtgaaaagttggtcttgtagatatctgaggatacgagttccaggtgcagggaacagcccatgcaaaagccctaagttgggaatgcgcctggtatgtttctggaggaacaagattagtgtgggcagaatggagtgaggaagaagaggtctactgtttgggggtccgaggggaggtttttgttttctttagagacagggttttgcactgtcaacaggctggactgcagtggcatgatcatagctcactgcagccttgaactcctgggttcaagtgatcaccacacctcagcctc

SEQ ID NO: 20518 - DNA, 898 bp, Homo sapiens
gcgtataccgcatctctaggagagacagcagttgcatttgactttgggccattggcagcagtcccaaagactctatttggacaaaacggcaaagatgaagtagtggcatacccactgtacatcttatatgaaaatggagagactttcctgacatacatcagtctgttacacagccctggaaatattggaaagctgttgggtccattgcccatgcatcctgcggctgaagataactatggttatgatgcgtgtgctgtactctgcttaccctgtgtccccaatatcttagtgatcgctactgaatcaggaatgctgtatcactgtgtcgtgctagaaggggaagaagaagatgaccacacgtcagaaaagtcctgggattccaggattgacctcattccttctctgtatgtgtttgaatgtgttgagttggagcttgctttgaaactggcatctggagaggatgacccttttgattctgacttttcttgtccagtcaaacttcatagagatcccaagtgtccttcaagatatcactgtactcatgaagctggtgtacatagtgttgggctaacttggattcataaacttcacaaatttcttggatcagatgaagaagataaggatagtttacaggaactctctacagaacagaaatgctttgttgaacacatcctttgtacgaagccattgccctgcaggcagccagctccaattcgaggattttggattgtacctgacattctgggacccacgatgatctgcatcaccagtacctatgaatgcctcatatggccgttattaagtacagtccatccagcgtctcctcccctgctttgtactcgagaagatgttgaagtggcagagtctcccctccgtgttctggctgaaaccccagatt

SEQ ID NO: 20519 - DNA, 345 bp, Homo sapiens
gaaaccatgaagcttattgtctattgtcagtaataacatgttcaaatattctattattgtgacattcatttttttcatgctttttatatgaggggaggccaaggagggaggatcacaaggtcaggagatcgagaccatcctggctaacacggtgaaaccccatctctactaaaaatacaaaattagctgggcgtggtggccggcgcctgtagtcccagctactcatgaggttgaggcaggagaatggcgtgaaccgaggaggcggagcttgcagtgagtggaaattgcgccactgcactccagcctgggcaacaaagtgagactccatctcaaaaaaaaaaaaaa

SEQ ID NO: 20520 - DNA, 350 bp, Homo sapiens
gcacacttttagtatttttaaattcacaggtaatatatgctcaatgctaaaaaatttaaacatgtagagaagcagaaccaataattatctattattctgccaccaagagggattcatatatacctttgtacgctttttgggcattaatacaggattaaagcgtgtatttttaaatattctattatttaatatattgtaactatccacgataacaaaaatataattgtatcattatttaatgtctgcttagtgtttcattgtgtgtatctactataattaatttgactagactcattgcaggatatttaaggatatttccttttttcatgagaaatagcactgggatgaac

SEQ ID NO: 20521 - DNA, 340 bp, Homo sapiens
ggggctcaacagtgagtccatgacagaagaaaccctgaaaagggcaaaggagattgggttctcagataagcagatttcaaaatgccttgggctcactgaggcccagacaagggagctgaggttaaagaaaaacatccacccttgggttaaacagattgatacactggctgcagaatacccatcagtaacaaactatctctatgttacctacaatggtcaggagcatgatgtcaattttgatgaccatggaatgatggtgctaggctgtggtccatatcacattggcagcagtgtggaatttgattggtgtgctgtctctagtatccgcacactgcgtcaa

SEQ ID NO: 20522 - DNA, 533 bp, Homo sapiens
  misc_feature (1)...(533): n = a,t,c or g
attnnnnnttatnntttggantncnngnatacccttntgacatgactacgaatttaatacgactcactatagggaatttggccctcgaggccaagaattcggcacgagctggaaaattcatcaggctttaaaagaagatattcttgagtttattaagcaagcacaggcacgagtactgagccatcaagatgatacggctttgctaaaagcatatattgttgaatggcgaaagttctttacacaatgtgatattttaccaaaacctttttgtcaactagagattactttaatgggtaaacagggcagcaataaaaaatcaaatgtggaagacagtattgttcgaaagcttatgcttgatacatggaatgagtcaatcttttcaaacataaaaaacagactccaagatagtgcaatgaagctggtacatgctgagagattgggagaagcttttgattctcagctggttattggagtaagagaatcctatgttaacctttgntctaatcctgaggataaacttcaaatttataggg

SEQ ID NO: 20523 - DNA, 86 bp, Homo sapiens
gcggcacgagggcagggaggtgccacacatttttaataaattgatctctagagaactgactgtcatgagcacagcatcaaggagga

SEQ ID NO: 20524 - DNA, 895 bp, Homo sapiens
gcttttttttttaattcattaaccaggggttagcccttaaggggaggaggacggatggattccacattccacttcctaaatctagtttaaaaaacatgttccccatctggggctcttaggaaggagtatagtaaatgcctcatttaataacatactcctttttgaaagttgccttttctttccacccttgagtaaatccagtatttgatgaaactcatgaaagtgggtggagcccatcttgcccctcctcttttctaggacgcactatatgtgactgtgactttcaaggacatttgtttgccatttgctgatttttttgggaagttaatttctaacttctttcactgataaatgaagaaaagtattgcacctttgaaatgcaccaaatgaattgagtttgtaattaaaaaaatttttttccctttcagtcattgtcttatatgcttagcatagatttgcagctcagtagtatagggagttcctagaatgcagctgaagacctgttatgtagaggaaatacgaggggtggtgctagaagacagacatctgtggaatgattcacatcctctcaagttaggaggatggaggcctgcttcattaagaagctgggggtagggtgggggtggggagaacacttaacaacatggggaccagtcaggggaatccccttatttctgttttgcatatgaggaaccctagagcagccaggtgaggctctctagtttaataaaaatcatggaaagactcttaatgcagactcttcttaagtgttaatagggattttttcagcttattttggttgcagtttccaatttttaaaaatgttgaggtaatctttcccaccttcccaaacctaattcttgtagatgcattagtgttgaaccaatgctttctc

SEQ ID NO: 20525 - DNA, 375 bp, Homo sapiens
ggggcccgggctggtgagcggcgcgcgccgtcgcctctccgcgggtagctgacggcccagagggtgggtgccaattccaccagcagctgcaactgaaaagcaaggttcagaaatgtcagatatcctccgggagctgctctgtgtctctgagaaggctgctaacattgcccgggccgtgcagacagcaggaagccctcttccagctgctgatcgaagaaaagaaagagggagaaaagaacaagaagtttgcagttgacttcaagacgctggctgatgtactggtacaggaagttataaaacagaatatggagaacaagtttccaggcttggaaaaaaatatttttggagaagaatccaatgagtttactaatgact

SEQ ID NO: 20526 - DNA, 353 bp, Homo sapiens
gcggcacgaggttccctgatatgtctcctcatttacacagtgaaaatccggagatttaataaagctaaaccagagcctgatatacttgaagaagaaaaaatctatgcttaccccagcaatattacctcggagactggattcagaactatttcaagcctagaagaaattgttgaaaagcaaggagacaccattgaatacctgaagcgacacaatgcgctgctgagtaagcgattgttggctctcacttcctcagacctgggctgtcagccaagtagaacgtgagaggctcacggtcatgacagcaattgcagaggaacccagagtaattgagactgactgaccacctgacaagc

SEQ ID NO: 20527 - DNA, 351 bp, Homo sapiens
gctttcctttatttctttctttctttcctatttgaaatctgcatcttaaagactgccaccagctgctctcacaggcaattgctttgctaagtaggccacaaggatcctagtgagcaatggagtattcacagttttctaattaaaagatgccacctagtggttacagttcccttcatcctgattgtaccaggaaacatgaaagttaagcagtattaacaaattccaggtcttctgtggtgccagcttggtctaacggcagcatcagatacaatgaacccatttcctttcacatctacaaccaagctgtcagaagtaactgatgttgatagtctacgaagctttgtagcaggg

SEQ ID NO: 20528 - DNA, 299 bp, Homo sapiens
tttactcacatttgcagtgcttattcctcttataatggatgagatgtaacttcagcaacttttcactagtgtatattttatcccatatcacttctcaacaattttacttctgtacttaactactttctcccctcatcatcagtgtttctttctgctgaaccattcccttcagcaatacacagaccaaaaataaaacacgcttcttcgatcctatatcatcttccaactattgcttcatttctacgatccttgttctagcaaaaagtccactaaagatttgttgctgcttgctcatgtcc

SEQ ID NO: 20529 - DNA, 372 bp, Homo sapiens
gactggctaatttttaaatttatttttgtgggacaagtgtcttcctgtgttgcccaggctggtctcgaactcctggccccaagtgatcctcccaccttggcctcccaaagttctgggattacagggcatgagcccctgtgccccacggcacagttaaatattaagggccagagcctttcacgcgtaatgtttttatcctgccgtaatttcttcctctccaattatctggaagccaaaaaggcattgcaaggtctcaaaggctattatatgaagctagattctttcaattgctgggaccagcgaccaactaaaattagcttaaccaaaagaatagaatttaatgggcttatatttccttgggggcatggccca

SEQ ID NO: 20530 - DNA, 504 bp, Homo sapiens
  misc_feature (1)...(504): n = a,t,c or g
gattnatnccgantttatncnactcnctatanggaatttggccctcnaggccaanaattcggcacaaggggataacctctgagaatgtggctgagcggtttggcatttcacggganaancaggatacctttgccctggcttcccancagaaggcagcaagagcccanancaagggctgtttccaagctganattgtgcctgtgaccaccacggtccatgatgacaagggcaccaagaggagcatcactgtgacccaggatgagggtatccgccccancaccaccatggagggcctggccaaactgaaacctgccttcaanaaanatggttctaccacagctggaaactctanccaggtgantgatggggcagctgccatcctgctggcccggaagtccaangcagaaaaattgggccttcccatccttggggtcctgangtcttatgcantggttggggtcccacctgacatcatgggcattggacctgcctatgccatcccaa

SEQ ID NO: 20531 - DNA, 426 bp, Homo sapiens
  misc_feature (1)...(426): n = a,t,c or g
ggccaagatcaaggtgaaggagaacattgatgccctggaggagctgaaaatcctggtggactacgacgagaaaggctacctcctgcagatcttcaccaaaccggtgcaggaccggcccacgctcttcctggaagtcatccagcgccacaaccaccagggttttggagccggcaacttcaactcactgttcaaggctttcgaggaggagcagaacctgcggggtaacctcaccaacatggagaccaatggggtggtgcccggcatgtaagccccggcccaccccacggaggccacagncacacagncacgccccctgattctggaactcgcccaactttcctactggntgctcccttggggtcccgcccancaagcggnntcgggncccangggtccgcccaantgacacgccctcgggggggccgc

SEQ ID NO: 20532 - DNA, 335 bp, Homo sapiens
gggattaccaaccttgctaaaaagctgcttgcaaaataattcgaggagaacctgtaccttgtggctagccatgcttaggcttgctgttcattatttgcaattttttcctttaaaaagatgatacttactctggagaccagtgtcctgagaaagatgactttgtgtctagcagtatagatgagctagcagtcagctgtagaggaagatccttagaattcctcatcagtgttgtattttgagtacattgcttttagtgataatttaaataaaacaccacaaacctagcacacttgagtgattatggaaggagcctgagtttggagccagggtcgatg

SEQ ID NO: 20533 - DNA, 374 bp, Homo sapiens
gcatgcaatgcttccaaatgaagtctcacattggatttgctgattttggagacagattcccctcttctggacagctttgatggccaagatagaagttcatttgctatgtttccagggactattctctttgatggatacaggatttatggggtctaaagagaacatacaattctaaagtgttcatgtttgagagaaaactctgcaatgatcagaaggattgagccagttttagcaaaacaaattaggactacattaatgatgaggttgactatacacagtttggagtgggagagttactctacccagtatcactgacatgttggaatgccagatgaaactgaaacagaaaaattgtcttggagtctaaaagacat

SEQ ID NO: 20534 - DNA, 311 bp, Homo sapiens
gggatagcaggcacccgtcatcacactcagctaatttttatatttttagtagagacagggtttgccgtgttggccaggctggtctcgaactcctgaactcaagtgatccagccacctgggcctgccaaagtgctgggattgcaggcatgagccactgtgcccggctatgtgttatgtttttgctttttccatagacgtaacattttgtctcttatgtgcattacatagtttcttccaagatgtcaacttatagttcatttatggtctctgctttgtagaacttcaaaatttctctacaatcacagttatat

SEQ ID NO: 20535 - DNA, 351 bp, Homo sapiens
aaatgatcaaaatttattttataatcctttaaaatacttatctttcatattagtcattaatttaattacaatattaatttgaatttccaggataatttcccggagttggttgcatgcattatctttcataattttacatagttcttttgttatataatgaatttactttacatgctagtgtttcaagtattgtatgaggattttcacaatagtatcactgaatgatgtcaccagagctctgagaataatatttgtaagttaactgttttatggggacattgaaaatattgtatttttgtagggtctattaaaaattggaagtggtccacctttatttaaaaaaaaaaaaaa

SEQ ID NO: 20536 - DNA, 498 bp, Homo sapiens
  misc_feature (1)...(498): n = a,t,c or g
tttcccttccccnccancagctatgacatgattacgaatttaatacgactcactatagggaatttggccctcgaggccaagaattcggcacgaggaaggccagagattgcctgattcctatggggataacctctgagaatgtggctgagcggtttggcatttcacgggagaagcaggatacctttgccctggcttcccagcagaaggcagcaagagcccagagcaagggctgtttccaagctgagattgtgcctgtgaccaccacggtccatgatgacaagggcaccaagaggagcatcactgtgacccaggatgagggtatccgccccagcaccaccatggagggcctggccaaactgaagcctgccttcaagaaagatggttctaccacagctggaaactctagccaggtgagtgatggggcagctgccatcctgctggccncggaggtccaaggcanaanagttgggccttcccatccttggggncctgaggctt

SEQ ID NO: 20537 - DNA, 331 bp, Homo sapiens
  misc_feature (1)...(331): n = a,t,c or g
gcttttactaaactgtcatgagacatttgtgtaattcagactccagtactgattatagtatcttttaaccaaatacatttcactaaaaattagacttgtaaaagtgttaaaaaaataaggcttggccagatggggtggttcacgcctgtaatctcagcactttggaaggctgaggcgggcagatcccctgagtttgggagtttgagaccagcctgaccaacatggagaaaccccatctctactgaaaatacaaaattacccgggtgtggtggcgcatgcctgtaatctcagctactcgggaggctgaggcaaaanaattgcttgaatctgg

SEQ ID NO: 20538 - DNA, 440 bp, Homo sapiens
  misc_feature (1)...(440): n = a,t,c or g
ntntgganacccgntatgacatgattacgaatttaatacgactcactatagggaatttggccctcgaggccaagaattcggcacgagcctaaactttcctcctgggagcctgtgatcatttgaaagtaacagaagaaagttgtcaggctgaggaaagtttcaacaggcacttggtgagaatgggaagcatccattcattgtgaaatcgcggggacagaggaggaattcacgggatcagagcactgagaaactccagaggcttctggttcaccgccctgattccacagatgtgggtcagaggcagagatggaagttggaatggacaagcctgccctctccttggctctccatggctgtgtcctcaggctgtttctgcaatttgacatgaggcctggccccagggaaaccagtggggcctcatctcctccctgtgctgctct

SEQ ID NO: 20539 - DNA, 482 bp, Homo sapiens
  misc_feature (1)...(482): n = a,t,c or g
gngnnnnnnnttgannnctttgaaancntttgacatgattacgaatttaatacgactcactatagggaatttggccctcgaggccaagaattcggcacgagccaggataaagtgactgagagcagtagaagacttgttgagccttaaggaataagaggaaaattatgttatgaagtgcaggaacagcacagacccagacgaggggatgcagcccggagccagtaacccggcgcctcctcctccccagggcgcagcgctggctgctccccggataccgtgatcacacgtcccaggtcctgagagcgcctcataggtagacagttctttgggacttttgggacgcagcacttgaagagaggtttacctaaactttcctcctgggagcctgtcatcatttgaaagtaacagaagaaagctgtcaggctgaggaaagtttcaacaggcacttggtgagaatgggaagcatccattcattgggaaat

SEQ ID NO: 20540 - DNA, 405 bp, Homo sapiens
ggatatctgtgttaccagccttgtctcggccacctcaaggataatcactaaattctgccgaaaggactgaggaacggtgcctggaaaagggcaagaatatcacggcatgggcatgagtagcttgaaactgctgaagtatgtcctgtttttcttcaacttgctcttttggatctgtggctgctgcattttgggctttgggatctacctgctgatccacaacaacttcggagtgctcttccataacctcccctccctcacgctgggcaatgtgtttgtcatcgtgggctctattatcatggtagttgccttcctgggctgcatgggctctatcaaggaaaacaagtgtctgcttatgtcgttcttcatcctgctgctgattatcctccttgctgaggtgaccttggg

SEQ ID NO: 20541 - DNA, 350 bp, Homo sapiens
gcagagcagggctgagaggcctggctgagcccctcccgctcaagacagaactgaggtgtggacacttagccctgtgggacacatgcaggacatcactgtcagcttctttctggaagctcacatcccactgactacccctcttttccttcctgccccataccccttctacttattcccctctgcttgggagtcttgccccaccacacctgcatccccatctgcaccccatcccctctccacctgcccttctcttccctctccatccaccatctccagccctgtgaagggaatgtactttcggcttatacccccattacccattacccaaaagttacctttttttttttttt

SEQ ID NO: 20542 - DNA, 844 bp, Homo sapiens
  misc_feature (1)...(844): n = a,t,c or g
tacgaatttaatacgactcactatagggaatttggccctcgaggccaagaattcggcacgagcgaaatagagacagggctcagtactcgtggctgggccttgctggccaagtgccctgcctgtgactcccagaggcccactggtcttcctagggctccctggctatttcctagcacttgccaagtgttcagctatctctggaggagtcctgctagggcccagttcaccttaccttctcctcctcttcctcctccccagggtggagtccatgtccctggctgacagagggaaccctggaaatattacttcgcgcttgatggagaaggagaaggccagagattgcctgattcctatggggataacctctgagaatgtggctgagcggtttggcatttcacgggagaagcaggatacctttgccctggcttcccagcagaaggcagcaagagcccagagcaagggctgtttccaagctgagattgtgcctgtgaccaccacggtccatgatgacaagggcaccaagaggagcatcactgtgacccaggatgagggtatccgccccagcaccaccatggagggcctggccaaactgaagcctgccttcaagaaagatggttctaccacagctggaaactctagccaggtgagtgatggggcagctgccatcctgctggcccggaggtccaaggcagaagagttgggccttcccatccttggggtcctgaggtcttatgcagtggttggggtcccacctgacatcatgggcattggacctgcctatgccatcccagtagctttgcaaaaagcagggctgacagtgagtgacgtggacatcttcnagatc

SEQ ID NO: 20543 - DNA, 353 bp, Homo sapiens
gcaagcgtttctactttgaaattcagcaagagtttctgagccttatgtttgagggtaccttttgctgcagttgtgaatattcagtacattgccagctcttggtcactgagtgattgagttagggctccgcaagagactttggggagtgaagtggatctcttcctcatcttctggtcctctgaaatgtgtgttctgaagccatggggctcgtcttctggggtgttcccctgcaggtgctggtgaaggtaacctggggcttaatgatggagtccctgatcatttttgcacaagacaggttgctgaggggtcggcaagcatctgacttgcccaatcccctggatatggtgagcccc

SEQ ID NO: 20544 - DNA, 240 bp, Homo sapiens
  misc_feature (1)...(240): n = a,t,c or g
gggatcacctgaggtcaggagttcgagaccagcctggccaacatggtgaaacccggtctctactaaaaatacaaaattaaggctcgggcacggtggctcatgcctgtcatctcagcatgacttggagactgaggcaagtgaattgcctgagctcaggagttccacaccagcctgggcaacatggtgaaacccagtctctactaatatacaaaaaattagctgggcgtncannanntgcct

SEQ ID NO: 20545 - DNA, 181 bp, Homo sapiens
attttatgcatttaaaaaacattattctaggccgggctcagtggctcatgcctgtaatcccagcactttgggccatgaggatataaaaccacctgataccaaatgaggtatgaggctacagaagtcctggacttctttcttctctaaggcagtttaaattgcactctatgtctttgaattt

SEQ ID NO: 20546 - DNA, 405 bp, Homo sapiens
gtttgcagatgccagacctatgctctataaatccataaattaattcaatttattgaaagaagtagatatctataaaccccacactgaactggttaagcttaattgcaatcctagtccatcctagagagaaatcaaaataattgagaggttagggcattgtcgctgtgagaaagcttagaggtaacacattatatgttatctggagagaagaatgttaaatggaaacaaagtttatgaagaatttcttcaagtacctgaaggactttctgggaaattacaagatagcattcttaggttccatatgtctagaagacttttcataactgtaagcaacttttgcaaatggtttgggaacataaaactcttccagcatagaagaaaatgggtactattaacattcagatg

SEQ ID NO: 20547 - DNA, 433 bp, Homo sapiens
ggtgctgtggggaagggagaaggatttgtaaaccccggagcgaggttctgcttacccgaggccgctgctgtgcggagacccccgggtgaagccaccgtcatcatgtctgaccaggaggcaaaaccttcaactgaggacttgggggataagaaggaaggtgaatatattaaactcaaagtcattggacaggatagcagtgagattcacttcaaagtgaaaatgacaacacatctcaagaaactcaaagaatcatactgtcaaagacagggtgttccaatgaattcactcaggtttctctttgagggtcagagaattgctgataatcatactccaaaagaactgggaatggaggaagaagatgtgattgaagtttatcaggaacaaacggggggtcattcaacagtttaaatattccttttatttttttttcttt

SEQ ID NO: 20548 - DNA, 523 bp, Homo sapiens
  misc_feature (1)...(523): n = a,t,c or g
aaanccnaaatccctttcaaatttgacatccngnttacgaatttaatacgactcactatagggaatttggccctcgaggccaagaattcggcacgagcggcacgaggcttcaagaggagctgctgaaggaattaagacatggtgaggtgccttagaaaaggaggtttggaagttgtgtaacaaaaatgtcattggccgggagctgtgggtcacacctgtaatccctacactgggaggccgaggcaggaggatcacttgaatccaggagttcaagaccagcctgggcaatgaggcccccatatctctacaagaaattaaaaatgaaacaattagttgggcatagtggtgcacgcctgtggtcccagctactcagactgaagttgaggaggatcacttgagcctgaatggtcaaggctgcagtgagttgcgattatacctcggcagtgagctatgattgcgccactgcactccagcctgggcaatagagttgagaccttctctcaaaaaagaaatgtcattagtg

SEQ ID NO: 20549 - DNA, 539 bp, Homo sapiens
  misc_feature (1)...(539): n = a,t,c or g
tttganaccttctttgaaccccnattaataccactactatagggaatttggccctggaggccaagaattcggnncgagctttcaaccattcctcatttaattggtttcctacccctcgggatcctagttggtgacccctggatataccacaatttgtcattatcccctttatagcatgctgcctggaagagaacacattatctggcaattctgagttgtgtaacatgtacccatgtgtaacatctagcatgtagagtggatggagcaaatgtccacttactggcctgtagagtggatggagccgaggtccacttactagcatgtgggatggatggagccgatgtctacccatgattctctcatgtcctaatgcaacctaaaattgtgttggtttatttggcatcttggattatattattgccttctgttgagcttatcatcaaccagaactcccaagcagaattttttttttctgntttcaatatgcatgcaattgnttaccacattttccatatnccgcagcttattggaccttaaat

SEQ ID NO: 20550 - DNA, 356 bp, Homo sapiens
gctgtctcctaacactcaggccattgcctcttccaatctctgctagctgagcttgaagccttagactagtggggaactcaccatcttccagacagcctgggcccaccctttatgtacatgagagggtctcttcctctgcgcttgcacatggaggccctccctggtccaggtggaggggctgctgtcccgcagtgtggccccagcctccacccctgctgctggaccagctctccccaggcccctccctgggggtgcagcacgtgaactccagagaggcgcatccttgggcccatggggaggtggaaccactctgccaggctgtgcctgtggatggggccgggcccaggatctgcttt

SEQ ID NO: 20551 - DNA, 350 bp, Homo sapiens
gggctgaccctgaagcagaaagcaaagcctagatcagtctgctctcctcctaccaacagggtaatgaagaggttgaaccaccagttctcaatcccatacatgagattcccaaaatagacgcggagttacacagagaccttttttttttaacctcctctgagattttttttaacctcctctgagattctgtatttccttaatgacccgaaaaatctatttagcccagtttttatccttgcagataagttagtacgcttctttttctgctggttgtgatcatatttctatttaggggtaaaggtgctgaaaatcatttgctgcgatgactcgcaaagacatagttaccatga

SEQ ID NO: 20552 - DNA, 433 bp, Homo sapiens
  misc_feature (1)...(433): n = a,t,c or g
ttganaccagctatgacatgtttacgaatttaatacgactcactatagggaatttggccctcgaggccaagaattcggcacgaggccacattaccattttttcacccgagggtcggctctaccaagtagaatatgcttttaaggctattaaccagggtggccttacatcagtagctgtcagagggaaagactgtgcagtaattgtcacacagaagaaagtacctgacaaattattggattccagcacagtgactcacttattcaagataactgaaaacattggttgtgtgatgaccggaatgacagctgacagcagatcccaggtacagagggcacgctatgaggcagctaactggaaatacaagtatggctatgagattcctgtggacatgctgtgtaaaagaattgccgatatttctcaggtctacacaca

SEQ ID NO: 20553 - DNA, 475 bp, Homo sapiens
cctcgaggccaagaattcggcacgaggctctggacagtttgagcagcattgttagagcctgtggaaaacactttacaactgtgtaactgtcttcatctttacagaggaatagtctacaaaggaagacttgtaacctggagaagagacctgtcatttactccatcctttatagtgatgctacaggacgaagaggaatggataaaaacattggcgagcaactcaataaagcgtatgaagccttccggcaggcatgcatggatagagattctgcagtaaaagaattacagcaaaagactgagaactatgagcagagaatacgtgaacaacaggaacagctggtcacttcaacagactattattgacaagctaaaatctcagttacttcttgtgaattccactcaagataacaattatggctgtgttcctctgcttgaagacagtgaaacaagaaagaataatttgactcttgatcagc

SEQ ID NO: 20554 - DNA, 503 bp, Homo sapiens
  misc_feature (1)...(503): n = a,t,c or g
gganncnncagttatgacatgattacgaatttaatacgactcactatagggaatttggccctcgaggccaagaattcggcacgagtggttaaagacccttgcactgcaagatattgcattgagtatacaaactttcttgggtgtatgtgtgaaataattgcagtctgtgttcatcaaaaattaggaatataaagaaaaaaattgctgtcagccaggcgcagtggctcatgcctgtaatcccagcactttgggaggctaaggtgggcagatcatctgagatcaggagttcgagaccagcctggccaacatgatgaaacccccgtctctactaaaaatacaataattagccaggcatggtggcactcgcctgtaatcccagctacttgggaggctgaggcaggagaatcgcttgaacctgggaggccggangtnncagtgagcctganatcatgccactgtacccccacctgggcaacanaangggaatctgctnnaaaaaaaaa

SEQ ID NO: 20555 - DNA, 450 bp, Homo sapiens
gtctctttaattttcaccgttctaaaagataggcattgtattcccatttcacatttatatgctcttgtataactacatttattggtccctcaaggagataatttatccccagttaaaaccaggagtcttatgtccttactgctctctggagtaagaagtagctgctaaccccacttgagtaaaaaaagtaaagtctcagaacaagccctaggcttaggtgtaaccactctacatgtgaggaatgtgttcctgccttctgtacccttttccccattgacacctatgttttaagagataacagggcctggtttgctgattctaagcctgaggaatactggagcaggactttgagtctagttgcagctttatcacctatctcctctgacaagtggccaagctacttcccactgtaggtctcaatggcttttaataacatgaggggatttggaa

SEQ ID NO: 20556 - DNA, 309 bp, Homo sapiens
aacaccgatgctgtctctaagttcatcacaggaacagcttaaaatcagaataatagggaactgctgattaaaacccaagtgcatggacattttagaaagaagagcaagccgttccactctctgggaagttcatgggcttgcagtgggagtttaaggtatcatctttgatggaacagcatggttaaaaacaccaaacttttttttttaaaaaaacgatactactgactttagcagcaatcacaaacaaaggggatgataaacgagggatacatttcagtcacagcaaagaaagattatgtgcttttccgc

SEQ ID NO: 20557 - DNA, 218 bp, Homo sapiens
ttgcctaccagctatgacatgattacgaatttaatacgactcactatagggaatttggccctcgaggccaagaattcggcacgagtatggggagtggagatagaaactatcaaagggatttaaatcaggtctctaagaaaggcctttctgaaggtgtgacatttaaggccagaacttcaggggtaagaaagactcagccaggtgaaaaaaaaaaaaaa

SEQ ID NO: 20558 - DNA, 481 bp, Homo sapiens
  misc_feature (1)...(481): n = a,t,c or g
ttgnacggagtaccagntatgactgattacgaatttaatacgactcactatagggaatttggccctcgaggccaagaattcggcacgagacaataccactattatcccttgcttttatgtaggatagtgtgaatgacagataccatgttgtcctccaagccactactctcttctcatggtctgtggctttctttggattaacctgaactcttgctgtagaatgaatgtccgttccccaagatccctgccccctggagatttctaggtgcttttggtaaacaggtccttgtctgccttgactctgctattatcctcagtcatgtacaaaatctctatctttcctggagttgtcccagtgcagactcaggctaggagtcatgcttctgaagaataatgtatgaaaatgattttgaaaaaggagtgattgactaagcgttcatctattaccaagataatnanactatagaacncctnggaaaat

SEQ ID NO: 20559 - DNA, 276 bp, Homo sapiens
gagttagcatgtatgaatgtaaggatgagggaagcgaagcaagaggaacctctcgccatgatcagacatacagctgcctacctaatgaggacttcaagccccaccacatagcatgcttcctttctctcctggctcggggtaaaaagtggctgcggtgtttggcaatgctaattcaatgccgcaacatatagttgaggccgaggataaagaaaagacattttaagtttgtagtaaaagtggtctctgctggggaagggttttctttttttttttttt

SEQ ID NO: 20560 - DNA, 481 bp, Homo sapiens
  misc_feature (1)...(481): n = a,t,c or g
tttnaacctttgatgccctgantacgaatttaatacgactcactatagggaatttggccctcgaggccaagaattcggcacgagcagccgcgcgtccagcatcatagacgagctcttccaggacaggttcttcacccgggagccccaggatacctaccactacctgcccttcagcctgccccaccggaggcctcacttcttctttcccaagtcccgcatcgtccgcagcttgatgcccttctctccgtacgagcccctgaacttccacgccatgttccagcccttccttgagatgatacacgaggctcagcaggccatggacatccacttccacagcccggccttccagaccngccaanagaattnntnccnaggngacaataaccganttggggnccggaaaanctgccnanttnnccgggttgcttggggataaaggaaccttgggaaaattgctggnnaaaaatttnntttggaattt

SEQ ID NO: 20561 - DNA, 574 bp, Homo sapiens
gggggactatcttattaatgaggccacactctatgctaaggaatttaaacttatctgtgtgcctggtgcgggagctacggggcccagggattgtgtttaaagtagtgcttctaccaacatgtcccgtggttccagcgccggttttgaccgccacattaccattttttcacccgagggtcggctctaccaagtagaatatgcttttaaggctattaaccagggtggccttacatcagtagctgtcagagggaaagactgtgcagtaattgtcacacagaagaaagtacctgacaaattattggattccagcacagtgactcacttattcaagataactgaaaacattggttgtgtgatgaccggaatgacagctgacagcagatcccaggtacagagggcacgctatgaggcagctaactggaaatacaagtatggctatgagattcctgtggacatgctgtgtaaaagaattgccgatatttctcaggtctacacacagaatgctgaaatgaggctcttggttgttgtatgattttaattggtatacatgaagagcaaggccctcagtatataa

SEQ ID NO: 20562 - DNA, 370 bp, Homo sapiens
ggttgccttgcatgtctgttagtttgtactaaggatctgattaggaagtggccactgagctaagaagaaaatggtgcaaagaaggaaagaggccatttctggatccaatattcatcttttactaaattttcactagagagttgtcccctgtcccaaatgagatttgggatgtgaaggccagtagcctaacaggtaacaattcctggggaagactcctgagaagagtctcatgttacaaactcatgagggtccctcttctttcttgtaggcatccaggctggagaagcagaacagcacacctgagagtgactacgacaacactcccaacgacatggagccagatggcatggggtcaagccgaaagggacgg

SEQ ID NO: 20563 - DNA, 424 bp, Homo sapiens
  misc_feature (1)...(424): n = a,t,c or g
cggacgcgtgggtcgcccacgcgtccgggccaggcttgtgttcgcagccttgccggggctggggttccgatgtggtccccggagcgggaggccgaggccccagccgggggagacccggcgggccttctgccccccgagtgggaggaggacgaggagcgcatgtccttcctgttctccgctttcaagaggagtcgcgaggtgaacagcaccgactgggacagcaagatgggcttctgggcgccgttggtgctgagccacagccgccgccagggggtggtgcgcctgcgtctgcgggacttgcaggaggccttttcagctgcaaggggagcgtcccgctggggctggccacggtgctgcaggacctgctgcgtcgaggggagctgcagcgggagtcagacttcatggcagtgtanacagcaactgg

SEQ ID NO: 20564 - DNA, 356 bp, Homo sapiens
gttaaatagttgacctctgttttatcccaagttggattaatggcaaaatgatatggcccttttgaaaaagctaatgtgttgaattgcctttactgttttacagaggagagcagtcaaagttaattagaaacagctggagctaacagtaagcctcacccccatcaatgtccctaccaggagagggttaccagggagaggagcagtcccgggaatccagggaggggcctctggtcccaaaagcaggccagagttgcagagaagttttgtgtctgaaaaataagaaaggttcatttcaggtgaaacagacctaggaaccctgtgttgacaaagccccattcatatggtatgaagttccc

SEQ ID NO: 20565 - DNA, 353 bp, Homo sapiens
ccgaagtgtagagcctctctggttcaattttatgagaaaacaaacttcctgttccttatgatggtagaataagaatagttgctggctctatgagagggaggtatgaatcagaggattgtataggcttatataggctttcaaagaatcttcctgttttctgctcattgcctcacctacactttgtacttccaattgctgaatttttccaggattctgtgggggtaaataggcttgcctcctttccgtgttcccctctgtaatcagtgaggttgtagctttctctgttaagtcaattacctcgactcttttttttcaactcccccaaattgttggaaacctttcattagctattg

SEQ ID NO: 20566 - DNA, 457 bp, Homo sapiens
  misc_feature (1)...(457): n = a,t,c or g
gtgtttgttttttaaataaaagaccattttttagaacagttttggacttacaacagaattggctgaaacaaaatactcctaatttctcccttccatcccctgtattgttgccatcattcatttcacttatatataagctaaaatcattgactacactgtgctgttactattttgaacaaactgttacctgttagctcaattaagagtaagaaaaggccaggtgtggtggcttaagtctgtggtctcagcactttgggaggccagggcgggtggctcgcctggggtcgggagttcgggaccggcctggccagcgtggtgggaccccgtctctaccgaaaatgcaaagggttggcctggcatggtggtgcgtgcctgtggcccagctgctcgggagactgaggcgggaggatcgcttganctgggangtggaagttgcggtggggccggaatgcgctat

SEQ ID NO: 20567 - DNA, 337 bp, Homo sapiens
gctggaagatgaatctaaagaaattcaaattcacagagaaatgctgagatcgatatatgtgaaaaggggttaacagacattgaggacagaatgagaaggcctcacaaatttataatagaatgggaaagaggcaatatttttttaaatggccaagaatttctcagaatcattgaggcttttctttttcctttcaggaaactcaatatatcccaagaagtttaaataagaagaaatacacaattaggcattatagtgtattgcagaaccataaaataaggagattattttaaagcattcagagagaaaatacattacctacaaagaaaaacaatattct

SEQ ID NO: 20568 - DNA, 722 bp, Homo sapiens
  misc_feature (1)...(722): n = a,t,c or g
gattgtctaacaaagttgaagccattgatgtggaagaggccaaacgcctccatcgggaagctctgaagcagtctgcaactgatccccggactggcatcgtggacatatctattcttactacggggatgagtgccacctctcgtaaacggaaagaagaattagctgaagcattgaaaaagcttattttatctaagggcaaaacaccagctctaaaataccagcaactttttgaagatattcggggacaatctgacatagcaattactaaagatatgtttgaagaagcactgcgtgccctggcagatgatgatttcctgacagtgactgggaagaccgtgcgcttgctctgaagccttgtgagcaaggaaggctccctgcatgtcctgcttgctgcacgccacatgggtgtggtctgcatctcagttggccgccatcagtgtaaatagagcttaaagtcatggtttggctgcataaaaattttctaacttgggttcaataattgtagtgaagtatctgttttcatttttttcacgttataaataaaaatactatgctggccgggcgcggtggctcacacctgtaatcccagcactttgggaggccaatgtgggtggatcatgaggncatgagttcaagaccagcctatccaaaatggtgaaaccccgctctagaaagataccnnaaaattactggcttgatggatgcccctgtatnccantact

SEQ ID NO: 20569 - DNA, 79 bp, Homo sapiens
gaaggggggtggcatgaaaatttccattcttggggtatatgactgtcctgtttcccccaggccactttttttttttttt

SEQ ID NO: 20570 - DNA, 416 bp, Homo sapiens
ggagaaacgagagtctgtgtgtgttagtttcccaggctgcggggagcaaagtatgagaaactggccagaagaatggaaattgatgtctcagggttctggaggctggaagtccaaaatccaggtggtagggccaggctgtctctgaaatcttacaggggaagggcccttctgcctttcctggtgcctgctgaggctgcatcacccgtcctcacatggcctctccctgtgtctctctgtgtccttgtgtcttccctctgtgtgtgtgtccgtgtccacgtttctccttttcacagacaccagccatagtggattagggcccgcaatttaactcgattacctgtgtaaaaatctttccaaattaggtcaccttctgaggtactggggcttaagacctcaacctgtctttttgaaagggg

SEQ ID NO: 20571 - DNA, 402 bp, Homo sapiens
aaattacgaccagtggatgaaaattgttgtgcatcagatttttgcttagtgtaaaagaggttcctcacaatcaaaggctgatgattgcagtaatgagctccctgtagttggagatattggagctgaactagatattcatgtgttgaagataatatgaaagatttctgcttctggtgggagatagggttagaggtgtgtggttactcagagctcatatctaagggactttgcacatgtatgaactcctcctcctgttcacattgaggacagtgatccatctggacccaggttatctgaggttggacgtcagtatgtcagacaagtggaccaagcttcttggattaggaggacttttctatcagcatcaacatttgtaaaacatcatctccagctgggggcggg

SEQ ID NO: 20572 - DNA, 366 bp, Homo sapiens
ggggcttcccaggcctggccagcaagagcacaaacagggggccatggaggactgttgttgccgaatacagacggggtttcaccgtgttagccaggatggtcttgatctcctgacctcgtgatccacccgcctcagcctcccaaagtgttgggattacaggtgtgagccaccgcacccggctacctgtctcctcattcttaaaagatgtaaacccctcccaacactggaagaggaaacagagaccagtgcgctgtgcagtctcacttaactagaatgcacaactcctgcttttatcaccattctgggaaatccccgctgcatttcatggccagggcagcacttcatagttggaaaaggatggtgtgg

SEQ ID NO: 20573 - DNA, 327 bp, Homo sapiens
ggaaatggcaattatcagtgttggatttagttccaactacttgatttacaaaaatgtacatttagagaaggttaaaagaaacagtgagaaatgtaaacattcaaaatgataattgaatctctcagttgtgggaataattatcagagacatgcaactgaaaatgtctcacctttcatctttttttcttaattcataaagttatcttgtagaatttgatgagaccctcctagtcattctcaactggggcggtgctgtcaccgaatggtgtttgagagtgttggggctagggcacatttttggttgtcacagcaactggggtggcatttg

SEQ ID NO: 20574 - DNA, 383 bp, Homo sapiens
ggtcaggcaactgacagaggacctgttgcagttgggtagcattaatttatgtcttttgtgaatttcgttaggaatgaatgttcagtaggcctagagctagaatggttggctgggggcagaaagagaagatgagaacttgcaaaagcatctttaaaccagttgactgggaggtatggccatgtagcaagcaggccagaggaggcttttgtaccatgagaatagaggaaaatagccgcctggtggctagacaatttaggtgtagaaaacacatttatatggttctttgaatgtaacagtggtaaagaatataggtttagttgttgctgctaagtagggggaaatgacatttttatctggtatgtttgagaataaagtaaatttca

SEQ ID NO: 20575 - DNA, 346 bp, Homo sapiens
gccacggggcctcagaatcctgaaactccaggcagccactccctgtcaggtctgttaagtgagagggaaccaactggtcatttctctttagtgacatcccttcaatacaatgaacaattatatatattggttaggtaattttggagttcctggtggtggcgatagtatttatattttaccagctatttaaatgttaccacttatttgacacttttaccttgctatgtcatcgagcagctctccaaataaaaaattgaccaccaagtgtagtcatcgacgtgccttacaactagtcatcttttctctctttagaggcaaacttggttttttattccatttactaaaa

SEQ ID NO: 20576 - DNA, 389 bp, Homo sapiens
gggtttacattgtcatgtctccacaggacaatgcacatggtatgtttgtcagaacccagttggagttttgtttcccagcatccaaaggaaatccctaactttcattttttcttcccgtaagcagccccgaacacttacttataagccatctctacctgaattagcaatcatggataagctcaataactgatcatttccttatcagtttaaaccatatatattttaacactgtctctttttcacacacactagttagctaagaatgagctggggggctgggcgtggtggttcacacctgtaatcccagcactttgggaggcggaggtgggcggatcacttgaggtcaggagtttgagaccagcctagctaacatggtgagaccccgtctc

SEQ ID NO: 20577 - DNA, 306 bp, Homo sapiens
  misc_feature (1)...(306): n = a,t,c or g
gtgccctatcgccaaaacacacacatcctcaccacctctcgcccccacttctgacttgcacctccgtctctatgtccatccccaccagcttagcttgacttttgggagctagaatcccaaagatgcctttcccagagcgctctgctccagacctagcagctgcagggaactgtgggtattttatgattttggagccagagaaacaaganggagagtgacctccacaaactgagggaaaangntcgggctttggctgggcntcntntgagncgcanngcnncctnacacatttntncncttttacac

SEQ ID NO: 20578 - DNA, 375 bp, Homo sapiens
ccagtagccaataagcagaaacaatccaaatgtccatccactggtgaaatgataaaccaatgtggcctatccatacaacagagctgtgatgtagtcataaaaaggaattaagaactgatacacctacaacgtggatgaactccgaaacatgatacaaagtgaagtcgacgcggccgcgaattccagatctatgaatcgtagatactgaaaaaccccgcaagttcacttcaactgtgcatcgtgcaccatctcaatttctttcatttatacatcgttttgccttcttttatgtaactatactcctctaagtttcaatcttggccatgtaacctctgatctatagaattttttaaatgactagaattaatgcccatc

SEQ ID NO: 20579 - DNA, 376 bp, Homo sapiens
tggtgaaagagccaacccgcaaagccttttaaaaccttgaattccttacctataaactgggataaaacctatggtgtaagtctgttctgagaattacatgaaatggatttatagagttctcagtacagttcctgaaatacagcagctgacgccagtagatgttgatttccttctcctttctacttttgaacttagctgtagttattagcatttttttaatgttgaggtaaacagtttccttagttgtgcatcagtattcagtccaatttaatgttaaattatgtttttactgggagcctgttcatgaccttaaaattgccgtaaaccctttatagaacaagtcgtgtttggctaaatatataaacacagatgtatc

SEQ ID NO: 20580 - DNA, 370 bp, Homo sapiens
gccgctgacggctgcttccactgccccaatttcattcggcttcactcgcacgtccgcacggaggcggctggccgactcgggagacggcgcggggccatctccggaggagaaggatttcttgaaaaccgtggaagggagggagctgcagagtgtgaagccccaggaggcccccaaggaactcgtcatccctttgatccagaatggccatcgcaggcagccaccagcccggccccctgggccatccacagatactggggccttggcggatggggtggtgtcccaggctgtgaaggagctcattgcggaatccaagaagtctctggaagagagagagaatgcgggtgtcgaccccacgctcgctatccccatg

SEQ ID NO: 20581 - DNA, 478 bp, Homo sapiens
  misc_feature (1)...(478): n = a,t,c or g
gacattctgtgtacatcatagtcatccagcacaagtagcctacagcagtgaagcagccagcacacaggtactggagttagtcacctggctccacagccctgcaatgccacttcccagctactaatggtgggtgcttcttaacctaaccaaacttcagtttttttcaccagtaaaaaggggatgatatcacttacttcacagggttgttgtgataacaatgctaccttcttgcctgtctggcaaaaaaggatgaattaaaaaattaattatataataatcaattctagggtagtgttcagcaaaaaaacacagactcattagaatcactgagacagagttgaaagggacctcagagtttttcactatataaaagaagaaatgaatagggaaagtgacttgaagtcattgagaaaaatgaatcacacccaaaatgnccaaatagaccctatcactgnttcttggatttanaancctatct

SEQ ID NO: 20582 - DNA, 379 bp, Homo sapiens
attttctgaacaaaagagggcgtcttcttagtcctctgtccctaagtttaaaggactgatttgatgcctctccccagagcatttgataagcaagaaagatttcatctcccaccccagcctcaagtaggagttttatatactgtgtatatctctgtaatctctgtcaaggtaaatgtaaatacagtagctggagggagtcgaagctgatggttggaagacggatttgctttggtattctgcttccacatgtgccagttgcctggattgggagccattttgtgttttgcgtagaaagttttaggaactttaacttttaatgtggcaagtttgcagatgtcatagaggctatcctggagacttaatagacatttttttgttc

SEQ ID NO: 20583 - DNA, 396 bp, Homo sapiens
aaaacaaggacgagtcttcagatgatgaagataaagaaagtgaagaggagccaccaaaaaagacagccaaaagagaaaaacctaaacagaaagctacttctaaaagtaaaaaatctgtgaaaagtgccaatgttaagaaagcagatagcagcaccaccaagaagaatcaaaacagttccaaaaaagaaagtgagtctgaggatagttcagatgatgaacctttaattaaaaagttgaagaaaccccctacagatgaagagttaaaggaaacaataaagaaattactggccagtgctaacttggaagaagtcacaatgaaacagatttgcaaaaaggtctatgaaaattatcctacttatgatttaactgaaagaaaagatttcataaaaacaactg

SEQ ID NO: 20584 - DNA, 513 bp, Homo sapiens
  misc_feature (1)...(513): n = a,t,c or g
gctggaagaattggtcaaatttttggtacaagccctcaacaagagtaactgctgtgggatgaccttgggcacaggtggttccatttcccctaggatggtatacccctcctaagggactacactgtatgttggttctataccaggacaaggatgcatgcggaagtaagacttgtaagagtctgtgatcgctctttcccacattccagagctcagatcccagagcaatatccttgttctctatagggaatatgaaccacttctcttgcctctctaggcaggaggaagagttcaataatcctgtgggagaactctcaacttctgcctacatcctaaacatcactggtgagtcaagcaatggcaattactcagctctccatacaccccgggctgatgtctggtggtattgtgggaaatggaacctctgtaacctgttaccatccaatgggactaagacttgtgctttagtccaattgggcaatcccttcaacctggcattcatangatnccannaat

SEQ ID NO: 20585 - DNA, 406 bp, Homo sapiens
cagctatgacatgattacgaatttaatacgactcactatagggaatttggccctcgaggccaagaattcggcacgagatctaaattatgtgcatcctacactagcaagaataggagtgctctacgctcttgctaaaggtaaattgtttgccagttctttcagaatcgtggttgagaaaatattcatggagtatggacattcagtccatttgtagtctgaatattaaaattgtgtcttttcatcacgctaaaatacctgcacaagttttttggagacagggtttcgctcttgttgcccaggctggagtacaatggcgtgatctcggctcactgcaacctccgcctcccaggttcaaccgattctcctgcctcagcctcccaagaagctgggattacaggcgcccacc

SEQ ID NO: 20586 - DNA, 496 bp, Homo sapiens
  misc_feature (1)...(496): n = a,t,c or g
ctttgaanccattgctatgacatgattacgaatttaatacgactcactatagggaatttggccctcgaggccaagaattcggcacgagggtatggacagtgctcaagaggaagggacagtgcaagccaccagcagccaggactccacgaaccacacacaagccttgttgaagcaaaggcaggtccagaagatagaagataaactcctcttccaacctccagtatcagccctgggtgtgtgcccaccctggaaggcctggaccccggggccagcctttgggccattgtggccgggggctattgctgcaaccttctggaggatcaatgagctgcattctctacatctggcctggctcctgtcccaggcgtgcttcaatttccccttctggcagagacctctgggccccattcagttgaagctgccagggcagaatcctttgcccttaaatctggagtggaagcagaaggagctggctcctctgcctagtgcagaaagc

SEQ ID NO: 20587 - DNA, 334 bp, Homo sapiens
gtgaacacaaagcaaaactacccctcatcccaccacctagagagaatcgcagtgagattttgatatattatcctctcaggttttactacatatgtgtatagataacaaaaatccttttattttatttcatttcatttcatttatcttgtttggagactcgctctgtcgcccaggctggagtgcagtggcacaatctcggttcactgcaacctccacgtcctgggttcaagcgattctcctgcctcagcctcccaagtagcagggattacaggtgcccgccaccatgcccagctaatttttgtatttatagtggaggcagggtttcaccatgttg

SEQ ID NO: 20588 - DNA, 338 bp, Homo sapiens
gggaagaaattctgttcttctgtgaggcttgggtgatatcagtaatcctattgaggagagagcatattgaatcctctgactttgggcaaataatttagtctccaggtcccaatgcccttgtctgtgaaatgaagagaatacttacccttcccgggtggatttaaaaatctgtgaggaaggccaggtgcggtggctcatgcctgtaatcccagcactttgggaggctgaggcaggcggatctcctgaggtcaagagtttgagaccagcctggccaacatggtgaaaccccatctctactaaaaatacgtaattggctgggcttagtggcacatgcctga

SEQ ID NO: 20589 - DNA, 189 bp, Homo sapiens
  misc_feature (1)...(189): n = a,t,c or g
gggataaaaacatactcagactgttctaacaagttctaccaaacattaaatgaagagatatgctaatcttaatccattccagaaaaaagaaaaacagcaacactttcttaactctttttataaagttaaattacaatctggataccaaaatcaggtgaagtgaggggagtntgagaaaggaaaattata

SEQ ID NO: 20590 - DNA, 508 bp, Homo sapiens
  misc_feature (1)...(508): n = a,t,c or g
cttgaanccanagctatgacatgattacgaatttaatacgactcactatagggaatttggccctcgaggccaagaattcggcacgagcggcacgagcctcctcttcctcctccttctcctccagctccccgcatccttccttaaccttaacctctctgggctctaccagtaaatctcgtttcattctggtttcacttcctcatgtgtctcacctgacacacacgcacaaacctaactcagttccccaatccctgctagggctctcctagagtgacgctacttgccttatggccctctcaagatagagatcccaagaccaattagaaagtaaatataacaataaaaatcacaacaaagtgacaataccaaatgctggtgaggatgcagctctccctcatcctcactcatatactgctgattggaatgtaaaatgtacagttactcaggaaaacagcttgcagtttcttacaaacattaacatgcaactaccatatgacccagtgattgc

SEQ ID NO: 20591 - DNA, 330 bp, Homo sapiens
gatcatgagggaggatgaagctgtgaaggtaggaggctagcttcctgtactgccattctgaaaaggccttcctagtacacagcgcaatgctctggtagtgttcacatattgcctggccaaaccaatgaccattggaactcaatttaggagggaggctgggaatattctcctatgaagatagatgaggtagaacagtgaggctgaggagataaaaggcaaacaagggcaatagaatcctcagcctttcttgtgtgggggcacagaattaaacagtttcctttctgtagttaagagatatgtggatcattgatccatttgattttgatgagc

SEQ ID NO: 20592 - DNA, 269 bp, Homo sapiens
gctgggaatgatatcaaatgcaatgtgaacatcccataatcgaaacggataatgacacactggtgagtgaagggacatcaggatcacaggttcaaaggcaaggagacccttgtccaaggagcatgcctgggagagcagggagaggtggtgtccagccactgccctttaagtaggggaaaagtgagtgcagaggattgaaccagagaacagaagctgctaacctgacggaaaatagacctggtgagggaaggttagtggaattggcgtgg

SEQ ID NO: 20593 - DNA, 336 bp, Homo sapiens
gctgtcttcatcactcactctatgctcagactatgccactgtaaatattcttcctaacatctttaaatcgccttttcctcagttttcaaggggaaggtcatttgtaaagcacgttaggtggttaaatcagttattgcggttttctcttactgcaagcctttttaatcacccccaggctgcattttattctatatcgccttttttcttcaaatctgctccaatcactcacttctctcttataagctaatcctgcctcacaccttaaatctgtttcagtgatcaagggcagaactcattgtggccttatctttctttgttgtaattgttcactgtctc

SEQ ID NO: 20594 - DNA, 331 bp, Homo sapiens
gcggcacgagtatagagggaggcgaaaaacaggggaagcctatgtgcaatttgaagaaccagaaatggccaaccaagccctgttgaaacacagggaagaaattggtaatcgatacatcgagatatttccaagcagaaggaatgaagttcgaacacatgtcggttcttataagggaaagaaaatcgcatcttttcctactgctaagtatataactgagccagaaatggtctttgaagaacatgaagtaaatgaggatattcaacccatgacagcttttgaaagtgagaaggaaatagaattgcctaaggaggtgccagaaaagcttccagag

SEQ ID NO: 20595 - DNA, 258 bp, Homo sapiens
cggggacctggggagcccggcgggtcggtatcgcggggggtactagtggcgccgccgccacagacaccaacgccgtcgccacctctgtatccatgatggacttggtgttggaagaggacgtcaccgtccctgggacgctcagcggctgcagtggccttgttcccagtgtaccagatgacctggatggcatcaaccccaatgctgggttgggaaatggtctgctcccaaatgtgtcagaagaaacagtgtctcccacca

SEQ ID NO: 20596 - DNA, 332 bp, Homo sapiens
atgactaataaattgaaattcaaaaacagccatgaatacaggcaagaaaagtttctctaaataactattctgtaaaagaaatgaagatttcacatacttgaaattactgctcagccagccacataagtagtttccttatgcttgtaagccagatgtttgatcagtatattagtaaataaaaagctgagcttacacaagtatttccttggcacactgaactttctttttgaaacatatcactctgttacccaggctggagtgcagaggtgcaatcctggctcactgcaacctccgcctcctgggttcaaatgatcctcctgccttagccttcc

SEQ ID NO: 20597 - DNA, 365 bp, Homo sapiens
gcaagtgttttgtgagctgtacaaatgttcttttcaccacatttttaaaaagtcacacgaaaggctgggcgtggtggctcacgcctgtaatcccagcactttgggaggccaaggcaggctgatcacgaggtctggagttcgagaccagcctgaccaacatggtgaaaccccgtctctacaagtacaaaaattagttggatgtgattgtgcgcatctgtaatcccagctacttggggggctgagacaggagaattgcttgaacctgggaggcagagcttgtggtaagccgagatcacgccactgcactccagcctgggcgacagagtttggctctgtttcaaaaaaaacaaaaaacaaaaaaaaaa

SEQ ID NO: 20598 - DNA, 165 bp, Homo sapiens
gattttaataaaagagaccagcttaaaaaatacaattataaaatttgtagagcaattataatctaattccattttaaagaaagaagacatctttacagaacattcagtgggatgcctttggctggggcaaggagccagcctccaccctcagctgcctagccttct

SEQ ID NO: 20599 - DNA, 430 bp, Homo sapiens
  misc_feature (1)...(430): n = a,t,c or g
gcaataattttctgcctgtttgtcattgtatatgctttaanagaaagtaatgaagtaggaaatttagacaattaaatggttgttatgtctacatgagaccaaataatagccttactgattattattattttttttttggaaggactaagtaatcctgttttaaagattcatgttttaagtttcactacttaatttttatttcagggacaggaccaattcagaccaggttaaagtttataagagaaaaataaatatancaaangtttattgacttcccacactacctgtcaggtagtatattgggtgttgctaaggtatcacagtaaatgagataagtttttgctctttcanacctttaagttcagtgaaancaagaggataaatgtgtctattaatccaattagtcaaattctgaaagcncaaaatgtta

SEQ ID NO: 20600 - DNA, 354 bp, Homo sapiens
atctgctgttacctcagactcagaactgttccagccctgtcccagagctcagctgaaagcacagtattgatggagagtttttctccattcttacacatctatagcaaatagatggatacctatgctgtgtcctactgggggcctcttttgtaagtttctgtagtttaccgaagctttgggattgtgcaattggctaacagtaaggaatgtttgaaaaaacagccttgggaaaaactcatagtatttactttaaggatattaaggtcgatttcagtatctctaactgccctcagtgagaagccatgggtaaacattctctctagtctcaataatgagaataggcgtgtttttccc

SEQ ID NO: 20601 - DNA, 355 bp, Homo sapiens
cccatattcaaaactcacctactcagaaaactgcaaacccatagttgctaacaatcctatttaaccattaagaaaggatttacaacaataaaagctatgtacataggaaatatcagagagtagaaagtgctaaccagaggtacccagaaaagctttctgtgactgaaacaatacttcctgtctaaggttcaggagtaagatgcttctttgggggctgagaaattaacatgagaaacctttggtatccaaattggatttctgagctctttgccacggcatttttggctagtctaaaacaatcatttggagaaagcaacaccaaggatgaggaggaaggaattctcaacctcggacc

SEQ ID NO: 20602 - DNA, 362 bp, Homo sapiens
gagaaatggaggcagaggttaagaaacttgcctaaggtcagacagttggtaattaatagcactgggatttgaatccaaacatgacaccagagcctgtcctcttaccacagggatatgcttcccatcagcatgttactcagtaaaattggctctaagttttggcttatgtaattcccagatcaatttgcctactcttgaacctgtttgttggggctgtttcttctttccttccacatgtaatcactagattctggtcacaatttacctacctgctgtcaagtcttatctgcttggattcctgaccttttctccaggctttctaactccaaacagggagggattccttcagcaagtaatgaact

SEQ ID NO: 20603 - DNA, 477 bp, Homo sapiens
  misc_feature (1)...(477): n = a,t,c or g
ngngnnnttgaancctttgaaaaccnctatgacatgattacgaatttaataccgactcactatagggaatttggccctcgaggccaagaattcggcacgagcctggattgtgaaatagtcagtgccaaatcttccgagatgaatgtcctcattcctacagaaggcggtgactttaatgaattcccagttcctgagcagttcaagaccctatggaacgggcagaagttggtcaccacagtgacagaaattgctggataagcgaagtgccactgggttctttgccctcccttcacaccatgggataaatctgtatcaagacggttcttttctagatttcctctacctttttgctcttaaaactgcttctctgctctgagaagcacagctacctgccttcactgaaatatacctcaggctgaaatttggggtgggatagcaggtcagttgatcttctgcaggaaggtgcagcttttcata

SEQ ID NO: 20604 - DNA, 475 bp, Homo sapiens
  misc_feature (1)...(475): n = a,t,c or g
tgaatncaacnatcncttcagctatcacatgattacgaatttaatacgactcactatagggaatttggccctcgaggccaagaattcggcacgagaactgtgtaactgaattttcaatgtgaccacatgatacacatcttgaagcatatctgctactgtagcatcaggggcatctgtcacgtaagacagtggaactggattccactttccaacctggattagccctttggcctgggcagcagagctatgtgaataacctagagacagcaatgccatttcgatcagctggttgaaaagcatatcctttctcaccagcacaaattctgcatgctcctccttgcaatcatattcaatggccgttttcataatgttccaccacacagaaaactggcagcatggttcctttcctaaggttggttttcatcagatggcccgagtgttttaaaggcactccctgcatttttgcacctgtact

SEQ ID NO: 20605 - DNA, 374 bp, Homo sapiens
gcttttctctagcttactttattgtaagaatatagaatataatacatgtaacatataaaatatgtgtcaatcgaccatttatgttattggtaaggcttcctgtaaacagtaggctattaggagttaagtttctggggagtctcaagctatacatagattttttactacatggggggtcagtgtcccaacctctgaattgttcaagcattaactgtattttctcacagtcctagaggctgaaagtccaagaccagggttccagcgtggtcaggttctggtgatggttttcctcctgactgcagacaggaggccttctcactgtgtcctcacatggcctttccttagtgcatgtacagagagacggagagagagtt

SEQ ID NO: 20606 - DNA, 423 bp, Homo sapiens
gggaaatgaaacatttgataggtttagccctaaaagtacctaacaccactacctcccttgtgcttaatgatccatgctttttgggactccagacagcaaacaaagtgccaggctgaaaatgacacaagccaggcacggtggctcatgcctgtaatcccagcactttggaaggccgaggcaggtggatcatctgacatcaggagttcgagactggtctggccaacatggcaaaaccccgactctactaaaaatacaaaaaaattagctgtgcatggtggcagacccctgtaatcccagctacttgggagaccgaggcaggataatcgcttgaaccagggaggccggaggttgcagtgagctgagatcgtgccactgcactccagcctgggcgacagagtgagactgccttaaaaaaaaaaaaaa

SEQ ID NO: 20607 - DNA, 316 bp, Homo sapiens
gactgaatacatggagaatggagatctcaatcagtttctttcccgccacgagccccctaattcttcctccagcgatgtacgcactgtcagttacaccaatctgaagtttatggctacccaaattgcctctggcatgaagtacctttcctctcttaattttgttcaccgagatctggccacacgaaactgtttagtgggtaagaactacacaatcaagatagctgactttggaatgagcaggaacctgtacagtggtgactattaccggatccagggccgggcagtgctccctatccgctggatgtcttgggagagt

SEQ ID NO: 20608 - DNA, 580 bp, Homo sapiens
  misc_feature (1)...(580): n = a,t,c or g
accttttttcccttatgaggactatcaattctttgggggtanttctccatctctgggggcccatttcctggaggggattttctgttncntggtgattgcccatatctgggggcgtcattggtcccttggggganagtcttaagttccttgaaagtttccatggggggctgttctctgggttggggggtctcattcttaangggggcntangnagcttctcngttnannanagganccnncctcaatcatttcnngtttcngggatatgcnnctttctggataaaccttcnctttccagtgaccccttttgtggaacctcntcccttnaggacntccngatcntcagtccctcanacangtcannatgtttggnancnnaccatcgacttngntntnccaaaccaagggtncnncccaatgtcaagggancccccggngcattcaattaaggggcccaccctaatgctttcnggaanccntaattgcctagggancacgggcttnttnnaactncccgatggaaaacaggnaattcaaaccanntggnattcaaaagggtcaaanngctgtgnnacttctg

SEQ ID NO: 20609 - DNA, 975 bp, Homo sapiens
gattacacatgccctgaaacatgtatctgatgacatgaagactcacaagaaccctgccctgaaggctcagagtggtccagtacgcagtggccccaaaccattctctgcacctaaaccccaaaccagcccatcccccaaacgagccacaaagaaggagccagctgtacttgaactggagggcaagaagtggagagtggaaaatcaggaaaatgtttccaacctggtgattgaggacacagagctgaaacaggtggcttacatatacaagtgtgtcaacacgacattgcaaatcaagggcaaaattaactccattacagtagataactgtaagaaacttggcctggtattcgatgacgtggtgggcattgtggagataatcaacagtaaggatgtcaaagttcaggtaatgggtaaagtgccaaccatatccatcaacaaaacagatggctgccatgcttacctgagcaagaattccctggattgtgaaatagtcagtgccaaatcttccgagatgaatgtcctcattcctacagaaggcggtgactttaatgaattcccagttcctgagcagttcaagaccctatggaacgggcagaagttggtcaccacagtgacagaaattgctggataagcgaagtgccactgggttctttgccctcccttcacaccatgggataaatctgtatcaagacggttcttttctagatttcctctacctttttgctcttaaaactgcttctctgctctgagaagcacagctacctgccttcactgaaatatacctcaggctgaaatttggggtgggatagcaggtcagttgatcttctgcaggaaggtgcagcttttccatatcagctcaaccacgccgccagtccattcttaaggaactgccgactaggactgatgatgcattttagctttgagcttttgggggttattctaccaacaaacagtccattggaaagaaaacagtcc

SEQ ID NO: 20610 - DNA, 434 bp, Homo sapiens
  misc_feature (1)...(434): n = a,t,c or g
ggagatggagtctcgctctgtcccccaggctggagtgcggtggcactatcccagctcactgcaacctctgcctcccaggatcaagcgattctcctgcctcagcctctcgagcagctgggaccacaggcgtgcaccaccacacccgattaagttttgtatctttagtagagacggggcttcaccatgttggccaggctggtctagaactcctgagctcaattgatccgcctgcctggcctcccaacgtgctgtgtttacaggtgtgagccatcatgcctggcctgcttaaccattcttttaagcagccttttaaaaatataggttgggtgcagcagcatgcacttgtaatcccagcactctgggaggccgagatggtaggattgcttgagcccagggaggattactttgagaccagcttngcaatacagcaaaaa

SEQ ID NO: 20611 - DNA, 449 bp, Homo sapiens
  misc_feature (1)...(449): n = a,t,c or g
ggacaagacatgatgaaggaggaatagagggggttaagaggtaaaggcagaagtctgtgagcaagcagtaccagtggctagaatgttgtgcaagctgagcaggatcagatagatgatagttctaagcagaaaaagtgctgtttggcttcctaataattggaaactggtcagagccagagaaataaatgtgtagaccaagggggatccaaagtatggcagacagaattttccacgatggctgcagcaagatttctgttccacacgctcatctccaatgtgatattggcactccttccatcaaaaggtgggacctatgttttctacccttgaatgttggtgggttggtgactatggttgaagtgatgttttctagactatggcataaaggtgatagacttattacctgggatactattgggatgcgactcttgaaacctancaccatacgg

SEQ ID NO: 20612 - DNA, 394 bp, Homo sapiens
ttgattgattacgaatttaatacgactcactatagggaatttggccctcgaggccaagaattcggcacgagagtgacatgatcttggctcactggaacctccgcctcctgggttcaaatgattgtcctgcctcagcctcccaagtagctgggattacaggggtcctccaccatgcccagctaatttttgtatttttagtagagatgggttttcaccatgttggccaggctggcgttggactcctgacctcaggtgatctgcctgcctcggcctttcacagtgctgggattacaggcatgagccaccatgcccagccaagaaattgatttcattggtccagggtggataccactatattttaaaactcctcagctgattgtaactagcagccatt

SEQ ID NO: 20613 - DNA, 391 bp, Homo sapiens
ggacattctgtcatttcaactcttcgtcttcagctgggtcctgctgtcttatcttgatctgttttcctaccataaatgtgaggctggggacctttaaattcaatgaaattcaattcctgtttgcctagcatatcccagccacaagtgacaaatttattaactgtaaaaaagcaacagtctctgaataagacagctgcttgtcttttggttgttttgttagactgagaagcaagatcgcccagaacttgaagatttcagtctctcacattgataaaagttaaaagtacacacatgggcttcctgtttagcatttctgctgtcagagccagctttagttagatgaaacccctccccaaaacaaagccaaacactgctcttttcatcttaggga

SEQ ID NO: 20614 - DNA, 427 bp, Homo sapiens
gtgtctctataagagattaaagtattcagtatgttccccccatattgtgtttcattttcatttgtagaacttttcagtgtctggttcttccatttaactagctttgaaagttaggcaacttgtattccctgagcttcaacttagttttccctcaaggtggatgataatagcaatgcctggtcaccttgcagcattagtgtggtgatcaaaatcaaatctgcaaactctgatgtgtcacatgtacatagagaattaatatatttttgtggtgactgacatgattgattacttattttaagtatactaccagctattaattttttttcaagtactcacaacttgttatgtgcggctctcagcccttacatataatgattcatttatttcccataataacctttttaaggggacactactattatcctca

SEQ ID NO: 20615 - DNA, 516 bp, Homo sapiens
  misc_feature (1)...(516): n = a,t,c or g
nnnnnntttgnnnntttganncccagctatgacatgattacgaatttaatacgactcactatagggaatttggccctcgaggccaagaattcggcacgagtcaggattgagacccggaaggcttcaaaggctgtcgcaaggaggaagaactggaagaagttcgggaactcagagtttgacccccccggacccaatgtggccaccaccactgtcagtgacgatgtctctatgacgttcatcaccagcaaagaggacctgaactgccaggaggaggaggaccctatgaacaaactcaagggccagaagatcgtgtcctgccgcatctgcaagggcgaccactggaccacccgctgcccctacaaggatacgctggggcccatgcagaaggagctggccgagcagctgggcctgtctactggcgagaaggagaagctgccgggagagctagagccggtgcaggccacgcagaacaagacagggaagtatgtgccgccgancttgcccaacgggccagcc

SEQ ID NO: 20616 - DNA, 516 bp, Homo sapiens
  misc_feature (1)...(516): n = a,t,c or g
gtacagcaggaaagcagccacagataatatataaatggacggatgtgttccaataaaactttatttataggaacaggcagtgggccagattcagcccgtgggccataggttgccagcctctgactctggtgttcagatcacagactttggatgtctcatatctgaatctttctaatctcgtgatagggcaaggtaattaaaatgttaatacgttagttttctcactgtcaatgtgttctatgacatcatttatgcaaagcatacaaagctgagaataaagtctcaggcaaatgctagtttcctggcctccttatacatacttacaaaggatggtgggagatagtttgagatttgaggcctctgaagaatangtgtttttgtgatgattttggcttttcagtttgacagttggtttgcttttttgacagacacattaanagcttcaagggncanttcatgggttgtcctttccatgtcanggacacctttcacgtggcaatttaagcacangaattg

SEQ ID NO: 20617 - DNA, 417 bp, Homo sapiens
  misc_feature (1)...(417): n = a,t,c or g
gaactggatattggcatttgatcgggtccctttgttgatcatggtgggattctggatagcgaacaccagctgccctccaggataggaggcgctcagttgtgacccctgaatctgaagtatatttcctttggaggacaagattccaaagctattcttgccggggctgagagggagaggggcaggtttgatagggacaagtttccgcggtgtgggctgtgggggagcaggaggtgtcacagcagcttcaactgctggagggccaattttgctacatgttgcagcaagcagggntaagggagatggctgggagtcctgggtggtggaggcggcaggctgcaggtagtcactgggactcacagcagcagtggcagccatgctggtctgtggatcgntcattacgacatcttcctccctggc

SEQ ID NO: 20618 - DNA, 514 bp, Homo sapiens
  misc_feature (1)...(514): n = a,t,c or g
gctatgacatgattacgaatttaatacgactcctatagggaatttggccctcgaggccaagaattcggcacgagaatcagtgggttgaaggatatgagaatttgggataaaaggttcatcagtttttattaccaccaacatgggtattgagattttcttttattttacattattgccagctctgaaggttattgttcttttacatttttgtatgttgggcaaaatatctagtttacaattaatatattttatttgtttgtttgttttgttttgtttgagacaggatctcatacttttgcccagtctggagtccactagtgcgatcatagctcactgcagccttgagctcctgggctcagcagtcctctcaactcagcctcctgagtagttgggactacaggtgcgtgccactgcacccagctaatttatttttgtagcaacatggngaaactgctctacaaatacaaaaaaaaccccaaccaaccaaacaaaataggcatggnggngagccctg

SEQ ID NO: 20619 - DNA, 362 bp, Homo sapiens
gagagcgcgcagagtccagactggcggcagggcccgaggggctgacccgcagcgtccctggtctctccagccctcactcggaaccgcacacagtgacaataccctcccctcccttgggctggacccctctctacagctaggagccaatggcagaagacaaaaccaaaccgagtgagttggaccaagggaagtatgatgctgatgacaacgtgaagatcatctgcctgggagacagcgcagtgggcaaatccaaactcatggagagatttctcatggatggctttcagccacagcagctgtccacgtacgccctgaccctgtacaagcacacagcacggtagatggcaagacatccttgtgga

SEQ ID NO: 20620 - DNA, 514 bp, Homo sapiens
  misc_feature (1)...(514): n = a,t,c or g
tnnnntnnntntttgaancccttggatgacatgattacgaatttaatacgactcactatagggaatttggccctcgaggccaagaattcggcacgagcacttccacagcccggccttccagcacccgccaacagaattcatacgagaaggcgacgatgaccggactgtgtgccgggagatccgccacaactccacgggctgcctgcggatgaaggaccagtgtgacaagtgccgggagatcttgtctgtggactgttccaccaacaacccctcccaggctaagctgcggcgggagctcgacgaatccctccaggtcgctgagaggttgaccaggaaatacaacgagctgctaaagtcctaccagtggaagatgctcaacacctcctccttgctggagcagctgaacgagcagtttaactgggtgtcccggctggcaaacctcacgcaaggcgaagaccagtactatctgcgggtcaccacggtggcttccacacttctgactcggacgttcctt

SEQ ID NO: 20621 - DNA, 420 bp, Homo sapiens
  misc_feature (1)...(420): n = a,t,c or g
ggaccactggaccacccgctgcccctacaaggatacgctggggcccatgcagaaggagctggccgagcagctgggcctgtctactggcgagaaggagaagctgccgggagagctagagccggtgcaggccacgcagaacaagacagggaagtatgtgccgccgagcctgcgcgacggggccagccgccgcggggagtccatgcagcccaaccgcagagccgacgacaacgccaccatccgtgtcaccaacttgtcagaggacacgcgtgagaccgacctgcaggagctcttccggcctttcggctccatctcccgcatctacctggctaaggacaaagaccactggccaatccaagggcttttgctttcatcaagcttccaccgccgcgaggatgctgngcgtgccattgcccgggtgtc

SEQ ID NO: 20622 - DNA, 364 bp, Homo sapiens
ggggtgttaagtttgccattattattattattactatgtgggagtctaagtctcttttgatcacactttaaagaccaaaaggtagaagcgcaaagacgttatctgtccaatattacaaacctagtaagtggtggaatttggccttgaacccagatctgtaactccagagccgaagtgcttcacccacctccctgtggtgcctctacagaaaaagagagttcaagatttcaacattttaagataatctgaaaaaaattggaatgtgcccccagctgccaatactctctcaacactgtttatcaaaggaaccaatatggaaggaaaaacattgctttgaagggaagatggatggatcccctagtaa

SEQ ID NO: 20623 - DNA, 435 bp, Homo sapiens
  misc_feature (1)...(435): n = a,t,c or g
nnaacagctatgacatgattacgaatttaatacgactcactatagggaatttggccctcgaggccaagaattcggcacgagtagcacagcagagtgaaacactttaaatagcacttgttccttgagtatatatggaagaaagtgaagtattggtaagtgttcagctgatatgagcagcatctcaggagtctgcaattcttgaattaccagggagtatttttaccattttcccccagtgaaaggcctattttgagagacttaccctccaaaatgaatgtattaagtcatattactttttttttgttttnnnnnnnggccttgctctgttgcccaggctggantgcantggcatgatagttacaggaaaggggtcccaatncanacccnaacagagggttcttggancttgtgcaacannnggnnanaaaancttta

SEQ ID NO: 20624 - DNA, 434 bp, Homo sapiens
  misc_feature (1)...(434): n = a,t,c or g
ggnnttnnngttnnntctnngaancccatcggnaanctcnttatgacatgcattacgaatttaatacgactcactatagggaatttggccctcgaggccaagaattcggcacgagagcttcctttgcactagcatctgaaactatatccagaatgacactggttttcataaaagtgttgatcctcacacctctttatagtcttgcacctagcccagtggagtgaaacactttaaatagcacttgttccttgagtatatatggaaaaaagtgaagtattgataagtgctcagctaatatgagcagcatctcaggagtctccaattcttgaattaccagggagtatttttaccattttcccccagtgaaaggcctattttaagagacttatcctccaaaatgaatgtattaagtcatgttcctttttttttttttt

SEQ ID NO: 20625 - DNA, 358 bp, Homo sapiens
gcagtaagaagggagcacggaacagattcaagctcagatggagtctcacactgtcacccgggctggaatgcagtggtgtgatcttggctcacctcccaggttcaagcgattctgctgcctctgcctcccgagcagctgggattccaggtacccaccaccacacccagctaattttttgtattttcagtagagatggggtttcactatgttggccaggctggtcttgaactcctgacctcaggtaatccgcctgcctcggcctcccaaagtgctgggattacaggcgtgagccatcatgcctggcctcaaagatcatttcttagagaagaacagctagctgctctgtcaccattaatga

SEQ ID NO: 20626 - DNA, 102 bp, Homo sapiens
gggtaggtgtggggctgatgtttgttgaagaaaggaagttttttttaatctagattacaaaaacagttttccaagtggatgaaaccatgttatatgaatgaa

SEQ ID NO: 20627 - DNA, 315 bp, Homo sapiens
gcaagatcacgggtcactgaaacctccacctcccagggctcaagtgatcttctcacctcagcctcctgagtagctgggaccacaggcatgcgccacagtgcctggttaatttttgtattttctgcagagatggggtttcactatgttgcccaggttgatctcaaattcccgggctcaagcaatccccccacctcggcctcccaaagtactgggattacaggcatgagccactgtgcctagccatatatccttctctctcttatcctactccagtctggctttggtccgcacttgttcactgacattcctctctgg

SEQ ID NO: 20628 - DNA, 517 bp, Homo sapiens
aacagctatgacatgattactaatttactacgactcactatagggaatttggccctcgaggccaagaattcggcacgagggggtgaggaacatataacgtactttttatttcataagcatttcttctccaaagtacctcattgaaacaccttccatttcctatcactgtcagggagaaaaaaaaggtacttatatacagcccatcttttgattctgcctataataccttttcagtgcccccaacttctaatctacttcttatttaaaaattagataaaggggtgcagaaagcattcccagacagtagaagtagtttgctaattctgaatataaatgctcagaatttatactaaaattttttttttgagacaaaatcttgctctgctgtccaggctggagtgcaacggcatgatctcagctcactacaacctccgctcccaggtgcaagcgattctcctgctcagcctcccgagtagctgggactacaggcatgtgccaccacgcttggctaattttt

SEQ ID NO: 20629 - DNA, 584 bp, Homo sapiens
  misc_feature (1)...(584): n = a,t,c or g
gcccgcttccgctctctggccgggcttgggctgcgtggagaatactttttgcgatgcctactggagactttgattcgaagcccagttgggccgaccaggtggaggaggagggggaggacgacaaatgtgtcaccagcgagctcctcaaggggatccctctggccacaggtgacaccagcccagagccagagctactgccgggagctccactgccgcctcccaaggaggtcatcaacggaaacataaagacagtgacagagtacaagatagatgaggatggcaagaagttcaagattgtccgcaccttcaggattgagacccggaaggcttcaaaggctgtcgcaaggaggaagaactggaagaagttcgggaactcagagtttgacccccccggacccaatgtggccaccaccactgtcagtgacgatgtctctatgacgttcatcaccagcaaagaggacctgaactgccaagaggangaggaccctatgaacaaactcaanggccanaaatctttcctgcgcatctgcaanggncacactggacaaccgctgccctanaaggtacctggggccatcaaaagg

SEQ ID NO: 20630 - DNA, 419 bp, Homo sapiens
gggtagcatgcgcctgtaatctcagctacttgggaggctgaagcaggagaggtgctggaacctgggaggcggaggttgaagtgagccgagattgcgctattgcactccagctcgggcgacaactgcaagactccatctcaaaaaaataaaaataaaagaaaagaaagaaatatgtgcactacctaagttttgtctttagaaaaactatccacctataaaaaattaccttgacaaaaatagttccggtttgactaatcattttgtttctttaagtggtaagtgtatgcaaggtggatccttgatgagccaacattgcactgtggatacatatctatgtttacgcgctattagaacagaaggcgctgtatatagaaatgttgcttgaagcatatttgcaaaacacgcagacttctgtatcg

SEQ ID NO: 20631 - DNA, 486 bp, Homo sapiens
cttgaatgaccccgaatttaatacgactcactatagggaatttggccctcgaggccaagaattcggcacgagggctcggcgtggcagttgtggcgacagtcttattccaaccccaaatagaataccctggggtcagaactaaggagagccatgaagaaaagagccttttgtccctctgtgtccctccctccctttcctggaaagtataaagtgccaatttacctcacaggccccttgcaaagactcaacttatttagggcaactttattcttctccaggtctgtgcttgatgtagcccggcagttctcatcctaggttgagccgagcctggagtctaaaatttatgaccctgggagtggttttggtctgagcatatgccaggaaacatctacaatctgaaagtgtttgactgacaataaccagtgtctcacagcatttatgagcatgccaaataaacaattgaaaacattcaaggaaattcagttt

SEQ ID NO: 20632 - DNA, 356 bp, Homo sapiens
cgcaagagcagccgcggcgccactatgccgacaaaaggatcaaggtggcgaagcccgtggtggagatggatggtgatgagatgacccgtattatctggcagttcatcaaggagaagctcatcctgccccacgtggacatccagctaaagtattttgacctcgggctcccaaaccgtgaccagactgatgaccaggtcaccattgactctgcactggccacccagaagtacagtgtggctgtcaagtgtgccaccatcacccctgatgaggcccgtgtggaagagttcaagctgaagaagatgtggaaaagtcccaatggaactatccggaacatcctgggggggactgtcttccgg

SEQ ID NO: 20633 - DNA, 427 bp, Homo sapiens
gggaaatgagcccctggccatgcaaggggccccgggagccttggcccagcccagggaagagtgtcagggcagggaaggccgtggccaccttagctgggtgagggtgtggggcagtgcactgatggacaaatacatcattagaagagaatccagtgtcctgaattggacctatgtgtatagggacgctaatgtgtcacaaaagtgacatttcagagaagaggaggaaaacagcctaacaaatggtgtggggccaatttggaaagaaaggaggcctgtcacctccactcactctatagacagagagcatctcacatggattttaggtctaaataagaaacgcaaaataatgaaagaagataacgtaggtggatggctccatgttcttggagtaagagatgttttctttaaaaagagacaaaaggccggg

SEQ ID NO: 20634 - DNA, 327 bp, Homo sapiens
ctagagtccaatatttgagtctctcgtgcaaatgagactattctttgtggtacaattccacctatcatatgtgaaaactgcagtaaaaataaacccagatgctaaatcattcctacaaaggtttgactgaaactgtggcagatgtctcatcttctttatatgttaagcagcatactcttctgatttttattgcaatcttttaccaagtggtgcacaaacttggtattgatgtctttattccattttgagtttagattgagaatatttttattttctgaaggcagagatatctactgtataattgcaccaaagtacatttgaaaggaa

SEQ ID NO: 20635 - DNA, 312 bp, Homo sapiens
ttgcttgcattttgtaaaggggttgactagcaccatttctttgtaaaaagaggcactcctggcctttaagtcacaattacaagaagttgaataaaaagttgatgaagtgcagggtaatctttagagcccaataatggtcacagcgtataggttgtgtgagatttgtatgttggtcttgcacgcagtgtaatgttctgagcctctcaatattgtaatgagtttctacgagtgagtctttactaaaggaatccagaaactaaggagacactgatgtatggaccagatgttaaagaaaatgttttgacccagcag

SEQ ID NO: 20636 - DNA, 447 bp, Homo sapiens
gtaccctggatacacacatatcagtcaaaaaggtctgagaactaaccaagtcacaaagtaatgtgtagtcatcagtgtgatgcctctcttcctttcttcagaatcagttgacccacaaagatactcacttccccaagattctcactttataaagcataaagacaaaatttaagagcaaagaagaagttcaaaaaggtagacagcaggaataacagatttttcacattccaagccaatctagagaccctaatttggatttggactttcctcctaagaataaagttgcagacaacattgaacttgggtaacataactttccagatttgctcattgcattggcttaattctgaaggaagaaggctaataattacaggttgctgaaaatgtctaaatgtaagtgaaactggtagaggacagcctggaataagcatcaaggtgaaagactga

SEQ ID NO: 20637 - DNA, 373 bp, Homo sapiens
  misc_feature (1)...(373): n = a,t,c or g
caagaatcctaaaggaacttggaaagactgggcacagactgcttttgatgaaagcattagcctttcagctgttggatacttcagaggttatgagtcagacatgaactgggagaaaggcgaaggccagcccttcgaatactttgtttatggagctgcctgttccgaggttgaaatagactgcctgacgggggatcataagaacatcagaacagacattgtcatggatgttggctgcagtataaatccagccattgacataggccagattgaaggtgcatttattcaaggcatgggactttatacaatagaggaactgaattattcttcccanggcattctgcacactcgtgggcccagacccatattaaattcc

SEQ ID NO: 20638 - DNA, 325 bp, Homo sapiens
cgaatacctgattagtccaaaagaagacagcaaaggagcagaaggaacaaacagaaaactaatagcaagatggtgaacctaaatcccaccatatcattaattatgttaaatatgaacagaccaaatattgcaatgaaggccgggtgcggtggctcatgcctgtaatcccagcactttacagggaggggaggccaaggtgggcagatcatttgaggtcaggagttcgagaccagcctgcccagcatggtgaaatcctgtctctgttaaaaatacaaaaattagctggctttcaaaggatttcaattatgtaatgttctttgaccag

SEQ ID NO: 20639 - DNA, 449 bp, Homo sapiens
gataactttgttatatgtgtgtttctgtagtaagatacttcatttaatattactgttgtgtcattaacattgaaatcatggccaacagcactataattcatgcctgaacaaagcttacctgacacatgtatttttttcgtaatccacatttgtccttaggaagactagacagtactttagcattatacttggtgaccatttaacacagtgaaatcaccaacaaaggtatgaaaatttgaaaagcgtggcactaaatgaaccaccaaaatgacccgtttacagtataagagctgaaacaagaagacaaagcatcaccttgttcagtctcacctgggaacatgcccgtggggtgactccaattttttgctcctctgtgcctgtttatgaatgacctcggaagtgccacacattgatttgggggtataaactttagtgagtaggcaagtttg

SEQ ID NO: 20640 - DNA, 427 bp, Homo sapiens
tgaggtgattacgaatttaatacgactcactatagggaatttggccctcgaggccaagaattcggcacgagctcttctactgtcaacatcccacaccacagtggcacatatgttacctgcatagacacatcgttgtcatccaaagttacattagagttcactgttgatgttgtacattctatgggttttgacaaatgtataactgatttttctaaaatcctgtctgaaaaatcttcctttcattggagaatttaatctgtttttcaattcatgcaattacttattgaggcttatctttatgcttctgtttatcctacctagtctccccctttttctttttttctcaccttttattgcattgaccagtttttgtttattttattctttttctctattacagtatgagcatgcttctatacacagacac

SEQ ID NO: 20641 - DNA, 405 bp, Homo sapiens
ggtggagctggctgaggagtcttctgcctgtttgtgctgggtactgggagatgcaggcggggagacacaaggtagaaggggcaaagtcctcacctaggaccttgagggagttaatgtgtaatattctaggatataagcttgaccacgagttgagaccctgagcacaggcctccaggagccgctgggagctgccgccaggagctgtcaccatgacgggggaacttgaggttaagaacatggacatgaagccggggtcaaccctgaagatcacaggcagcatcgcccgatggcactgatggctttgtaattaatctgggccaggggacagacaagctgaacctgcattttaaccctcgcttcagcgaatccaccattgtctgcaactcattggacggaacaactggg

SEQ ID NO: 20642 - DNA, 365 bp, Homo sapiens
ggagctaccatctaccctgcccacattcacactgtaataatacattgaggttacataacactggtactcttctccccaaagcaaatatacaggtagtcttaaattcttcattaaaatataacttttatatgaagtagggggaaaaattaaatgaatattaataattagctatactgtcacaacacaaataaattataatattcatattgaatccatgactaaaataatacaaatctatttcagaaagagcacacggtacaagatagcatctaacctagcaattgttctactagggatcactgttacacttccaaagcgtcactttagatattcagctgcaactagttatgccactagtgccgggg

SEQ ID NO: 20643 - DNA, 334 bp, Homo sapiens
gcccaccagagcctatagaatcaattccttggactcacagccatgcagataagccctggccatctcagcagccaccgcacaacccccctaatgaaagacacgccctcctcccctctggtcacgtaagagaacatcttccagctgcctttttcacacccactccagccctctgccccagttttctcctcctcactagtctgtggctttagtagttcctttgcttgtaattatgggatgggatccaggcatagggaactagttgtttcatagctcccagtcaaaaagaaagtgagagaagctgttgggcagcgaacctactgtttaaaatcaggat

SEQ ID NO: 20644 - DNA, 370 bp, Homo sapiens
  misc_feature (1)...(370): n = a,t,c or g
gggagcaggcatggtctcttctacttccttcaatggaggcgtctctcctcacaactggggagattctggtcccccctgcaaaaaatctcggaaggagaagaagcaaacaggatcagggccattaggaaacagctatgtggaaaggcaaaggtcagtgcatgagaagaatgggaaaaagatatgtaccctgcccagcccaccttaccccttggcttccttgccccagtgagctgatncctncncgagganngactgtgcnanncttggcntggnaccancnctntcnggntanannntncanncngnatngananatangnnnnntngccanagtatntncnnannnnnnnggntanntanannnanactt

SEQ ID NO: 20645 - DNA, 549 bp, Homo sapiens
  misc_feature (1)...(549): n = a,t,c or g
gccccttcctctgtggagacggacatttcctcttccaggaagcaatcagaggagcccttcaccactgtcttagagaatggagcaggcatggtctcttnnacttccttcaatgggggcgtctctcctcacaactggggagattctggtcccccctgcaaaaaatctcggaaggagaagaagcaaacaggatcagggccattaggaaacaggtaataacaagaggaggaggaagagggaagccaaggagggattgcaggggactttcggagagcaatactggggaactgagtctgctgggagagactggactgcccccctccagcctcagtcttcccgtacccctccacatatttatgtttctgtttctagctatgtggaaaggcaaaggtcantgcatgagaagaatgggaaaaagatatgtaccctgcccagcccaccttcccccttggttccttggcccagttgctgattcctccacgagggtggactctcccanccatggcctggtgacanctcctctgatccctntcaagcccgggtgtccaaacc

SEQ ID NO: 20646 - DNA, 443 bp, Homo sapiens
gcggcacgagcctccttcttcctcttcctccccctccttcttcttctctttcttcctcttttttaaaatgatctaaatggatgaaactaccctttcctagaatttcttcatctaaataattccatttatttcaagggtcatttccactctcacctgcccccaactaccctccataccataccttggttatacacagcacacagagcgggagtattcatggcacttggttaatattataactgtgcatatttattttccatttgttgtaatcaagtactcataaggaagctacaagggcagtgattttgtaaagaattatcctgagtctggaggagaggagatgagccaataaccaagagctcaccaagccttcaaagcttcttccttccctacagagagcatcctataccttcaatgggcttattttcaggactcacagagcc

SEQ ID NO: 20647 - DNA, 425 bp, Homo sapiens
  misc_feature (1)...(425): n = a,t,c or g
gtgagaacagaaatgagatgttcccatggtggagagggccgtgcctcctgcaggcccaaaagctcagttgcctgcctctgtctttgaccttgaggggctgaattttctccagcacttagcaaanaacccagtgtgtggaagatgctcataatgagtcagcacaaatgaatgatgtcttccattggaatgaggctgggatggggcacgtggagcttaccaagttgccactgaacccaaatcttcgggattctttctccctgagatgctaaatcaattcttgggcattcaagtaactcagttacctgtgctccaggcagaatcaaaaagtgaaatatcagctagtttgggttcaattttgaaaataatcatgctacgtctctctggcttcaggttctcaattttctgattgacagaagttgcgagac

SEQ ID NO: 20648 - DNA, 458 bp, Homo sapiens
cttctatgactgattacgaatttaatacgactcactatagggaatttggccctcgaggccaagaattcggcacgaggcagggtgctgaaactgggaaaaccagccacattctgctcagggccaggctaccaggccaccaaactgaggtgtgtagttacaggacatagactgtttttaaagcattccaaacccgcttaaaaggtaatttcccattcattgcctaattgtagcccctttccccccaacatatttaaacttcagagagttgcagaagaaaataagtgctactgcatagatcacaatgaagaaaacaagctcttgttcatcaaaaacactgctcttgttgcattgtcaatctcaaaacaattctcgtctatttgggtgttttttagaggtaattcatcctcgttcaaaccttataaccctgcttaccttaagagcttgtaagctaaaacatg

SEQ ID NO: 20649 - DNA, 505 bp, Homo sapiens
  misc_feature (1)...(505): n = a,t,c or g
tttganaccgtttgncatgnntacgaatttaatacgactcactatagggaatttggccctcgaggccaagaattcggcacgagggactgtatcaggatcaacagaagacttcttgacccaaagattcaaatatagaactaggaattgattttcacatgtagtttttaggtaaaggacatctctttcagttgattcctacagccaagactagctttgatcctgggagattcagaaacctcaagatgggtagctggcttgagtaacatcctagataatagtcccagtcaaaaaccccattgaggttgaaggactggaaactgacctgtgtgaaaaagagctatcagtgcaggaaaagactcatgctgattttgaccttactctggcccttttccctcaactgcttggtggggagtancgaggataaggancatgttggtaccctcatttggaggctngagcactgctgtntanagggatntgannccttactttnanaccaaccccg

SEQ ID NO: 20650 - DNA, 471 bp, Homo sapiens
  misc_feature (1)...(471): n = a,t,c or g
tttggantctgnaaaccctatgacatgattacgaatttaatacgactcactatagggaatttggccctcgaggccaagaattcggcacgagcgattttgctatgatttttcatttattggtatcagaattgaatatatttagctgttgctctctgctaagtaaactgagacctaggtgtgcttaccattgttttctgtgaaaaccagctgatccgtgttacaaatgactgttttagctatggaaacaagacacctctgtgaatatgattccttgtgtggtgggcatcactagagagcaatgactgtattccctaaagagaaagtgcgagagcggcagtacagaccaaggcagaggtggctgaggagattgttccggtcagcaatgtagaattcctgcccctgtgttctgtgaccccaacagagggagccagcacccactgtgcacctcccacacagcccacactgcacaag

SEQ ID NO: 20651 - DNA, 372 bp, Homo sapiens
  misc_feature (1)...(372): n = a,t,c or g
ggtgaaaccccatctctactaaaaatacaaaattagccatacatggtggcgtgtgcctgtaattccagctactcaggaggctgaggcagaattgcttgaacccaggaggtggaggttgcagtgagccaagatcgcaccactacactccagcctgggcaaaagagtgagactctgtctcaaaaagaaaaaaaaaaaanagaacancatagggatnagtttccngggttntttncctaccttacatttnnaancnttggaactgaaaaanntgacantccaaaaatgccnaagggngagacaaaaaacgaaacctttttcgntagccaaaaaaccaggaangggaaaatttatcaataccnnaaactttttata

SEQ ID NO: 20652 - DNA, 443 bp, Homo sapiens
  misc_feature (1)...(443): n = a,t,c or g
attgaattnccgtttgacatgattacgaatttaatacgactcactatagggaatttggccctcgaggccaagaattcggcacgagccggaaaagaatcatccattgcagatcagagcctttgctaaattgctgaataagaagatggttgagtcacctccttcgcttaaacttgtcctcattggaggttgtcgtaacaaagatgatgaacttagggtaaaccaactgagaaggctgtctgaggatttaggagttcaagaatatgtggaatttaaaataaacattccatttgatgaattaaagaattatttgtctgaagcaacaattggtctgcataccatgtggaacgagcattttgggattggagttgtggagtgtatggcagctggcacaattatccttgcacacaattcggggggcccaaagcttgacattgtggttcctc

SEQ ID NO: 20653 - DNA, 421 bp, Homo sapiens
ggtggaatgtacatctggtataagaagacatggcagaagccagcctccgatctgtccacacgaatacagcattcccaaagcaacgtgcatgtgccattattcactggatgagcttgaggtggatgaactagcccaccaggctctcaatgtcatgaatttaacactgaattaagaaaaatatgttttaaaaataatagtttaggtgattgctggggtgctaggagaggaaggaatggggaataactgtttaatgggtatagttggccttgtgtatctgtgggttccacatctgattcaaccaaccgtggatcaaaatatttgaaaataaaaaacaaaacaaaaatgatacaaataaaaaccaatataacaactattaacagcatttacattgtctaggcattataagtaatctggagatgac

SEQ ID NO: 20654 - DNA, 532 bp, Homo sapiens
  misc_feature (1)...(532): n = a,t,c or g
ttgnnnncntancagctatgacatgattacgaatttaatacgactcactatagggaatttggccctcgaggccaagaattcggcacgaggggccctggactcagcttccgcacacacctgctgcctgaactgaggcaaatgattcgacctctctgaacctcagttttccacacccaaaaaatggggctgaaaataaaatcaggcctgtgtgctgggcctggcctgtagtaagtacttcccaaccccttctcttgacccacaaatgttgatggagcccttctgtgccaggccctgagctgggctgaggaggcagtgagaggcagctgacattgtcctttcgtgggagaagagttcactcaggcttctttccactgcgttaacccagcccgagggagccaaacccctggaatctattccccttggcaagaactcccagggttccaggcaggactgaccccgcactccgaggcatcaggcccagagcacttggctgatccaggtgccatccttcccgaaacaccaccacaggcag

SEQ ID NO: 20655 - DNA, 321 bp, Homo sapiens
gcaatatccatgggaattgtcagtgttagttctcctgatgttagttcagtatctgaattaactaataaagaagcagcttcacaacgacctcttagctcttcagcaagtaacagactgtcagtgagttctttgttggctgctggggcccctatgagctctagtgcaagtgtacctaacctgtcctcaagagaaacatctagcttggagagttttgtaaggagagtggcaaacatagcacggactaatgccacgaacaacatgaatctaagccgaagcagcagtgataacaacactaatactttggggaggaatgtgatgagc

SEQ ID NO: 20656 - DNA, 391 bp, Homo sapiens
gcccttttcattcataatactttgaaaataaatattgggccttttcaaggagagatacaacgtgtaatcctatatctgttttcttcttttctgtctcctcccctttaagataaaaaaaagacactacttttctccaccctcccaatggaacaaactttgagggagtggtaaaaggagctgtttaaaggggaaacaggtcagcacagtggctcacacttgtaatctcaagcactttgagaggccgaggcaggcagatcacctcaggtcaggagtttgagaccagcctggccaacatggtgaaaccccatctttactaaaaatacaaaaattagctgagtgtgttggctcacacctgtagtcccaactactcgggaggctgaatcacgagaat

SEQ ID NO: 20657 - DNA, 470 bp, Homo sapiens
  misc_feature (1)...(470): n = a,t,c or g
agctatgacatgattacgaatttaatacgactcactatagggaatttggccctcgaggccaagaattcggcacgagaaactcagccagctgagaagatgatgttcccctaagtggaaaggcaatgtttcttcaaataaacaactttctttaactttatgaaatttagaatttagaaaagttacaaagtaaacatatggtattaaatgttagttaaaatccttattttaggtactcctttttattctttttttagagatggggtcttgttctgtcctgtcaaggagcaggtgtccctgagaacccaaacattccagagagtatctgagaacctacctgggaaaaaagtcccataacacacacagtaggcaaagacccagaaaattagtttaaaagcagcatagggatgggaggcagcatgggcctctaaagctgtctgctgctgtccggagtacctnctatataagtccta

SEQ ID NO: 20658 - DNA, 488 bp, Homo sapiens
  misc_feature (1)...(488): n = a,t,c or g
ttganaccatttatgacatgattacgaatttaatacgactcactatagggaatttggccctcgaggccaagaattcggcacgagtttttagttatcttagagattttaataaatcttgattttttttagtgtatcttaatgttttaccacttcccaaacaatgcaaaacttaggacagtttaactttgtttattccctcctgccctttgtgctatttttttcatattttatttcaatatatgatacaaaccacataatttttttgtaaacagttaatattcttttatatttatccacatgtgtaccctttctaatgctcataattcatttttacagttctttgctaccatccaggataattttcctttagcctgaaaaaattcctttaatatttgttgtagtgccagtctctttgaggcagattttctcagcttttgctgaaatccctttattttgacttcttttttgaaggaaaaacttattggtcc

SEQ ID NO: 20659 - DNA, 537 bp, Homo sapiens
  misc_feature (1)...(537): n = a,t,c or g
gcacagacagcaggaccccagaggtgcctgctggtgaggggccgcgccggggcctgggtgcccccctgactgaggaccagcaaaaccggcttagtgaggagatcgagaagaagtggcaggagctggagaagctgcccctgcgggagaataagcgggtgcccctcactgccctgctcaaccaaagccgcggagagcgccgagggcccccaagtgacggccacgaggcactggagaaggaggttcaggctcttcgggcccagctggaggcgtggcgtctccaaggggaggctcctcagagtgcactgagatcccaggaggatggccacatccccccgggctacatctcacagctggtgggcgtgatcactgtgcccgttttacagacaaggccactgactctgagaggttatgtgacttgccaaggtcaccccgcttgaggtttnaaagngggatttgaccaaggtccggttactgaaacctttgtgtnatcccctggaactttgacttggaccttgcccgggaatgggggtaatggcc

SEQ ID NO: 20660 - DNA, 539 bp, Homo sapiens
  misc_feature (1)...(539): n = a,t,c or g
ggtnnnnnnnnttgnanaccgctatgactgattacgaatttaatacgactcactatagggaatttggccctcgaggccaagaattcggcacgaggaatgcttcatcatcacatgtatgtcagtttaaggggatgacctagtctctcagtgcctgagtctctttccttctgtttgtccttcctcagcatctgtcccttgggtctgccagctgtgcctgccgatgtctcctttgggtgaaacttcctgcccctgcccctgttgtgcccctgatagactctgtgttactgtaaagaatcacccaggctgggcgcagtggctcacgcctgtaatctcagcactttgggaggccgaagcaggtggatcatttgaagtcaggagtttgagaacagcctggccaacatgatgaaaccctgtctctactaaaaatacaaaaattaaggttgggcactgtactcatgcctataatcccagcactttgggaggctgaagcangtggatacctganggtcangancttanaaccacctggccacatggca

SEQ ID NO: 20661 - DNA, 343 bp, Homo sapiens
gagaatctgattggtgaaacctgcggttcctggcagatgctggtagttgcagtcaactttgagcacaatataattccaatttaaggagttaagaatcttagaacccactgtagtgagatttgtaatatgactgaataaattcttcctctcgtttgtgagcgtgaattatataattaataccaggcattcattaagccatgcatatgcttatgttgaggtcatgagtactaataatacagctgtttcaaaaagcaagttaatgggcgggtgtggtggctcacgccagtaatcccagcactttgggaagccaagccgggcgaatcacgaggtcaggagttcgaga

SEQ ID NO: 20662 - DNA, 377 bp, Homo sapiens
gggaggagtgggcagggtgccacgagatggaggtagagggagaaaggagcaagagagaattgaaggatgaagtgcaagttatcaggctgggttaccacatccggttttggcctgtgggctgtcggtagatctgccttaacctgggagtggcgagggagtgatgcatctgccaaaacgaggagggtcactacatctcatgtctcatctccttgctcagctcatcctagccatgctggcctcctggctgttcctcaaccagctagtcgtgctccccatctcagggcctttgcctggatgctctttcctggagatcttggctatcctgtcaaaacttgtgttccccaccccgcctttatacactccctattctatgtatt

SEQ ID NO: 20663 - DNA, 390 bp, Homo sapiens
aaaaagcttttcatctctccagggggaaaactgtctagttcccttctgtgtctaaattttccaaaacgttgatttgcataatacagtggtatgtgcaatggataaattgccgttatttcaaaaattaaaattctcattttctttcttttttttcccccctgctccacacttcaaaactcccgttagatcagcattctactacaagagtgaaaggaaaaccctaacagatctgtcctagtgattttacctttgttctagaaggcgctcctttcagggttgtggtattcttaggttagcggagctttttcctcttttccccacccatctccccaatattgcccattattaattaacctctttctttggttggaaccctggcagttctgctcc

SEQ ID NO: 20664 - DNA, 478 bp, Homo sapiens
gcggcacgagggaaaagtaatgcaaggaacttggtaaagtaacaagggtgggggattcttgcagaaccagattcagcaggccaaggatgaggcctggtcaagaagagcattcagaggagcctgactcaagtttggtcaaggaccaggagtcactgttggcccctccttcattcaaggtactgtgaatatttctgttcaatactgggcctcttggccaagtggctaccctcctcactggacttgatagctcaggcctctgatatttctttattttgcatggttccgattggtgaggtttccttaaagcttactcagctgtaatgctttggcaagcagaatcaaattgtgtttaagcccaggctttggaatcagaagcacttaggttcagatcttgctctgccacttattagctgtatgactttgggcaggtcacttaagaatattttcttccttggtgtggggggaagggggaaggaca

SEQ ID NO: 20665 - DNA, 470 bp, Homo sapiens
  misc_feature (1)...(470): n = a,t,c or g
ggagagcatgatcaataccctgtgctgcttcccctcctgtcccttcccgtcccagcctcctctttagaggaacttgagagtccgctactgtcaaggagaggaaagaactgccaccccaaaacgagtttggtaatcctgtggttcttattctcctgcactaggtttccccagccttaaccaggcaacatctcctgtacgctagctagggttacacaaatgcaactactcaaaagcaatttctcaacactcctcggctacctccctggtataagccaccttcatctgtcacctgaataactactatagcctcccaatgtctcccagcttcaaccttcacctttgccctactgtctcttctccccacagctgccaaagtggccctttcaaaatggggcagatcaagtgactcgtctgctcagcacccaccaggggcatctcatttacaccgagtaccagtcacaggtntttca

SEQ ID NO: 20666 - DNA, 442 bp, Homo sapiens
tttgaatttccaaaaccgttatgacatgattacgaatttaatacgactcactatagggaatttggccctcgaggccaagaattcggcacgaggatgatggtacaagtgatcaaggaaaggtaatggatgtgatgaaactaacaagggccctgacttgtgctgtcaagaagcctctgaagaagtgacatttaagatgaaacctaaaattatgagagaactgcagctgttacagccaaaggggaaatgatgacatggacaaaggcctcgaggcaggaggagctgctggcagccagctctcggcataagctttggcatacagtaagtgccttgcatactgctgtattgcaattgaaaaaataaggatctggccaggcgcggtggctcacaccggtaattccagcactttaggaggccgaggtgtgcagatcatttgaggtcagga

SEQ ID NO: 20667 - DNA, 455 bp, Homo sapiens
  misc_feature (1)...(455): n = a,t,c or g
ggatcatgtctcctcttgtcaggctacagagtggtggaagaggacacacacacatctcctccatgttcctgccacagggccccttccttaagtaatgacttatctccttccagttgccacctgttggagccaagaatgtattaatttggggtgacactgggttagctcagcatggatttcccttatccgatgatttttctacatttacttggccaatttggggaacagacctccactgtgattccatactctctctttgctttcactatcccagggatgggaggcggagggtagagatgaactcactgagcagccagagccaaatgcaatcggtacgaatcttanaaggaagganggggagcccangtatganaaagaanaaaccactaagaaaatacctccctgggaggatgagctggggccctttttcttttgctggatggttcctttatgca

SEQ ID NO: 20668 - DNA, 397 bp, Homo sapiens
gcttggaacctggggtaaagccatgaatcacaaagtcccctactttcatgaagctaacagataaacaatatagtttaggtgatgaccagtgctagacagaaaaataaagtgtattgcaggagagcattgtaacagctgaggttgtctggaaaactctctgcaaaggttatgttacagccaagacccataaggaagtgagcgagtaagccccagtaaagtttagaagtatagcttttcaggcagaagcaaagaaaatgcagagaccggaagggaagactgtcagggactagaagaccagtgtagttggagtactaggagcatcttaggtaagtaatggaaattgcttagaaaaaaaactagtagaacatcagtgaatctgccaaaaggttacataaat

SEQ ID NO: 20669 - DNA, 401 bp, Homo sapiens
cccacgcgtccgggcgcgccggaagaaaatcatgatcatcatctgctgtgtgatcctgggcatcgtcatcgcctccactgttgggggcatcttcgcctagaagccacccaaactgccactccactccaggtgggccactccaaggaggccctggctgctgccacctggctgggctgccctcccaacccccgcctctggctcagagcaccctccctcccggcccccatgctcccttctctgccatgggccctccgtccccgccccgtgtcgtgtgcatgatctctgtgagtgtgcgtctgtacgggaagaggcagagggaggcagccagcggggcgtgatgcagtgtgcacagcgaggagcagacccaggcagggccgccagggtgacacaggccacccttc

SEQ ID NO: 20670 - DNA, 668 bp, Homo sapiens
gcggcacgagggcggcagaatgttggctaccagggtatttagcctagttggcaagcgagcaatttccacctctgtgtgtgtacgagctcatgaaagtgttgtgaagagcgaagacttttcgctcccagcttatatggatcggcgtgaccaccccttgccggaggtggcccatgtcaagcacctgtctgccagccagaaggcactgaaggagaaggagaaggcctcctggagcagcctctccatggatgagaaagtcgagttgtatcgcattaagttcaaggagagctttgctgagatgaacaggggctcgaacgagtggaagacggttgtgggcggtgccatgttcttcatcggtttcaccgcgctcgttatcatgtggcagaagcactatgtgtacggccccctcccgcaaagctttgacaaagagtgggtggccaagcagaccaagaggatgctggacatgaaggtgaaccccatccagggcttagcctccaagtgggactacgaaaagaacgagtggaagaagtgagagatgctggcctgcgcctgcacctgcgcctggctctgtcaccgccatgcaactccatgcctatttactggaaacctgttatgccaaacagttgtaccactgctaataaatgaccagtttacctgaaaaaaaaaaaaaa

SEQ ID NO: 20671 - DNA, 396 bp, Homo sapiens
gacaaaatgtatcttgacttttaatttttgtatttggaatataagagtcactctaattgccagcagagagtgctgtcctgaatagcatcttagtctatctgtgggtttatttaaaaaataaaaacaaaagcaggcaagagacttggctggttcctctctgccaggttggtactgtcttattagcaagtaatagaaactacacggttgtcatgttggggagaagagaagatgtgattgtcagcatggaggctctgggaatgtatggagatgattgcataaagcagaagaccccaagactgagatttagcctcccaggaccccttcaatccccatgctgttgtgtggctgtgggtgacctcagcacagccacagttgcgttcattctcagggtgcccg

SEQ ID NO: 20672 - DNA, 379 bp, Homo sapiens
ctctagctcagtataatcccaaattggatgtgaaattactttatccagtatccaaataccaacaggatcaagttgtcaaagaagataatattgaagctgtagggaaaaaattacatgaatataacactcagtttcaagaaaaaagtcgagaatatgatagattatatgaagaatatacccgcacatcccaggaaatccaaatgaaaaggacagctattgaagcatttaatgaaaccataaaaatatttgaagaacagtgccagacccaagagcggtacagcacaggaatacatagaaaagtttaaacgtgaaggcaatgagaaagaaatacaaaggattatgcataattatgataagttgaagtctcgaatcagtgaaa

SEQ ID NO: 20673 - DNA, 396 bp, Homo sapiens
gggagcttcatgagttttcctgtcaagccagcatccagtgtgttcgtgcccctcgcagtcacaggccttccccgcactgtcctggcttctgatacgacatgttagctttacctgtttttgttttgctttttcttttttgagacggagtctcgccctgttgccaggctggagttcagtggtgcgatctccactcactgcaacctccgtctcccgggttcaagtgattatcctgcctcagccacctgagtagctgggattacaggcacgcgccaccacgcctggctaattttttgtgtgttagtagagatgggggttcaccatgttggccaggctgggcttgatctcctgaccttgtgatccacccacctcggcctcccaaagtgctgggattacagg

SEQ ID NO: 20674 - DNA, 340 bp, Homo sapiens
  misc_feature (1)...(340): n = a,t,c or g
gctggaaggtaatctggcaatgtatgttctaaaagtcttaaatatatgattatctcttgaaccatccattctagttctaaacatattctcaaaaaaaaaaaantaaataaatccntgatcagnccggccncgggggntnacccctgtanncccagnnttntaggaggccaaggcaggcgnatnacctgaggtnaggagttcaanaccagcctggccntggggaancccngtttttactaaaantncaaaaaattacccnggcntggnggggcacncctgtantcccagttantnggaacgctnaggcgggaaantcacttgancctgggaggcanaggtt

SEQ ID NO: 20675 - DNA, 431 bp, Homo sapiens
gtgggattacaggcgcccaccaccacgcctggccaattttttgtatttttagtagagacggggcttcaccatgttggccaggctggtgtcaaactcctgacctcaggtgatctgcccgtctgagcctcccaaagtgctgggattacaggcgcgagccaccgcacccagccaggtttttcttttgaactaaacacagagagtatgagttctacagtgtttctgaacatagttgtattttgagttggagcatagagaagttgggctccctgatcatagattcatctgcagattgtggcaggagtggaggagtgaggagatgggcagggccttcttagaccaggaggggatgggcagggccttcttagactgtaaagattatggagaccttgagattgcagcttgccagctagctacctgtgccttgagtctat

SEQ ID NO: 20676 - DNA, 528 bp, Homo sapiens
  misc_feature (1)...(528): n = a,t,c or g
gaggttnngtnnntatttganacctctgaaaccttacgaatttctacgactcactatagggaatttggccctcgaggccaagaattcggcacgagagcccttccttgagatgatacacgaggctcagcaggccatggacatccacttccacagcccggccttccagcacccgccaacagaattcatacgagaaggcgacgatgaccggactgtgtgccgggagatccgccacaactccacgggctgcctgcggatgaaggaccagtgtgacaagtgccgggagatcttgtctgtggactgttccaccaacaacccctcccaggctaagctgcggcgggagctcgacgaatccctccaggtcgctgagaggttgaccannnnnnncaacgagctgctaaagtcctaccagtggaagatgctcaacacctcctccttgctggagcagctgaacgagcagtttaactgggtgtcccggctgcaaacctacgcaaggcgaagaccagtctatctgcgggtcaccacggtggc

SEQ ID NO: 20677 - DNA, 477 bp, Homo sapiens
aaccgctatgacatgattacgaatttaatacgactcactatagggaatttggccctcgaggccaagaattcggcacgagagtgcccctccggcctcgccatgaggctcttcctgtcgctcccggtcctggtggtggttctgtcgatcgtcttggaaggcccagccccagcccaggggaccccagacgtctccagtgccttggataagctgaaggagtttggaaacacactggaggacaaggctcgggaactcatcagccgcatcaaacagagtgaactttctgccaagatgcgggagtggttttcagagacatttcagaaagtgaaggagaaactcaagattgactcatgaggacctgaagggtgacatcccaggaggggcctctgaaatttcccacaccccagcgcctgtgctgaggactccctccatgtggccccaggtgccaccaataaaaatcctacagaaaaaaaaaaaaaa

SEQ ID NO: 20678 - DNA, 402 bp, Homo sapiens
gaactggaaggtgtcgtgacaaatttgatgacagatggtgtgggctcctgaggagattttttctctgccagtttctcggctggattctcagtctttatcaatttgaaaagctttacattggaggagttcaaagagttgagagtaaatgaagaatataagccagagtgtatgtagtcattgcggctagaggtcttggcaccaggctgaggtggtttatctttccctccattctccacatctttggaactgctgctgacttcactgaagtttaaactttcacagtcaccctcaatcctgcccactgtcattggatccatgttcaaaatctctggataagagacaaacttgtacacaaacttctgaccattcacttttttgatgatattctgtaggttaaaaaaa

SEQ ID NO: 20679 - DNA, 526 bp, Homo sapiens
  misc_feature (1)...(526): n = a,t,c or g
gtggaagaattatttaaaacttatgttgccatattttacacatgccactgttgcactgattcagtccatgttgactgggggccacggcaggaggctgtgattcttcancactttttctacactggctagacctacattattgttttataatcttctgcctgctcttggttttttatttctatagattaatatggaggattctttatgtgattggtctgcgagcctattggttattgttttactctgtcattaagctcatgactgatgcatattaaatgggaaagagatacgcatttaaaattctctttaagtccagaattgtgattgtctttattcatccaggctttcaatccacttatctcaggcctttggttatagtataacaacctctcccattcgcatcacagctttctctccacctctttcttctgccctcctgtacttaaannaaggaggtaggtgggatnaccnnccnnaaanggggnaangnaataatngnccnggaattgnntgggcccaggctttg

SEQ ID NO: 20680 - DNA, 412 bp, Homo sapiens
gctgaccacatctgtgaggtgccgagctgggtgcttgacatcatttgcttggagaagcagctgctagtagacccattttacaggtgagagaaccaagtctcacagaggcctgggttcaagtcccacctctgccactaactggcatgtgaccctatctatccttcactgctctgagcctagaccctggcccctgcctggctccctgccaggctccctgccacccctcacgacctctgatggtcgttgtgggggtctcttgcctggctcccagggctagggttagggctctggaggtgctttcactcaaccaagggggccacagcactggggagtgaaactgccccgcctcaccctgcgttgccctctgggtctgtgagggtgggctggcaggaggcctaggccttgccctagg

SEQ ID NO: 20681 - DNA, 398 bp, Homo sapiens
ccacgcctttcttccctcccagctgcgggttccgctggcggcggtggcgctgacaagcccgcgtcggggaagcaggggagtccctgctcacacagaccgcgccctcacggagggaggccgcttcctagacctcgcctagtcgtctttcctctccctgccctgggggggttgcgggggtcagtgcaaactcctgcgtccagggcactggtgagctcccgagttcgggcagccagggggctgaggtcctgaaggaggctccgaggggagagtcctgcgtgtgcaaaacctgggaggggagccgaagcccaggtgcttctgggactgagctctctcgatgtggagctggagtagaggggatgtgtgcggctgcagtatcaggcgagggggtgggctttatc

SEQ ID NO: 20682 - DNA, 332 bp, Homo sapiens
gctggagatgaaggtacaactcaaaggtcctaagagtcttgtgagttatgcagggcatttaaggtgaggggagcagcatgttccgagacatataaattaggcagagaaccacagggtacttgctttgcctggagggtggtaggtatgtgagagaagagaaaaagaggactgaacaaccaacaggagccaggtatttgctgacggctatcagaggctaaaagcacatgtcaggaaaagagaaaagttatgggaagatgagaaacatcaagaaatcctgcatatcggccaggtgcggtggctcacgcctgtaatcccagcactttgggaggccg

SEQ ID NO: 20683 - DNA, 230 bp, Homo sapiens
agccctggtgttccttttatcagaaaagctgaaagtgtcccaaaagcacacccctctcctatcagatgtccatcttattggccggaactatgctgcacctccattccaagaacaagagacactgaagaaaaaaatgtattgctttagcttctaaaaaggagacggccaagggataagacagttgagaagggtgtggcatgacagagtgtctgctgctctcttggttttag

SEQ ID NO: 20684 - DNA, 428 bp, Homo sapiens
gagaatttctagaaggaggaggtgcagttttggatatgttaattttgaggtacctatgaatgccttgtccaggaagagataatccaggaagcaggtgggtatacaggccagaagcttaagggaggtgtccaggctgagaacttgcagtccccagatgtgccatgctgttttaaggttctttgtttatgcacatcctgccccactgcctctaaatctccctcaaacacttctagtcatacccattttacatattaccaaaagtcagagttgatcaccctctcctctatgttgccaatctacctatttttgccttcttctctgtaatatagatattgtttacttaaccatattaattaggtgtctactatgtattataccactgttccaagcactaaggataagatgatgcaaaattctgatccttatgg

SEQ ID NO: 20685 - DNA, 405 bp, Homo sapiens
gaaggatcagatgaagcagatggaagtaaacatctcccaggagagtccaaatttcagcagaaactggcagaaatgacttctactcgaacacgaatgcaaaagcagaaaatgaatgatagcatggatacctcaaacaaggaagagaaatgaggatctcaggaccttggtggacactgtgtacacctctggattcattgtctctcacagatgtgactgtataactttcccaggttctgtttatggccacatttaatatcttcagctctttttgtggatataaaatgtgcagatgcaattgtttgggtgattcctaagccacttgaaatgttagtcattgttatttatacaagattgaaaatcttgtgtaaatcctgccatttaaaaagttgtagcagattgtttcct

SEQ ID NO: 20686 - DNA, 403 bp, Homo sapiens
gttgcaggatgcgttttcccgagggcttctgaagccaggcctcaatgtcgtgctagaggggccgaagaaggccgtgaacgacgtgaatggcctgaagcaatgtttggcagaattcaagcgggatctggaatgggttgaaaggctcgatgtgacactgggtccggtaccggagatcggtggatctgaggcgccagcacctcagaacaaggaccagaaagctgttgatccagaagacgacttccagcgagagatgagtttctatcgccaagcccaggccgcagtgcttgcagtcttaccccgcctccatcagctcaaagtccctaccaagcgacccactgattattttgcggaaatggccaaatctgatctgcagatgcagaagattcgacagaagctgcagact

SEQ ID NO: 20687 - DNA, 535 bp, Homo sapiens
  misc_feature (1)...(535): n = a,t,c or g
tgactcagcctcatcaaggcaggcctgccccgctgatccagcgctgaagtttctcactgcccaacacacccggctctgccagcttccacacttcccaggcgccaggagccccacgccgagctttacacataactgggaaagaggctacgggagcattctccctccttcctccaccagccttcgctgggtctggaggccacctggccgcgtgcgacggggatgtctgctaatttgtagaatctaactttgtccaacgtgaaatactcaacacaacttctcagaactgtgaatgtgacacttcctgcaggcacccaaagaccgcctggtctcctgcaccaccgttctccagagccctctccacgggcgccagtgctcacacaaggtcacggccacctcaaaaaaccgtatggccaaaaagttttttggggtggttgggagcagtgctcgtgccgctcgtgccgaattcttggcctcgagggccaaattccctatagtgagtcgtattaaattcgtgtcatgtcanagggntntcaaa

SEQ ID NO: 20688 - DNA, 445 bp, Homo sapiens
ggtgatataacattcttgtgcagaatctggagattcttataaataagtatgaagaagctgtttgtcatctggcgtcatcccatcagttagttacaaaaatgtctcagtaacctagtcaagaacttgtgtctatattcttttaagcagaaatgttctaggaatttgaaatggtaaagtttatctttcagctgaataaaattattttcataaaaatgtactaatttgtcctatgtgaaaaggaactaagagattaaaatctagaatttgcttattaaagctagaattataaagtctagaagtctccatatttttatatttaaaggaggaatgactgaggagttctagcttccagtcttaatgtaagtggtttgaaatgctttactgttaaaaggaagttacagagctgggcgcagtgcttacacctgtaatcctagcactttgggaa

SEQ ID NO: 20689 - DNA, 396 bp, Homo sapiens
gagcacacatacagtagtggcataataccagctggatttcagagtgcagaatgaaaccatgtggttttctgtgagattttttaggccttatataggaattatatgcatgactaggaccttataaattatgtatctactatgtgcccagctcctagtatatacctaatttaatccttgaacaactcttttgtgttacatggtattatccctgtttaaagatgaagaaaccaatatttggataaattaaataccttattttataaatgagtaagtcttttctgacttcagagttcatgcattttaccagtaagccatgctttccgcttactgcaaactagtgactccaaacttctgcaaactgtgaaactattgtgaacttgtgtgaatgtattgaag

SEQ ID NO: 20690 - DNA, 404 bp, Homo sapiens
agcgaggctgagcctacagatgaactctttctggcctgccttcgttaactgtgtatgtacatatatatattttttaatttgatgaaagctgattactgtcaataaacagcttcatgcctttgtaagttatttcttgtttgtttgtttgggtatcctgcccagtgttgtttgtaaataagagatttggagcactctgagtttaccatttgtaataaagtatataatttttttatgttttgtttctgaaaattccagaaaggatatttaagaaaatacaataaactattggaaagtactcccctaacctcttttctgcatcatctgtagatactaagctatctaggtggagttgaaagagttaagaatgtcgattaaaatcactctcaggcttcttactattaagc

SEQ ID NO: 20691 - DNA, 442 bp, Homo sapiens
  misc_feature (1)...(442): n = a,t,c or g
ttgnnnnccctntttgaaaaccgntatgacatgattacgaatttaataccgactcactatagggaatttggccctcgaggccaagaattcggcacgagcttgaggggctgggaaagcagaacttgggatagggccaagggacacacaggcttttctgaggcaggccaccaagtgagggcattcctgggcacagcctgagctgggaacgtggcctcctggctctctgctggtgtctgactcagaggtctttaagagccctgccctcttattgggttggccagcagaggaggtggggacacaggctcggacttctagcaggtgctggggctaaagtgcccagaggtgtccctggaggcccctgtgagcccagccagcgcagtgcgcaccaccctcttaggcaacaggagcagcacangaacctgctatgggcttcttgcccaac

SEQ ID NO: 20692 - DNA, 380 bp, Homo sapiens
  misc_feature (1)...(380): n = a,t,c or g
gcggcacgagcttctaaccataccgatgattctccgtatagctggtcttttccaccttatcatccttcctctgagaagtatgaaaacactaagacatgtcgagggccagatggagaactccatgccaacctgctttgccctgtggatgtgctggatgttcccgagggcaccttgcctgacaaacagagcactgagcaagccatacagttgttggaaaagatgaaaacgtcagccagtcctttcttcctggccgttgggtatcataagccacacatccccttcagataccccaaggaatttcagaagttgtatcccttggagaacatcaccctggcccccgatcccgaggtccctgatggctaccccctgtggnctacaac

SEQ ID NO: 20693 - DNA, 360 bp, Homo sapiens
ggggattacaggtgcatgccaccacgcccacgtaattttagtagagatggagtttcaccatgttagccaggctggtctggaactcctgacctctggtgatccgcccacctcagcctgccaaagtgctgggattacaggtgtgagccaccacgcccagccaggttgccccagtcttaaactcagatggaaacctagatatgaaacctccgtcccctctgcctttcccaggacactttgccaccatcaccttgaccttcatcgacaagaacggagagactgagctgtgcatggaaggtcgaggcatccctgctcctgaggaagagcggacgcgacagggctggcagcggtactactttgagg

SEQ ID NO: 20694 - DNA, 402 bp, Homo sapiens
gtaactgtgtagaatgaggcatagagatcaggaaagattaggatagaagagtacactctggacagggaagtgtgtcatgcagatgaacattcttggtactcttaactttcataagaactgaagcttaaagtttatggttgcgtgtttgaacttcaggccttagtataggtttaaacttgtcacagattacttaaaggttgttaaaagaaacaatttgtgtaaatgttcatcctggtatgcacattttatttttaatgtcccggcattgattttatgtttaattctgatttccagaagagtaaactttgctaaattgttatatgatattacgacatttgatctgcattataaaatattagagagagtgtaacgaacctcatatgtattacctaagttcagcaa

SEQ ID NO: 20695 - DNA, 335 bp, Homo sapiens
gcagtcttcaaatttcagaaaagaatttgtttcttcattgtcatttaaaattaatgtgttaaatatgtatgcttttacattattagtggttataaaagttaaacacttagaaaaaaagtcaaaataacatacatactatccaacaaaataactttcatattttattgtgttttcttccaaactttttacctttgcgtctgaattctgtgtaggttgtatctataatatagacaacactttatagcctgctaaatattataccataaataggtagttgttacataattctcaggtaatagtaatacaggtctttatcataatctactgagtagttg

SEQ ID NO: 20696 - DNA, 440 bp, Homo sapiens
  misc_feature (1)...(440): n = a,t,c or g
gaaaattttctacatatttcacacactgccccattctcagaatttcaggaagaagttatcctgttgaggtttttcatcttgaagatataatagaagaaacaggctttgtactggaaaaagactcagaatattgtcagaaatttctggaagaggaataagaagtaaccattaatgttacaagcaaagcagggggaataaaaaaatatcaggaatacatcccagttcatactggagcacatgctgatttaaatccattttaccaaaagtacagcagccgcactcagcatgctattctatacatgaatcctcataaaatcaacctggatctcattttggaacttcttgcatacttagataaaagtcccattcagaaatnttnnaagagcnntanttnncttttaccncggacttgctcaanttncncnngtggatgaantttt

SEQ ID NO: 20697 - DNA, 361 bp, Homo sapiens
ggaaatacacacacacacacacgtatatatgtccatggacatcaaaatgaggtataggttaggaagttaccctggaagttagaattgagataattactttgattagcaaaggtttatgttagaaatatgagtggttcaaggcagcgcctttcaccttgatgcctgttgtgtttagcactggatagaaaattgctatttttactgatgactactttaatgcttggttcattcatatgaaataatctttcttttctcctttaataataatgatctctcctgatttcaagttgaaaatgtattaatttaagataacttatgaagcaatgacatatggaagaggagatgggaaattgtttctcaa

SEQ ID NO: 20698 - DNA, 370 bp, Homo sapiens
  misc_feature (1)...(370): n = a,t,c or g
tcgcccctttganccccttcttatnnaatccctttgacatgatccacnaatttaatacgactcactatagggaatttggccctcgaggccaagaattcggcacgaggaggaagagctactcatacactgccggtggaatgtgaaatggtacagtttttttagaaggccatctggcaacatctattaaaattaaatatacccactaaatgtaaattaaatatacatgtgtcctttgatccagccatcccccaactggggattaatcccataagatgaaataaccaaccctgagtagaaaatgtctganncacatggaatatccatnancngangaatggttgaatnatttgtgatacatccataatattta

SEQ ID NO: 20699 - DNA, 339 bp, Homo sapiens
ggcaccttctctgttttctgaatgtcctgatcactgatggaactgatagggtgtaccctgtacccgcctctcagtctttactccccatcttcttagccaccatcaccactgccccactcaactcctcttactaaggtccccaacgacacacccagatctagcagagcagttcactacttgccctgtgcctgcctccttgcgcatttgacctaatggacttcttccttggcacactctcttcctgtggcttcctcagcagcgttttgttgattcacctcctacaggtctggcctcgatttctcagactcgtcttcctcttcacagacaggcagtaatgtg

SEQ ID NO: 20700 - DNA, 807 bp, Homo sapiens
ggaattctgtgactatggaaccaaggaggagtgcatgaaagccagtgatgctgatcgaccctgtcgcaagctgcacttcagacgaattatcaataaacacactgatgagtctttaggtgactgctctttccttaatacatgtttccacatggatacctgcaagtatgttcactatgaaattgatgcttgcatggattctgaggcccctggcagcaaagaccacacgccaagccaggagcttgctcttacacagagtgtcggaggtgattccagtgcagaccgactcttcccacctcagtggatctgttgtgatatccgctacctggacgtcagtatcttgggcaagtttgcagttgtgatggctgacccaccctgggatattcacatggaactgccctatgggaccctgacagatgatgagatgcgcaggctcaacatacccgtactacaggatgatggctttctcttcctctgggtcacaggcagggccatggagttggggagagaatgtctaaacctctgggggtatgaacgggtagatgaaattatttgggtgaagacaaatcaactgcaacgcatcattcggacaggccgtacaggtcactggttgaaccatgggaaggaacactgcttggtgagcagcagtggggcccaattcaataggtggagcacaaagaagaatcatttgatttcttactgagaaaaagttcaaaggtgtggtttcataaggtaatctgttatctgtggtgagcaggttggtgtcaaaggaaatccccaaggcttcaaccagggtctggattgtgatgt

SEQ ID NO: 20701 - DNA, 480 bp, Homo sapiens
  misc_feature (1)...(480): n = a,t,c or g
gcctgtcctcaatcagctgcaccttctccttgatcttgtctgagtataggtttccctcagctaccagctngtttccagagtccacaggactcaagaccttatcccggttgttctccatagaccccaagaaatcctcaaacttccggatcccagcctctgcagcttccagggagtctgggggctccaagtgagccagagtgtattcctggntgctgaggatggcttcaacctgcttggcatctttctggaactcctggaagccaaggcactgagcgaggntgtggctgcggctctcccacatcctgccagggcatcccagccagtatccaggccctccagccgctggcccanaagcagatactctgggtccgctggccttggatcactttctcccagaatcttaancccttggaagatgaattggngncccncaaactaaacttgaacctgcatgctggttcaggactggtttggcttaaa

SEQ ID NO: 20702 - DNA, 440 bp, Homo sapiens
  misc_feature (1)...(440): n = a,t,c or g
gagaaaataggtttgaatgagaaagtattctgagaaaggtggggaatgggcgtcagatatggattggaaggagacaagagatcggaaaggtgacagaagagagcccccactgtggtggctactgcctgcaccttcaccaggaagtgttgctcacctgtccaagccacaagttctggtcatgtcgtagatccaagtgcctccaggtggatgtgccacttccaaggcccagccttcctaagccacctcaccttaaggtctggatacatttgttcacagtatgcactttttgagtgctaattatgtgccaggcactgggctaggtcctggggacacacccatgaacaaggagagcaggttcctggcctcttgcagcttgacattctancagaggagacagtctgtaaacacatagataaataattgaaagannttgcncatgg

SEQ ID NO: 20703 - DNA, 495 bp, Homo sapiens
gggacggcaacgcaaagatgaccctgggaatgatctggaccatcatccttaggttcgccatccaggacatctccgtggaagagacctcggccaaggaagggctccttctctggtgccagagaaagacagccccgtataagaacgtcaatgtgcagaacttccacatcagctggaaggatggtcttgccttcaatgccctgatccaccggcacagaccagagctgattgagtatgacaagctgaggaaggacgaccctgtcaccaacctgaacaatgccttcgaagtggctgagaaatacctcgacatccccaagatgctggatgcagaggacatcgtgaacacggcccggcccgacgagaaggccataatgacctatgtgtccagcttctaccatgccttttcaggagcgcagaaggctgaaactgccgccaaccggatctgtaaggtgctggctgtcaaccaagagaacagcacctgatggaggactacgagaa

SEQ ID NO: 20704 - DNA, 376 bp, Homo sapiens
atttccattatgaaagagaagctgaagaaagactgactgcagcgacaaagaatgatccttggataatttaaatgagataatgcagttgcaactgtgtgtccacaagtatggacatcaaatctgtgggaaaagaacaggtttgtattttcaggaaggagagaataacagtcttatagacagagggcacagctaagcacagctgccactgcaggagacaggccccatgtcaggatgccatagtgctgtggggagcacagtattacccagtgggtagggcttctgtcttccctgggagcagggatggtatcttagtcaatttttttcccttgagatgaggtctgtgcctgatgtacaacggatactccataaatgtttg

SEQ ID NO: 20705 - DNA, 420 bp, Homo sapiens
gtctacccttcaggtgaagtaactaagtctaaaccactctctggagtagaagataggtattaaggtccacctcctaaaggcagagaatgttcatatatatttgaaattcttctatacaacatttatatcttctctttcattttactaatttatttttaagctactgtgcaatacagggtgggtgtgtgttagaccattcttgcattgctataaaggaatacttgaggctaggtaatttgcaaagaaaagacgtgtaattggcgcatggttctgcatgctttataggaagcattgtcccggcatctgcttcttctaagggcctcaggaagcttacagtcatggcagaaggtgatggggagccaggacggcacctggcaagagtggaagcaacagcgacaatggggaggcccaaactctttt

SEQ ID NO: 20706 - DNA, 315 bp, Homo sapiens
ccctgctccaaacaaccacaaaaatggtactttttaaatgcctgcccatcctctcctggaagggggtttttccaagattcggggtgactgattcatcccacagccccaggcagcagtttatcctggaactgtcctctgttctcccatcactgctgagccctgagaattgtgaatggccctcagagcatctaggcctctgcaacaatcaggtctctggtgacttgaaatgcagcaatgagggagctcagctggatcttctcgttggtgccaacagaaagcctgtactcaatgtctgccattttggtcaataaatgt

SEQ ID NO: 20707 - DNA, 534 bp, Homo sapiens
  misc_feature (1)...(534): n = a,t,c or g
attggnacaccttgactgattacgaatttaatacgactcactatagggaatttggccctcgaggccaagaattcggcacgagccaaaacaaagaaacatgtcagcagggcctatggtggttccatgtgtgctaaatgtgttcgtgacaggatcaagcgtgctttccttatcgaggagcagaaaatcgttgtgaaagtgttgaaggcacaagcacagagtcagaaagctaaataaaaaaatgaaacttttttgagtaataaaaatgaaaagacgctgtccaatagaaaaagttggtgtgctggagctacctcacctcagcttgagagagccagttgtgtgcatctctttccagttttgcatccagtgacgtctgcttggcatcttgagattgttatggtgagagtatttacacctcagcaaatgctgcaaaatcctgttttcccccagagagctggaggttaaatactaccagcacatccctagatactactcaagttacagtatatgatcactaatatagtatgctcttggtac

SEQ ID NO: 20708 - DNA, 393 bp, Homo sapiens
cccacgcgtccgtgcagatcccggggggattcagcccttctcccactgtgctggcagaggcactcctgtgacgctgaatacagtgaacagggacattcccgccactcggggacagatgggcacaagggaggggaaactccatcaggaagtgctcccctgggcagaggcgcccactgggtgctgtgggctcaggagggggcggggcaggagctggtgccaaccgggaaccagagccccacaagccatacagcccattggtgacaaggtcctgagaacacagtggccaggtgtccccaggctcctggcccctccgacgacctcaactctgcccagcccggtccctggccatcagcgacgctgtccgccccccgtcagatcccatgtgtgccatgt

SEQ ID NO: 20709 - DNA, 443 bp, Homo sapiens
  misc_feature (1)...(443): n = a,t,c or g
ttgganaccngttatgacatgattacgaatttaatacgactcactatagggaatttggccctcgaggccaagaattcggcacgagcctggtaatagaattgtttacctttataccaagaaggttgggaaagcaccaaaatctgcatgtggtgtgtgcccaggcagacttcgaggggttcgtgctgtaagacctaaagttcttatgagattgtccaaaacaaagaaacatgtcagcagggcctatggtggttccatgtgtgctaaatgtgttcgtgacaggatcaagcgtgctttccttatcgaggagcagaaaatcgttgtgaaagtgttgaaggcacaagcacagagtcagaaagctaaataaaaaaatgaaacttttttgagtaataaaaatgaaaagacgctgtccaatagaaaaagttggtgtgctggagctcctccct

SEQ ID NO: 20710 - DNA, 335 bp, Homo sapiens
ggttttattctatgtagcccacacatatatttatgcatgtgaatggtattttcaatacactttgtgcatagctgtgttcagatccctcaaagcacagcccgtgatgagtaagaaagactgtagctgcagctctggggtccccgaggagctatggctcatcctcatctcagcgggcttcactcccaaggggtgggtgctacatctccatcctcccctgtcccagcaacattctcctcttttgttagccaggaatcctggaagaatagcaagagcagagggtagcataaggcttgtgttccttcctaactgctgcctttctgattaggaagcattga

SEQ ID NO: 20711 - DNA, 356 bp, Homo sapiens
gctgctggctcactcttccttatattctgaaagactgagctcatctaagacctcccctgaaagccctccctgacacctcctctatcctctggctggggcaggtccccttcttcacgttaccctgagcctgtgcatctctcagctactacatcagccttgtgatattataattatcctctgactgtctcccatgaaagacagtttcttggggggcaaggggtgtgatttattcatttttgtatcccagcatctgacaaataggcactcagatgtttgaatgaatcaattaaaaggtgatgcccatatatagttactttagtaaatgacaactacacagtatttcgtcagctgcctac

SEQ ID NO: 20712 - DNA, 343 bp, Homo sapiens
aattcggcacgagagcagaggcaagaggttgaggaaatacagtggattgtggggaggcaagcctggaagcagttgcatccgggagttgggagggtggcaatctcagactcttactgctctaaaatagcacctataaatgagtccatagcatatgaagcagggaagggaggtgggacctgcgtctgctgtgcttaatctcagctagtgggagacactctccaaatagctaattacttaatggaaatgaggcagaagataactacatttttttttttaagggactgggtcacctggacccagtgctcatgcctgtaatcccagcactttgggaggctaaggttgg

SEQ ID NO: 20713 - DNA, 382 bp, Homo sapiens
gactgttccttgctgagcttttcgatctcaaccttattctactctctactttgctcaaaacatgccagccatatgggccttcttaaagtgctcttatatatgctgggagacagttctctattggtctctccattctgcaagctgggagcagagacactaaactgcctttgttctaggctatctttccaaagccgtttcagcctcataagacaaagcagcacaggacaggcaggtttactgccagttataaggctgaggaggcctgaacatggagttcctctcctctaacgtaacacactcaatgtacaaggcttcaccttaccctcttcttagctgccccataggaagtggggctaagggaaccaaaagaaatgctgatact

SEQ ID NO: 20714 - DNA, 339 bp, Homo sapiens
gtggctcacgcctgtaatcccagcagtttgggaggccaaggtgggtggatcacttgaggtcgggagttcgaggccagcctggccaacatggtgagacaccgtctctgctaaaaatacagaaattagccgggcgtggtggtgggtgcctgtggtcccaggtatttgggaggctgaggcggaagaattgcttgaaccgggtaggcagaggctgcagtgagttgagatcgtgccactgcactccagcctgggcgacagagcaagactctgtctcataaataaaaaatttttgaaaagagccattttatgtggaagattagtctccttgttgcagattctttg

SEQ ID NO: 20715 - DNA, 445 bp, Homo sapiens
aacagctatgacatgattacgaatttaatacgactcactatagggaatttggccctcgaggccaagaattcggcacgagcaggcactcagaatggtccagcgtttgacataccgacgtaggctttcctacaatacagcctctaacaaaactaggctgtcccgaacccctggtaatagaattgtttacctttataccaagaaggttgggaaagcaccaaaatctgcatgtggtgtgtgcccaggcagacttcgaggggttcgtgctgtaagacctaaagttcttatgagattgtccaaaacaaagaaacatgtcagcagggcctatggtggttccatgtgtgctaaatgtgttcgtgacaggatcaagcgtgctttccttatcgaggagcagaaaatcgttgtgaaagtgttgaaggcacaagcacagagtcagaaagctaaataa

SEQ ID NO: 20716 - DNA, 327 bp, Homo sapiens
ggagagagctagcaccatgacctgctgaataagaagcttccctgcccccgttttttttttaaacttggccttactctgttgcccaggttggagtgcagtggtgcaatcatagctcaccacaatttcaaactctcaggctcgagtaatcctcctgcctcagcctccccagtagctaagactacaggcgcgtgccaccaaacctggctaattttattttttgtagagacaaagtctcactatgttgcccaggctggttgcaacctcctggcctcaagcaatcctcctgcctcagccttccaaagcacatgagccaacgcaatcagcccc

SEQ ID NO: 20717 - DNA, 163 bp, Homo sapiens
gaatgtttctacacataagccttagcatatatgaaaacggtgttaaacatgtcccattagtgtataaagggagtcagtgtaaatttatttacctgctgtagcttcacacagcaatggctggtggcccaaacagaccaggccaggtggcacatggctgcactgc

SEQ ID NO: 20718 - DNA, 379 bp, Homo sapiens
  misc_feature (1)...(379): n = a,t,c or g
gctggagcaatctgcctgccttggctttgcaaagtgctgggattacaggcataagccactgcgcccggccatatatattgtatttaaccttggattaagtgattgctttaggatcttccagctcaaacatcacattgcatatatatgtgtatatatataattttttgggggggggcggagtcttgctctgtcacccaggctagagtgcagtggcgcgatctcggctcaccgcaagctccgcctatggggttcactccattgtcccacctcagcctcctgagtagctgggactacaggtgcctgccaccatgcctggctaattatgnttttgtatttntagtanagacggagtttcaccgtgtagtcaggatgggcttga

SEQ ID NO: 20719 - DNA, 329 bp, Homo sapiens
gtcggcgtggtgtgtcacaaagaaacgacatgtatacaatggttatgtggttagaactccaacagtgaacaacgaaaagaattcattcaacttgacaatggatacaggtaggcagggccaggtcacacagaacctggcaatccatgttaatcttataaaacaatataagcaatcctcatctttcctcatgctcttttatttatctcagaccctgtttgaatgaaaatttacaaatacaagctaaaagataataaactcccacaaaaccatcaaccaatttcaactatcaacttttggcgaatcctacctcatctataacatctatctcc

SEQ ID NO: 20720 - DNA, 382 bp, Homo sapiens
ggaaaatacctcaaacaacatatataaatcagaccaaggatattaatctcaggccaccgccatagtgaggctttgaagccaggggaaggtggtgagaccttcttgtatgttaaggaagaaatgtcataaaaattccaaagcaggactcaaatttccaggggagagggcctctttattgtttcctctaatagctgctttggcgctttagtgaataaatgtgttgcacaaagtaaccctagatgcatctgaactttagtctggcttggctcccacttttgtatttagcatccattctgaattatttatttaagatatttttgctgttgtttgtcactccttcttcctgtctccctaccagtccccctcattcgtcctgctttat

SEQ ID NO: 20721 - DNA, 332 bp, Homo sapiens
tgattattaatattactcttatagggccataggatgcttaagctaacattaaatttttatttactaaggaatgtgatttctatgtgttcacagaataaagacaatgacactcttaaggatgtgctgaaagcaaacgttgaaaagcctgtaaagatgcttatctatagcagcaaaacattggaactgcgagagacctcagtcacaccaagtaacctgtggggcggccagggcttattgggagtgagcattcgtttctgcagctttgatggggcaaatgaaaatgtttggcatgtgctggtacgtatcaactgtgaactgttactggaggttca

SEQ ID NO: 20722 - DNA, 350 bp, Homo sapiens
cttactttcatttattcttattgagatcattaatgaaggctcctttccagatactgttcataaatgctattctatttaacgtttagttcttagtactagatcacaagttaaaaaaacaaaacaaagaaacctgtaagtcctacggttatctcttcctcttaaatcttgtcttcttagtcctttattacagtgacagcggcatgggcagtcatccattcactccctcattcaagtcagaaaaacatctcagtcccaggggcaaaagactcctagtagcacctggactccagaatggacttagcagtagatggaggtcttaggagacctattttcatcagttccaacgtgag

SEQ ID NO: 20723 - DNA, 387 bp, Homo sapiens
gagtcattcaataatgatataattacatactatgataagggctataaagaaaaacttcagggtatttagaacataggacagcggtactagacctaatctgggagatcagggaaggaaggctcctgctgggagagagttgaaatgaactggacaaagatgagggaaagggtttaggtagagagaacagcaagtgtgtgagaactggccattggagaatataaaggaaggcaatacggctagagtatagtgagtgactgatatgagaagagattggaaacataggtagatcatacagcaccttataggccttgtttaaagtgtttatcccaagagcagtgagaaagcactgaaatatattttttggggtgagcaatattatcaaatctg

SEQ ID NO: 20724 - DNA, 391 bp, Homo sapiens
ggactttctggctccagccaaagccaccctaggggagacacaccgcctgttccccaacaccatgctctttgcctcagaggcctgtgtgggctccaagttctgggagcagagtgtgcggctaggctcctgggatcgagggatgcagtacagccacagcatcatcacgaacctcctgtaccatgtggtcggctggaccgactggaaccttgccctgaaccccgaaggaggacccaattgggtgcgtaactttgtcgacagtcccatcattgtagacatcaccaaggacacgttttacaaacagcccatgttctaccaccttggccacttcagcaagttcattcctgagggctcccagagagtggggctggttggcagtcagaagaacgacctg

SEQ ID NO: 20725 - DNA, 548 bp, Homo sapiens
  misc_feature (1)...(548): n = a,t,c or g
tnnnnnttttgaancctttggctatcnacatgattacgaatttaatacgactcactatagggaatttggccctcgaggccaagaattcggcacgagccagtactgcagactatgccatgttcaaggtgggacctgaagctgacaagtaccgcctaacatatgcctacttcgctggtggggatgctggagatgcctttgatggctttgattttggcgatgattctagtgacaagtttttcacatcccataatggcatgcagttcagtacctgggacaatgacaatgataagtttgaaggcaactgtgctgaacaggatggatctggttggtggatgaacaagtgtcacgctggccatctcaatggagtttattaccaaggtggcacttactcaaaagcatctactcctaatggttatgataatggcattatttgggccacttggaaaacccggtggtattccatgaagaaaaccactatgaagataatcccattcaacagactcacaattggagaaggacagcaacaccacctggggggagccaaacag

SEQ ID NO: 20726 - DNA, 402 bp, Homo sapiens
gcattggtccttctgatgaaacacaagatgaggttttccctgctgagtgtcaggcagtctgtctcaagctgcaggctgaagccccagtggaatctaattccatccttccagtccccttcatacgaagagtgggaaatagtgggaatggaaattaattgtacctgctggcattattaaagttatcagtgcgtatcccctcttgggccaggaagattaaaaaggctgttgtaatcagagcacatgatttctgacacactggatgggcttcctccccaggttagatgtaaggaagtgatctgagcttgttgcctctggcctgataccacatagctcggggctatgcagtgtctgcctcatcctcccatcagccctggaggaaagccaggatcctgctctctgaat

SEQ ID NO: 20727 - DNA, 554 bp, Homo sapiens
  misc_feature (1)...(554): n = a,t,c or g
ggggacaggtgtgtgccaccatgcctggctaattttttgtatttttagtaaagatagggtttcaccatgttggccaggctggtcttgaactcctgacctcaagtgacccacctgcctcagcctactgaagtgctgggattacaagcacaaaccaactcacctggccgaagcttgcacttttaaccagtgtactatattatctttctgttaatgttttttagggtcttcattcactgagtgcctcattaaacctagtgctaagcaataagaatacagtataagatatggtctcattttctttcttcaaggatattacagtctaatggagaaggcataaaagcaaatacaataccatgagattagtaaaataaagtaaaagttgaccctgtttgtcagggccctccaaaaatgaaggacccttttactgaaaatcagcaaaatattagtacanaggatatgattcacagaaaaatgtgttgcactgcttccacantgcatgttctatcctcaaggngatgttantgccnccgttttgtantacnggtgcctggaaa

SEQ ID NO: 20728 - DNA, 370 bp, Homo sapiens
gattttttgtagttttatattttgtgggaaaaaagggcaatatagacagctctctgtatctgtgggttccatgactatggattcaaacaactgcaggttgaaaacatttaaagaaatattgtgtgtctattgaacatgtacagacttttcttgttgttattccctaaagaatacagtgtaactatttacctagcattacactgtactaggtaatataggtagtctagagatgatttaaagtatatggaaggatttgcataggatatgtgcaaatactatgccatttttttttttaatcagggacttgagcatccatgaattttggcatgggggaaggccctggaaccattcacccacagatgccagggga

SEQ ID NO: 20729 - DNA, 347 bp, Homo sapiens
agattatgagatgacaacacttttgggagaacttccatgtgacaaaagatagaataaacacagttgagagacaagaaacagattggaagatttttgcaacatacctaatgaaaaaagtataaatatccagaaaatgctacaactcctacaaattagtaaggaaaaaacaactcaatagaaaatgggcaaaagaaaagaacaagcaatcacagaaaaagaaacaaagtggccagtaaacaaaaactgttcaacctcagtaaaataagaggaatgcaaactaaaggtactatctctcacccatcagtttagcaaaaagcaataaattaaattattaatcagtacgtatt

SEQ ID NO: 20730 - DNA, 338 bp, Homo sapiens
gggctcggcgtgggcctttgtgtctcccagcagcaggcgtacataggagtcatctcttcgatgggcattcacatagggctaggtgtgcccttgctttataaaacatatgggttcttaaaaattggatattcctggatgtcttgtaagtaaaatcattttacatgaccatgaggagtgatccatttaaaggatccttgcagggaagactctggggaacaaggaatccacatgcactctgagatttctgtttagatttttcctgaagagctgcctcttaggggacttctgaatttaaagagacgttagaaagcagacatgatgaaactgcgttgtctcca

SEQ ID NO: 20731 - DNA, 461 bp, Homo sapiens
  misc_feature (1)...(461): n = a,t,c or g
ggtnntnnnnnatttgganacnntatgactgattacgaatttaatacgactcactatagggaatttggccctcgaggccaagaattcggcacgagggatgctggagatgcctttgatggctttgattttggcgatgatcctagtgacaagtttttcacatcccataatggcatgcagttcagtacctgggacaatgacaatgataagtttgaaggcaactgtgctgaacaggatggatctggttggtggatgaacaagtgtcacgctggccatctcaatggagtttattaccaaggtggcacttactcaaaagcatctactcctaatggttatgataatggcattatttgggccacttggaaaacccggtggtattccatgaagaaaaccactatgaagataatcccattcaacagactcacaattggagaaggacagcaacaccacctggggggagccaa

SEQ ID NO: 20732 - DNA, 458 bp, Homo sapiens
  misc_feature (1)...(458): n = a,t,c or g
acnctatgacatgattacgaatttaatacgactcactatagggaatttggccctcgaggccaagaattcggcacgagattcaaggatccactgaaagatggtgaggcaaagatcaaaagcgactatgcacaacttcttgaagacatgcagaatgcattccgtagccttgaagattagaagccttgaagattacaactgtgatttccttttcctcagcaagctcctatgtgtatattttcctgaatttctcatctcaaaccctttgcttctttattgtgcagctttgagactagtgcctatgtgtgttatttgtttccctgtttttttggtaggtcttatataaaacaaacattcctttgttctagtgttgtgaagggcctccctcttcctttatctgaagtggtgaatatagtaaatatacattctggttacactactgtaaacttgtatgtagggtg

SEQ ID NO: 20733 - DNA, 462 bp, Homo sapiens
  misc_feature (1)...(462): n = a,t,c or g
tntgaancccaccagttntgacctgattacgaatttaatacgactcactatagggaatttggccctcgaggccaagaattcggcacgagatcacatggtccattattcgtgagcacatgggagacatcctctataaactttcctccatgaaattcaaggatccactgaaagatggtgaggcaaagatcaaaagcgactatgcacaacttcttgaagacatgcagaatgcattccgtagccttgaagattagaagccttgaagattacaactgtgatttccttttcctcagcaagctcctatgtgtatattttcctgaatttctcatctcaaaccctttgcttctttattgtgcagctttgagactagtgcctatgtgtgttatttgtttccctgtttttttggtaggtcttatataaaacaaacattcctttgttctagngttgtgaagggcctccctcttc

SEQ ID NO: 20734 - DNA, 411 bp, Homo sapiens
agggaatccaggagcttttgaagagagagtttggagtgcagaagaggcagcggaactaggagttgtcgggtggcgtgacctgctccactggcttgttttgaagtattgtttcatctggtgaaggagccagtgccatcatggtggctagagatatctggtccatatccagatccagtccctgaagctgaaggaaatatatgaccaggtaatggtgtgtacttaacaagcatctaggtaaatacatgtgcataaggcacagaagcacagaatgggaaaagaaagggcgtggaggttcaacacattctgagggtgtatttcaagatgaaaggaaactcatatgcagatggtctcagagttctatcttgagactcactgggggaggagaaagggggaaaggaaaaaaaagtctta

SEQ ID NO: 20735 - DNA, 399 bp, Homo sapiens
aattcggcacgagcaaccctctgatccagccagccccaccccgagatgcccacaatgatcttttaacattgcccccagcataagatccagtgacttccaacagccagagcccacccttcaccttcagttatcttccgctagagtggccatccaaccttactgcagggaccccacgtcactcacaaggacctgcggtgttgctctgcaaccttcaacacgattgcattcatcgcctcactcacctgcaccacaggctcactgaccgtcatcatccgccgtgacccccgacctcacccctgccgatccctgtaacacttcttctctacgcctttccaccaccctgatcttgcggcaagatccccaagacgatcttacacttcagggattcccacactatcc

SEQ ID NO: 20736 - DNA, 734 bp, Homo sapiens
tgtatgactgattacgaatttaatacgactcactatagggaatttggccctcgaggccaagaattcggcacgagggaaatggatggactgtgtttcagaagagacttgatggcagtgtagatttcaagaaaaactggattcaatataaagaaggatttggacatctgtctcctactggcacaacagaattttggctgggaaatgagaagattcatttgataagcacacagtctgccatcccatatgcattaagagtggaactggaagactggaatggcagaaccagtactgcagactatgccatgttcaaggtgggacctgaagctgacaagtaccgcctaacatatgcctacttcgctggtggggatgctggagatgcctttgatggctttgattttggcgatgatcctagtgacaagtttttcacatcccataatggcatgcagttcagtacctgggacaatgacaatgataagtttgaaggcaactgtgctgaacaggatggatctggttggtggatgaacaagtgtcacgctggccatctcaatggagtttattaccaaggtggcacttactcaaaagcatctactcctaatggttatgataatggcattatttgggccacttggaaaacccggtggtattccatgaagaaaaccactatgaagataatcccattcaacagactcacaattggagaaggacagcaacaccacctggggggagccaaacag

SEQ ID NO: 20737 - DNA, 355 bp, Homo sapiens
gtttgtttgtttgttgcaaatgaaaatgtatttgatgtccaggatatcctaaatagaaaccatagtttaaaatcgtatataagaaatattttgttataaattgacataaatacctaggaaaatattgaaattgtcaataaaataagttcattacctcttggaatatgttattttcaaaataaactataatctatagttcattatcaaatcaaaattacataaggattgagataagcaaagactacataatgcaataatgttctgtacctataccaataagcttgattaaaagagtgttctgtaagtagcattttctaactgattctgtatattctagccacaagaatcttgactg

SEQ ID NO: 20738 - DNA, 351 bp, Homo sapiens
gggcaggtggatcacctaaggtcagagtttgagaccagcctggccaacatggtgaaaccctgtctctactaaaaatacaaaaaattagccaggcgtggtggtgcatgcctgcaatctcagctactcgggaggttgaggctggagaattgcttgaacccgggaggcggaggttgcagtgagccgagatggcgccactgcactctaacctgggcaacaagagcaaaactctgtctcaaaaaagaaaaaaaaaatgagatttgtatatattgacatatcccatggtatattatgctagaaaagcaagttgaagatgaacatgtatataccattatcacattttttaaactttgg

SEQ ID NO: 20739 - DNA, 168 bp, Homo sapiens
gcattttctgctgaagacctcctacctcaatgaaaaataggatctttcatttgtaaactctcaacttaccttcaccaccagctgttcacacttattcttacttccagaggtgtcaccatttttcttttttcttcctatctaccccctataggagtttttttttttttt

SEQ ID NO: 20740 - DNA, 418 bp, Homo sapiens
ggagtcatataacatgcccttttgggtctgcttctgatgcttagcattacagtgcagagttcatccacgttgtgacttgcatcaatactccttttcatggctggataatactcagtttgatggatgtaccatattttgtttatccattcatcagttgatgggcacttggattattttctactttttgactgttgtgaataatgctgcagtgaatatttgtgtacaggtttttgtataaacacgtttttatttctcttggctgtatacctagtgatggaattgctggattataaggtaactttttttgttgttttttgagatggagtcttgctgtgtcaccaggctggagtgcagtgacgagatctcggctcactggaacctccatctcccgggttcaagcgattcccctgcctcagcc

SEQ ID NO: 20741 - DNA, 436 bp, Homo sapiens
  misc_feature (1)...(436): n = a,t,c or g
gtgcaattgtgtcatttcaggagaaatgacctgttaccaaagtgtcatgaaacccacattaatgagctgggctgtagtggaggtttactttgatttctgaccttaattattagtggtttggattctttacgtttatgatggattttctgattaccaattatgattcactgtaagccatttttaaaaatatgacatgaagctctgacccacttttaacaacacagtggcaaatgccaaacaattggcaatttccccttctaatatcagctgtttgaatcatcacatctactgtggtggctggggaccactttatcttcattctctggcttcagtattcttttctggtattgtcattactgacctaggtgcatatctgnactaagctgggaccttanctctatgccctgagaaaatganggtnaactggganaaccgc

SEQ ID NO: 20742 - DNA, 476 bp, Homo sapiens
  misc_feature (1)...(476): n = a,t,c or g
ganntccaaaatttgaantccatcagctatgacatgattacgaatttaatacgactcactatagggaatttggccctcgaggccaagaattcggcacgagaagacttctatgttgatgagaacacaacagtccgggtgcccatgatgctgcaggaccaggagcatcactggtatcttcatgacagatacttgccctgctcggtgctacggatggattacaaaggagacgcaaccgtgtttttcattctccctaaccaaggcaaaatgagggagattgaagaggttctgactccagagatgctaatgaggtggaacaacttgttgcggaagaggaatttttacaagaagctagagttgcatcttcccaagttctccatttctggctcctatgtattagatcagattttgcccaggctgggcttcacggatctgttctccaagtgggctgacttatccggcatcaccaaacagcaaaa

SEQ ID NO: 20743 - DNA, 538 bp, Homo sapiens
  misc_feature (1)...(538): n = a,t,c or g
acaccagccccccaccatgggcagcaaggagcgcttccactggcagagccacaacgtgaagcagagcggcgtggatgacatggtgcttcttccccagatcaccgaagacgccattgccgccaacctccggaagcgcttcatggacgactacatcttcacctacatcggctctgtgctcatctctgtaaaccccttcaagcagatgccctacttcaccgnccgtgagatcgacctctatcagggcgcggcccantatgagaatcccccgcacatctacgccctcacggacaacatgtaccggaacatgcttatcgactgtgagaaccagtgtgtcatcattagtggaganagtggagctgggaagacagtggcaagccaaatattcatgggctacatctccaaggtgtctgggcngnngcnnaaagnccagcacgtcnaanattcatcctgcatccntcccgctgtcnaaggcttccggnacgccaanacgtgcgcancacantccagccgcttggnaagtacttgngaccattcaggc

SEQ ID NO: 20744 - DNA, 546 bp, Homo sapiens
  misc_feature (1)...(546): n = a,t,c or g
ggtaagtagttgaagactcagacacttgaagttgaattttggaagatttgcagttattggcagtgacaggatctaggtatgagtatgaaaatgggtagctgaggtgagatggcaaaatcaaaagattatcatgagtcgggaggtcagtattcattattgaaatcaccagttatgatggggtgattagagtgaggcaaggagccggtgcagagggagaggtgtgaggagaagcaccatggcaagaggttagtggcatacacgttggaattagctgaaatctgtttcctcggttgcattgggcaaagtcacttctcatcagtgagcctcaacatcttctcagtaaaacagggataattaccgccaccctcaaagagtcattgtggggatgaaatgagatgatgggntgtgaagtacantgacctgtcncagctaatgtcantatttactgttgacngtttcctacngttctttaataaaaagaatggnanntgtgtagaagtgctaatgcctancctgcatgtcganntgaanctncntatatacttt

SEQ ID NO: 20745 - DNA, 244 bp, Homo sapiens
gtgctcggggcttagatggtgaacctgggcctcagggtcttcctggtgcacctggtgatcaaggacagcgaggacctccaggagaagcaggtcccaaaggagatagaggggctgaaggtgctagaggaattcctggtctccctgggcccaaaggagacacgggtttgccaggtgtggatggccgtgatgggatccctggaatgcctggaacaaagggtgaaccaggaaaacctgggccttctgg

SEQ ID NO: 20746 - DNA, 323 bp, Homo sapiens
gtagaagttaataaaggtatccatggagaacactgaaaactcagtggattcaaaatccattaaaaatttggaaccaaagatcatacatggaagcgaatcaatggactctggaatatccctggacaacagttataaaatggattatcctgagatgggtttatgtataataattaatagtaagaattttcataaaagcactggaatgacatctcggtctggtacagatgtcgatgcagcaaacctcagggaaacattcagaaacttgaaatatgaagtcaggaataaaaatgatcttacacgtgaagaaattgtggaattgatgc

SEQ ID NO: 20747 - DNA, 645 bp, Homo sapiens
  misc_feature (1)...(645): n = a,t,c or g
tgattccttaacagctatgacatgattacgaatttaatacgactcactatagggaatttggccctcgaggccaagaattcggcacgagccattcatttcctcaaggaccactcccaaagacttctatgttgatgagaacacaacagtccgggtgcccatgatgctgcaggaccaggagcatcactggtatcttcatgacagatacttgccctgctcggtgctacggatggattacaaaggagacgcaaccgtgtttttcattctccctaaccaaggcaaaatgagggagattgaagaggttctgactccagagatgctaatgaggtggaacaacttgttgcggaagaggaatttttacaagaagctagagttgcatcttcccaagttctccatttctggctcctatgtattagatcagattttgcccaggctgggcttcacggatctgttctccaagtgggctgacttatccggcatcaccaaacagcaaaaactggaggcatccaaaagtttccacaaggccaccttggacgtggatgaggctggcnccgaggctgcagcagccaccagcttcgcgatcaaattcttctctgcccagaccaatcgccacatcctgcgattcaaccgcccttcttgtggngatct

SEQ ID NO: 20748 - DNA, 407 bp, Homo sapiens
agagatcattgcaaagcagggaggaggtggaggtggaggaagcgtccctgggatcgagaggatgggtcctggcattgaccgcctcgggggtgccggcatggagcgcatgggcgcgggcctgggccacggcatggatcgcgtgggctccgagatcgagcgcatgggcctggtcatggaccgcatgggctccgtggagcgcatgggctccggcattgagcgcatgggcccgctgggcctcgaccacatggcctccagcattgagcgcatgggccagaccatggagcgcattggctctggcgtggagcgcatgggtgccggcatgggcttcggccttgagcgcatggccgctcccatcgaccgtgtgggccagaccattgagcgcatgggctctggcgtggagcgcatgg

SEQ ID NO: 20749 - DNA, 441 bp, Homo sapiens
  misc_feature (1)...(441): n = a,t,c or g
ggagagctggaaaggatgcagggagatgccatcaaggtacattgtgcttggagtgtaaattggtacaccctctcgctcagggctatttgcagtataaatgcatacatttcggcctgacgcgggggctcacggcctaggataaatgttaagagaagaactgctaggtcaaaaagcatatcattttaaaggctattgacacatattgccaagttccttccaggaaggtttccccaactttcactcttaccagcagtgccagaggagaggagagggagttggccaacaggaagggttattatattatggaacaaaacgacctttgttttttaccatcagatgtttcacagtgatctgcgctagctatttgattttttgnttttttgagatggagtcttgctctgttgcccaggctggantgtantggcgtgatcttggctcact

SEQ ID NO: 20750 - DNA, 83 bp, Homo sapiens
gcactgaagtgaatgatctgttcgatcagtgccgacttgcctttctttcccagctgcaaaccacccaaggtgaagtcatctta

SEQ ID NO: 20751 - DNA, 507 bp, Homo sapiens
  misc_feature (1)...(507): n = a,t,c or g
ggtggacagctgctgtctgctgccttggcaggggctcctactcccaagtgggggctgagcccatgagcaggagctcaaggagctgcaggtctgaggccagacctgtttaattctatcccacagagtcgctgcccaacgtggtggtgaatggtgtgctccagggcctctacagcttcagcatcagcccagataaagcccagccaaaggcggcctgtcaccctgctcctctgccaccgatgccctgatcagtccagaggcctttggctgcctcctaagaaagtcatgtgcctctgtcctatgaactccatataaggctgggtcctcctttggcctggacccaggacttaattacccagtgcccagttgtgccacattcccactcaaggntcanaacttggctccattggtactggaggtggtaaaattgtatgccctaaagccaananncaagggaggtcaanaaaattagtngtaaagaggaattcnccaaanaaannnnnnnnaaaa

SEQ ID NO: 20752 - DNA, 435 bp, Homo sapiens
ggaatcaagtgccaactatgagccagcctctttgataaagtggagatgcaaagatggaggcatggattatacttgcgaagaactcacaggaggagatagaaaatcaaatcaacaattacaacacgtagctgcataccataacacaaatgaaacacaccaatatgactaagcacctaaaagtgccctgcactgtatcaggcattaggcattaggtgaataagatgcatgctcttcctgttctgtggagctcactgctgagtgcaggagataagaccattaatgagcgatgacagcaacgtgctctaacagggagctgtggttcggcgtgggtgggtcctaaccagatcagtgggtctaggaaagtgactcaggagtgtgtcatgaggtcaaggccagcatctcaagacgctcacatgactactttatgggtctttg

SEQ ID NO: 20753 - DNA, 433 bp, Homo sapiens
gatctccccagatacctgaaactgaccacctgagtacgttttcccattgctgagctgtttccctgatatctggccatgcaacggagatcaagagggataaatactggacttattctactcctttctcaaatcttccatgttgggatcaacaatattccacctgtcaccctagcaactttggccctcaacatctggttcttcttgaaccctcagaagccactgtatagctcctgccttagtgtggagaagtgttaccagcaaaaagactggcagcgtttactgctctctccccttcaccatgctgatgattggcatttgtatttcaatatggcatccatgctctggaaaggaataaatctagaaagaagactgggaagtagatggtttgcctatgttatcaccgcattttctgtacttactggagtggtatacc

SEQ ID NO: 20754 - DNA, 370 bp, Homo sapiens
gcatggaattattttggcttttttattttcttcttttttaaaaggaaatgttactaacttccaggttttccttaaagtatagccaagaattctttctactttgtagatagtctttgaaacgatttgtttatctttctctaggtcatgtccctgggactcctgtctacagagaaaaagaagatatgtatgacgagattattgagttaaagaaggtagtatttcggtttgttctctattgatttgaaacggtgaaagcttcctataacaatgtattagaacatcagtgcctgtgctgggaggtgcccagatgggaagagcgggagccgttagggtcgaacctgagtttgagccgtggcgtagtgccctagga

SEQ ID NO: 20755 - DNA, 356 bp, Homo sapiens
gaagaaagggccgccggggttggggccctctgggtgactgggagaggaaggcgccggaatggatccagattaaatcggatgctgtatgccctgtggagacatggggtgtacctctaaacgcactgcgttgtaagcaaaggagtgacctgatttaatttgatcttttaaaagtcattctaggccaggccgggtggctcacgcctgtaatcccagtgctttgggaggccgaggcgggtggaccacgaggtcaggtgttcgagaccagcctggccaacatagtgaaaccccatctctactaaaaatacaaaaattatccgggcatggtggtgcatgcctgtaatcccagctactcaggg

SEQ ID NO: 20756 - DNA, 326 bp, Homo sapiens
ggacttttcccagaaagcaaatatgctgtgttatttgcctaccaaggaggcttcggaggtagaatttggtgcctacagactggcagtggggaggtgtgtgggctgttgacaaagtcctgagcaggaggatggaggggaggttttatagagagtaagagctgcttggaatttggaagtcccagaggggtgttgtagcttggagaggagcaggaaggggcagctcactgtggcaggctctgcatagtggctgcctgtaaggagatgggacttcagaggaacctgaggctcagatacttgtcatgttttttttttaattaagcggccgc

SEQ ID NO: 20757 - DNA, 459 bp, Homo sapiens
acagctatgacatgattacgaatttaatacgactcactatagggaatttggccctcgaggccaagaattcggcacgagactggatatgttcattgtgatattttggccttttgtaagattgaaaaaaaatgagggggtaaataattacaacttactaataattagaaaacctactctacttattaaaataattcctaatgttatccaaaaggaatttaaactataaacaaaaattctctacagaaatcaaagaaaataatatcaaatttatttcactagataacatatcaaagagtcaattcttgggttttgaggagaaagtaatgctaaaaagtcacaattaaaattttgtttcaggccaggcgcggtggctcacacctgtaatcctagcactttgggaggccgaggttggtgggtcacttgaggtcgcgagttcaagaccagcctgccaatagggtg

SEQ ID NO: 20758 - DNA, 398 bp, Homo sapiens
  misc_feature (1)...(398): n = a,t,c or g
gactacctattatgtgccaggcattttgctagactgaggatgtggtggtgaacaagacagataggtgtttctttttacatgtcagaagttgattttttagtcagtcagtatgtcatcaaaattaaatactcttggctgggattacaggcgagagccaccatacctggcccagggtgaacctctcataagaacatgaggctgccatggcagcattagacctgccacactgggaggagagtttgcctgttgttaccaagcacaggagagggactctgccactggggagggggtcaagcacagtatttttagcaagcaatcctttactgtttattcagccactttaaaaatagataccaccctttctttctaattggcccatttttcatnctctgngcttg

SEQ ID NO: 20759 - DNA, 448 bp, Homo sapiens
  misc_feature (1)...(448): n = a,t,c or g
gcccaagatataggtgctgttactatctgtatccccacatgagaaaacaggcttggggaaagaggttaaataagttgcctagggtcacaccgtgaacagcagagccatgattcaaatctcattttgactggctccaaagcctgtgttcctaactaaaccactcactaaatgaggactcctgactgttgttattttggttaacagaaccataaagtaggagttaaggttctagttactgtttgctgagcattttccaatcttacctcacttaacctctgtattctgagttaggtgaggcaggtgggtgtgctcccatttcacagacaaggactaggagggtccagacaagtagtgaacttgcccagggtcacccagctaatgttgggttggaagttgaatcggggcttttgaaaatacaccccattttttcttctgngcttcagcttga

SEQ ID NO: 20760 - DNA, 429 bp, Homo sapiens
  misc_feature (1)...(429): n = a,t,c or g
gagcagtatgccggaagctggttttcaggccacaaatgctttcacagagtgcaaattcacctgcaccagtggtaaatgcttgtatcttggttcgctggtctgtaaccaacagaacgactgtggggacaacagtgacgaagagaactgtctcctggtgaccgagcacccgcctccgggcatcttcaactcggagctggagttcgcccaaatcatcatcatcgtcgtggtggtcacggtgatggtggtggtcatcgtctgcctgctgaaccactacaaagtctccacgcggtccttcatcaaccgcccgaaccagagccggaggcgggaggacgggctgccgcaggaagggtgcctgtggccttcagacagcgccgnccgcggctgggcgcctcggagatcatgcatgccccgcggtccagggacaggttt

SEQ ID NO: 20761 - DNA, 352 bp, Homo sapiens
gccacccacctgcacaacgacctctgggaggtgttcagcaaccccgaggactggaaggagaagtacatccaccagaactacaccaaagccctggcagggaagctggtggagacgccctgcccggatgtctattggttccccatcttcacggaggtggcctgtgatgagctggtggaggagatggagcactttggccagtggtctctgggcaacaacaaggacaaccgcatccagggtggctacgagaacgtgccgactattgacatccacatgaaccagatcggctttgagcgggagtggcacaaattcctgctggagtacattgcgcccatgacggagaagctctaccccg

SEQ ID NO: 20762 - DNA, 353 bp, Homo sapiens
gggcatacggagtggtgtccatgtgcatcgggactggaatgggagccgctgccgtctttgaataccctgggaactgagtgaggtcccaggctggaggcgctacgcagacagtcctgctgctctagcagcaaggcagtaacaccacaaaagcaaaaccacatgggaaaactcagcactggtggtggtggcagtggacagatcaaggcacttcaactcatttggaaaatgtgaacactgatgtcatggtataggagtgggtggggtgttgagccacccatcagaccctctttagctgtgcaagataaaagcagcctgggtcacccaggccacaaggccatggttaattcttaagg

SEQ ID NO: 20763 - DNA, 548 bp, Homo sapiens
caacagttatgacatgattacgaatttaatacgactcactatagggaatttggccctcgaggccaagaattcggcacgaggaatttttttttccagccccggtaccggaccctgcagccgcagagatgttgatgcctaagaagaaccggattgccatttatgaactcctttttaaggagggagtcatggtggccaagaaggatgtccacatgcctaagcacccggagctggcagacaagaatgtgcccaaccttcatgtcatgaaggccatgcagtctctcaagtcccgaggctacgtgaaggaacagtttgcctggagacatttctactggtaccttaccaatgagggtatccagtatctccgtgattaccttcatctgcccccggagattgtgcctgccaccctacgccgtagccgtccagagactggcaggcctcggcctaaaggtctggagggtgagcgacctgcgagactcacaagaggggaagctgacagagatacctacagacggagtgctgtgccacctggtgccgacaagaaaccgagg

SEQ ID NO: 20764 - DNA, 401 bp, Homo sapiens
gtcgagatcagcctgggcaaaacagagagaccctgtctctacaataaataagaattagcgggggcgtggtggcgtgagcctgttgtcccagctacttgggaggctgaggtgggagaattgcttgagcctaggaggtcgaggttgcagtgacccatgatcacaccactgcactccagtctgaattacagagtgagcgcctgtctcaaaaaaacaaaacaaaacaaaaaaaccaaccttatatccttctcattggcacccccctgagataatcgggtcagaaacctgggagccatcatttgttctgtcattcctaatcagaaactgattcctattggttccactatatcctgtgtcctggagatcaaaaacaaataaatagtaaataggtacttgccttcaca

SEQ ID NO: 20765 - DNA, 319 bp, Homo sapiens
ctcctgtctctgccccccgagtagctgggattacaggcatgcgcaagcatgcccagctaattttgtatttttagtagaggtggggcttctccatgttggtcaggctggtctcaaactcctgacctcaggtgatccacccacttcggcctcccaaagtgctgagattacaggcgtgagccaccacacccggcccaggtgtttttcaatatctaattatgcataaaaaatgaatgcagctctctctcaaactgttcattgaactaaattcttccagaacccaaagtaaggaagatttgcttgaaatctgattaacagtttc

SEQ ID NO: 20766 - DNA, 427 bp, Homo sapiens
  misc_feature (1)...(427): n = a,t,c or g
gtttaacatttgttcatttatttaaaacatttacacactgcctactactacacaactggtcagaaactgttctagggatacaaagcgggtaagataaatgcctgccttcaagaaactcagtcctatggggaagtcaacaatacacaggccagacatggtggctcacgcctgtaatcccagcactttgggaggctaaggcaggcagattgcttgagcctgggagatccagaccagcctgggcaacatagtgagacctcatctctacaaaacatgagccaggtgtggaggtgcgtgtctgtagttccagctgttcaggaggctgaggtgggaggactgcttgagcccaggagatggagggtgcaatgaaccatgtttatgccactgnacttcgggctgggtgacagaagtaagaaccttgcttnacaaa

SEQ ID NO: 20767 - DNA, 350 bp, Homo sapiens
gctatgaagttgactgatctaaactgcacaaaggcagagcttggagaagttcagcgcctgacctcagaagggtctgacactgacattcctggcctcttccctaccaggaaatctatgctgacttgctgactgccttggagtctttccattctgaaaatgccatagtggaaaaaacccagactctagaggcagaacagaccgggttccactgctgagcccgtgtgaccacatgcctggtccttaatggttctgactcttatttcttcacatgggggcagtcatgaaggttaaatgatggaatatatgtgaaaatgcctagccttgcgttgggctcataatgggaacctcgt

SEQ ID NO: 20768 - DNA, 312 bp, Homo sapiens
attttgtgtgcgatggtggtggtggagagcagaggttatactcttttgttagtttgcgagccgctggactaggaaggagctacacggatgtgaatgagttgaagagggttgtatattgcgtcgacgcggccgcgaattccagatctatgaatcgtagatactgaaaaaccccgcaagttcacttcaactgtgcatcgtgcaccatctcaatttctttcatttatacatcgttttgccttcttttatgtaactatactcctctaagtttcaatcttggccatgtaacctctgatctatagaattttttaaatg

SEQ ID NO: 20769 - DNA, 348 bp, Homo sapiens
gccagcataaggcttgataagaccaaactaattagaaacaggcacgatggaattttcttttttcatttgaaaaaacatttcaaagtttattgttggaggtaagtgcttaccaccctgtgaagtgcgtgcagggctgtcattaggtggaggtaacaggcaccaaatccccaagaagctgctacccaccaagtgacctccgagccactgtgtcctctccctttacctttctggctatgcatagaaccttaaggaagtttccttctagcctggctgatggcttcctgggtgaacctggcagagttgtttattatttctgaatctcaccttcttttagaggtaatctcaatt

SEQ ID NO: 20770 - DNA, 438 bp, Homo sapiens
gggtggttctcacagcactcagtggctttctccaaagaaatatttttacgaatcctctctgactttccactgccttgattcttttatatccttgatgtgtccttagagttgtctaactttctttcaaagtacacaactcgtactttactttagagttttatctattttatgatggagcctcagtggaaactcccaatttaacatttcattttccttaaattcctgggtaacagtgcagcagtgcgaagaagctagaggtggtgaagtcaaatttaaatttgattttagattttatgactagctttgtgattgtggacaagtcacttagcctattttttaaaatgaaagtaaccgtatatcactaggattgatgtgggatacaaacagggtaccctgtaaatcattaaagcttgatcatagtaagtgctcagtaacttg

SEQ ID NO: 20771 - DNA, 325 bp, Homo sapiens
gcccaccaccagcctggccccatgaaggagtgataatctttgacaatgtgaacttcatgtacagtccaggtgggcctctggtactgaagcatctgacagcactcattaaatcacaagaaaaggttggcattgtgggaagaaccggagctggaaaaagttccctcatctcagccctttttagattgtcagaacccgaaggtaaaatttggattgataagatcttgacaactgaaattggacttcacgatttaaggaagaagatgtcaatcatacctcaggaacctgttttgttcactggaacaatgaggaaaaacctggatccctt

SEQ ID NO: 20772 - DNA, 734 bp, Homo sapiens
gcagctgtgggaggaggcggcgtggaaggccgaggagctcaagcccggaccaatccccacgttccgggccgcgaccctgaccctgcagcgtaccgggaagcgaaaccggccggatgggccgctgagcccgaatcgggcactgtgtggagccccctggagctgagatcaggatgttccgcttcatgagggacgtggagcctgaggatcccatgttcctgatggatccctttgctattcaccgtcagcatatgagccgtatgttgtcaggtggctttggatatagccccttcctcagcatcacagatggcaacatgccagggaccaggcctgccagccgccggatgcagcaggctggagctgtctccccctttgggatgctgggaatgtcgggtggtttcatggacatgtttgggatgatgaatgacatgattggaaacatggaacacatgacagctggaggcaattgccagaccttctcatcttccactgtcatctcctactccaatacgggtgatggtgcccccaaggtctaccaagagacatcagagatgcgctcggcaccaggcgggatccgggagacacggaggactgttcgggattcagacagtggactggagcagatgtccattgggcatcacatccgggacagggctcacatcctccagcgctcccgaaaccatcgcacgggggaccaggaggagcggcaggactatatcaacctggatgagaagtga

SEQ ID NO: 20773 - DNA, 569 bp, Homo sapiens
  misc_feature (1)...(569): n = a,t,c or g
tacagcttgacatgattacgaatttaatacgactcactatagggaatttggccctcgaggccaagaattcggcacgaggaagggtattctgattgggataatggctcgtaggagacagtgaagatcaggactaccaaaatggaatggatgggcctgttggggattagcagaagtgcttaggtgggtggaattacagagggctaggaaagctagacagagctagtcaaaatgagacctgatgtgaaaggccactagggcaccagcctttttaatctgaaagctctgcttcctctgtttctttatcctgttgctgtttgttgaccacataattatttgtttacgtcatcagctggcacagggcctttatgaggtcagagactgcctagccctgtgttcctggcacctaacaatgcctgtcataaaaacaggcattcagtacgtttttgatgatgaacaaattatacttatttccttggatttgacaactacttgactgnatatgatgataattagaatatccctctgagaaatcatttaaaagagaaactcattcaatgcaatctcaatgc

SEQ ID NO: 20774 - DNA, 397 bp, Homo sapiens
cccacgcgtccggtggtctgcccctggagaacccagaagaacacagctgtgcgcgcccacaggctctgggggcgggagaagataagtcgcaaggagggggcgggacctacacctcaggaaagccggagaattggggcacgaagcggggctttgatgacccgcaaagggcgaggcatgcaggaggtggaggaattaagtgaaacagggaaggttgttaaacagcaccgtgtgggcgaggccttaagggtcgtggtccttgtctgggcggggtctttgggcgtcgacgaggcctggttctgggtaggcggggctactacggggcggtgcctgctgtggaaatgcctgcccgcgcgcttctgccaggcgcatggggcatcgtactctagcctccactcct

SEQ ID NO: 20775 - DNA, 468 bp, Homo sapiens
  misc_feature (1)...(468): n = a,t,c or g
ggtgnnnnnntttgaaatcctatgacatgattacgaatttaataccgactcactatagggaatttggccctcgaggccaagaattcggcacgaggagatttcatttatgagatgacatgaacacccaatgcttttcccactcccacaaagtagaccttcaagaaaaccatggtaggcataggagaatttttgtctttgttttaacctttgtcctaaacagatctgatctggcgaatcttcacatattggttatttcctttccataggaagtgcttagcctccaagtatgggctacttattttttaacaattactttcactccaagacgtacataattttttaaacatgggaatccctgatgtttcatttttgttttggaaatgatttttagagaagatgaattatcctgtctgatgccatgagatctatttttatcatttgggatgttgagactaaaactgacaacat

SEQ ID NO: 20776 - DNA, 464 bp, Homo sapiens
  misc_feature (1)...(464): n = a,t,c or g
tttgataccnttatgacatgantacgaatttaatacgactcactatagggaatttggccctcgaggccaagaattcggcacgagcggcacgagaacacatccagtgtacatgaagtaggcaccgagttaaactatttgtctactatatagcatgtcatcttaaaagccttattttttcctcaaaatattaactttatttttctccctgtaaaatcaagacacagttaaaatgtagccttcctcattttctgggaatactttctaacaagatatgcttctttccaattggacttctaaatttctagcaattctaacagtgcataaaagaggcaaccccaaaagtgtagcaggtactgaataacagatttgcagccttgggtatccacattaaaatttgaaatctaagtgaattacttcaagctgatttcttaggtcaaggagagattatggccttaaatgcctga

SEQ ID NO: 20777 - DNA, 396 bp, Homo sapiens
  misc_feature (1)...(396): n = a,t,c or g
caggggagaaaggtgaatagaggaggagggtgagcacaaagtggggttggtggggagggtgagcagagggtgtaggcaacaaagccagggtccggagcactagcccaccagatccgctgtgggaccctagcacctcacaatttttggcacaaaatcaccactgtgcagggctctgtaacccagcttcagcctggaccctgggggcagacttgtcatactctaatagatatacttcaaagcatccaagtatatgccactctgttgcctgggggctcccagtgagcaatagctgtgagcctgatacttaatggaaatttgccnaggcatggaaggaacaggcanagagacaacaaggagaagcngatgaggcagatgaaatctacccggcataatgca

SEQ ID NO: 20778 - DNA, 387 bp, Homo sapiens
gagcagcatttcatacagttgttgactcttctccattaaaacatttactttatttggcttctaggaaacatattttcctgctttttcttcctatttctctgactcttttctcagtttcctttgctgtttccttttctatcctctaaacattgaaatatcctaagcctagtttgggattcccttgatggtcttcatttctttaatgggaactgtgctggtgactcaaatttatatctccagccagaacctttctcctgaattccagattcacatatccgactgtttactaggtgcttgataactatatctgtacttttcatcttgtttaatccaaatttacttcttttgcattttccttagttcaataaatgacaactttattcttcc

SEQ ID NO: 20779 - DNA, 417 bp, Homo sapiens
tttgactgattacgaatttaatacgactcactatagggaatttggccctcgaggccaagaattcggcacgaggtggcaggtgcctgtaatccgagctactcgggaggctgaggcgggagaattgcttgaaccagagaggcggaggttgcggtgagccgggatcgcgccactgcactccagcctgggcaacaagagcgaaactctgtctcaaaaataaaaaattccctttaacaccttcaaggtcaaatgcctgcctttgtgaacagttaataaactttgacattttcagacatttgccattcagaagggagcattgtagcctgctgtagaccattccagcaaatgtcagaatgcagggcaagatgtgtgtcgactatgttttttatgtttaagttacttacttatttcttcaggtaa

SEQ ID NO: 20780 - DNA, 347 bp, Homo sapiens
ctgcttttgaattctatacagtagccccccttacctgtaagaaataagttccagattggacagctattgcctttatcaaatagaaatgaagttgcattaggactgagttccagtttctgtaagattttatatatctttttctttactatttcatcatttctagttttgtcctaggacctatgataaagccttctagtaattccatctgagaacctgctttttatcaaagctgcttctctttcttggaagttgaatttggttttgtctcctgaacaacatgtgattgccaaaagttcaagtctgttttttacatagttcttcctaacctcctttcctgtgaaatttaa

SEQ ID NO: 20781 - DNA, 474 bp, Homo sapiens
  misc_feature (1)...(474): n = a,t,c or g
ttggaaanccctttngntttggaaancccctntgacatgatnacgaatttaatnccgactcactatagggaatttggccctcgaggccaagaattcggcacgagaactggagtataaagattatcattttttatttttcaaattgggaaagaaactctgggagaacaggacacctgtcagtgccacacagctcattgccggtaaaaccgggatttgagcagagatcttctgatacccattggggttcattaccacttacaccacagctggctcaagaacaattttagaaaaacaaaacaaaccccagacattagttactctgaagatacgccaccttgactctgttcagaaagcaacaggcttcacattaaatagaagtccgttatttgtttataaggataagaggaccggagacgctcaaaagaagaaataaaaattagagttctcccctctgcatcacctcacaagtgaaag

SEQ ID NO: 20782 - DNA, 834 bp, Homo sapiens
gggccgcgcgagggctgacgaaccggaagaagaggaactgggcctgaaagggtaccggtgaccgctactgctgccggtgtttgcgtgtggcagggagccaggcctggcgagcggggtgtgtcgcgatgccggagctggcagtgcagaaggtggtggtccaccccctggtgctgctcagtgtggtggatcatttcaaccgaatcggcaaggttggaaaccagaagcgtgttgttggtgtgcttttggggtcatggcaaaagaaagtacttgatgtatcgaacagttttgcagttccttttgatgaagatgacaaagacgattctgtatggtttttagaccatgattatttggaaaacatgtatggaatgtttaagaaagtcaatgccagggaaagaatagttggctggtaccacacaggccctaaactacacaagaatgacattgccatcaacgaactcatgaaaagatactgtcctaattccgattggcatcattgatgtgaagccgaaggacctagggctgcctacagaagcgtacatttcagtggaagaagtccatgatgatggaactccaacctcgaaaacatttgaacacgtgaccagtgaaattggagcagaggaagctgaggaagttggagttgaacacttgttacgagatatcaaagacacgacggtgggcactctgtcccagcggatcacaaaccaggtccatggtttgaagggactgaactccaagcttctggatatcaggagctacctggaaaaagtcgccacaggcaagctgcccatcaaccaccagatcatctaccagctgcaggacgtcttcaacctgctg

SEQ ID NO: 20783 - DNA, 343 bp, Homo sapiens
gctccttatatctcagaggctgtgtgggagatatttaacaagtaccaactgggagtcagtgaacgtgcattctggattggtgatgtccttggccagccttggagttctggcttccttgagatctgagtcttcctatggaaatcaagattacagtgcatcctctcagagccctgcactccgtagcatgctaattctagttatctacatttacctagatggccttttccaattatctatgtatatcagatggtatctacatacacctatatctgattctcattccgatctttaaaagtgagaatatctgaaatgtgcatttggcttgttttggggttttctttgg

SEQ ID NO: 20784 - DNA, 362 bp, Homo sapiens
gctggtatatggtagaaattcagaaagaggaaaccataccaatataatttggaacatcatgctcagtaccccaaatggtagagggtgaagggctgttcctccaacaaacgcctggcaaaagggaggatcacaacctcaggcagtggttgatactcttgggttagagaaagggtagagaaggctggtgtcatgataagcacaccgactctacagctgcattgctggggtacaagtcccaattctccaattatatgacattgagttacttaatctctaggttcctcagtttcctctagataaaatgaaaacaatgattatacctattgcattgggttgttgggaggatgaaattaattagtata

SEQ ID NO: 20785 - DNA, 721 bp, Homo sapiens
aattcggcacgaggcaaatgctatggaggtggtaagtcaaacttatcctcatatctcagtatatctcaattcaccctccttatgttgaataattttatagacctttccctgagactgatcaggaagaggatatgaaatctggggcaaggggcccagattttacccagccaagggtgacaaaggaccagaaggaagttgccttcacattttgcctaagtcccattctccctatgctttgcatttgtgaaaatattcatctgagattataggtacagcatgaagccttggaaaaaaggcatgtttacatcctctgccaggatagcataacaattaacaaagcaggtttttgaatctctgaatagtcaggtgcactgccatcaaaataaacttttatttctattctttgctgatagattacaaataaagccactaaaatatcctgaaaaagaagatttatatatgaattggacaccagggacagatttttcacacttattttgttggagcagttttttccttagctgtgggtgtttgggaagttcttttgttgttagcttttgttgcttacaagagggaaaaaagctttagttatgctaaggtaagaatgattttgattggaggcaatattgttctcagtgtgggccgaccttccacgtattggtagtgatttaccagttcctaactgaagaaaaacccatttgtttgaaaattgctgttaaca

SEQ ID NO: 20786 - DNA, 492 bp, Homo sapiens
tgaatccttgagacgaactaaacgactcactatagggaatttggccctcgaggccaagaattcggcacgaggtcaaaatcataatgcctggagcgtgggtccactcttttccctgggactccattatttctctttgaagcacaggagccaatccccctggtccctatcaggagccacacagttttggttgaagagggaggggctgagagtctggtaggctcatgggtgtggttatccagcgcaggggccagagaagtgccctatgctcttctttccccaccgtgcttggctgactctaaaaattcctgggcacatcacagttactagtcagctttctggacatgtctattcaaagaagtttctggaagatcagagaatcttgaaaaggtgaaatccagtctcttgggcagaatctccaccaccttggtgagccacacccagcctttgctctgtgattcggggcaagggccaggcacatctacttttgcaagc

SEQ ID NO: 20787 - DNA, 375 bp, Homo sapiens
ggcaaaagtttaaatataacttttatatgtgctggaaaaccaaaaaatttatgtgacctgctttattgcaatattcactttatggcggtcatcaggaaccgaacccacagtatctgtgagctatgcctgtataagtattctctgaggatattgatgggatgagtgccactgtcagtgcaaacctgttgtgatttaaacactttgctcctgcagtgagatgtggcctaaagccattagcacaaagaggaaggaaaactggagggctttgaaagcactagttgcctacagtgagtttttattttcaagttagaatattgtaagggaatgtggaatctgattttaggagtcctaatgaggcaggtttaatgagctaat

SEQ ID NO: 20788 - DNA, 1609 bp, Homo sapiens
  misc_feature (1)...(1609): n = a,t,c or g
cccacgcgtccgggcggcgtcgccaggaggagcgcgcgggcacagggtgccgctgaccgaggcgtgcaaagactccagaattggaggcatgatgaagactctgctgctgtttgtggggctgctgctgacctgggagagtgggcaggtcctgggggaccagacggtctcagacaatgagctccaggaaatgtccaatcagggaagtaagtacgtcaataaggaaattcaaaatgctgtcaacggggtgaaacagataaagactctcatagaaaaaacaaacgaagagcgcaagacactgctcaggcaacctagaagaagccaagaagaagaaagaggatgccctaaatgagaccagggaatcagagacaaagctgaaggagctcccaggagtgtgcaatgagaccatgatggccctctgggaagagtgtaagccctgcctgaaacagacctgcatgaagttctacgcacgcgtctgcagaagtggctcaggcctggttggccgccagcttgaggagttcctgaaccagagctcgcccttctacttctggatgaatggtgaccgcatcgactccctgctggagaacgaccggcagcagacgcacatgctggatgtcatgcaggaccacttcagcccgcgcgtccagcatcatagacgagctcttccaggacaggttcttcacccgggagccccaggatacctaccactacctgcccttcagcctgccccaccggaggcctcacttcttctttcccaagtcccgcatcgtccgcagcttgatgcccttctctccgtacgagcccctgaacttccacgccatgttccagcccttccttgagatgatacacgaggctcagcaggccatggacatccacttccacagcccggccttccagcacccgccaacagaattcatacgagaaggcgacgatgaccggactgtgtgccgggagatccgccacaactccacgggctgcctgcggatgaaggaccagtgtgacaagtgccgggagatcttgtctgtggactgttccaccaacaacccctcccaggctaagctgcggcgggagctcgacgaatccctccaggtcgctgagaggttgaccaggaaatacaacgagctgctaaagtcctaccagtggaagatgctcaacacctcctccttgctggagcagctgaacgagcagtttaactgggtgtcccggctggcaaacctcacgcaaggcgaagaccagtactatctgcgggtcaccacggtggcttcccacacttctgactcggacgttccttccggtgtcactgaggtggtcgtgaagctctttgactctgatcccatcactgtgacggtccctgtagaagtctccaggaagaaccctaaatttatggagaccgtggcggagaaagcgctgcaggaataccgcaaaaagcaccgggaggagtgagatgtggatgttgcttttgcacctacgggggcatctgagtccagctccccccaagatgagctgcagccccccagagagagctctgnacgtcaccaagtaaccaggccccagccttcagggcccccactacgccagcctctccccgtctggatcctgcactctaacactc

SEQ ID NO: 20789 - DNA, 366 bp, Homo sapiens
gaaaatggcggcagcgatggatgtggataccccgagcggcaccaacagcggcgcgggcaagaagcgctttgaagtgaaaaagtggaatgcagtagccctctgggcctgggatattgtggttgataactgtgccatctgcaggaaccacattatggatctttgcatagaatgtcaagctaaccaggcgtccgctacttcagaagagtgtactgtcgcatggggagtctgtaaccatgcttttcacttccactgcatctctcgctggctcaaaacacgacaggtgtgtccattggacaacagagagtgggaattccaaaagtatgggcactaggaaaagacttcttccatcaagcttaattgttttgt

SEQ ID NO: 20790 - DNA, 327 bp, Homo sapiens
gctgtaggtgttagtggataatagtgttgactagcatccctagtgtgaaagagttgtcaaacttgaaatatgtttgtaaaaataaacacgatttccgtttaatcttaggcctttagtagccataatcaaggtagaggaatagcagcccttatatttgaagaacttcagttttccaggcactttctcatcatctcatttaatcctgtctcacagctggaggtgggggcaattcatatacatagaaagtagcttctaattccatttagcagtatagaatgcttaaaagaaccataattattgcaggatagaaaaaacaaattttttttt

SEQ ID NO: 20791 - DNA, 408 bp, Homo sapiens
attccttgcaagatgcattctctcaaagctcataaaaggtagatctcagtaggcatatatatctattaaataaattgaagcagtaattaataaccttccaagaccaggcgcggtggctaaaaatacaaaaagttagccgggcgtggtggcatgcgtgtatagtccaagctactcaggaggctgaggcagaagaatcacttgaacctgggaggtggaggttgcagtgagccaagattgtgccactgtactccagcctgggtgacagagtgagactccatctcaataaaattaataataataaaaccttccaaaaaaagtgccgggaccaaatggattcactgatgtgcatttttcgagatcttaaggtagaaatgataccaagtctgtactgtctctttcagaaaataa

SEQ ID NO: 20792 - DNA, 475 bp, Homo sapiens
ggttgacagatggcgatcccacaaagggggtgacggaccgttcccaaatcctcatgaacgtccgcaacgccatccggggcaggttcccgctctacaacctgggtttcggccacaatgtggactgtaactttctggaggtcctgtccatggagaacaacggacgggcccggcgcatttatgaggaccatgatgccacccagcagctgcagggtttctacagccaggtagccaaacccctgctggtggatgtggatttgcagtacccccaggatgctgtcttggccctgacccagaacacttaccagcacttctacgatggctctgagatcgtggtggccgggcgcctggtggacgaggacatgaacagctttaaggcagatgtgaagggccatggggccaccaacgacctgaccttcacagaggaggtggacatgaaggagatggagaaggccctgcaggagcgggactacatctt

SEQ ID NO: 20793 - DNA, 507 bp, Homo sapiens
  misc_feature (1)...(507): n = a,t,c or g
acatctatgacatgattacgaatttaatacgactcactatagggaatttggccctcgaggccaagaattcggcacgagctgggcactttaaataaaactaagctatgaaacccagagaaggggtagattctttctttcaaaagataaagaaacaacaatggcattatcacaccttttaaacatatgagagagggccaggtgcggtggctcacgcctgtaatcccagaactttgggaagctgaagcgagtggatcacatgaggtcaggggttcgagaccagcctggccaacatggcaaaatcccacctctactaaaaatacaaaaattagctgcatgtggtggcgtgcgcctgtagtcccagctactcggtaggctgaggcaggagaatctcttgaattcgggaggcagaagttgtagtgagctcatgtcattgcactccagcctgggcaaccgagtgagactctgctcatgaaataaaatgaaatanaatanaatanaataaaataa

SEQ ID NO: 20794 - DNA, 451 bp, Homo sapiens
tttgatccctatttgaaacctttgactgacacgaatttaatacgactcactatagggaatttggccctcgaggccaagaattcggcacgagcagctcatgaccgatctcctgtggaaacgtgtagtatcccacgcaccgcctcagacactgacagtagttactgtatccctacagcagggatgtcgccttcacgtagtaataccatttccactgtggatttaaacaaattgcgaaaagatgctagttctcaagactgctatgatattccacgagcatttccaagtgatagatctagttcacttgaaggcttccataaccactttaaagtcaaaaatgtgttgacagtgggaagtgtttcaagtgaagaactggatgaaaattacgtcccaatgaatcccaattcaccaccacgacaacattccagcagttttacagaaccaattcaggaag

SEQ ID NO: 20795 - DNA, 337 bp, Homo sapiens
  misc_feature (1)...(337): n = a,t,c or g
attgtctagcagagcaggggcagggtgataaattgttgataaattccactggacttgagcttggcagctgaactattggagggtgggagagcccagccattaccatggagacaagaagggttttccaccctggaatcaagatgtcagactggctggctgcagtgacgtgcacctgtactcaggaggctgaggggaggatcactggagcccaggagtttgaggctgcagcgagctatgatcgcgccactacactccagcctgagcaacagagtgagaccctgtctcttaaagaaaaaaaaaaangtcaaactgctggnactggccaggtttttgccca

SEQ ID NO: 20796 - DNA, 449 bp, Homo sapiens
ggaagaatatccacaaacatctacacttattcttagccaaaaggccaggaagtgactccagtctctaaaaaggctgagtatactcctcccttttctagctgtttatctgagtgaggctgggtgtttgccgtgttcttccgcctgaacacagatctcagcagagtatgggcgcaggtggatgcggggacccagcactctccttatcagccgaacaggagaggcctgtgcagcgcacagagtggcacactctcctcattcattatttttgttttggaaagtagttattttaaaaataaaagtaatgtatgttaatagtaatgggtttattgtattttaatgaattaaacatttgaaaatgtctcagttttaatttcctgcgtagtacatatcagttgatctgaaagctctttggggtcttccacagaggtaaagagtgtgaggggccatag

SEQ ID NO: 20797 - DNA, 628 bp, Homo sapiens
cccacgcgtccgagctaaggaactttacatcctaacagtataatccagctcagtatttttgttttgttttttgtttgtttgttttgttttacccagaaataagataactccatctcgccccttccctttcatctgaaagaagatacctccctcccagtccacctcatttagaaaaccaaagtgtgggtagaaaccccaaatgtccaaaagcccttttctggtgggtgacccagtgcatccaacagaaacagccgctgcccgaacctctgtgtgaagctttacgcgcacacggacaaaatgcccaaactggagcccttgcaaaaacacggcttgtggcattggcatacttgcccttacaggtggagtatcttcgtcacacatctaaatgagaaatcagtgacaacaagtctttgaaatggtgctatggatttaccattccttattatcactaatcatctaaacaactcactggaaatccaattaacaattttacaacataagatagaatggagacctgaataattctgtgtaatataaatggtttataactgcttttgtacctagctaggctgctattattactataatgagtaaatcataaagccttcatcactcccacatttttctt

SEQ ID NO: 20798 - DNA, 197 bp, Homo sapiens
gccaacagccctcttcccacctgggtaggcagcgccctaattggaattggaaacagaaaattcgccaggccatactgctggagcccattcagataaaactgcccaatactgagaggtgttttctacacccagctagaggagcacactccattttcccatgtctgacttcgtggtgtgagccctgggccctactgacc

SEQ ID NO: 20799 - DNA, 377 bp, Homo sapiens
gagttcttaagagcagccccggtaactggaggaatgggagccgttttgatgagaaaaatgggctggagagaaggagaaggattaggaaaaaacaaagaaggcaataaggaacccatcctagttgattttaagacagaccgaaaaggtcttgttgcagtaggagaaagagcacaaaagaggtctgggaacttctctgctgcaatgaaagatctgtcaggcaaacatcctgtgtctgctttgatggagatctgtaataaaagaaggtggcaaccacctgaatttctattggtccatgatagtggccctgatcatcgcaaacattttctctttagggtattgataaatggaagcgcttaccagcccagctttgccagccc

SEQ ID NO: 20800 - DNA, 448 bp, Homo sapiens
gagagtcagctggccacgatgccagtcactgctgagctgccaaaccttacgcgtcccagggggcacctgcctagaggccaggcactgcactggaccctcagacacagcttgtgcagcctgcttaggagcttgggaaatgactgtcatctgtgatcttgctggtcccaggaagcccattttacagatgaggaaactgaggcccaaaggcacgaagcgacctctctcagcctcaccaagagcactggaaggtggtgtagggctgcggccgtgcgcacagagagcacagcagcaggaaggctcctgggcctccagctcccctccctcagaagcctcccagagtgacaggaaggtcagaggccccagggagggggccggggccaggatctggcaatttcctatccctctctgtggctctgtgcatctaattactccttgagcatctgtgtta

SEQ ID NO: 20801 - DNA, 379 bp, Homo sapiens
gctcggctcattgcaatctctgcctcccgggtttgagcaattctcatgtctcagtctcttgagtagctaggattacaaatgtatgccaccatgcctggttattttattattattattattattatttttgtatttttagtagagatggggttttgccatgttggccaggctggtctgaaactcctggcctcatgtgatctgcccgccttagcctccttacatgcgtgagccactgagcctggccaaaatattgtctaattattcatcattctgtagtgttgagtaaatgtaacttttttgtgtctatattatgtagttttgagtaaatgtaactttttttgtctgtgtctttggacacttgtagccaaaaagaggaaga

SEQ ID NO: 20802 - DNA, 251 bp, Homo sapiens
tttttctacaccctcttttgagtgtagtttggtattttgtaattgagagctcatttcaaaagcagaaaaagacaacaaatattaaagcaaggaaaagtgtaactgaaacactgcactttactgttttatacttttgtacatatgagaaatcaagggattagtgcaaccagtagaaagcattgaaatgactgtcattaaccacacagtcctggaggcagagatgcagttacctaccctagcttttgatgggt

SEQ ID NO: 20803 - DNA, 521 bp, Homo sapiens
  misc_feature (1)...(521): n = a,t,c or g
tttgaaaacctttgagacacnattacgaatttaatacgactcactatagggaatttggccctcgaggccnnaattcggcacgagccagctgctcacgaggctgaggcatgagaatcacttgaacccaggagacaaaggttgcagtgtgccaagagcatgccactgcactccaacctgggcaacagagtgagactctgtctcccaaaaaaatagaaaaaagagtgcaggctctggaatcagactgtcattgactaatttggtgacctagacaagttagttaacctctctgtgcctcagtttccttcttgagtaatagtggcacatagaaatcaattagtatttatttctgctgttattactatcatctaaaaatggaaagaaatgaaaatgtccagtatttagtatactgatcaataattacacgtttatataattatatgtgcatgtgtatattgagggatgttatcaaagcatttggagatcagtggtatacgtgaccaagagataaagtagttttcata

SEQ ID NO: 20804 - DNA, 353 bp, Homo sapiens
gacttcattaaaccaagagtcatcttactccagatcccagactgcttgggaagttggacatgcatattcccaaagagaacagtgttggaagaagacaggagagcagctcgcgggttgggggtagagggtaggaaaagagggcaagatggaggactaccactcgaggccagcctccactgcctgttagggcggtagaacctaagagccggtccaaggcaacacaaaagacagtgaggctaggtctttaattgcagccaacgatcaagaaagcaactccgtctcaaaaaaaataattattatttaaaataatcattgggcctggcgcggtggctcacacctgtaatcctagcact

SEQ ID NO: 20805 - DNA, 488 bp, Homo sapiens
ggtcaggaactccttggtaagagtctttggaggaagtgccatctaaatgggtaaaatctgctatcttaagatttacttaacatatttactgcacacataagtgagttttctaaaaccagtttcatataaagcaattattcattcatttattccacaaatattaagtgcttgttctagacactgctaggttttggggataccatagggagcaagacaaaattcatgtttttatgggagctttaagtaagtaaaagacacaagatattcttcacttttgtgaaagcactaaagtaattttctagttgtttattagtagtggtagtcatgaatttttcatgaaaatgattggattaaaataatcaaggggaaaagaaaatctagctttatttctttatcatcagtaaaaatatctcaagaaagctcaaatgtattaagtgatccttgtcaaaacttttttttgacggtaagaccagctttttggtcatatg

SEQ ID NO: 20806 - DNA, 320 bp, Homo sapiens
gatagatcttctaggtctccaagatcatcctcttctcgttcttcatccccatatagcaaatctcctgtttctaaaagacgagggtctcaggaaaaacaaaccaaaaaaagctgaaggggaaccccaagaagagagtccgttgaaaagtaaatcacaggaggaaccgaaagatacatttgaacatgacccatctgagtctatcgatgaatttaataagtcatcagccacatccggtgatatttggcctggcctttcagcttatgataatagtcctagatcaccccatagtccttcacctattgctacaccacctagtcaga

SEQ ID NO: 20807 - DNA, 322 bp, Homo sapiens
ctgttttgttacattttacacccgtaaagctgcattagaagctcagaatgctcttcacaacatgaaagtcctcccagggatgcatcaccctatacagatgaaacctgctgacagtgagaagaacaatgcagtggaagacaggaagctgtttattggtatgatttccaagaagtgcactgaaaatgacatccgagtcatgttctcttcgtttggacagattgaagaatgccggatattgcggggacctgatggcctgagccgagggttgctcatcacccatggtggtaaaatttgctgatacacagaaggacaaagaacagaa

SEQ ID NO: 20808 - DNA, 444 bp, Homo sapiens
  misc_feature (1)...(444): n = a,t,c or g
accgctttgacatgnttacgaatttaatacgactcactatagggaatttggccctcgaggccaagaattcggcacgagcatccgagtcatgttctcttcgtttggacagattgaagaatgccggatattgcggggacctgatggcctgagccgaggttgtgcatttgtgacttttacaacaagagccatggcacagacggctatcaaggcaatgcaccaagcacagaccatggagggttgctcatcacccatggtggtaaaatttgctgatacacagaaggacaaagaacagaagagaatggcccagcagctccagcagcagatgcagcaaatcagcgcagcatctgtgtggggaaaccttgctggtctaaatactcttggaccccagtatttagcactttatttgcagctccttcagcagactgcctcctctgggaacctcaa

SEQ ID NO: 20809 - DNA, 488 bp, Homo sapiens
  misc_feature (1)...(488): n = a,t,c or g
tttgnnnncctatcagctatgacatgattacgaatttaatacgactcactatagggaatttggccctcgaggccaagaattcggcacgagctttggtagctcagtgtgcatctagagtgggactggggagggagctaagcttgggctgggctgcttggggcttggcatagggtggaaagggctaccctggggctctgaccacactgtagtatgtgtggagggtgccctcccgtctcccacaacttctgctataacaataaactgtagaggaatctgagtaccgttattattctttgtctaggtgtgcctgcatcatgctcctcttcctatcttctccctgtccacgtctcatattctcttctcaaagtgatataaaccctgggagagggcctttgtggcataggcacttcacaaaatatgaccacatagaaactggctcttttccaatacaacggtgttgccttgatattgtagtatttttaagcctg

SEQ ID NO: 20810 - DNA, 328 bp, Homo sapiens
gatcggaagccggttggggtgtgagaggttttctcgctctagggagattcttcaagcaatcactatgtcaacagacacaggtgtttcccttccttcatatgaggaagatcagggatcaaaactcattcgaaaagctaaagaggcaccattcgtacccgttggaatagcgggttttgcagcaattgttgcatatggattatataaactgaagagcaggggaaatactaaaatgtccattcatctgatccacatgcgtgtggcagcccaaggctttgttgtaggagcaatgactgttggtatgggctattccatgtatcgggaattctgg

SEQ ID NO: 20811 - DNA, 342 bp, Homo sapiens
ctaccttcttttctaccttttgcacttttcctaatcacattgggaataaaatgttgggcaagttagaatactccaaaatatttcatttaccttaaattttactcaatcctacattttattacctatactcataagaattgtattataaaatacattgttaaacgaatgttttcagtgctccattgagagtccggtgggagcacactgggttggggagaagacagagctgtgagccatccgtctgcctgtgcttgagtcttggctctgccattgactagttgtatgaactgccgcaggtggttcagccactcagaacctctgtaaaagtgagatgtaaaaaca

SEQ ID NO: 20812 - DNA, 347 bp, Homo sapiens
gggtgaggatgggtagggcactggaatccaagggagatgctagacccatactacctaatgtcatggaagaatagaaaatgtacaaaggaaaaagtgagagcggtaaggcctttgtctataggatgctgtctgagctttcttgtccccatacttagaagggaaaaagctttgggatcaaagagagagagaattaatctttctaccctctaagcaaggaccctgtatgccttcatcccacttaagaagtaagcctgaaatatgagttatttggccatatcctggtcctacagtagtcctagtctttgctatcacccaagccagcttcatggaaactaggccatattggc

SEQ ID NO: 20813 - DNA, 340 bp, Homo sapiens
ggaagttcagatttcatcttatttactgaaggtggagaaaggatgtggaagtaggggttatgggctctcaaaagtagatttagagagatttttttatcactgttttatgatatagttcactgagcacttacatagattaacagttacaagtttccataaatcagttagaatatgactagcttcagggaaggaattttcaacaactgcaatctttgattgttttactgtgggaacttgcagtgatataattgacaacattatttaacaataataggtaaagtaggccgggtgtggtggctcacgcctgtaatcctagcactttgggaggccgaggtgggtg

SEQ ID NO: 20814 - DNA, 470 bp, Homo sapiens
  misc_feature (1)...(470): n = a,t,c or g
gnnnnngnnnnnttgnnttnnnnntntgaaaccgtttgactgantacgaatttaatacgactcactatagggaatttggccctcgaggccaagaattcggcacgagtcgatctcccagaattcccatttggactggaacccatagttgccaccagatgggatattcaaaaatacgccagagaggcctacaacctgggggtcaggtacattggcgggtgctgtggatttgagccctaccacatcagggcatttgcaaaggagctggccccagaaaggggctttttgccaccagcttcagaaaaacatggcagctggggaagtggtttggacatgcacaccaaaccctgggttagagcaagggccaggaaggaatactgggagaatcttcggatagcctcaggccggccatacaacccttcaatgtcaaagccaaatggctgnnnagtgaccanaggaacagccnagctgat

SEQ ID NO: 20815 - DNA, 332 bp, Homo sapiens
gcatggccccagggcgggtgggccaggctcatggtctctctccaggccagcagtggcaccacaagggagatcacactgagatgcctgttaattctccccaccccagatttgcttccagctcctgacgctgtgtctgcgggagctgtttgagttccgattcatgcagactgaccccaactgggccaacttcctgtatgatgcctccagccaccaggttggttcctagtgatgtgtgtctgggtacatttgctgttgtaacaaatattccttgatatttcggtagctcaacaaaatagcagttgattacccccacaataggcaggggtggccct

SEQ ID NO: 20816 - DNA, 343 bp, Homo sapiens
ctctgcctgaatcacctcctccgtcagagccaagtctctctcctgctcctttgaactatccagatcctggcctaggtctgcctgtgtctctaggctctccagatggggggcatcattctccagatgaagagcagaaactgttcccagcaggagaaagggcaggagcaagaggcgttgcatatctactgtcttttagcgaggacactactccaccgtccttcttggggctgtctttgtgtgtctagtatagccccttccaagagtcgtcgacgcggccgcgaattccagatctatgaatcgtagatactgaaaaaccccgcaagttcacttcaactgtgcatcg

SEQ ID NO: 20817 - DNA, 521 bp, Homo sapiens
  misc_feature (1)...(521): n = a,t,c or g
tttgannnctttganancagctatgacatgattacgaatttaatacgactcactatagggaatttggccctcgaggccaagaattcggcacgaggggtggcaggcagcggggagccgatagaggctcctttgcctgctgtggtcctccaggcagcctttcacaggcacgcccatgcatatctcctattctaacggcccctgacctctcccttttggatcctaaactgtgtctctggtctgaagactgggaaggagcaatttctcaatttatctttctactgtggatgctttcctacgccctgaggcacatgaagtcagaaaggaagggcagaggggcaagtaggcacagtaagggaattttcttttcttttctttttttttttngaaacanagtttnantntgtcacccaggctgnagngcaanggcatgatctcgcctccngggttnaagcnattntccngcctaagcctcccgagtanctgggattacaggcgcctgccaccacgcccagttaattttt

SEQ ID NO: 20818 - DNA, 329 bp, Homo sapiens
  misc_feature (1)...(329): n = a,t,c or g
ggctttattcacatgtatatcactcagcctctttattttttaacttcctcacaggtgatttagcccttctcctgttggtaaatattttaggttgatttcacttttttttttcccaagagatggggtctctctgtctgttgcccaggctgcagtatagtggcgtgatcatagctcactggagccttgaactcctggcctcaagaaatcctcccacttcagcctttcatgtagctaagactacaggcttgtaccatcatgcccagctaattttaatttttttttgtaaaggtgaggtcttgccgtgttgcccaggctagtctnaaattcct

SEQ ID NO: 20819 - DNA, 337 bp, Homo sapiens
gcagctaatgtttattagcctcctacctaagtcagtcactttgctaaattcttcacctgtggtaactcattttgattgttataacatctcagcaccattattcccattttaatgatgaggaaactgagtcatagaggatacagacttgcccaaaggagagccaggattttcacaccccctcctcaagctgggcctgccctccaagtgcttgttatatacctccacgggtgtcagcccagatgactcctcacccatccaccacctgcagcttgagatgttaactattagagctccattcttttggttcaaaacgttgatacttacttagatgttcccg

SEQ ID NO: 20820 - DNA, 640 bp, Homo sapiens
  misc_feature (1)...(640): n = a,t,c or g
ctatgacatgattacgaatttaatacgactcactatagggaatttggccctcgaggccaagaattcggcacgaggtgggcagggctgaaagcgcacctcatggtgcagcctctggggttccacgcgcctgactgtggcaaagaggggtttgtggatctcccagaatatccctttggactggagtccagagttgccaccagatgggatattcaaaaatacgccagagaggcctacaacctgggggtcaggtacattggcgggtgctgtggatttgagccctaccacatcagggcaattgcagaggagctggccccagaaaggggctttttgccaccagcttcagaaaaacatggcagctggggaagtggtttggacatgcacaccaaaccctgggttagagcaagggctcgaagggagtattgggagaatcttcggatagcctcaggccggccatacaacccttcaatgtcaaagccacatggctggggagtgaccaaaggaacagccganctgatgcancanaaagaagccacaactgagcagcagctgaaagagctctttnaaaaacaaaaattcaaatcnnagtacctcgataaagctatttttgatgaatttcangtntttgggtcccantcctaca

SEQ ID NO: 20821 - DNA, 541 bp, Homo sapiens
  misc_feature (1)...(541): n = a,t,c or g
gaacatgacctacttctcaggcctcctggtgatcctggcctttgccgcctgggtggcgctggcggagggactgggtgtggccgtgtacgcagcggctgtgctgctgggtgctggctgtgccaccatcctcgtcacctcgctggccatgacggccgacctcatcggtccccacacgaacagcggagcgttcgtgtacggctccatgagcttcttggataaggtggccaatgggctggcagtcatggccatccagagcctgcacccttgcccctcagagctctgctgcagggcctgcgtgagcttttaccactgggcaatggtggctgtgacgggcggcgtgggcgtggccgctgccctgtgtctctgtagcctcctgctgtggccgacccgcctgcgacgctgtgagtcctggcccaccctccctcccagacactgacccacactcttaatgcatttcacccctccttgaagggaccggatcccggcntgattctgaaagctcctgacttgtgnanggaactntnggacncacgagatcccc

SEQ ID NO: 20822 - DNA, 348 bp, Homo sapiens
gaaaagtattattgcaggtatcaataaccatttgggacaaatttaaaaggtcttaattctaatttgctgtgaaaagtcatgccagagttattacagcatcaaaaagtaaaacaaaacaaacaacttcagttccatctgatgtagctgactttttgatgagactaaaactgtgtagttcatcatctccatccaagttcagatctcaagtctatgatcttgactaccttaatgtatggctattattatcttgatgatcacattggctttgctttcggcacaccccgatctctctccctttcttctgattttctccactcaaaacaagaggggtatttttctccgacattt

SEQ ID NO: 20823 - DNA, 338 bp, Homo sapiens
ggctaccatatctttaatgtcatggattccttgccaaatttccacagttcatattagtaactacatttgcttccgctttgtttcactgttgaagagaatgaaatgcttgtttggattaccatgcaagcatgcaaataatctatgctctctgtatttaaaaattcgtctatttgaaatgtgacttgggccgggcgcggtggctcactcctgtaatcccagcactttgggaggccaaggccggcggatcacgaggttaggagattgagaccattctggctaacacggtgaaaccccgtctctactaaaaaatacaaaaaattagccgggcgtggttgcgg

SEQ ID NO: 20824 - DNA, 342 bp, Homo sapiens
ggactctctgaaaaagataactgattcaatgaagaccctagggcaaggcttgagaagccactggtaccaatggacactgtggacaatggtcatttctccaaggacgctgtgagtattaactgtgatgctgtgattagtcagactgggattggctgtggaatgaaatactgatcagaactgacaagatttgtgtttgggactgtggctaacgagtcttttcagacttctatatgaatttgaaatggtctctcaggaaaaggagaacatggccgggcctggtggctcacgcctgtaatcccagcactttggcaggctgaggcgggcagatcacttgaggtcagg

SEQ ID NO: 20825 - DNA, 642 bp, Homo sapiens
gggtgggtttgagatgtttgggtgggttaagtgggcattttgacaacatggcttctcctttggcatgtttaattgtgatatttgacagacatccttgcagtttaagatgacacttttaaaataaattctctcctaatgatgacttgagccctgccactcaatgggagaatcagcagaacctgtaggatcttatttggaattgacattctctattgtaattttgttcctgtttatttttaaattttctttttgtttcactggaaaggaaagatgatgctcagttttaaacgttaaaagtgtacaagttgctttgttacaataaaactaaatgtgtacacaaaggatttgatgcttttctctcagcataggtatgcttactatgaccttccaagtttgacttgtataacatcactgtcaaactttgtcaccctaacttcgtattttttgatacgcactttgcaggatgacctcagggctatgtggattgagtaatgggatttgaatcaatgtattaatatctccatagctgggaaacgtgggttcaatttgccattggtttctgaaagtattcacatcatttgggataccagatagctcaatactctctgagtacattgtgcccttgatttttatctccaagtg

SEQ ID NO: 20826 - DNA, 518 bp, Homo sapiens
  misc_feature (1)...(518): n = a,t,c or g
gcctcttaaaaaatgtttcaagtttaatttctaatataatacatttcaatagttatacatgaacaacagctctccagggtccctaataagtcccaataaagaaaaggagtatagaggtgttttttttttgttctttctttcttttttcttttttttgtaaaancaaagctgaagtgggccgagtgctgtggcncacgtgtataaccccagcactttggaggcctaggcaggcagatcacttgaagtcaggagtttgaaaccaacctggccaactggtgaaacccngtctctactaaaaacaaaacanttacccgggcctggtggtgcaggcctgtaatcccagctacttgggaaactgaggganggagaatnactttaccaagggggggggaggtnnaattancctnaatgcnnnannggacccagcccggggaaaanntngnncccnncccnggngnnnnnntnnnnnnnggggggncttntttnnngggcnnnngggttcccctttnnggggggtt

SEQ ID NO: 20827 - DNA, 314 bp, Homo sapiens
atctctgcaaatgtcaatattattttggtctgtcttactttatacctaaagtttaataaatgtaagctcattttgttgaaatgtaatattcatagttattcttccttgattgattttattccttgattatgcagtgtgattttcatcagttacaatagttatcctttggcattatctcttacaaatgaagaaatcttatcttttaactgtggcttttaaaaaggctatcttaggcctggtgcagtggctcacacctgtaattctagcgttttgggaggccgaggcaggcaggtcacttgaggccaggagttcaa

SEQ ID NO: 20828 - DNA, 471 bp, Homo sapiens
  misc_feature (1)...(471): n = a,t,c or g
gtggacactgtcccaatggggtaacagctgggttgggcccagtggctgaggtgaagtccagcccagtgggagggggtccccgaggacctgctggccctgccctcggcaggcactggggagcaggctgggatggcggccaccactacccagagatggatgcgcggcaggagcgggtggaggtgctgccccaagcccgggcctcctgggagagcctggacgaanagtggagggcgccccaggcaggcagcaggaccccagtgcccagcacagtgcaagcaaacacctttgaatttgcggatgctgaggaggatgatgaggtcaaggtgtgaggggctggggcacggtcccagggccccacctaggtgcagagccggccctcacctaacagctggttcctaccagaccgganaggggagaagtcatgttgccctaaacccctcccacctntgcaggacagacatgggagggagg

SEQ ID NO: 20829 - DNA, 322 bp, Homo sapiens
gatttttgacacttacatgttaggaactagacattatttcagtaatcctcagaggagccttgagtggtagatgctatcattcttccccctttcttttaaataatgaaatagaggtttaggaagacccaaagctagttgatgtcagagccaagatccaaagcccatgtgtggttataaagccgtgttcttaccactatattatgctgtaagaataaagggacaaacctcaaaataaaagctttcactatcagtaacacagcaaaaaacaattattcattcaataatgagcaggatgaataaaaacagacaaacctcatcacat

SEQ ID NO: 20830 - DNA, 373 bp, Homo sapiens
gagtttattgaacatcttcaagtggcaggtattgttttaggtgttggagatacacacggtgctctaaagatctggatggcaacacaattactctatttacatgagcctctaaatcagactctggtaggtcagatttcccagaggaagaaaaatataagcttattttctcaagatgaatagatgttagattgattaaaatgagctgttccggtgcagaagacagcacgtgtgacttcctagaggtacatgagcatgaaacagttcttagttatgaccagaatgaaagacacatgtcaaggaatagcaagagacgaagacagaggggcaaaagaagatcatgaagaatatgttcagactaatccaatttttaaaa

SEQ ID NO: 20831 - DNA, 424 bp, Homo sapiens
gcaagaatgtaaacttttttaccaagcccccaattggaacctgggatcaagtggccgaggtcctgagctggcagttctcctccaccaccaagcgaggactgagcatcgagcagctgactacactggcagagaaactcttgggacctggtgtgaattattcagggtgtcagatcacatgggctaaattttgcaaagaaaacatggctggcaagggcttctccttctgggtctggctggacaatatcattgaccttgtgaaaaagtacatcctggccctttggaacgaagggtacatcatgggctttatcagtaaggagcgggagcgggccatcttgagcactaagcctccaggcaccttcctgctaagattcagtgaaagcagcaaagaaggaggcgtcactttcacttgggtggagaaggacat

SEQ ID NO: 20832 - DNA, 348 bp, Homo sapiens
gatttatgacaacagtttaataaaagcttaagaagtgtcctcttcctgggcggggagaggagccgaggagcctcagtgggagcaccgcgtgggatgttaagcccctcagcatctcctggggccgcctgacgctgccacacaagagaagagcgagggggagccagcgaggtgtttcttttagcccaggcaaggctactgttatgcttgccaatttgacttttccccagcaaactcaagctgtcctgtgagtttccacatcagccgtgtgcctggggagctgctccgagcttgggctctggtgctgtctgctgcatggacctcattagcgctcacccagcagattgcttt

SEQ ID NO: 20833 - DNA, 323 bp, Homo sapiens
gcatttttgaaaaaatgatttacggatacaattttaactctttcattgtactgtcaaaccttattttataattaaaatcctccatgatctggaatctcccttttattaacagtggctaaggagccatagcagtgagactagaaaggagagaaaagattctggaaaatgtgggacttaaatatgtgtgcattgtgacatgagtagtggatgagggaaccaccgatggggagaaaaattgcaaaaacaagagtaatatttgtatgcagatatccacctatacaatatatgtgataatttgaaattacctatatctttttttttaa

SEQ ID NO: 20834 - DNA, 381 bp, Homo sapiens
ggaagcaaattgagaattcccataagagggtctgtctctgtgttcttaagactatatccatgcggcccattcagtaagttgtatctgttggttggattttaaaatagatgatttaatcagtgcatttaatatcctaatatggcatcaaaacttgaacattgatatggcctgaaatctgttgaaaatgatcatattgagtaaagaaagtctctacccaccggtattaataacagggtgatctgtttagaaattacattttctctgatacatcaatgagttttgcaaaggagagaaaattgatggtacctgtagtcaagtccagttccaatactgccacagaatttttcttaaaagttctattgtaaataataggccacagaa

SEQ ID NO: 20835 - DNA, 442 bp, Homo sapiens
  misc_feature (1)...(442): n = a,t,c or g
gcggcacgagggcgggcatatgtagtcccagctacttgggaggctggggcgggagaatcgcttgaacccgggagtcggcagttgcagtgggccgagatcacgccactgcactccagtctggatggtaaagtgagaacccatctcaaaaaaaaaaaccnttnantaaaanggtntttgaaaaancagttgtcananngnccntgtnctngancttgacnccntgngaaaaacagcctccantaggtcantggccaaacnggngagtntnaaataggacancnctgtnttatagctnaggatgcnttgataataaaagtttgaancancagntgacanacnagtttaancantaccccccanactagtttgctntgcttttgaaaacagcagcctgnaaccnttnaaacaagccctaatgngngagtcaccaaaaanctccttt

SEQ ID NO: 20836 - DNA, 342 bp, Homo sapiens
ctgtgattcattttgaatatggtgtgaagtagggtcctgattctcttgcctgttgcatagtgtgtttttgccctacacaggtcaattgtgtcttctgtaatctcacctaaacaccatttgcgcaaggttttcatagctatttgggggccattaaaaataatgctctgatgaacgtcattcaatttctgtgcccaggagctcagcttagtcagcacagttggaattagacagattttgtcaacctcagactgcctctgttgccatggaaaggtggcttcctggcagagcagctagttagcacaagtggagggcggcacttcatgtactctttttttttttttt

SEQ ID NO: 20837 - DNA, 938 bp, Homo sapiens
gataccagtctccaagccactgagcctctcaggcctgctcagtgagccgctccaagaccccttagccctcctggacattgggctgccagcagggccacctaagccccaagaagacccagaatccgactcaggattatccctcaactatagcgatgctgaatctcttgagctggaggggacagaggctggtcggcggcgcagcgaatatgtagagatgtacccagtggagtacccctactcactcatgcccaactccttggcccactccaactataccttgccagctgctgagacccccttggccttagagccctcctcaggccctgtgcgggctaagcccactgcacggggggaggcagggagtcgggatgaacgtcgggccttggccatgaagattccttttcctacggacaagattgtcaacttgccggtagatgactttaatgagctattggcaaggtacccgctgacagagagccagctagcgctagtccgggacatccgacgacggggcaaaaacaaggtggcagcccagaactgccgcaagaggaagctggaaaccattgtgcagctggagcgggagctggagcggctgaccaatgaacgggagcggcttctcagggcccgcggggaggcagaccggaccctggaggtcatgcgccaacagctgacagagctgtaccgtgacattttccagcaccttcgggatgaatcaggcaacagctactctcctgaagagtacgcgctgcaacaggctgccgatgggaccatcttccttgtgccccgggggaccaagatggaggccacagactgagctggcccagaggggtggaactgctgatgggatttccttcattcccttctgataaaggtactccccaaccctgagtcccagaaggagctgagttctctagaccagaagaggatgacaatggcaa

SEQ ID NO: 20838 - DNA, 352 bp, Homo sapiens
cccctttactgtagtctgctctctctcattccagggtacacagcaccttctagcgtaccatgagctcactggtcaggtatgtcttccagcaccagaaggcaggctccctgagggcaggggcctctgtccactgatgtttggcatataggacatacccaaatatttgctgagtgaaaaacggatcgaggctccagcttaagacaattactcacctgaatattcgtcgacgcggccgcgaattccagatctatgaatcgtagatactgaaaaaccccgcaagttcacttcaactgtgcatcgtgcaccatctcaatttctttcatttatacatcgttttgccttcttttatgta

SEQ ID NO: 20839 - DNA, 426 bp, Homo sapiens
gaactggaagcaaggtaatgagtgtgacatgttgagtttgaagtcctgttacaacagctgggtggagaggtccagcaataagcagttaagaaaactgggccagtgcctaggaggagtgccagggctccttcccccacatttactggtcctcggttcccttcaacacatagtatgttgggaaagcagtagcggcagtagaagtggtagtagcagcagcagtagtaataataagtgtagccacttattgaactcttgccatgtgccaggcactgtgctaaggagattttatatatgtatatctcccctaactcttacaaaaacccaaagaggtaaatcccatattatctagagaggttaaataacttgcctgtggctgtcacaaagccccccacactctaaatcattttactaaaatccacccaagaa

SEQ ID NO: 20840 - DNA, 372 bp, Homo sapiens
gatcacttgaacctgggaggtggaggttgcagcgagccgagatcacaccattgcactccagcctgggcaacaagagcgaaactccgtctcaaaaaaaaaggacttttctttgtataaatcatttactctagagaaaccttgcctaaataatagcagctatgtaaatcatatgtaagttttgtgaatatctaactcatgcagtggttctttttggaatttgctatttttcccttccttttggccagcttctctatgtattcttgcaaaaatatttcctgtagctgtctggcttgatgggaaaattaatcatgggattagtaagagaaacttgcttgctaaattgattctttggaagcacttagatactttttg

SEQ ID NO: 20841 - DNA, 350 bp, Homo sapiens
gtaggtgggcacatcacttgaggccaggagttcaagaccgacctgggcaacatggcaaaaccccatctctacaaaaaaatacaaaaaatgagttgagcatggtggtgcatgcctgtagtcccagctactcaggaggctgaggtaggggaatcacctgagcccagcaggtagaagctgcattgaaccaagattgcaccactgcataccagcctgggcgacaaagtgagaccctgtctaaaaaataaaaggaatccagaaaacatcttgcatagaatttgatacaactaaagacatgcttagagggatatttatagttttaaataactgtatcagaaaaaaagggaagataa

SEQ ID NO: 20842 - DNA, 361 bp, Homo sapiens
  misc_feature (1)...(361): n = a,t,c or g
aagaaaccccagagcctggaagacacggacttgagccggctctacacagcaacatccctgatgcagattgatgacaatgtgatgaggaagtttcacggctataactccctgaaggaatactatgaggaagaaagttgcatgcggtacctgcacaggatttatgttcctctcatgctggttaatgcagctgacgatccgttggtgcatgaaaggnttntaaccattccaaaatctctttcagagaaacgagagaacgtcatgtttgtgctgcctctgcatgggggccacttgntcttctttgagggctntgtgcnnttncccgngnccttgtcgtgnangngttngnntgttnntggngtac

SEQ ID NO: 20843 - DNA, 444 bp, Homo sapiens
  misc_feature (1)...(444): n = a,t,c or g
tntttgnnnngaaacccntcagctatnacatgattacgaatttaatacgactcactatagggaatttggccctcgaggccaagaattcggcacgagcaactattggatgattatccgaaatgtttcattgtgggagcagacaatgtgggctccaagcagatgcagcagatccgcatgtcccttcgcgggaaggctgtggtgctgatgggcaagaacaccatgatgcgcaaggccatccgagggcacctggaaaacaacccagctctggagaaactgctgcctcatatccgggggaatgtgggctttgtgttcaccaaggaggacctcactgagatcagggacatgttgctggccaataaggtgccagctgctgcccgtgctggtgccattgccccatgtgaagtcactgtgccagcccagaacactggtctcgggcccgagaag

SEQ ID NO: 20844 - DNA, 1109 bp, Homo sapiens
gtttttggtgaagtcaagaaaagggtggacttgaatgtttatttacaggatgctgcaagataggaaattccacatagaaattagaaacctagtcagaggacaagcttcttccagtatgtacagttggaactgttcaagtatagtttcagtgtaaaaagtgctacaataacaaaccacatttaagaaagagttcttagtagagaaacaataagacaaaataccaaacatagtacacaacaaatttatgcctcagctacatgatctaaaagttaaaggtcccaggagccccatcctgaacttggaaagtgtagccttcagaggtagtttctggcacaacgttttgatcttcctcttcctcaacgccaagaccaaggtgcgagggcttatcgagatcatctccaatgcagcagagtatgagaacattcccatccggcaccatgaagacaatctcctgaggcagttggctcagaaggtcccccacaagctgaataaccctaagttcaatgatccgcacgtcaagaccaacctgctcctgcaggctcacttgtctcgcatgcagctgagtgctgagttgcagtcagatacggaggaaatccttagtaaggcaatccggctcatccaggcctgcgtggatgtcctttccagcaatgggtggctcagccctgctctggcagctatggaactggcccagatggtcacccaagccatgtggtccaaggactcatacctgaagcagctgccacacttcacctctgagcatatcaaacgttgcacagacaagggagtggagagtgttttcgacatcatggagatgggaggatgaagaacggaacgcgttgcttcagctgactgacagccagattgcagatgtggctcgcttttgtaaccgctaccctaatatcgaactatcttatgaggtggtagataaggacagcatccgcagtggcgggccagttgtggtgctggtgcagctggagcgagaggaggaagtcacaggccctgtcattgcgcctctcttcccgcagaaacgtgaagagggctggtgggtggtgattggagatgccaagtccaatagcctcatctccatcaagaggctgaccttgcagcaa

SEQ ID NO: 20845 - DNA, 320 bp, Homo sapiens
cagactggagggctcgtcctgctacagacagctttgatgactacccacctagaagaggtgatgatagctttggagacaagtatcgagatcgttatgattcagaccggtatcgggatgggtatcgggatgggtatcgggatggcccacgccgggatatggatcgatatggtggccgggatcgctatgatgaccgaggcagcagagactatgatagaggctatgattcccggataggcagtggcagaagagcatttggcagtgggtatcgcagggatgatgactacagaggaggcggggaccgctatgaagaccgatatgac

SEQ ID NO: 20846 - DNA, 422 bp, Homo sapiens
gcggcacgaggctgcatttaatgtgccagaatataagaacatttgtcttagtccaagaactattttcagtttagttttgtcaccagaatcatgagaggtatcttttgaccaaattcagtttcatttattgtttaactgctaagcaatgaagactattaacaaacagattatcattaactctaaataataaaactaaatacagactaaacgcttacttaactaaattataaaagttccttctaacaattccatctctactaaaaatgcaaaagttagccaggcatggtggcagtcagctgagataacaccactggctccagcctggacaacagagcgagactccgtctcaaaaaaaaaagtgagcgatcttggctcactgcaagctctgcctcctgggttcacaccattctcctgctgctccc

SEQ ID NO: 20847 - DNA, 752 bp, Homo sapiens
  misc_feature (1)...(752): n = a,t,c or g
ggtgcaaccccaactacactggcagtgcatgtgactgttctttggatactagtacttgtgaagccagcaacggacagatctgcaatggccggggcatctgcgagtgtggtgtctgtaagtgtacagatccgaagtttcaagggcaaacgtgtgagatgtgtcagacctgccttggtgtctgtgctgagcataaagaatgtgttcagtgcagagccttcaataaaggagaaaagaaagacacatgcacacaggaatgttcctattttaacattaccaaggtagaaagtcgggacaaattaccccagccggtccaacctgatcctgtgtcccattgtaaggagaaggatgttgacgactgttggttctattttacgtattcagtgaatgggaacaacgaggtattccaattgtagctggtgtggttgctggaattgttcttattggccttgcattactgctgatatggaagcttttaatgataattcatgacagaagggagtttgctaaatttgaaaaggagaaaatgaatgccaaatgggacacgggtgaaaatcctatttataagagtgccgtaacaactgtggtcaatccgaagtatgagggaaaatgagtactgcccgtgcaaatcccacaacactgaatgcaaagtagcaatttccatagtcacagttaggtagctttagggcaatattgccatggttttactcatgtgcaggttttgaaaatgtcnatatgtataatttttaaaatgt

SEQ ID NO: 20848 - DNA, 379 bp, Homo sapiens
cttctgcactgcatttcctaaagtctaatttacagtcttgtcttactttgcaattcccactcttttttttggcgaagaaattgagcttttcctcatctaaaatcacggcagattttgagttgcatggatcacaattagtgaattttaaaaattatacctggaacaggcacatggcagaggtctgtctgacaatgagctgggaggtgtgaaaccttcttgcccctgacactcaaggacagggttgtctacatgacatccatttccaagccacagaacgcttgggaacacccacttagagctgagagtgaccttccctatgggagaggcacacttacaaagggaaccgaccgtaggcaggtgaaatccccaccttgctgtt

SEQ ID NO: 20849 - DNA, 356 bp, Homo sapiens
ggaaaacaaacaccctaaaaaaaataagagacaaaagtaattcacacaggcagtttgcaaatggagacttccaaatggtcaataagcatatgaaaatttgatgaacagctcacgcctgtaatcccagcactttgggaggctgaggcaggcagatcacaagatcaagagatcgagaccatcctggccaacatggtgaaaccctgtctctactaaaaatacaaaaattagctgggcgtggtggagtgcacctgtagtcccagctacttaggaggctgaggcaggagaatcacttgaaacctgggaggcggaggttgcagtgaactgaaattgcaacattgcactctaatctggtgaca

SEQ ID NO: 20850 - DNA, 435 bp, Homo sapiens
  misc_feature (1)...(435): n = a,t,c or g
gcatacttcttagccctggatccaaaaggatccaaaagatgatttgtcctctgcttttaggtagctttagagagtaggaaaccaagtcattttacaacgtaaagttacaatcagtttgactctaacatgacatacattcctaaaaatcactgtactatgcaaaacgatagaataaaaaccaaataacttaggggaaaagtggggttaaggagacaacacttaaaatgttgtcagtgacacattaaaaaaataatggaaacctaataaaacagtagcactgttttatacatgttaggtggttaagaaataaataaatactacaggctgagcacggtggctcacgcctgtaatcccagcactttgggatgctgaggtgggtggatcacgaggtcangagatcgagaccatcctggctaacacggtgaaaccccgttt

SEQ ID NO: 20851 - DNA, 465 bp, Homo sapiens
  misc_feature (1)...(465): n = a,t,c or g
ggtggnnnnnntntttgannccctntgananccgttatgacatgattacgaatttaatacgactcactatagggaatttggccctcgaggccaagaattcggcacgaggagccgtgagccccaggctaagccccagctggacttgagtattgacagcctggatctgagctgcgaggaggggaccccactcagtatcaccagcaagctgcctcgtacccagccagacggcaccagcgtccctggagaaccagcctcacctatctcccagcgcctgccccccaaggtagaatccctggagagtctctacttcactcccatccctgctcggagtcaggcccccctggagagcagcctggactccctgggagacgtcttcctggacttcgggtcgtaagacccgctccgctcgtcggcgcaccacgcagatcatcaacatcaccatgaccaagaagctagatgtggaag

SEQ ID NO: 20852 - DNA, 455 bp, Homo sapiens
  misc_feature (1)...(455): n = a,t,c or g
ggtcntgctgattcgaatttaatacgactcactatagggaatttggccctcgaggccaagaattcggcacgagcaagagctgcaggagcagctgcggagcctggagcagctgcagaaggaaaacaaagagctgcgagctgaagctgaacggctgggccatgagctacagcaggctgggctgaagaccaaggaggctgaacagacctgccgccaccttactgcccaggtgcgcagcctggaggcacaggttgcccatgcagaccagcagcttcgagacctgggcaaattccaggtggcaactgatgctttaaagagccgtgagccccaggctaagccccagctggacttgagtattgacagcctggatctgagctgcgaggaggggaccccactcagtatcaccaggtcaggaggcagccttcctccctatgtctgtttatggagtgcctgctgtt

SEQ ID NO: 20853 - DNA, 393 bp, Homo sapiens
  misc_feature (1)...(393): n = a,t,c or g
gaaggaagggaaatttccaaggcaagattccaacccagcctgcctttcagagaggcgcaattgcaaagtgttcatgagaacggactgcgaatccttggttcgaatcattgctctgctgcttgctggctacatggtcttgggcgagtatcttaccttctctggtgtcagtttcctcatctgtagaataagtgtgctaatcataggatctcctcgccgggccatggtgatgattaaatcagaggtaccagtaactcgggcagaactgtgtctggcacttggcagcacctggatcaccttccttctctccaccttcgcggcacctgtaactgcaatgttgcctctgccttttctccgcctgtccctccactnatcatgtcccgggctttntgcaaa

SEQ ID NO: 20854 - DNA, 338 bp, Homo sapiens
ggcccagtgtcccttgagctggtcgtgaagccaggagcaacggtgaccttgcgatgtgtgggcaatggcagcgtggaatgggatggccccccatcacctcactggaccctgtactctgatggctccagcagcatcctcagcaccaacaacgctaccttccaaaacacggggacctatcgctgcactgagcctggagaccccctgggaggcagcgccgccatccacctctatgtcaaagaccctgcccggccctggaacgtgctagcacaggaggtggtcgtgttcgaggaccaggacgcactactgccctgtctgctcacagacccggtgctggaagc

SEQ ID NO: 20855 - DNA, 416 bp, Homo sapiens
  misc_feature (1)...(416): n = a,t,c or g
gtactctctttctccaatgaacctggggaaggttgtcaaaaccccaaagggcccagccaatcctatcagcagaagcaattgtagtctagggtttaaggatcctagggtcaggaagttctaggtctccctcctgttaacactaacacttctgtgttttttgtttgtttgtttgtttgttgctcactctgnngnncaggctgnnaatgcagtccagcaatgggcaacagaatgagactctgtactnataatatnnaataantaatntcctttanaancacnntntgtaatgtanttggcactnaatgagtgngatacccattaatgtnctgactaaactaatcncccaangtcatcnttgattnctaggacagtccataaaanantggtgtcccngnnntgggaaatntntntgcacg

SEQ ID NO: 20856 - DNA, 419 bp, Homo sapiens
  misc_feature (1)...(419): n = a,t,c or g
ggtttaaagtcatatttgaaagctctcttgtgtatttatttttctgcttccaatctacctgtgaggctaggggaaaaaaatcaagaaattgtatgaatccaaaaagtcatgagatatatgtgaaaggaagcttatgcattaacatctctagaagtctgaatgtaaagaaaacttctgttatcattttgcccttattcatgttattatttacaagtaaatatataataacaaagccaaaataaggaagtccattgaaaaacaatgtcaaggctgcagatattaacagtgaaaaattgtgtcacaacattgttttataanagaaaagaanaaaaagtatctaggtgtgtatgagctaaatgggggtccttcttttgttattaagtgtaacatttctaaaagaacatttctgttcatcattt

SEQ ID NO: 20857 - DNA, 421 bp, Homo sapiens
  misc_feature (1)...(421): n = a,t,c or g
tnnntttnannnctcttgaaaacctttgacatgatnacgaatttaatacgactcactatagggaatttggccctcgaggccaagaattcggcacgagcaaccacctaccaagatttgcgtgggctgccccagagatatacccaccaacagcccagagctggaggagacactgactcacaccatcacaaagcttaatgcagagaataacgcaactttctatttcaagattgacaatgtgaaaaaagcaagagtacaggtggtggctggcaagaaatattttattgacttcgtggccagggaaaccacatgttccaaggaaagtaatgaagagttgaccgaaagctgtgagaccaaaaaacttggccaaagcctagattgcaacgctgaagtttatgtggtaccctgggagaaaaaaatttac

SEQ ID NO: 20858 - DNA, 401 bp, Homo sapiens
  misc_feature (1)...(401): n = a,t,c or g
gcaagatcgttctgactgctagcagactggatgaggaaagtgtaggcacgcagcacagggcagtagtcggttggagtaaacctgaagagacatgatgagcttctgttaggcagtggcaggagggatggaggggagatacagatttgaaatgaaatggtaaaggggtatacgttatgtacaagtttggttttgaaactttaattctgtttgaggtacctgcgagacactgaaatgaagctagttgaatgtataaatttggagttcgggagagagggtctgagtaaatgtgattttggaaatcatgaacacatgggtgatatttgaggtcttaagacattgatgagatcatctagggaagatacagatcgtttggaaatatcaaangccaaggacagaatcct

SEQ ID NO: 20859 - DNA, 322 bp, Homo sapiens
ctgaggactgactggggttctgagactccctgtcccggaccgcagcgttaaaaggatctgaacaaagtctgctcaaatctcctgctgtgaaccagcagaatttttgaacaggtttcttcacatataaaaatctattgtaaaaatacggaaaagaatggcagcggaaacgcagacactgaactttgggcctgaatggctccgagctctgtccagtggtgggagtattacatcccctcctctttctccagcattgccgaagtataaattagcagattatcgttacggcagagaagaaatgttagcacttttccttaaagacaac

SEQ ID NO: 20860 - DNA, 293 bp, Homo sapiens
  misc_feature (1)...(293): n = a,t,c or g
cccacgcgtccggatggatgagatgctggtgtgtggatggatgagatgctggtgtgtggatggatgaggtgctgtgtggatggatgaggtgctggtgtgtggatggatgaggtgctggtgtgtggatgaggtgctggcgtgtggatgcaccacgttttggttctctgtagggcacttgggttgtttccacttttatgctcttgcagtgttactgtgaaagttcncnnacagtgcatncatcnttnctnncaccggancacttgnaatatgatcctnactgcctnnatgnntga

SEQ ID NO: 20861 - DNA, 336 bp, Homo sapiens
gaaggtttctgttgctgggtttctgaaatgagctgcccaagatagcagtttggtcatgttgctgacttcttgctgacttcctttctcctcctcctcctccatcgggtcctcaggctgggtcctgacccctctggattctttcttttcctgcatgcttgctactttttcaattactgacatacaggaacctagtatttcattgtgcctgaggtaggcagttgctagcctcttgatattggataccttttctgagctatgaagtattacaccatagtggataataaagtactcacaattgcattatagaatagattctggtaactgcaccagtgggga

SEQ ID NO: 20862 - DNA, 458 bp, Homo sapiens
  misc_feature (1)...(458): n = a,t,c or g
gntnccttcacatganacgaatttaatacgactcactatagggaatttggccctcgaggccaagaattcggcacgagaaagcttaatgcagagaataacgcaactttctatttcaagattgacaatgtgaaaaaagcaagagtacaggtgtgtaaactatactacaaaagcagtaacactatagtctatgtgcaaattgctgactaattttgccactgatcttggctctggattgggaaaccatacatttgataatgtgatttggtgcattagatttggtaaattaagtgccaatctccctgtatgcttcatcccggacaagtattttacaacattctctctgttttctatatgtaaaggactgaggtgaggatcaaataagttaatatatgtcaaatcactttttcaaactctaaaatgctatataaatacaatagcagctggacgcggtggctcac

SEQ ID NO: 20863 - DNA, 333 bp, Homo sapiens
ggcaggtccgagccctctgaggatggtgagggcgattgataacctctgaggttccgtccacccctaggggcccctatcttgggaacctctggatccttgtacggttcagttcctagaggtcacagcagggacacacaccggggaggaactgcgattatatgggggaagtggtgacatttttagagctttctacagaacattctcctggttcctgctctccattcgcagggtgagcgcccactggaagcctcgctgtgcttctgctttctcctgtagtccttggaagcaaggacttcttgttcgttctttaggaacggaagcaaacgttctcgt

SEQ ID NO: 20864 - DNA, 561 bp, Homo sapiens
  misc_feature (1)...(561): n = a,t,c or g
gggagttttatgcgcttgtatctcaggaactacagagagctgacttgggtctttggagaggtgaagaagtaactcttagcaatccaaaagggagccaagaagggaccaagtatattcaaaacctccagggcctgtttgcgcttccctttggtaggacagcaaagccagctcatatcgcaaaggttaagatgaagtttcgcttcttaggaaaattaatggccaaggctatcatggatttcagattggtggaccttccccttggcttacccttttataaatggatgctacggcaagaaacttcactgacatcacacgatttgtttgacatcgacccagttgtagccagatcagtttatcacctagaagacattgtcagacagaagaaaagacttgaacaagataaatcccagaccaaagagagtctacagtatgcattagaaaccttgactatgaatggctgctcagttgaaaatctaggactggtttcactctggcanggttcccaatacgaactgangaaaggaggaaaggtatncagtcactaccacaatttagagggtg

SEQ ID NO: 20865 - DNA, 355 bp, Homo sapiens
gaagaactcaggcctttctgaatagactgctgcctgcattgtccacacccatggcagctgggggctgagtgcgtgttcctatcctgtatctgtcacacccatttctgcagccctccagacactctgaggagctctcagtagccccctcgcctcttactacagtgattgattaccctgcctgccagtagttaacacctctgccattgctgaggaggagaaagtgacagagctggccttgctcacagtgactatggactgcttgggggccacgaaggcactgtgtgtggggtgtgagttgtccctcgacactgggacttggcgctggatagtgaggtgctttcaaggttcacagagg

SEQ ID NO: 20866 - DNA, 366 bp, Homo sapiens
cttcgccccaatatcatttctggaaaatacgacagcactgctatctatctggatacccacttccggctcctgcgagaagatttcgtcagacctttacgggaaggtattttggaacttctccaaagctttgaagaccagggcctgaggaagagaaagtttgatgacatccgaatctactttgacaccaggattatcacccccatgtgttcatcatcaggcatagtctacaaggtgcagtttgacacaaaaccactgaagtttgttcgctggcagaattccaaacgattgctctatgggtctttggtatgcatgtccaaggacaacttcgagacatttctttttgccaccgtatctaacagggagcag

SEQ ID NO: 20867 - DNA, 328 bp, Homo sapiens
ggctctgcagtgtgacccaccgtgtgctgtgtggacagatgatgctggtcagcaggcaggaaaacgatctgccaggcgctgggggtggggcagaggattgttcttcctgaccttggtatgaaaaccgtatggagttcttagtgaggaaaatcactcttagcccaaattcctgcgaaggccgatgggattgtttttaagatttgttggattgctggatttgttgaagggagaactggaagaagctatcagaagtttacagggcatcggagggagacactccctttggccactttctccgccaaaactatcctggttttagcccaacagc

SEQ ID NO: 20868 - DNA, 398 bp, Homo sapiens
ccctatttaaaactgggtcatcatttgtcctgttctagcaagatagtcttcagtttcattttcctgtgccctgtggtagttggaaacaaatcataatgtattatttaaatgtttaacatcattgcataacagcgtttattatacagtggcagatttctttagctgccacagtaatactcattccttgtgtgtgtcttggagtgcatttgactccaggaaaagccattttggttttccttaactaaatgataaatgtacccctctcagtctgcagtattgagttgtttaaagtatatgtgcagtcttgcttacaaggaggggttaccatgtatcacacctaatcttcccaatgtttgggatattaaaacacaaagtccttaacatgccaggctcaaggg

SEQ ID NO: 20869 - DNA, 388 bp, Homo sapiens
gtgagctctagcctgtaaaatggactgtgggtggctcgtggagaaggtgccctggtgtgcttttctgtgtcctctctggattctccctgagctgtccacctctgaagcctgcttcaccttcagactgccagggcaagacatgcagcttctgcagaactcatggcagccgttttccacttggccgagctgggtctgtgaagcagagaggaatcagtaataggaaagaaatgtagttgtttttttcccccttagaatacctaccatactgcatttcagcttggagtgcgcagcatgaggcatttgtggttcagaaaagaggtcttcctttttcctcctcctgttttcttttccttccttctccccaactccccaaaggcttactgccttt

SEQ ID NO: 20870 - DNA, 336 bp, Homo sapiens
gggggcttcctaggggcacctggtagagcccatgcttccggatcaggtgctgacagctgcagagacaccatcactgtaccagccatgggtgccgcaaccccagcaaccccatggaaccggagttccccaggtagtggccagtgtcaggccatgtgtcctttcctcaaattaaaaggacctcgctagcctgagcttgagaggataaaatggcaagaaaggacttctgttgcccaaagtgcagtgacttgatttcatgtaaattgccatagctaccttctcaccaaggctgatcttccctcagtttgagaagtccttgtgtttgggtgggttgtatgg

SEQ ID NO: 20871 - DNA, 457 bp, Homo sapiens
  misc_feature (1)...(457): n = a,t,c or g
aaacccttgnttgataacgctatgactgattacgaatttaatacgactcactatagggaatttggccctcgaggccaagaattcggcacgaggtgggtaagttgtgtgtcaaggaggggattggtgtacagattatttcattacctaggtaataagcatagcacctgataggtagtttttcaatcctcaccctcctccctccagtaggctttggtgtctattgttccatctttgtgtccatgtgtattcaatgtttagctcccactaataagaatatgcagtgtttggttttctgttcctgtgttaattagctggttcaactttatggttcaccatttatatagcgaagctgtgagttgttttttagttgccatggacccccaggttgaaggtcatgtaacttgaggaggctcagatgaactaagaatgcaaccatgggcagaacctaaatgcttgg

SEQ ID NO: 20872 - DNA, 709 bp, Homo sapiens
acgaatttaatacgactcctatagggaatttggccctcgaggccaagaattcggcacgaggaactttcgaattacctactcaattgtgcaaacgaattgttccaaagagaattttctgttcttaactccagactgcaagtccctttggaatggtgataccggtgaatgtacagataatgcatacatcgatattcagctacgaattgcttccttctcacagaactgtgacatttatccagggaaggattttgtacaaccacctaccaagatttgcgtgggctgccccagagatatacccaccaacagcccagagctggaggagacactgactcacaccatcacaaagcttaatgcagagaataacgcaactttctatttcaagattgacaatgtgaaaaaagcaagagtacaggtggtggctggcaagaaatattttattgacttcgtggccagggaaaccacatgttccaaggaaagtaatgaagagttgaccgaaagctgtgagaccaaaaaacttggccaaagcctagattgcaacgctgaagtttatgtggtaccctgggagaaaaaaatttaccctactgtcaactgtcaaccactgggaatgatctcactgatgaaaaggcctccaggtttttcacctttccgatcatcacgaataggggaaataaaagaagaaacaactagtcacctaaggcctgcgagtaca

SEQ ID NO: 20873 - DNA, 490 bp, Homo sapiens
  misc_feature (1)...(490): n = a,t,c or g
tttganncctcttgaanccatnagctatgacatgattacgaatttaatacgactcactatagggaatttggccctcgaggccaagaattcggcacgagcggcacgagctcaaacaagttacttctgctctcagagagtcagtttcatcatctgaaaaatgggaagttccctggaatgctgtggcaactagagatgatatgttggtagctagtatagcacttggagcataagaataatagtaacagctgacatatatcaagtgtttgcctcaagccgggcatcattctgagaactttgtctggattaactcatttaatctctttaacgctccaggacatatgtagaattactaccactacttagaggtaagaatattgacatacaggcccggcacggtggctcacgcctgtaatcccagcactttgggaggcccaggtgggcggattgctgagctcaggagttcgcaaccatcctgggcaacacggtgaaa

SEQ ID NO: 20874 - DNA, 402 bp, Homo sapiens
  misc_feature (1)...(402): n = a,t,c or g
gccctgtctgccgtagccattatcccatgttccaggggctcctggggcacaaggtggggggaggtcgtctttccaggccgttgaccggtgaaggcctttgtggacttcccagaccaccactctggtcgtgtcccagctccctggagggcagggtgtcatccagaccttcccgaagcagcagtgccgaagtccgtcccttgccatgagtgctgtgggcaggtgcatttgcagacattctggcctttagttggctggccctttatggtgtaacacaaaggcttgcgtacctgagagcgccagatcccaccccggctgtcctgtggctccaggcagggatggcccgcatcctggggttctgnatnaacctggggcattaagggcttccggggtaaggngacccgc

SEQ ID NO: 20875 - DNA, 385 bp, Homo sapiens
cggagcacggagatctcgccggctttacgttcacctcggtgtctgcagcaccctccgcttcctctcctaggcgacgagacccagtggctagaagttcaccatgtctattctcaagatccatgccagggagatctttgactctcgcgggaatcccactgttgaggttgatctcttcacctcaaaaggtctcttcagagctgctgtgcccagtggtgcttcaactggtatctatgaggccctagagctccgggacaatgataagactcgctatatggggaagggtgtctcaaaggctgttgagcacatcaataaaactattgcgcctgccctggttagcaagaaactgaacgtcacagaacaagagaagattgaccaactgatgatc

SEQ ID NO: 20876 - DNA, 356 bp, Homo sapiens
ggcgtggcacagaggaagggaacagatagttaagtacttggacagaagggcaacagttcaagtattaagatttatgttccttaatttcttcttctttatgcgaagaattttagcatctctaaagaatgagggtcaaaaagatgcagaaacaagaaaacttaaccattacttagacattactagattgtaggacagacaaaaatgtcccatccaagagtagcgctcatgttttttgactcaagaaaataggaagtttactaactggcttccaggaaaggccaaggagagaaagccaatgggaaggagggtggggcagagggacccacaccaggaaaccgctggcaggtgggggatgg

SEQ ID NO: 20877 - DNA, 620 bp, Homo sapiens
  misc_feature (1)...(620): n = a,t,c or g
nnnnannnannnnnnannnnanannnnnnnntatnnnnnnnnnnnnnnnnngnngnnnnnnnnnnnnatnnnnnaggnagnnaggtnnnnnnnntcntttgaanaccntttggacaccattacgaatttaatacgactcactatagggaatttggccctcgaggccaagaattcggcacgaggttttgctatttccagattcttaagccaacaaaagtgccttcatattttctgtctggaagacagaaagcccagaaggagcccagaagcaacagtttgagagaggcgctttctgcggccaagtggataagaggagcggcctgcaaccatgggacaggccctgggtatcaagagctgtgactttcaggcagcaagaaacaatgaggagcaccacaccaaggccctcagctcccggcgcctctttgtgaggagggggcagcccttcaccatcatcctgtacttccgcgctccagtccgtgcatttctgcctgccctgaagaaggtggccctcactgcacaaactgaggatgctgtgttcctgaagaatgaggctcagcgcatggagtacttgttgaaccagaatggnctcaatctanctgggtacagctgactgnnttcca

SEQ ID NO: 20878 - DNA, 510 bp, Homo sapiens
  misc_feature (1)...(510): n = a,t,c or g
gctgcctgccctgaagaaggtggccctcactgcacaaactggagagcagccttccaagatcaacaggacccaagccacattcccaatttccagtctgggggaccgaaagtggtggagtgcagtggtggaggagagagatgcccagtcctggaccatctctgtgaccacacctgcggacgctgtcattggccactactcgcttctgctgcaggtctcaggcaggaagcaactcctcttgggtcagttcacactgctttttaacccctggaatagagaggatgctgtgttcctgaagaatgaggctcagcgcatggagtacttgttgaaccagaatggtctcatctacctgggtacanctgactgcatccaagnaaagtcctgggantttggccaattcnagggggantcnttganctcaacctgcgcttgctgancaagggcagcaagtntagaaatggagccaacccgtgcacgttggccntgttnttggngccttgccnnaattccaaa

SEQ ID NO: 20879 - DNA, 356 bp, Homo sapiens
atttggggtgcgtctgtggaagggatcgttctctgcagcctcggagccacactcctgcagtagtgcttgttggttcttctcagactgaagtgcatgatttctccccgtccgtcctctggggtcgacaggatgcagaaggctttgcttgagaggtgttcatctgtctctcaagagaaggggaagcaacttctcacacctcccctgtagaaggagctaggggcagtatctcacatgattggaaggatttcccatttttattctgtcctgtcagagcccaaatagtagttcttgcacaaatagtagtttccaggatccctcattttcacaagtgtaagaacagcctgtgtgtgttgaac

SEQ ID NO: 20880 - DNA, 355 bp, Homo sapiens
gggaaccctcagttagtacctcccctttatgaagaacacagaaagacaaagaaaagattatttctggaaagaaagggaacaatatgaatattcataaaccaaaaagtacactgcagtcaatatttcccaagactagtcatacacatctttttctcctattaatcaaaaccttgcaggagacagtgattttttaccttttgctcagccagatttcacacagagagatcaggaacctgactggtaaatgattcttactaccctgttgccagcttgtcaggttcctggattctcttaaactgtggcttccaaaagagcagagctttgatcaccctgcttgctgattatgaaagaaaac

SEQ ID NO: 20881 - DNA, 504 bp, Homo sapiens
  misc_feature (1)...(504): n = a,t,c or g
gtttttttctgaccattctggattccttttagggcaagccaatcccttaggcttgcaattttggacttttatatttgactgataataactatccccttaagtttttacagtcctgatgggttgaaaagacattccactcactacgtgataactaggttgagaacgattatgaggaggtacgtagaccatccaactttgtatttgtaatggcaaacatccaggagcaattcctaaacaaactggagggtatttatacccaattatcccattcattaacatgccctcctcctcaggctatgcaggacagctatcataagtcggcccaggcatccagatactaccatttgtataaacttcagtaggggagtccatccaagtgacaggtctaatcaaaggaggaaatgggacataagcccagtagtaaaattttgcttagctgaaacagcaagagagacttaccgccgtggtgattancatcaaggcatccangatcatattacttct

SEQ ID NO: 20882 - DNA, 336 bp, Homo sapiens
ggcttgttgtcaaagaaatgtagattaattcaaaaggaacacaggattctatcggtccttttcctagtcctgaagacaaggtcagctatgtaatatccagggcccagtgcaaaatgaaaaggcaaactccttgggccggtgcggtggttcatgcctgtagtcccagcactttgggaggctgaggtgggcggatcatctgaggtcaggagtttgagacagcctggccaacatggtgaaacctcgtctctaccaaaaatacaaaagttagctaggcatgatggcatgtgcctgtaatcccagctacttgggaggatgaagcatgagaatcacttgagc

SEQ ID NO: 20883 - DNA, 390 bp, Homo sapiens
gcggcacgagctccagatgcttgttgacgctccctgctcagacctggctcaggaactacgtcagagttgtgccaccgtccagcggctgcagcacacactccaacaggtgcttgaccaaagaggaagtgcgtcagtccaagcagctcctgcagctgtacctccaggctttggagaaagagggcagcctcttgtcaaagcaggaagagtccaaagctgcctttggtgaggaggtggatgcagtagacacgggtatcagcagagagacctcctcggacgttgcgctggcgagccacatccttactgcactgagggagaagcaggctccagagctgagcttatctagtcaggatttggagttggttaccaaggaagaccccaaagcactggctg

SEQ ID NO: 20884 - DNA, 369 bp, Homo sapiens
ggggtcttacgcacagctggccccgggagcccctgggctggggacgggtggtgggagcccagcttatcccacaattaggtggggtttctccccagtgaggccccaggctttgccaggctgccggtagcctggtgggcacttggctttgcccccacggcagctctggagcctcaccaagcctccagggcccaccctcctgcccagctctgtgtctggcacctgtgcctccttccttcacacccactttggtgaccctcacgaatgcttgtccccttgaggtactaacactcacttcccacgtagggtgcccaaccttctgccctaattgagggcagggctatccccgctcaagcaggacactggaatgaa

SEQ ID NO: 20885 - DNA, 316 bp, Homo sapiens
ggaatacctgcatgaatactgggaccaggggttggatccctcccacacaagggccgggcgcctcccacactcagcacctgtgtggctttgcacccattgacgtggttgctgggtatgaacgccccactctgcttcccagtccctagcacagcgcctggcagttagcagatccaccagggaatacgtgagtgggtgggcaaataaagaatctgtcacagtccccgaccccaagaagcctcatctgccagggaagtttggacaaatcacagatgcttttcccttcctggggctggagtagaaaccttgcagatagtca

SEQ ID NO: 20886 - DNA, 402 bp, Homo sapiens
  misc_feature (1)...(402): n = a,t,c or g
agctatgacatgattacgaatttaatacgactcactatagggaatttggccctcgaggccaagaattcggcacgagatcgcttgaacctgggaggcaggggtttcagcgagccaagattgcgccactgcactccagcctgggcgacagagtgagattccatctcaaacaaacaaacaaaaaaccaaaaaaacaaatttaactcttgactcgttctcttctcgccccagtcacatttagtagcagacctgttttattagaggagagttctcgcagtgttcgccctaacttggcccggtggaaaagcgtgtaagcctgtgttctttctgaaaccattttctgnncatttgggattttacgcaaatgcctgtagctgtttganctgnntttgcancncntggggt

SEQ ID NO: 20887 - DNA, 403 bp, Homo sapiens
gactggctttgctcctcagataaaagatgaagtatttgaagaaacagaaaaaaacttccgaatgcaagaaagattgattaagtcttttatccgagacctgtctctctacctccagcacatccgggagtccgcatgtgtgaaagtggtggctgctgtgagcatgtgggatgtgtgcatggagagaggacaccgggacctggagcagtttgagagggtgcatcgctacatcagtgaccagctcttcacaaactttaaggagaggacagagcggcttgtcatctcccccttaaatcagttactgagcatgtttacagggccccataagctggtacagaaacgctttgacaagctcctggacttctataactgtcagaacgggcagaaaagctaaagggccagaaaa

SEQ ID NO: 20888 - DNA, 564 bp, Homo sapiens
ggcgtcctcgtggaaggcccgggaccgcgggatgggtgtcggcgtgaccaggcctgagctccctgtctctcctcagtgacatcgtctttaaaccctgcgtggcaatccctgacgcaccgccgtgatgcccagggaagacagggcgacctggaagtccaactacttccttaagatcatccaactattggatgattatccgaaatgtttcattgtgggagcagacaatgtgggctccaagcagatgcagcagatccgcatgtcccttcgcgggaaggctgtggtgctgatgggcaagaacaccatgatgcgcaaggccatccgagggcacctggaaaacaacccagctctggagaaactgctgcctcatatccgggggaatgtgggctttgtgttcaccaaggaggacctcactgagatcagggacatgttgctggccaataaggtgccagctgctgcccgtgctggtgccattgccccatgtgaagtcactgtgccagcccagaacactggtctcgggcccgagaagacctcctttttccaggctttaggtatcaccactaaaat

SEQ ID NO: 20889 - DNA, 682 bp, Homo sapiens
tgatactcttatgactgattacgaatttaatacgactcactatagggaatttggccctcgaggccaagaattcggcacgagggaacgacgtagaagagaggaagagatgatgattcgtcaacgtgagatggaagaacaaatgaggcgccaaagagaggaaagttacagccgaatgggctacatggatccacgggaaagagacatgcgaatgggtggcggaggagcaatgaacatgggagatccctatggttcaggaggccagaaatttccacctctaggaggtggtggtggcataggttatgaagctaatcctggcgttccaccagcaaccatgagtggttccatgatgggaagtgacatgcgtactgagcgctttgggcagggaggtgcggggcctgtgggtggacagggtcctagaggaatggggcctggaactccagcaggatatggtagagggagagaagagtacgaaggcccaaacaaaaaaccccgattttagatgtgatatttaggctttcattccagtttgttttgtttttttgtttagataccaatcttttaaattcttgcattttagtaagaaagctatctttttatggatgttagcagtttattgacctaatatttgtaaatggtctgtttgggcaggtaaaattatgtaatgcagtgtttggaacaggag

SEQ ID NO: 20890 - DNA, 435 bp, Homo sapiens
gcaataagcatgaggacctaggctaggcagggtgggtttcacaaatgaggaggggatgtcgtggccacattttggttttagaaagcttgctgtagctagtagctgggtagaagtagtctatttgggagagtatatgaggtttcagggagagtttctggagcttagggctggaatgatggctgggtttagagaagaatggatggatcttagtgtttggattgacttggatatagcagatgcaggcagaatgaaaattcagaatgcttcagatttttggcttaggcaaaatttgacaaatgacagagtcaaggagcaccatttaaagaccaggatagttgagattgttgtaacaaaagtacttgagtgtgaattggaatactgccctttattagatttatcattttgggaaggctaacttctctaatcttcaagatt

SEQ ID NO: 20891 - DNA, 345 bp, Homo sapiens
ggaggtccacagagaagtgatctgccgggccaggcagggtggctcacgcctgtaatcccagcactttgggaggccaaggcgggcggatcacttgaggtcaggagttcgagaccagcctggccaacatggtgaaacctcgtctctatttaaaaaaaaatacaaaaacttagccgagcgtggtagtgcgtgcctgtaatcccagctgctcaggaggctgaagcaagagaatcacttgaaccggggagacagaagttgcagtgagccaagattgtgccaagcctgggcaataaagcgagactccgtctacccaccgccccccacccccccccaaaaaaatttagccat

SEQ ID NO: 20892 - DNA, 504 bp, Homo sapiens
ggttggttgcagggttctgggcaaaggtcttaaaaccccatggtgagcagatggccaatcctgaacaccccaattttaaaacagggctttttttccaagagactttttgaaaatagctcctattttgagaggaggaaccctggcaggagagagccagagttaagcccagctgagagggggttggtaggcaggggtctgcctgattctcactgaagcttgatactcagggtgagcttcctaaactagtgcagatttgccggcccactgagcctcccagatgagaacctgcatttcaacaaggtccttgatgcagcaaagtttgagatatactgggctagaacactcaggggacacaaaggttctctgaaaactaaggaaaataggtagggtgtggtggctcatgcctgtaatccttgtattttgggatgccaaaggcgggcggatcacctgaggtcaggagtttgagaccagcctggatcaacatggtgaaacaccatcctctac

SEQ ID NO: 20893 - DNA, 359 bp, Homo sapiens
ccgggtgtaatcactttattggcttttggagagcaatggaggggattaatacctcatctttccaagttaaaagactaagactgtttccaaaagactccaaataagaaacttctcctcaaagtacaaggataatctgaatcatcttaaaccagcaataaaaaagtaaaatataaatttttatttagaattaaagcaaatacttcagtatcacaaacacaatattaaacttcaagaaatacaccgctaattcggagtgagcgtttatttgcacgattacaacatgcggacaaacccaggcgagatgagcgagtctacggttcctacccacccggctgacaaggggtggcccaggggccgga

SEQ ID NO: 20894 - DNA, 468 bp, Homo sapiens
  misc_feature (1)...(468): n = a,t,c or g
ggaggcaccatgacttcaataccctggtacagtttagagttggcactgaaggagataaggagaaatcagaaaaagattctaaggcagggcagtcaataaggggggagaaaaagcaagaactttagtatcctggaagtcaactgaagaaacaaatttcaaagagaaggagtgatcaccctgtcccctactgctgactagtctattaagatgaagacagaaaattggctgctggatttaacgatgtggagatcactagggatattgataagaagtgtttctctgaagtgacacaggtgaaagtctgttgcagtggattcaaagagagtagggtgagagaaattgcanacagcaagggtgttagcccttttaaagacattttttattccatgaaaggaaaatananatggtncagcagntgcagaacgtncattctanagttgttngnttggtgcnggtgttctgatgaaa

SEQ ID NO: 20895 - DNA, 466 bp, Homo sapiens
  misc_feature (1)...(466): n = a,t,c or g
gtcntatcacatgattacgaatttaatacgactcactatagggaatttggccctcgaggccaagaattcggcacgagaactggaagaaaagcagcatacatagaaaagaaaataaagtattagggaaaaagaatggcatgagccttctcaacagcagcactggaatctggaagtgttcacattgtgagggaaaatgatgctcaacctagaattctttgcctgttcatattttcagtttgctctgagggtaactacaatttattacatcagaaatttacatctaggccaggcagggcagctcactcctataatcccagcactttgggaggccaaggtgggtggatcacttgagctcaggagtttgagacccacttgggcaatgtggtgaaaccctgtctctaccaaaaatacaaaaattagcccgggcatggtattgaatgcgtgttttcccagctactcaggaggg

SEQ ID NO: 20896 - DNA, 354 bp, Homo sapiens
gggtttttcaagatttggcctgtttcaaagataaattcacattttacagaggtttgcccatggttatacacaaatggagtacactgatgttctcagaggtgatggaaaacttggtatagctaaattccctgatggaaaatttccagatccacagggaaaggtgagatatttagatacagttaccagagaagactatttataagctctgtttatgaagttcaaaggaataaacttttttttcttagaagtatgagtagagcattcaaatagcaataaagaaaatttctaggccaggcacggtggctcacgcctgtaatctcaacactttgggaggccgaggtgggcggatcacct

SEQ ID NO: 20897 - DNA, 378 bp, Homo sapiens
gtaaaagcttcgttatacatttgactaagaaatcacccagctttaaagctgcttttaacaatgaagattgaacagagttcagcaattttgattaaattaagacttgggggtgaaactttccagtttactgaactccagaccatgcatgtagtccactccagaaatcatgctcgcttcccttggcacaccagtgttctcctgccaaatgaccctagaccctctgtcctgcagagtcagggtgggttttcccccggactgggtcccgatgccaaggagtcctggcctccgcagatgcttcattttgacccttggctgcagtggaagtcagcacagagcagtgccctggctgtgtccctggacgggtggacttagctaggg

SEQ ID NO: 20898 - DNA, 308 bp, Homo sapiens
  misc_feature (1)...(308): n = a,t,c or g
agaataaccacccattccacagactaataaagaatttatctctttgcaactaacatagtttgaaatgggagatacgggctcttggagagagttttttctggggttctgaaaaggtcagatcctatcaaaacacaatccactcactcaaacatttcagcgtactcacattctgagtactactgtttagtatgaaaagaattccagtgttacatgaagtaaaaatggattatctcaatcctcatggaatataacgggacttgaccagcatttccttttttttttncnttcagtanctnnnttatanggaa

SEQ ID NO: 20899 - DNA, 380 bp, Homo sapiens
gtccatgtcagcgcacatggctccttgctccgtccttcacttaagtttgagcctttttggcttttgcaaaacatgaatgcaaaacttgaaatttttctatgtcatggctcttcccaactttcacatttttgggacagcgtctctactaaaaatacaaaaagtagctcggcgtggtggcgtatgcctgtgatcccagctgctcgggaggccgaggcgggagcatcgcttgagccagggagccggaggttgcagtgaaccgagatcacgccactgcactccagcctgggtgacagagtgagactctgtctcaaaaaaagactttccaaaaccaatgcccattattgattgacttcttcctctccgccattctctgccttctt

SEQ ID NO: 20900 - DNA, 467 bp, Homo sapiens
gtgctgagtggatgctttggaaacctaacctcaggcaaaaggtccttggttcaggcttggtgactgatgttgcattgtctgctgttaatagcctagagattgaagacccaagtaggccatatttttgcctgtcaacagcgaatctccaatcttttaacttctttagtttcaatatttgattttgcttgggttcacctctacagttgctttgccttgtccctggtcaccttactatatttgactgaattaagctttctgtttcaatgtaagtacttagtattttgcatttaaaaggctgttctttaataactttggaggaagttgactgattttaatgaaattctgccattataaaaggcattcacatacacctcaggtttaatttaaatgcagctgccccttgaaatgaaatggcaatgggcaaaagtttcaaaaggaccatttttttccataaacctaaggggttc

SEQ ID NO: 20901 - DNA, 406 bp, Homo sapiens
  misc_feature (1)...(406): n = a,t,c or g
gaacagaatgagcagtgttctggaaaaggtgctagaggatgagaagagagtagagtgaagggattgctcttctgataggaggaaggatactatcaggtgtaacagaaggaaagaagatgggaacagatagaggtaggttcataaatttggtgatgaaaagataaggactttctcaataaaggataagggaatgtcattattcaaaggattggttgctgatttaagagaaggcctgtgtccacagaggaggtctaaaggaaaaaaaaaaaagggcacntgggggctnacncttataancccanctttttggnaggntgagncagnagnattgnttgaccccaggatttgnagnctgcagtgacccntgatcntnccntgcnctnggccctgggngacanaataaaac

SEQ ID NO: 20902 - DNA, 374 bp, Homo sapiens
gcccagaaacagcttgattggttacagcttagcaattgtctttaatgggcatggtctgatcacttgacagcctgtggttgcctgaaaatcaactggtatggctggctgagatggagctacctgttgcaagaatatactcctaagttaggttgcagtttgattactgagtttttggtacctcttagattttgtacctgggacaggttcctcacctcactcaccctggccctgttcctgagacaaggaatagctccttttaagatgctgattatcatgcttctgccttgctgggcacacccacactggttgtaatactcaccatctcttcccattttcacatctggactcttcttctcatgcccctcaacccttaa

SEQ ID NO: 20903 - DNA, 327 bp, Homo sapiens
ggtgatctggctcctttccagggtggactccactcccactctcacaaaaacatgtagtaggccctgggcattcagctcttccacacactgcatggcttccttaaaatcattaatgtgtagaaattcatcaatgatagatttcgacttcctctccagttcctcttctgataatgcagccttgtcatgagctgacattgctgaaatttctggttttgctgactcccttgttttatttcgctcagcctcagtgctgttcctctccacatccacacctcctgtgagctgcttcacggtctccagtcgacgcggccgcgaattccagatcta

SEQ ID NO: 20904 - DNA, 365 bp, Homo sapiens
ggcctggggcaagagaggccactagaagaaggctaaaagaaaactcacatccttagacatggacagacatgtgctgatgccactatgaagggtaagatagtcacctaaatatcttgcccagcatgctagttaagcacgcctactagactctgcagtggttcatcaaggggcccaaagttccattctagcctctcttgatgtgcaaaagttgaggcaagatgctgggttcctgccatgaccttcaaacaggaggtgtgggttatgtgctcttcccctagtgaggccatgtattttgaaaacagtcattcctgaaaatactggggaaaaggggaacaggtgtactaatatcagcacatggtgacacc

SEQ ID NO: 20905 - DNA, 92 bp, Homo sapiens
gattcttgcagtggcctttgtgtgtttatgtacagtatccttaaggtgggtcagagcatgtattatgctttggctcagttaaattttaaaaa

SEQ ID NO: 20906 - DNA, 395 bp, Homo sapiens
cggccggcgaccgttccggcggccattgcgaaaacttccccacggctactgcgtccacgtggcggtggcgtggggactccctgaaagcagagcggcagggcgcccggaagtcgtgagtcgagtcttcccgggctaatccatgccgggttggaggctgctgacgcaggtcggcgcccaggtgctgggtcgactcggggacggcctgggtgctgccctgggcccggggaacagaacacacatctggctttttgttagaggtcttcatggaaagagtggtacatggtgggatgagcatctttctgaagaaaatgtcccattcattaagcagttggtctctgatgaagataaagcccaattagcaagtaaactgtgtcctctgaaagatgaaccatggc

SEQ ID NO: 20907 - DNA, 451 bp, Homo sapiens
gcaaatttgatggattaaatggcacctgtataccaatttgtagaaagaacatatgtgatacttatgtaaagtgtggggggagtgggtaacagttttaaggcacaaaatggtttggccttcaaaaggcaggtgtgaataaaagctgagagtcttttctgtgacagtaaagagtaggagagactggagggtagtgtgtggtgtggactaagactgaaaggaggttattacccagatactaggagacactggtgtccctgttttagagatttggctctatacccatttgtcatttctcaattactggtcacaacaagaggccactggagaaagtggcaggtggtgaagcaaggttattgtgtgagcttttgatgataagaatctctctctggaactgacagaattgccttcatgtgaatccttcaacaaaaaaatgagcctgcctagactactt

SEQ ID NO: 20908 - DNA, 623 bp, Homo sapiens
gggctgttgtggtgtgcaaaactccgtacattgctattttgccacactgcaacaccttacagatgtggaagatgtgaaatttgtcatcaattatgactaccctaactcctcagaggattatattcatcgaattggaagaactgctcgcagtaccaaaacaggcacagcatacactttctttacacctaataacataaagcaagtgagcgaccttatctctgtgcttcgtgaagctaatcaagcaattaatcccaagttgcttcagttggtcgaagacagaggttcaggtcgttccaggggtagaggaggcatgaaggatgaccgtcgggacagatactctgcgggcaaaaggggtggatttaatacctttagagacagggaaaattatgacagaggttactctagcctgcttaaaagagattttggggcaaaaactcagaatggtgtttacagtgctgcaaattacaccaatgggagctttggaagtaattttgtgtctgctggtatacagaccagttttaggactggtaatccaacagggacttaccagaatggttatgatagcactcagcaatacggaagtaatgttccaaatatgcacaatggtatgaaccaacaggcat

SEQ ID NO: 20909 - DNA, 431 bp, Homo sapiens
ggaatgagcacaggatatagaaaacaggattcattaagcataggggagatgccagagagtacagaacttttcaaaagtgttcaggggaaatgcagaggaattaatttcttcctctgaatgttccttttttgtgtgctctgtgattcctgctggacagaaagtgtctggtaataggaaaagcaggagatttattatcaggcagaacttcctctgttccttgttatctgtgtggctcttgggcaagttacttccttacctaatttcttcatttgtagaatgatgaagagctgctttccaagtttgtgaggattacatgagataaggaatctcaaatgcccaagacctagtacatgctcagtaaacattagtatcttcagttttccctctttctagagattagaacttttaataccatatccagtatattggaa

SEQ ID NO: 20910 - DNA, 411 bp, Homo sapiens
gcggcacgaggtaaaatccatttccttacttgttcattttagtcttggacagagaggggaacattcttgcctttggatcggaggagggccagtagaggtttaagcaaagactccccaggaggtgtagacatgtagaaaaagagccttttgttactactgcagatatctgacccttcgttagccagtcagagtatgctggcagagcccaattataggctcctgaagaggacgtgggaagagaagaaaggggaagaagtggtttctctctggaaattcccattttcctgcaagagagttcatggatattcctttccgaagtggtggaaacagcattgaatccaaattccttcttttcagctgtgggaatgacatcttctcaggcagtcttgagaatcaaaagaacaaagaatt

SEQ ID NO: 20911 - DNA, 385 bp, Homo sapiens
atcaagttagccaacatccgggcagcagaaaaggttgaggaaaagaactttggcagctcgcacgtcatgcaggtcatctacacggacgacgccggcaggccccagactgcctacctgcagtgcaagtgtgtgaatgagcttaaccagtggctgtctgtgctgcggaaggtgagcatcaacaacaccggactgctgggctcctaccaccctggcatcttctgtggggacaagtggagctgctgccaccaaaaagagaagacaggtgggagaggaggcctgggtcccgggctctgcatccgtccactgcgagatcgggcctctggctgaacgatgggaccgtgagccctgctgtgcacctgcagggacataacccaaggaatgctgg

SEQ ID NO: 20912 - DNA, 481 bp, Homo sapiens
  misc_feature (1)...(481): n = a,t,c or g
gtgtattttcaggtagtgatggggtttcaccatgttggccaggctggtctccaactcctgacctagtgatccacccgcctcggcctcccaaagtgatgggattacaggcgtgagccaccatgcctggccaatttttaaattttattcagctcatagttaaatatccacatgtgtacctaatggatactgaattggaagcgcaatttaagatgatttcagactggagggtatggtttcagactgaagaagtgggaatgggtaggatttaatgtaatatattttttttttaagtgaaggaaaaatgttaggggcccttacctgattaggtttttaagaggaatgtttggaataactanttcnaagaattccnggtaaaaaagccantgacaaanttttgacaatttgnancactannaacatgttttgngcaaantcnaaagggtccatcaantanangggcctgnttntaaccccttaaaac

SEQ ID NO: 20913 - DNA, 379 bp, Homo sapiens
gaacaaaactttgattagctcacttgtttcaaaagaatcgctgtatattttctctcctagatcattaagtactttaaatgttgattgatgttgtaatactgtactttatttttaacacaaaacttggccagacagcaaaaatatttgccaggagaaacaattttgaaaaagacagattgccttttgttggaagaaagtacatggagacttgaatcgtaaaggcaaagtattggttacttctaagcatctgtagactaatgattaattgatacacagtttcagcatttaaacaatattaggaagctcacttttaaaagtattttattccaaatggttgattatatcattgctaccagagatgagatgattcagtctggtc

SEQ ID NO: 20914 - DNA, 818 bp, Homo sapiens
ggagcccccgcccccacgcacacattactccaacattgaggccaacgagagtgaggaggtccggcagttccggagactctttgcccagctggctggagatgacatggaggtcagcgccacagaactcatgaacattctcaataaggttgtgacacgacaccctgatctgaagactgatggttttggcattgacacatgtcgcagcatggtggccgtgatggatagcgacaccacaggcaagctgggctttgaggaattcaagtacttgtggaacaacatcaaaaggtggcaggccatatacaaacagttcgacactgaccgatcagggaccatttgcagtagtgaactcccaggtgcctttgaggcagcagggttccacctgaatgagcatctctataacatgatcatccgacgctactcagatgaaagtgggaacatggattttgacaacttcatcagctgcttggtcaggctggacgccatgttccgtgccttcaaatctcttgacaaagatggcactggacaaatccaggtgaacatccaggagtggctgcagctgactatgtattcctgaactggagccccagacccgccccctcaccgccttgctataggagtcacctggagcctcggtctctcccagggccgatcctgtctgcagtcacatctttctggggcctgctgacccacaagcttttgttctctcagtacttgttacccagcttctcaacatccagggcccaatttgccctgcctggagttccccctggctctaggacactctaacaagctctgtccacgggtctccccattcccac

SEQ ID NO: 20915 - DNA, 362 bp, Homo sapiens
  misc_feature (1)...(362): n = a,t,c or g
ggctggtcttgaactcctggcctcaagtgatccgcccacctcggcccaaagtgctggccaccgcgcccagtcagacttgttttttagtgaaataaattgttttcctttaggaccttattctttatgataacagattccaagaatatgcagtcttgtcaatggctgtttcatcctcagtttctttaaaaataaaatacaattagaacatttttagatatgctatatctatccaatctattttcctgtcacccagtaaggttttctatcatcagcacaggtctatgaaaggacagtaaagggtctcctgttacataccctagcactaatgtttgtaatagaatgntaagataagttggttcatg

SEQ ID NO: 20916 - DNA, 301 bp, Homo sapiens
aattcggcacgagggagtctgccaggtggtgtccatcatgtaattatgccaccctcggccctggaccaactcagccgacttaacattacctatcccatgctgttcaaactgaccaataagaattcggaccgcatgacgcattgtggcgtgctggagtttgtggctgatgagggcatctgctacctcccacactggatgatgcagaacttactcttggaagaaggcggcctggtccaggtggagagcgtcaaccttcaagtggccacctactccaaattccaacctcagagccctgacttcc

SEQ ID NO: 20917 - DNA, 327 bp, Homo sapiens
ggatctgtttctttttcttggcttgatgtttggtaggtccttgaatgggcaagagggcacatgaagtacggcgtcctccacattcacggcctctacacggacccctgcggggtggtgctggacccatcggggtataaagacgtcactcaagacgcagaagtcatggtacggcccgtcctaattagcatcggtgcgtcctctcagggattactggtggccactggccattggctgcagttgagtggcttcccaggctccaggcgtccgtgcccttcaggtcggccctgcacacagttgctgagggaggggccacgtctcttgtcctcg

SEQ ID NO: 20918 - DNA, 343 bp, Homo sapiens
agctgagccaacaccaccatcactaccaccgagagcacaaaccaagtgcttcatactcaggccaccaggcccatgggtctccattccggctcgcgtggaggcccaactctaggaagagagtcctgggttcttacagaaatctctactggctgaggacagtgctgccccatctcctactattctacagtgaaggtcatcatcaaaagtcctgcaatgagtatcccaaactactagtaccaaaactactagttttggtagaatctgtattctaaaacagggatggtcagggttttctcgtcactgctggggaaactgaaaacaatggcatcatgcacaacttcac

SEQ ID NO: 20919 - DNA, 377 bp, Homo sapiens
  misc_feature (1)...(377): n = a,t,c or g
gaattttatttattcaatttttgttacttcccacttttgctgtgtcaacctaaataacaaacagagagaacccctctaacagaaaatgacatttgagaatacggcattgcagtgggaaaatanangccntaanannntatgnacgtatnccngggtgcncagnnnnacnatggcnnttatngnaaccntnnntactgnctatgccattntggncaaccccaannttaaggcacntngcangaangtgctganttccttgggagatnccntaangcccntntgatctnanggnccctttgncaacttantgaactgcactgtnanaanctgcatnnggatnntnanancttnnggctcttngnaaatgnngngggggc

SEQ ID NO: 20920 - DNA, 383 bp, Homo sapiens
cttagcggctgctgttggttgggggccgtcccgctcctaaggcaggaagatggtggccgcaaagaagacgaaaaagtcgctggagtcgatcaactctaggctccaactcgttatgaaaagtgggaagtacgtcctggggtacaagcagactctgaagatgatcagacaaggcaaagcgaaattggtcattctcgctaacaactgcccagctttgaggaaatctgaaatagagtactatgctatgttggctaaaactggtgtccatcactacagtggcaataatattgaactgggcacagcatgcggaaaatactacagagtgtgcacactggctatcattgatccaggtgactctgacatcattagaagcatgccagaacaga

SEQ ID NO: 20921 - DNA, 508 bp, Homo sapiens
  misc_feature (1)...(508): n = a,t,c or g
ttgacttcaacagctatgacatgattacgaatttaatacgactcactatagggaatttggccctcgaggccaagaattcggcacgagagtgaaactggaggaatttggaagaccaaagattgacggggaactgaaagtccggtccatagtcaaccacaccaagcaggataggtacttgttcctgtttgacaaggtggtcatcgtctgcaagcggaagggctacagctacgagctcaaggagatcatcgagctgctgttccacaagatgaccgacgaccccatgaacaacaaggacgtcaagaagtggtcctacggcttctacctaattcaccttcaaggaaagcagggcttccagtttttctgcaaaacagaagatatgaagaggaantggatggagcantttgagatggccatgtcaaacatcangccagacanagccaatgccaaccaccacagtttccagatgtacacgtttgacaagaccaccnctgcaaagcctgcaaatgtt

SEQ ID NO: 20922 - DNA, 434 bp, Homo sapiens
  misc_feature (1)...(434): n = a,t,c or g
aaaccttttatgaccngattacgaatttaatacgactcactatagggaatttggccctcgaggccaagaattcggcacgagctggaagaatttggaagaccaaagattgacggggaactgaaagtccggtccatagtcaaccacaccaagcaggacaggtacttgttcctgtttgacaaggtggtcatcgtctgcaagcggaagggctacagctacgagctcaaggagatcatcgagctgctgttccacaagatgaccgacgaccccatgaacaacaaggacgtcaagaaggaaggctcctctctcagtcactgcctcgccgtcgtgaccactgctcatagcaggcctgctcctcgccgggcccagcgccccccagaaagtggtcctacggcttctacctaattcaccttcaaggaaagcagggcttccagttt

SEQ ID NO: 20923 - DNA, 372 bp, Homo sapiens
gagaaaaacaagcatttacatatattcttcgtcactttgaagatgcatgacctgaactcgactgcttgtgtttgtttacatatcaggcatacccaggcatctcctgcagccagaggttccattgctgtctttgctcagtcctcttttaaaatatgaattagtggacaggcacggtgcctcacacctgtaatcccagcactttgggaggtcgaggcaggtggatcacgaggtcaggagatcaagaccatcctggctaccactgaaaccccatctctactacaaaaaaattagccgggcgtggtggcgggcacctgcagtcccagctactcgggaggctgaggcaggagaatggtgggaacctgggaggcagag

SEQ ID NO: 20924 - DNA, 349 bp, Homo sapiens
gtcatgcaggaggtggcacagctcagccagtttgatgaagaactttataaggtgattggcaaaggcagtgaaaagtctgatgacaactcctatgatgagaagtacctgattgccacctcagagcagcccattgctgccctgcaccgggatgagtggctccggccggaggacctgcccatcaagtatgctggcctgtctacctgcttccgtcaggaggtgggctcccatggccgtgacacccgtggcatcttccgagtccatcagtttgagaagattgaacagtttgtgtactcatcaccccatgacaacaagtcatgggagatgtttgaagagatgattaccaccgcag

SEQ ID NO: 20925 - DNA, 619 bp, Homo sapiens
gattgtgcaagagaatggatgacgatgactgccgacctctattattactacatggatgtctggggcaaagggaccctggtcaccgtctcctcagcctccaccaagggcccatcggtcttccccctggcaccctcctccaagagcacctctgggggcacagcggccctgggctgcctggtcaaggactacttccccgaaccggtgacggtgtcgtggaactcaggcgccctgaccagcggcgtgcacaccttcccggctgtcctacagtcctcaggactctactccctcagcagcgtggtgaccgtgccctccagcagcttgggcacccagacctacacctgcaacgtgaatcacaagcccagcaacaccaaggtggacaagagagttgagctcaaaaccccacttggtgacacaactcacacatgcccacggtgcccagagcccaaatcttgtgacacacctcccccgtgcccacggtgcccagagcccaaatcttgtgacacacctcccccatgcccacggtgcccagagcccaaatcttgtgacacacctcccccatgcccacggtgcccagcacctgaactcctgggaggaccgtcagtcttcctcttccccccag

SEQ ID NO: 20926 - DNA, 690 bp, Homo sapiens
  misc_feature (1)...(690): n = a,t,c or g
ggtcatggtgatcctgttcaaaggcatccccttggaaagtaccgatggagagcggctcatgaaatccccacattgcacaaacccagcactttgtgtccagccacatcatatcacagtatcagttaaggagcttgatttgtttttggcatactacgtgcaggagcaagattctggacaatcaggaagtccaagccacaatgatcctgccaagaatcctccaggttaccttgacgatagttttgtaaaatctggantcttcaatgtatcagaacttgttngagtanccagaacgcccataacccangnaactggagtcaanttcccaattggataaatcccannccaaccatannatcatgacatganntcgggggtcaatcttcataggtctcngtcttcnccatcaaagcagnaaanggnccntgaatcatancnaaaggatggaaaatatgggnccnagtcctacangngcattttacccctcgtcgaagttcaccnaccggnttgggaattcnaggattggcactacaggngatnaannatnngccntccccggactaatnggggtttaaccctgaaanagctattgttcagnctctgnatcancnccagggattcttccccaagnctggagcacnttcccntgggaccctnaatccngnaataacctgggatttcccaaatttcctc

SEQ ID NO: 20927 - DNA, 445 bp, Homo sapiens
ggtaacgaaaaggtccagccttcacacttaaccttttgatcagagctgcaaagaagtagtgaaatagtattggagttctagctcctggagtgacaggcctcactggtagatagagaaagggaactgagtcacagagaccctatgttctcagtttgagatgttcttcacaaggtgggtcatcccatttccctgctctccaactccagaggtgtgtgcactttcctgcaggttgtaacacggggtagcctgggcaccctgtcttttctctattccttcccaaagtgggtcccaccttctgcggacaggtgcttccctctgaggtcctgctgtttctcctagacccacacttagctttgggctgtgtcactgtcacgtgagccctgacactgttgctgtctccccttgcaccatggctttcgtgactgccccgtgtgtctggctgctg

SEQ ID NO: 20928 - DNA, 490 bp, Homo sapiens
gggcaggtaagggctcagggttatgaaaattgctttgggactccccctgcctggggtctctagaagggagactattcttaggaggtgtctgtgccctgaaggagactttctttgctacttggcctgaaggacttctttttgaaaaaaagatttggactagaatcaaaatcctgaactgcaaagagatggccaattaggccgttgggctgagttccagccaaggagtcgggctctgcctttcagttccctgaacaggctggaaagagattcttggctcatggtcccatgacatggtgggatgcaggaagccaagttcacaatccatacccctctgctaatggagaaaccatgagtcagccgacccagctctcgcctatcttaagagtccagcgcagacaatcgtatggaaagcaggaagagaggaaaaggaagctgtagaaaaataaacatttccttgcattttacttggaacagagcagcgtttcttgcc

SEQ ID NO: 20929 - DNA, 438 bp, Homo sapiens
  misc_feature (1)...(438): n = a,t,c or g
ggaccccagtgggctgaatggctctgcttgctttaggaactgggcgttgtatggtagagcatcttggccttgacataaaaggtagcatactggctccccagccctgaaccttccctgctagagcaaggcaggggtgagagggggaaggaaagaaaaaggagtggggagtggggtggggagcaaggattaacagggagcagtagcagcaccagatgtgggcatagcacactgggaagaaattgcagtggcgatctgaactcttcctctccgcctcctggctctgtggaagcccagggaaggcattaggaactgcaggctgctcttagtgctcctcccggatgggacaccttgggctcatccctgaaggccactcctaccattttacacactgagttnctgggggctcgnaactgtgagaacctaantttcttgcttggt

SEQ ID NO: 20930 - DNA, 414 bp, Homo sapiens
ttcatattttgtattgatttttgattatgaaaatcaaaaattttcacatttgattatgaaaatctccaaacatatgcacaagcagagatcatggtataataaatccctttgcaactccactcagccctgacaacccatccacacacggccaggcctgtttatctacactgctgcccactcctctctccagctccacatgctgtacctggatcattctgaagcaaattccgagcattacatcattttgtccataaatatttctaacatccttaaatatacaatcggaattcaagcatctcccattgtcccacaaatgtttggctgtttttgtagttggattgtttgtattaggattcaagcaaggcccatatattgcatttatttgaaatgtctgtaagtctctttccatctacg

SEQ ID NO: 20931 - DNA, 270 bp, Homo sapiens
cggacgcgtgggcaggtgtccaaaatgtgagttaaacattaccttatatttacactgttagtttttattgttttagatttattatgcttcttctggaagtattagtgatgctacttttaaaagatcccaaacttgtaactaaattctgacatatctgttactgctgactcacattcattctccgccattcaaatactattttttatccacatttttttttgttcccaaactgtaatgtacaaggatatgtgtgataatgctttggatttg

SEQ ID NO: 20932 - DNA, 442 bp, Homo sapiens
  misc_feature (1)...(442): n = a,t,c or g
ggtatctcagtatcatgagctggtggtccaagctcgggatgactttaaacgagagctggacagtattactccagaagtccttcctgggtggaaaggaatgagtgtttcagacttagctgacaagctctctactgatgatctgaactccctcattgctcatgcacatcgtcgtattgatcagctgaacagagagctggcagaacagaaggccaccgaaaagcagcacatcacgttagccttggagaaacaaaagctggaagaaaagcgggcatttgactctgcagtagcaaaagcattagaacatcacagaagtgaaatacaggctgaacaggacagaaagatagnagaagtcagagatgccatggaaaatgaaatgagaacccagcttcgccgacaggcagctgcccacactgatcacttgccagatgtcctagggaccaga

SEQ ID NO: 20933 - DNA, 361 bp, Homo sapiens
gggcactgtgaacttggctgtaaatagtaagggagctacaacatgggtgacaaccagttttaaagcaccttctatctactggatttgctttgagtgtgtaatttctagtccttagaaaattcctatacaacctagacattgtttccctgctgtacagatgaggaaacaaagacatggaggccaaagtcacacagctggtttgtaaaatggtatgggcctgtgagaactggttaaagccaagaatgaatggacatttgcataaaaccctgaagagaatacaaaaaacaaataacctgtgtggaagaaaaaagaagagatagactgatttcttcgaaaatgcaagtgatataattactttgct

SEQ ID NO: 20934 - DNA, 304 bp, Homo sapiens
gggaaacaggaacttacttttcaacagaaggaggatacgtggttctagatgaatctttcaatattggattgaagtttgaaattgcatttgaagtccgtcccagaagcagttccggaaccctggtccacggccacagtgtcaatggggagtacctaaatgttcacatgaaaaatggacaggtcatagtgaaagtcaataatggcatcagagatttttccacctcagttacacccaagcagagtctctgtgatggcagatggcacagaattacagttattagagattctaatgtggttcagttgga

SEQ ID NO: 20935 - DNA, 312 bp, Homo sapiens
tttaggaacaacttagaaacaaagcctagaaagggtagttgacaatttcgggaaaaaaatggcagtcagaggctaagatgtggaaggggactgggaattggtgagaaggggagaatcactaatagcctattttatgttgtgggtcgacgcggccgcgaattccagatctatgaatcgtagatactgaaaaaccccgcaagttcacttcaactgtgcatcgtgcaccatctcaatttctttcatttatacatcgttttgccttcttttatgtaactatactcctctaagtttcaatcttggccatgtaacctc

SEQ ID NO: 20936 - DNA, 423 bp, Homo sapiens
ggtttctctgcccaaggaagacagaacatggagaaccgtcagggcaggaaccccacagactgtcccttccagcccacactctgccacctcctggccctgtcccaattctgagccaaggcctccccgaggcagaagttgcctggtcctctgtccccacagtgacctgactgggggtgagggagaaggaggagagagcccatgtgtggtgtgtgtgcccctgagaacttcgtggtgactgcctttgggagcccgcaggtggccagaggcaggggtagctgagttcctggagaccccttttttgcccccaggttccccagagggcaacgccatcagtagcagtgtggtgtttcaggcagagctctggccaggctgtgccagtgtgtcccggacgcatcactaaggaagagagagtttatttagtct

SEQ ID NO: 20937 - DNA, 360 bp, Homo sapiens
gcgagcagtgtatctgtcccttttgctgcttgctagttctgccttacaacttccactggaaagagctttttagtgcagcaaatagtgtctgcattttattgtataaagcattgcctgggccataccaaatcattttgacagaggtcatttcagggatgccacaggcttcataattgctacttgatgctagttgtagcaaattgcacttgggttttggtagttgtgagtatagtgttgtctccttccaccccgccttgtgtgttaatcactgactgccaggaaatctctttgacataacatcctaaaaagtttttgttatcagtagggccctgtaacatttttttccttttctaaagccta

SEQ ID NO: 20938 - DNA, 387 bp, Homo sapiens
cctgcttcaactactattcttattgggaatggacaatggaatgttctctggttttatcatgatcaaaaacctccttctcttttgtatttccatgaacttatccagtcactttggcttttcacagatgccaaccagttcagtgaaagatgagaccaatgacaacatcacgatatttaccaggatcttggatgggctcttggatggctacgacaacagacttcggcccgggctgggagagcgcatcactcaggtgaggaccgacatctacgtcaccagcttcggcccggtgtccgacacggaaatggagtacaccatagacgtgtttttccgacaaagctggaaagatgaaaggcttcggtttaaggggcccatgcagcgcctccctct

SEQ ID NO: 20939 - DNA, 515 bp, Homo sapiens
  misc_feature (1)...(515): n = a,t,c or g
tggcattaccatgaaagatataaggcaagggtggggagatggggaatggtgggggcatcaccattttaagtagggatgtcagggtaggcctgattggaagggtgacagtggagtaaatccccaagggaaggagggagtaagttgtgttgtgtggacatttgggaggaagagcttcagacagaggaatgtgcaaaggccctgaggcaagagcataaccatattcgcggatcagcaaggaggtgggccaggatatggcacatgtggtcaagagggaacctggtagtagatgaagacagagaaataatgaagagtcagtttatgcagagttttaaaagcctttgaaggtacctggcttctgtggagtgaaatgggggagccctgggggttaaagtataggagtgacctgttctgctacatattagcaagattaaccnccccaaagtgggatacttgctatatccttgctttggttcagcccataattgcttaagtggcanggcanaaagcccacatga

SEQ ID NO: 20940 - DNA, 329 bp, Homo sapiens
gattttataaggtaataaggcaaaacattttgtgcttttgtgggtgaggggtggggctgggttttggctcttttcctgtcactaatcatgcatttatttttttcatgtgtattaattgttcttcaattaactatccttatgtactttacaagtcacacataactcagtcactctctgtttggttagtaagcttttataatttggatttctataccaactactcttcaggatgagcccagtttgagttctattatgacaccaactactagaaaaatagactatggtctttagagccaaacaggccagatttaagtaccaagctttgctgg

SEQ ID NO: 20941 - DNA, 399 bp, Homo sapiens
cggagagcgcgctctgcctgccgcctgcctgcctgccactgagggttcccagcaccatgagggcctggatcttctttctcctttgcctggccgggagggccttggcagcccctcagcaagaagccctgcctgatgagacagaggtggtggaagaaactgtggcagaggtgactgaggcatctgtgggagctaatcctgtccaggtggaagtaggagaatttgatgatggtgcagaggaaaccgaagaggaggtggtggcggaaaatccctgccagaaccaccactgcaaatacatccccccttgcctggactctgagctgaccgaattccccctgcgcatgcgggactggctcaagaacgtctggtcacccttgtatgagagggatgaggcaacaaccc

SEQ ID NO: 20942 - DNA, 871 bp, Homo sapiens
cttgacatgattacgaatttaatacgactcactatagggaatttggccctcgaggccaagaattcggcacgagctaattcaaaacctcaagccaaacaccatcatggtcttagtgaactatattcactttaaagcccagtgggcaaatccttttgatccatccaagacagaagacagttccagcttcttaatagacaagaccaccactgttcaagtgcccatgatgcaccagatggaacaatactatcacctagtggatatggaattgaactgcacagttctgcaaatggactacagcaagaatgctctggcactctttgttcttcccaaggagggacagatggagtcagtggaagctgccatgtcatctaaaacactgaagaagtggaaccgcttactacagaagggatgggttgacttgtttgttccaaagttttccatttctgccacatatgaccttggagccacacttttgaagatgggcattcagcatgcctattctgaaaatgctgatttttctggactcacagaggacaatggtctgaaactttccaatgtaagttgataaactagagttcttaaatgtatgaactggaagagcaattaggagtcaattgattcaactttcttattttaccaattagcaatctgatgcctagagaggcggtgtgactcctcctaagctagaatcactccagagtcattcccattactccaaataagtaattgtatcagtttcttccatccttgacctttatgtcccagaattactctgatagaacagcttaatgatcagaagtgactctggtgagatgcagttctgaaggaggtgtgaggagggaatgcttaagaggtgactcctggcggcagc

SEQ ID NO: 20943 - DNA, 362 bp, Homo sapiens
  misc_feature (1)...(362): n = a,t,c or g
gcaccactttgggaggctgaggtgggtggatcacgaggtcaggaggttgagaccagcctgaccaacatggtgaaaccccgtctctactaaaaatacaaaaattagttgggcgtggtggcacgcgcctgtaatcccagctactcaggaggctgaggcaggagaattgcttgaatcgaggaggcggaggttgcagtgagccgagattgcgccacggtaatccagcctgggtgacagagcgagattctgtctcaaaaaaaaacaaaaaaattattcaactgtgagaactcactccccaaaaaaaatgttttgctagcaactcattgaaaaatggnctctattaaaaaggcacgttaatacatcca

SEQ ID NO: 20944 - DNA, 333 bp, Homo sapiens
gggaggaaggaggtggactgggaaatgggctcagagcaggtgcaggcctggaccacagggcggtggcaaggctcaaacctgctgtgcagggctcagtgtggggtctcgaggacacgaaggctgcacagccaggggcaatgcaaagactgaggctctaggatactgaggctgtcatccagggtcaagcccaagagagagcaacctccgggcttgcaagcgggcagatggaaggttgaaaaggcaaccccatgtcctcctgctctgttgtctgagcggggggcttccagatttgttgaagaaaaggatgtgtgcatggccagctgcctgggtttg

SEQ ID NO: 20945 - DNA, 298 bp, Homo sapiens
  misc_feature (1)...(298): n = a,t,c or g
gttttttttcttgccatttctctttatgatcccaatgtattgatgtatttctaacactacaacaagatttgtgtcactcaactgtgtgttgtaatcattgcagaaaccaaaagcatagaagggagagagggaggaagactttagtcatgatacaatgccaatgtaaggactccttttaagaaagattttaaaaaatttcttcatcaaaattcccattgcctccttgaatgaactgtgaaggattgcaaattcctttanaacttgnttctggancgaatctggantctcttcttagcca

SEQ ID NO: 20946 - DNA, 358 bp, Homo sapiens
gggtgactcttgtgttcagctgagcattgtgccaaagagtcacatgtctacttgtggaacctctgctaattgccatgtgtatttgctgttatagctctcatttcaaaggaacacaatgtatttatttacatattttagtaccctatatgtctgaatacaagatgaggtctctcctgaaattgtcccttggaaaggagtctctatattcagtcctggcatagttagccaaccactttgttttgtttgggacagatacattaacctggaatgacttgactttgcgctggttttactgcctagtgtaaccggttacaacgggttgatggtggtgatgggggaggggagtgtggaaataact

SEQ ID NO: 20947 - DNA, 486 bp, Homo sapiens
  misc_feature (1)...(486): n = a,t,c or g
tnnnntttgaantcnaattcccttctatgacangattacgaatttaatacgactcactatagggaatttggccctcgaggccaagaattcggcacgagaccgtggcgcctagggctgcggcagggactcggcctctgggaggtttacctcgcccccacttgtgcccccagctcagcccccctgcacgcagcccgactagcagtctagaggcctgaggcttctgggtcctggtgacggggctggcatgaccccgggggtcgtccatgccagtccgcctcagtcgcagagggtccctcggcaagcgccctgtgagtgggccattcggaacattggacagaagcccaaagagccaaattgtcacaattgtggaacccacattggcctgagatccaaaacgcttcgaggcaccccaaattacctgcccattcgtcaggacacccacccacccagtgttatattctgctcgccggagtgggtgttcccggg

SEQ ID NO: 20948 - DNA, 1144 bp, Homo sapiens
  misc_feature (1)...(1144): n = a,t,c or g
ggcaagatcaagtcctgctactacctgccttgctttgtgacttccaagaacgagtgtctctggaccgacatgctctccaatttcggttaccctggctaccagtccaaacactacgcctgcatccggcagaagggcggctactgcagctggtaccgaggatgggcccccccggataaaagcatcatcaatgccacagacccctgagcgccagaccctgccccacctcacttccctcccttcccgctgagcttcccttggacactaactcttcccagatgatgacaatgaaattagtgcctgttttcttgcaaatttagcacttggaacatttaaagaaaggtctatgctgtcatatggggtttattgggaactatcctcctggccccaccctgccccttctttttggttttgacatcattcatttccacctgggaatttctggtgccatgccagaaagaatgaggaacctgtattcctcttcttcgtgataatataatctctatttttttaggaaaacaaaaatgaaaaactactccatttgaaggattgtaattcccanccctcttgcttcttccccacctcaccatctcccagaccctcttccctttgcccttctcctccaatacataaaggacacagacaaggaacttgctgaaaggccaaccatttcaggatcagtcaaaggcagcaagcagatagactcaaggtgtgtgaaagatgttatacaccaggagctgccactgcatgtcccaaccagactgtgtctgtctgtgtctgcatgtaagagtgagggagggaaggaaggaactacaagagagtcggagatgatgcagcacacacacaattccccagcccagtgatgcttgtgttgaccagatgttcctgagtctggagcaagcacccaggccagaataacagagctttcttagttggtgaagacttaaacatctgcctgaggtcaggaggcaatttgcctgccttgtacaaaagctcaggtgaaagactgagatgaatgtctttcctctccctgcctcccaccagacttcctcctggaaaacgctttggtagatttggccaggagctttcttttagtgtaaattggataaatacacacaccatacactatccacagatatagccaagt

SEQ ID NO: 20949 - DNA, 304 bp, Homo sapiens
atgtttgaatatggtacaagatccttcccaatttgatgttcttgttatgccaaatttgtatggagacatccttagtgacttgtgtgcaggattgatcggaggtctcggtgtgacaccaagtggcaacattggagccaatggggttgcaatttttgagtcggttcatgggacggctccagacattgcaggcaaggacatggcgaatcccacagccctcctgctcagtgccgtgatgatgctgcgccacatgggactttttgaccatgctgcaagaattgaggctgcgtgttttgctacaattaag

SEQ ID NO: 20950 - DNA, 408 bp, Homo sapiens
  misc_feature (1)...(408): n = a,t,c or g
gagaattagcttataatctctaggaaaagttctgttagaatttttattgtaattgcactgtatttatagattaatttggaaagaattcatgcatttacattatgaagttttcccattcatgacaagatatagttcttcattattttttcctatctttcaataaaattttataattttatttttaaaagattagatggctttggttanatttattcatgggtagcttaaagtttctgtttccattacaaatgatatatttttaaaattacatttttaattgttattgctatataaaactggtgtttgatttttatatatttatcttataattgtcttattaaccaccttgctgaattattttacaggtttgcccacagattatcttaaattttccatgtagataaccat

SEQ ID NO: 20951 - DNA, 449 bp, Homo sapiens
taccgtttgactgattacgaatttaatacgactcactatagggaatttggccctcgaggccaagaattcggcacgagctggggtctgagtggcagggctgtggccgcacagtgctgatgacagcccagtcaggttcatagccggggtcaaaggttggttccttctcagaagcacatgagtcacccccactggagtccttaggagaggaaaggagcagacagtaaggggccatggattcagatcttagcctcgaggctaccctggaagatagccccattgaataaagagggaaactgaggcacaaagaaggtacagcaggccgggtgcggtggctcacgcctgtaatcccagcactttgggaggctgaggcgggcggatcacctgaggtcgggagttcgagaccagcctgaccaatatggagaaacctcgtttctactaaaaaaatcaaa

SEQ ID NO: 20952 - DNA, 360 bp, Homo sapiens
  misc_feature (1)...(360): n = a,t,c or g
ggttttggtagttctagccattgcagtaagacagtagacagaaagtcaaataattggcataaatattggaaacaaaaaattatttctactttgaaatgatacaatagaatagctggaaagcccagggggactctagtagaaaacagcaatgaggattaaatgtaagacactttggaaagctgatgtgtgagaaatgtacacaaactaatagctttctctttattagtagtcatcagttgaaaatggaaatgaccaagcaaaaatattcaacagaatgacaaaactattggttacacctaggaataaatgtgttaaagaaaggtcagagtgaaggtaatgacccttatgaanaaancttgg

SEQ ID NO: 20953 - DNA, 304 bp, Homo sapiens
gtccaagtacctgctcaccaggccactgggggaggaaggacaggccatctgctattcgtccaccaacctgacttgatcctctcttccctcctcccaggtgttatgtctggctgtagctgttggtcacgtgaagatgacagacgatgagcttgtgtataacattcacctggctgtcaacttcttggtgtcattgctcaagaaaaactggcagaatgtccgggccttatatatcaagagcaccatgggcaagccccagcgcctatattaaggcacatttgaataaattctattaccagtaaaaaaa

SEQ ID NO: 20954 - DNA, 627 bp, Homo sapiens
ggcaggaactgcatgctgcaggtgtcctgcccttccgcccacgagtgcgccatgtttcagcggagcggcgtgtgggagaagccacgtcgtgtttcacatgtcggagtcgaatgcatttgtaaatccctaagtcaagtaggctggctgcactgttcacatttgtctctaaaagtcttcatcgctaaaagataccataatttgctgaggcttcttaagctttctatgttataatttatatttgtcactttaaaaaatccatttcttttagaaaaaattagggtgataggatattcattagttaagatggtaacgtcattgctatttttttaacatcctctttagaggtaatttttgttaacataaccaaaaattaaattgaaacaaaatgtcccaactaagaaaatatatagagcattttatttttttttagtgttgtaaaatattaacctctgtgagatcctttgtatcttaatgcattacctttacacatatttattcttattttctctcctttcagagtttacatttttatatttaatttactatttcagatttttaaaatagtatagaaaaaagtaggagtgatagagaacaaaaatactcttatacagtgcaacccaaataccg

SEQ ID NO: 20955 - DNA, 380 bp, Homo sapiens
  misc_feature (1)...(380): n = a,t,c or g
aaactccggtctcccattcagccggctctgcatgaattaaactcttattgcaattcctctgtcttgataaatccgctgtctgggaaacgggcaaaatgaacccatggggtggttacactgaccctctgctgcacatcccggacagccttgttaagaacccttggtaggctgggcatggtggctcacgcctgtaatcccagcactttgggagcactaggcaggcagatcacgaggtcagaagatcgagaccatcctggctaacacggtgaaaccccgtttctactaaaaatacaaaaaattagctgggcgtggtggcagacgcctgtagttccagctactcgggaggctgaggcaggagaatggnngncggcgggnttgct

SEQ ID NO: 20956 - DNA, 480 bp, Homo sapiens
  misc_feature (1)...(480): n = a,t,c or g
cctttgannncaacagctatgacatgattacgaatttaatacgactcactatagggaatttggccctcgaggccaagaattcggcacgaggccggactgcgagtctctttgcggcgctacactagagcagagtacgagtctgaggcggagggagtaatggcaggacaagcgtttagaaagtttcttccactctttgaccgagtattggttgaaaggagtgctgctgaaactgtaaccaaaggaggcattatgcttccagaaaaatctcaaggaaaagtattgcaagcaacagtagtcgctgttggatcgggttctaaaggaaagggtggagagattcaaccagttagcgtgaaagttggagataaagttcttctcccagaatatggaggcaccaaagtagttctagatgaccaggattatttcctatttagagatggtgcattcttggaaagtcgtanactgaaataantcactattgaa

SEQ ID NO: 20957 - DNA, 352 bp, Homo sapiens
ggacccagaatactttgccataccctaaactatatcatccgtggcaggcctagcatccaggcccccctctctctcccatttcttgcctgtttcatagaaccacatcattgcttatggaaagctgcatcaaagtgtcttagaagatggtgtaaaactgagatttcaagagctcatgtccacagggaaactagttagtgataccgaatgctgctgcatgtcagaattcctgaattaatctgaatcaatgcacataaaagattggcttgtgagcaaaggattttattaaaacattttgatttctgttgctttaagaaaaagaccaaagtttcctgccataggatggcaaatgtat

SEQ ID NO: 20958 - DNA, 437 bp, Homo sapiens
gctgctatatgacattttttctctcatgtctcagatgagaagcagggcaaaaccctgtgtgtctccaacttacctaacacaccatccgctgtaggattaggacccagacacgtcttgctgcaggccatgctcacttccatctgctctcttttccctgcattcttcttttgtgtcacttccctgtcttgtcagtacttctaattctcatagccctgctatcccctacaacctcgtgccttagtattaatagggtacagcagggaaaaactcacttagtttccattttgttcttggagaagaaaaatttggagacatttccaaaatggcatgtacatcataattcttattgccaacatttataagaaactttgactgtagtgattatcaagatcatgcttggaatatttattccctctttcccacctttcaaaaaaaag

SEQ ID NO: 20959 - DNA, 473 bp, Homo sapiens
acagccttacgaatttaaaacgactcactatagggaatttggccctcgaggccaagaattcggcacgagcggtgaggtcagcttcacattctcaggaactctccttctttgggccacggaattaacccgagcaggcatggaggcctctgctctcacctcatcagcagtgaccagtgtggccaaagtggtcagggtggcctctggctctgccgtagttttgcccctggccaggattgctacagttgtgattggaggagttgtggccatggcggctgtgcccatggtgctcagtgccatgggcttcactgcggcgggaatcgcctcgtcctccatagcagccaagatgatgtctacagcagccattgccaacgggggcggagttgctgctggcagccttgtggctattctgcagtcagtgggggcagctggactctccggattgaccaagttcatcctgggcttcattggtctgc

SEQ ID NO: 20960 - DNA, 246 bp, Homo sapiens
  misc_feature (1)...(246): n = a,t,c or g
gtactgctgccctctttttagcagtaaggcgctgacccaagagaactcaccttattcttcatttcgcctggngaatcctccaggcctttctctacaccctgaaggggagggaggaaaatggataaatgagagagggagggaacggcagccgncgnactgngcagattcncnagcagacctacagcaagtannacacaaactcgnacaacnatgactcactgntnaagaactacggctgatttactg

SEQ ID NO: 20961 - DNA, 560 bp, Homo sapiens
  misc_feature (1)...(560): n = a,t,c or g
ggggaaacccacgctgagggaacaatcatgggaaagagtagagacggggttccaccgtgttagccaggatggtctcgatctcctgacctcgtcatcctcccgccttggcctcccaaagtgctgggattacaggcttgagccaccgcgccccgctctttcgtgttccaaaggctttttaaataaacttccactcctgtcctggattctgctttatggccctcantcgaattctttcttctgaggaggcaaggactgaagttgcttctgaccagtacaggagaaaacgaatacagcagggatgacttccaccagctccactttgcagctctgaggtgtattaaaaatgacctggaagaagtcatgccacaggccagaccttaacattcctttcggcttatnccacgatttcntacaaagcttcaccttcttaatnagtcannaatcatcaaatttttgatnccacctangacngtgnncncctgcttcatcaaatcnaccattttttncngcaaacaatgtnnacctcaagtgnnannaaacttcggngtccnctgcttcct

SEQ ID NO: 20962 - DNA, 378 bp, Homo sapiens
ggagaatataagaggcacagagcagagaccagagactctgggggacacagataagagtgacagaggccaggcacattggctcataccagtaattccagcactttgggaggctgacgcaggagaatcgtttgaaccgagttcaaggctgcagtgagccctgattgcactactgcactccagcctgggccacagagcaagaccctgtctcaaaagagaaaagagtaacagagaccccaagagagaccctgggaattggagacacagagggacagggaccctaagaactagacacagagagagatagaagaggccccggaagacacagataagagacgctaagagacagcagggataccattaaaagactttcaagaagcc

SEQ ID NO: 20963 - DNA, 197 bp, Homo sapiens
  misc_feature (1)...(197): n = a,t,c or g
ggtggagacaaacagtgatttcaagggctgagagaaggggaattgattgcaaactggtgcaagacagcttttgtgggtgttggagggctctaagctggattgtggtgacagttgcacaactataaatttacagaaaaccattaaagtccatacnaagagtgggaggattacaccttaataaaatttttttttttttt

SEQ ID NO: 20964 - DNA, 326 bp, Homo sapiens
gctggagccaggagtgattattccctcgcctgaccggagcaggtctgttgccaaaccaggcagcaccttgggaacagtttctcttatggagataggagccttccagtggggccactggtcttgcttagggcgaaacgactgggcttctgagaagcagcgtctcagcaatgcagcaggactgcatcccccacaagtggacttggaactccagagatagcagggaagccccttgattctagcccagctgccacacgcttcagaacactgcctcctgcccacactgtggtcttcccagactcctccttcctcccaccacacctcccacg

SEQ ID NO: 20965 - DNA, 352 bp, Homo sapiens
  misc_feature (1)...(352): n = a,t,c or g
gcctaatgctatagtagtcattaactttaggcagattttattttatatctggcccaaaatatgttgtatctttggcattactgcctgacctgatccactttttgggtttttttgtgtgtgttttttttttaaaagatagggttttgctttgttgccaggttggagtacagtggngtgatcatggctcactgcaaccttgacctcctgggctcaaacagncctcccaccttancttctgaagtagctggnactacaagcacacntcaccacgcccagctgattctttnattttttganagaaggcatggattctgntgcccacactggntnnaattnctggactnaannatcc

SEQ ID NO: 20966 - DNA, 648 bp, Homo sapiens
gcggatagaggacacgaccaagatggcggcggtgtctggcttggtgcggagaccccttcgggaggtctccgggctgctgaagaggcgctttcactggaccgcgccggctgcgctgcaggtgacagttcgtgatgctataaatcagggtatggatgaggagctggaaagagatgagaaggtatttctgcttggagaagaagttgcccagtatgatggggcatacaaggttagtcgagggctgtggaagaaatatggagacaagaggattattgacactcccatatcagagatgggctttgctggaattgctgtaggtgcagctatggctgggttgcggcccatttgtgaatttatgaccttcaatttctccatgcaagccattgaccaggttataaactcagctgccaagacctactacatgtctggtggccttcagcctgtgcctatagtcttcagggggcccaatggtgcctcagcaggtgtagctgcccagcactcacagtgctttgctgcctggtatgggcactgcccaggcttaaaggtggtcagtccctggaattcagaggatgctaaaggacttattaaatcagccattcgggataacaatccagtggtggtgctagagaatgaattgatgtatggggttcc

SEQ ID NO: 20967 - DNA, 335 bp, Homo sapiens
gccaagctacaatctctcatttccttctgtacctgagtcagggtcattccctctctgtccaaactctggttttctcgtgctttagcacatagtgaagaatggccattccagcttccagcccagcatgaccatggaactctactgtccaacaccattcatctagagagagaatctgattggctgggcttgagccaggtgattgagcctgggcttaatcaggcttgagccagcctgatttgataagccctggtgagggggcagggctgcctggaggttcatcacttcagcaggggctgtgagtgacgtgcccagagaaaacttggcagagaaaactt

SEQ ID NO: 20968 - DNA, 527 bp, Homo sapiens
  misc_feature (1)...(527): n = a,t,c or g
ggttgcctaggctggagtgaagtggtgcaatcacagcgcactgcaacctccgctcactgcaacctccgcctcccaggttcaagcgattctccggcttcagcctcccgagtanntgggagtataggcatgtgccaccatgcccggctaatttttgtatttttagtagagacgggatttcaccatgttggtcaggctggtcccaaagtcctgacctcaagtgatccgcctgccttggtctcccaaagtgctgggattacaggcctgagccaccatacccggcctcttttgagcactttctgatgccaanaactaggtttagtactggctcaactctgggggagctgatgcctcaaaggacagatanagaagtaaacatatgattgacacccatgtcattgcgcccccacgctcgcaccgccatccaggagtaagcatanaatgtctcacagcacaaggcctgaactcngtccccaacagacntgttanaaacctttccctctctttccaacctgaatcctgaancatta

SEQ ID NO: 20969 - DNA, 353 bp, Homo sapiens
gattaaattctgggtgaaacccttttctcccacacaaaatagttttagggatttttttcattgtccattacttgccaggggcagttttagcagcacttttgatagattacgtataatcctcccaaccaaccagcagggtagctattactgtccacattttacaggcaaggaaacaggctccaagaggctgaggactttgcccaggatgacatagccaatggacaagcagtgtctgtcagctgtgaaggcttcactcttattgtccttctaccttgaatagaagttttcctgataagaataaacgaggaaaaggtccttgcctcctggaagaacaaatctaccaggtgatctat

SEQ ID NO: 20970 - DNA, 66 bp, Homo sapiens
gaggctgtgaacctagagcgtgccctggagatggcaatcgaagcaggagctgaggatgtcaaggaa

SEQ ID NO: 20971 - DNA, 509 bp, Homo sapiens
  misc_feature (1)...(509): n = a,t,c or g
gctccagaagcttctggaagctggaaactttatctgtcaagccctgaacagaaaaactagctccaagtggctcaggctacctgtaaactctgagccccttgcccacctgaagccctggggatgatgtggaaataggggcacacacagatgattcatggatggggacatggaaatgagaataggttaaatggtgcaggtacctcatagccagctctacacagaggtctctcctggcagaaagcaggcgaagggcaggaggagctgcttggcagaaggacctcctgcccagacctgaggagtgagaggctttgagggctgaagtctccctttgttacggaccctggcccaggagttgaatgcctgaggacgtgtgggaaccccgttccctacttagcatgatccttgagtctcctctctggatggaatccgcgactggccactgggcacctttaacggttcacctnccttgccgngggccttgcttttgactntaggaccaggcatggagg

SEQ ID NO: 20972 - DNA, 327 bp, Homo sapiens
ggagattccaagggctccagggaatccagtggatcaagaaagcaggaaaaaactccaaaagattacaaggaatacaaatcttacaaagatgacagtaaacataaaagagagcaagatcattctcgatcttcatcctcttcagcatcaccttcttctcccagttctcgagaagaaaaggagagtaagaaggaaagagaagaagaatttaaaactcaccatgaaatgaaagaatactcaggctttgcaggagttagccgaccacgaggaaccttttttcgaattagaggcagaggaagagccagaggagtttttgctgggacaaatact

SEQ ID NO: 20973 - DNA, 365 bp, Homo sapiens
ggggagcagggacgcgtgatgggaccctgataagaaacatcgtttcaaggagcgagattgacttaaatcttatcaaatgtcacttcaagaagatgtacggcaagaccctcagcagcatgatcatggaagacaccagcggtgactacaagaacgccctgctgagcctggtgggcagcgacccctgaggcacagaagaacaagagcaaagaccatgaagccagagtctccaggactcctcactcaacctcggccatggacgcagccagacagatgcctcagcatgaagggcttggggacttgtggatcattccttcctccctgcaggagcttcccaagctggtcacagagtctcctgggcacagccg

SEQ ID NO: 20974 - DNA, 468 bp, Homo sapiens
  misc_feature (1)...(468): n = a,t,c or g
ttgaacacccnttgngacagccgctatgacatgattacgaatttaatacngactcactatagggaatttggccctcgaggccaagaattcggcacgaggtttcatgacgatcctgtgtacccggagctatccgcacctccggagagtcttccaggagttcatcaagatgaccaactatgacgtggagcacaccatcaagaaggagatgtctggggatgtcagggatgcatttgaggccattgttcaaagtgtcaagaacaagcctctcttctttgccgacaaactttacaaatccatgaagggtgctggcacagatgagaagactctgaccaggatcatggtatcccgcagagagattgacctgctcaacatccggagggaattcattgagaaatatgacaagtctctccaccaagccattgagggtgacacctccggagacttcctgaaggccttgctggctctctg

SEQ ID NO: 20975 - DNA, 402 bp, Homo sapiens
catgcatctgtagcttatgtcctcccagcggcagtcacggtgggcctttataacatctagcacagaggctgaaggaagggaggagcctcccatagaagggaatttttttttctccttgcagtgctggacacctgtagtccccactatatttgtgagggatttgaggggcttgccaccagctgcagaaagttatcttattgctgtactttcttatacgtgatggaagaagttggacttgccattcctgcttcagccgggcaacctaagttaatactttcctggtttctctttttgccatttaaacacattgttggaattggtggatgattgtttgccaaaaatatgctttcttccttcttattcctgggtttaaataagatactagcttcaatagtggcagcg

SEQ ID NO: 20976 - DNA, 418 bp, Homo sapiens
gattaactacgtatagcggggaaaatgaaattgctggtaaaactgaagttctgaagccatatagtagcaacatagtattattactagtaacacttaagtgtcaagacagtaaagcaacccagtatagttcgagtctgggttgtagtcgggcagttcttttggtttctggtatgttacagctcactgaaagaaaaggtgatggaaagataggaatcagaaagagggatgctaccttgagttctgtcactttaagtttggtgtccttatctgttaaataatgatggaaatgcctgtctcattgattttttgtgaagattgaacattaaccagtttaacaaaacaagctgtgcccagcacagtgcctggcacacagtaagcattcagcagttcgaccagatctagccctttctctaagtgg

SEQ ID NO: 20977 - DNA, 412 bp, Homo sapiens
gaggcatggtggctcatgcctgtaatcccagcactttgggaggccaaggcttatggatcacttgaggtcaggagtttgagactaacctggccagcatggcgaaacccatctctactaaaaatacaaaaaattagccaggcatggtggtgggtgcctgtaatcccagctacttagcaggctgaggcaggagaatcgtttgaacctgggaggcagaggttgcaatgagccaagatcgcagcactgcactcaagcctgggcaacagagtgagactccatctcaaaaacaaagaaagtaaattagtggttagcagtggggagaatgataaactggatttgatgcttaagaagtggggggttacttttcaggggagtgaaatgtctaaaattgattgtgatggatgcacaaatctat

SEQ ID NO: 20978 - DNA, 374 bp, Homo sapiens
  misc_feature (1)...(374): n = a,t,c or g
gagagacctgggcttttttctcagtctttttttatttgcagtaggagtttaaaggagacatttagcttgccacacatcagtattcatgtctataaaataaggtggctagtatagagaggatgaattatttgaaacctacttgtgtcttatagtattgtgatattgcaaataaaactgaggagatttacatatttctgatgaattttggaggcatccatctgatagccatagatacntaaaataattactcacaaagcnatattcaccacgcggctttcncagtttccatttcatttgaatcagnctaggctgaacnggangaataatggagtttgaagaatnccaatngttgccaggtgcctgggctcatgccg

SEQ ID NO: 20979 - DNA, 485 bp, Homo sapiens
  misc_feature (1)...(485): n = a,t,c or g
gngnnttgannccnttgaaaaccnnttgactgattacgaatttaatacgactcactatagggaatttggccctcgaggccaagaattcggcacgagtttgtggccattgttcaaagtgtcaagaacaagcctctcttctttgccgacaaactttacaaatccatgaagggtgctggcacagatgagaagactctgaccaggatcatggtatcccgcagtgagattgacctgctcaacatccggagggaattcattgagaaatatgacaagtctctccaccaagccattgagggtgacacctccggagacttcctgaaggccttgctggctctctgtggtggtgaggactagggccacagctttggcgggcacttctgccaagaaatggttatcagcaccagccgccatggccaagcctgattgttccagctccagagactaaggaaggggcacgggtggggggaggggttggttgggctcttatc

SEQ ID NO: 20980 - DNA, 402 bp, Homo sapiens
gctatgtaatgcaaggcatatgcctgatgaagtatacaaatacacctgaccagaaactttgtctcccacataagtctcttctaggcactgtcggggtacatactgagctgctgctttggctgtattttctgtgcctcagaataaccattgtcctggtgttcatatccttagagttcagtacaaaatgttggatatccatttaataggttccaggttatcttagttggagtttggggtatttgaaaacgtcatgccttcaggctatcatttccctcagaaagctaagtaaatttactgcattcatttctcaaagagtaaaagtgcaggttgtatgtgtctatgaacatttaaacatgttaaaatgttaaatttaacattttaaatttaaacatttaaatatgt

SEQ ID NO: 20981 - DNA, 502 bp, Homo sapiens
  misc_feature (1)...(502): n = a,t,c or g
atttgannccancagctatgacatgattacgaatttaatacgactcactatagggaatttggccctcgaggccaagaattcggcacgaggcagacgtttacagagaccacttttacagtgagcagctactggacagatgtccctgcccaccccactatgctgccctccctcagggtctgggccagtgtcagtgcagtctgtccctatgaagtcagtcctccggcctcccaagtgcagtgtcatgtgatagaaagggacaggctcattacttttctgcttcttaaaaagcaaagagactgggcatggtggctcacgcctgtaatcccagcactttgggaggccaaggcaggcggatcataaggtaaggagatccagaccatcctggccaacatggcanaacccagtctctactaaaaatacaaacattagctgggcatggtggcgcgtgcctgtaatccactgcttgggangctgagcangagaatntctcnaancggggagt

SEQ ID NO: 20982 - DNA, 584 bp, Homo sapiens
ctgagggagaaaatgatgcccaggttgggctccccggcccaccggccgaggagaggcctgcgctgcacacgcgcagaccgagcatccgcgtcaagaggcgaagagagcgcgcgctccccacgtcctgcgctcctggctgccgggcattcgtctcagccgtgactctcgccaggccggggctggcgcgcccacgtctgaagagcgatgccccgggagatcatcaccctgcagctgggccagtgcggcaaccagattgggttcgagttctggaaacagctgtgcgccgagcatggtatcagccccgagggcatcgtggaggaattcgccaccgagggcactgaccgcaaggacgtctttttctaccaggcagacgatgagcactacatcccccgggccgtgctgctggacttggaaccccgggtgatccactccatcctcaactccccctatgccaagctctacaacccagagaacatctacctgtcggaacatggaggaggagctggcaacaactgggccagcggattctcccagggagaaaagatccatgaggacatttttgacatcatagaccgggaggcaga

SEQ ID NO: 20983 - DNA, 439 bp, Homo sapiens
catctctggggctgaagcagcttcatttcagagaaaccagctgcttcagaaagaaccagacctcaggttggaaaatgtccaaaagtttcccagtcctgaaatgatcagggctttggagtacatagaaaacctccgacaacaagctcataaggaagaaagcagcccagattataatccctaccaaggtgtctctgtcccccttcagcaaaaagaaaatggcgatgaaagccacttgcccgagagggattcactgagtgaagaagactggatgagaataatactcgaagctttgagacaggctgaaaatgagcctcagtctgcaccaaaagaaaataagccctatgccttgaattcagaaaagaactttccaatggacatgagtgatgattatgagacacagcagtggccagaaagaaagcttaagcacatgcaattccct

SEQ ID NO: 20984 - DNA, 430 bp, Homo sapiens
  misc_feature (1)...(430): n = a,t,c or g
gctggaattgttcaggaaaatgttcttcccaggctggggtggccaagagaccattcatttaatgcctgatggagaagagtgaggagcctgtgcttagcagtgaatggtccggaagccaggcagtgtgggcttttccaagcaggtggatgtcctcatctgtgccctggttgagatgcttcaccaaattcttctcatagagcagcgggtggtaggcacccatcgtgcaggcactatcgaagaacttctggtagtagtagcacacgtcagtcttgcgcttggatgggaggaactcataaatatccacctggtcacacagcgtcatcatgatgatgataccaagcatcccagaggatggggggtttggctgaatctcttctggggagatttcttgaagaatgtcccatagctcccaaggcatntggggcttgag

SEQ ID NO: 20985 - DNA, 540 bp, Homo sapiens
gatcacaagtccctggaggatgctctgagctcagacacatctggccacttcaggaggatcctcatttctctggccacggggcatcgtgaggagggaggagaaaacctggaccaggcacgggaagatgcccaggcatgacgatcctgtgtacccggagctatccgcacctccggagagtcttccaggagttcatcaagatgaccaactatgacgtggagcacaccatcaaaaagtgtcaagaacaagcctctcttctttgccgacaaactttacaaatccatgaagggtgctggcacagatgagaagactctgaccaggatcatggtatcccgcagtgagattgacctgctcaacatccggagggaattcattgagaaatatgacaagtctctccaccaagccattgagggtgacacctccggagacttcctgaaggccttgctggctctctgtggtggtgaggactagggccacagctttggcgggcacttctgccaagaaatggttatcagcaccagccgccatggccaagcctgattg

SEQ ID NO: 20986 - DNA, 453 bp, Homo sapiens
  misc_feature (1)...(453): n = a,t,c or g
gggcagacgaggatgaaagagcccaggagagtcagattgatttcctaaattcagtaatagtggaccttcaaaggaagaatcaagacctcaagatgaaggtggagatgatgtcagaagcagccctgaatgggaacggggatgacctaaacaattatgacagtgatgatcaggagaaacagtccaagaagaaacctcgcctcttctgtgacatttgtgactgctttgatctccacgacacagaggattgtcctacccaggcacagatgtcanaggaccctccccattccacacaccatggcagtcggggtgaggaacgcccatactgtgaaatctgtgagatgtttggacactgggccaccaactgcaatgacgacgaaaccttctgatgaagcctccagtggagaactggctttgtcagacgcctngcattganncacgtacaccncatttggg

SEQ ID NO: 20987 - DNA, 381 bp, Homo sapiens
ggattcaggcacctacagcaactcacagcaactcctaactcttaggagggctccctcctattggccgtgaagctgcaaaccagcctctctcttttccctggatcttccttgcccctagttctgagccccagcccagaggcaggcctcatggctaataaaccagctagaggacagctggggcctgttggctccttctccatgttggccttcccttgtgtctcttgtccctgtaggagtgccttatagtactgtctcgtgcttctagtctagtctgaaccacttgaagcctgcaggacccttcaactaaatctggatccctttgcttcttccctgctggctactcttcatatagatgctcttggagcctgtgcattccatgat

SEQ ID NO: 20988 - DNA, 363 bp, Homo sapiens
gcatagattctttgaatttagtataaaagtactgagaattaagtttgtacttccataagcttggattttaaacactgatagtatctcatgagtaatgtgtgttttgggagagggagggatgctgattgatatttcacattgtatgaaataccatgtttgaaactcatagcaataatgctatgctgttgtgatccctctcaagttctgcatttaaaatatattttttctttataggaattgatgtataccatgaagtcattgtcagttgtagtagctctgatgttgaatgagatatcatgttttagcattccattttactgactagggtagaagaacacttttcttggctacatttggaggata

SEQ ID NO: 20989 - DNA, 772 bp, Homo sapiens
gcctttgcagaccaagtatgaaatattataattacaaagatcttaaaagcatatttcactgttcacattttttctttttaaaatttctttataactattatatgacattttcctttatcaggactttataacaatttaaaataaagggttagttttgcagaatacatgactggaggcattaattactttgaaaatattatttcttttgccccagggctgatgcaaatcgtactgcccctagtggaagtgaataccgacatcctggggcttctgaccgtccacagcctacagcgatgaattcaattgtcatggagactggcaataccaagaactctgcactgatggctaaaaaagcccctacaatgccaaaaccccagtggcacccaccgtggaaactctacagggttatcagtgggcatcttggctgggttcgatgtattgctgtggaacctggaaatcagtggtttgttactggatctgctgacaagaactataaaggtaataatgaaggaagaaaaaataaacatgactttgtgtttgtcatgtaagtttaatcagttattatttcctgtggcaggaattgctattgcagttcctctgttattttagacctgaataaggagtaaaatttatcatttatactaataagtgttctaaataaatatctgtttgaaaagtgctatttaaaccactttttctttacctactgaatacctaccactaattcctttatacttacattggtctctccaactgggtacaaaattaagag

SEQ ID NO: 20990 - DNA, 323 bp, Homo sapiens
ggtgcattccagatctgctgcttgctggctgtaaaatgttcaacaagttacttctcgaagcctcagtttccacatctgtaaagttggagtaataattataatatttaccttatagaattgtggtgatgattagagaatgtaacatggtaactaccgacacatagtaactactaactatgggtcaactgtaggttggaaccacatgaaatttctattgtagtggaccaaaaattatcaaatattggcaatttcatatggttcaatctagtattactaaaaggcatccattctttggaaatatcaatgctttccttattcatctc

SEQ ID NO: 20991 - DNA, 513 bp, Homo sapiens
gacaaccctctctcctcagcgcttcttctttcttggtttgatcctgactgctgtcatggcgtgccctctggagaaggccctggatgtgatggtgtccaccttccacaagtactcgggcaaagagggtgacaagttcaagctcaacaagtcagaactaaaggagctgctgacccgggagctgcccagcttcttggggaaaaggacagatgaagctgctttccagaagctgatgagcaatttggacagcaacagggacaacgaggtggacttccaagagtactgtgtcttcctgtcctgcatcgccatgatgtgtaaccgaattctttgaaggcttcccagataagcagcccaggaagaaatgaaaactcctctgatgtggttggggggtctgccagctggggccctccctgtcgccagtgggcacttttttttttccaccctgcctccttcagacacgtgcttgatgctgacaagttcaataaagattcttggaattttgaaaaaaaaaaaaaa

SEQ ID NO: 20992 - DNA, 376 bp, Homo sapiens
gtgaggatgttctggatggagttaccaagcccccgacaggctggtccagttcctggcctcaacaaagtatgtgtccttttgcctcaggagaccagctgctccctaaaggctgcagcccccagcagagtttggcctgtttttctgcctgtttcacaagagagtgagcccccctggctccagctgcccacctgcacgaagctctgttaatggctgggacccccgaagcacctgggcccccagcctgttgctgggcctgggcttcagcttctctccaactcccatctactccacatctggtcctgggagatgttttctttccttctgagcctgaaagatcaaaagccctaaagtctaaaatcctgaaaattacaatccc

SEQ ID NO: 20993 - DNA, 536 bp, Homo sapiens
ccgctgcctcctcctaccctcgccatgtttcttacccggtctgagtacgacaggggcgtgaatactttttctcccgaaggaagattatttcaagtggaatatgccattgaggctatcaagcttggttctacagccattgggatccagacatcagagggtgtgtgcctagctgtggagaagagaattacttccccactgatggagcccagcagcattgagaaaattgtagagattgatgctcacataggttgtgccatgagtgggctaattgctgatgctaagactttaattgataaagccagagtggagacacaggtaaaattggcattatctcctttttaccaggatgcttgagttccttgtttagtgattatctagctgcctgggctatactgcaggtacctgtgtcaatattagatgtggctcttgggagtaattttgggtagaattcccagttagaacttcctggggcttggagtttagctgccaatcattgcagttttaaagaggctctggcaataatgctgacagtgtct

SEQ ID NO: 20994 - DNA, 109 bp, Homo sapiens
ctgattttcagcctgtgtcgatacaataatcgacttgcagaacatattgtatctatgcttttcacatcaatagcaaagttgactcctgaggcagccaatcctttcttta

SEQ ID NO: 20995 - DNA, 321 bp, Homo sapiens
ggacactcaaatcactgcaggcatatatgaagccaacacaatctaagctgctattaaaacagagccaagtcataaattagtacatcaacatctagaataaggcccaaagaactacctctgcctgttgtaacaacagtgggcagggacgcacagcaaaggtacaaatgactacatgatcccaatcaccgagctacatttagtgggctcagccaaggtatacaatcaagcttaatttgatgtaaaagctgaaacttccataatccatagtacaaaggtaaaaaagaccaaaacttcttatatggaatcttggcaatcaaatgg

SEQ ID NO: 20996 - DNA, 339 bp, Homo sapiens
gccggaccacaagcactgtagatattgatgaatgtcagcaagggaatctatgtgtaaacgggcagtgcaaaaataccgagggctccttcaggtgcacctgtggacaggggtaccagctgtcggcagctaaagaccagtgtgaagacattgatgaatgccagcaccgtcatctctgtgctcatgggcagtgcaggaacactgagggctcttttcaatgtgtgtgtgaccagggttacagagcatctgggcttggagaccactgtgaagatatcaatgaatgcttggaggacaagagtgtttgccagagaggagactgcattaatactgcagggtcctatg

SEQ ID NO: 20997 - DNA, 400 bp, Homo sapiens
  misc_feature (1)...(400): n = a,t,c or g
ggaaatattttcccaaggaagctattctacacagtggcaaaattgctatctaattaataatgtagctaaactatgatatttatagtagcaaaaaactaaattctataagattgcattaaaggaaagatatattctatttgctcacttgggctgcttggtactcacctgccctccaggtgtactttaggcctgtggagggtgggcatttagtggtgacccttgcaccagggttttctaacagatgaccctgtgaatcataatttaaacctgcatatattttatagccagtcacatttgccctctcaccctatatgggccataaactgcctaagcactcaggcctcccactcatcaacccctttgaccagagaaagaagcactctggntctctatccccttg

SEQ ID NO: 20998 - DNA, 435 bp, Homo sapiens
gacatggtatgttaaaagcgcagagaagctgaagaatgatgatgaagactaaaataacgatgataagcaaagaactaagcaggcatctgtgcagtgattcaggaggggtgtccatgaggggcggcttcggagcagctctccctgtaacttatctcacagttccctcctcctttaaggagtcagaccacggtgggctttgctttagagacatgccactgtgtgctttgttgctcgtgactatcccttcacctttctagaggtgctcgtcttcatgtaaagtcgggtgaagctttttcactcctggagaaaagctcttacaaaatttttgggacaaggagcaggtgtgcctcagcgagcctgtcattatctggggagggggctccagataacacacttctacttgctttctttagggaaacgacatgggctcctcct

SEQ ID NO: 20999 - DNA, 270 bp, Homo sapiens
ggggctttgctggcttcccagagagaggcaggacagaatgctttgacctccaagctgttttaaatctagtagataagccagatcctgtgttgccataagcccttggcccacatttaagtgggaatgcagctagcttggatgtctgaaactttgtaggcgcctctgtctgaatcctgaacacaggcaccaggactactgagagctcgtcatctgtgcaggatagccacacagcaaacatgtttgcaaaactgaagaagaaaattgcagaag

SEQ ID NO: 21000 - DNA, 332 bp, Homo sapiens
  misc_feature (1)...(332): n = a,t,c or g
gtttagtagttggacttagggaacaaaggaacctttaatagaaattggacagcaagaaagcgagcttagtgatacttgtgggccagggcattagccacaccagccaccactttctgataggcagcctgcactggtggggtgaattctttgccaaagtgatgggccagcacacagaccagcacgttgcccaggagcctgaagttctcaggatccacgtgcagcttgtcacgtcgacgcggccgcgaattccagatctatgaatcgtagatactgaaaaaccccgcaagttcacttcaactgtgcatcgtgcaccatctcaatttctttnattt

SEQ ID NO: 21001 - DNA, 507 bp, Homo sapiens
  misc_feature (1)...(507): n = a,t,c or g
annnctttgaaaacnttatgactgattacgaatttaatacgactcactatagggaatttggccctcgaggccaagaattcggcacgagaggaggtccgaagctctgtgggacctcttgggggcaaggtggggtgaggccggggagtagggaggtcaggcgggtctgagcccgactagcagtctagaggcctgaggcttctgggtcctggtgacggggctggcatgaccccgggggtcgtccatgccagtccgcctcagtcgcagagggtccctcggcaagcgccctgtgagtgggccattcggaacattggacagaagcccaaagagccaaattgtcacaattgtggaacccacattggcctgagatccaaaacgcttcgaggcaccccaaattacctgcccattcgtcaggacacccacccacccagtgttatattctgcctcgccggantgggtgttcccgggggcacttgccgaccaaccccttgcgtcccaggtttgcagctc

SEQ ID NO: 21002 - DNA, 312 bp, Homo sapiens
tgtaaacatatcaggtgccaacaacttcttctgagatgaaccattattctgttcaactgtcattagattatgcttggctttcactgaggcctcaaatgtatcaacattttcccgttcatactctttaacatcagcagctactcgctccagaatgtcatctggagatggtgatcgtgttctcgtactgctctgggggctgcttggttcagatggcacagacatgttgctatcttcagcaaggtatttatatttctgaacaattgcctgcctttggattcttctctgttctattagggcttcttcatcttcttc

SEQ ID NO: 21003 - DNA, 410 bp, Homo sapiens
gggacctaaaggtgtatatcaaatcagcaaacaaatcaaagctcatgatggcagtgtgttcacactttgtcagatgagaaatgggatgttattaactggaggagggaaagacagaaaaataattctgtgggatcatgatctgaatcctgaaagagaaatagaggttcctgatcagtatggcacaatcagagctgtagcagaaggaaaggcagatcaatttttagtaggcacatcacgaaactttattttacgaggaacatttaatgatggcttccaaatagaagtacagggtcatacagatgagctttggggtcttgccacacatcccttcaaagatttgctcttgacatgtgctcaggacaggcaggtgtgcctgtggaactcaatggaacacaggctggaatggacca

SEQ ID NO: 21004 - DNA, 490 bp, Homo sapiens
  misc_feature (1)...(490): n = a,t,c or g
gctcacccagaggacctcaaatcccgggctcgggcctggggaacataccaggggtggtagcattttaaaaacatttggtagatgttactggcccaagagagagccatttaaatactcatatttatcaaaagcccagctgcactgccttgacccgtggaggattgtgagttctttgtgcccgaaaccttccagtttcagttctgccttgcatgatattggttagtttcttctctccccatcccccccgccacacttttttctgtcagaacaaagaatgctttttgcactctanatctgnggtttgtaaggccaagtaattttctaagccctacacattaggaccttaccgaacatttttnanaaaaagcccctttgnagcttnnnnaaaanttagggcntttggaaanaaaaccggaagnttttggaaccaccaagctttcnnaaggangggggcnttaaggctttttcanccccgggcaantttnnaaaa

SEQ ID NO: 21005 - DNA, 377 bp, Homo sapiens
  misc_feature (1)...(377): n = a,t,c or g
ggggggtgctgacgacaactgagggcaaagtgcttgtcccctcatagttgcgcaatgaatgcagaggggctgaggttcatctgtcgtcttcagctctgcaggctacatctcagggtgtttcctgtgaaagttccagaagaaagctgtatggtcagcttggggaaatatgtggttcatgctggaatgctggacataccacattattggaaagatgcacattgaatgaccgacaaaatgaaactcaactttccaaatgctggtaatgagagaagattctgttctaatgaccagttgtttcctgaaagaatgtcagctcgattcataatgaatgcattctaaccatgacagccacagtcaggacacaaaaancaaagtgt

SEQ ID NO: 21006 - DNA, 480 bp, Homo sapiens
  misc_feature (1)...(480): n = a,t,c or g
gccctcncnncctncctttgacccctntgacaccntatgacatgantacgaatttaatacgactcactatagggaatttggccctcgaggccaagaattcggcacgagggctgtagtatgtatgttgccttgttcccttgtaatgaatgcgctaagctcatcatccaggcaggtataaaagaagtgattttcatgtctgataaataccatgatagtgacgaggcaactgctgcgaggctcctgtttaatatggccggggtgacattccggaaattcataccgaagtgcagcaagattgtcattgactttgattcaattaacagcagaccgagtcaaaagcttcagtgagttacatctcattcaatctccagaagattgggattatcgtcttctaagaggttgctaatgcctttcatcttgaagttacacataacttcttactagccagtatggcaaaagtaggcatctaaagaatataaa

SEQ ID NO: 21007 - DNA, 306 bp, Homo sapiens
gacattgttatgctgggtgtggtggttcatacctgtaatcccagcacactgggagaccaagacgggaggatcatttgagaccaggaattccagaccagcctgggaaacacagaaagaccctatctctacaaagaagtttattaaccaggtgtggtggctcatgcctgaccactatctactcttttgaatctagcttatttcactcggccttttaaaaaaaaagtcttatccacatggttgtgtacattagcagctaatttttatttttatttttttcagtcctgataccaatgcagtaacatcttt

SEQ ID NO: 21008 - DNA, 448 bp, Homo sapiens
ggcaaagcagctttagcctcatagaatattatttctttggactcaagctgaaatacaagccttacattgccttatgctttatttctttctaatttttatatgtatatagatgagggttccttaatggttgtgagcattgtgtggaattttacacctggcctgcgtggcagcctcttccagttgaggtgttttatgtcacgcacactccatcccagtgtacaaaacctgcttctcttctcaaccgtggcagctcccgctggctcctatgccctgccctaaagggctcttgagcctctgggaatgggaggggccaagagaaggaaaaccctgtctttagcaccctttaaaagaactgtgccccccttctcagtgctgctttgcatgggcctggcccggctcacattcgtcagtgactccaaccctcctgcttgctgtacttgggatgaaa

SEQ ID NO: 21009 - DNA, 343 bp, Homo sapiens
ggtgggtatttgggatgtacatggttgctacgtatttctgtcaacaaggtgagctgaaagtacctgtagaatatctccaaggagaacatacaaaggataactagaaacatgagcctgaatgtcagggttgggtggagctaagggaatgatggtgagattcatcagcaagctaatgaagacagtggcagtggaggcgaatacagacagtgaaattccctagggagagctgtgatgtggctcaaaagagggcgcaaaacagtgctccagggagcacaaacatttaatggataagaacaaggtaatgaagaagcaaaaggaacagggttcagaaaaccagaaaagc

SEQ ID NO: 21010 - DNA, 367 bp, Homo sapiens
gtgcatagggctcggcgtggacggcgctggtgcagggtggggaggaggctcagccatgcggtgggcagggagtgatgcctgatgcacagaggacagagggtgccggtttcttagtgccagaagagggaggaatataccaagggaggcacccacgtgcccctggcgtcatctccacatgcaggcaggcaggcagaaagtaagagatcatgtggacaaaggtgtgtccccagctctgtccgtcatctccacatgcaggcaggcaggcaggcagagagtaagagatcatgtggacaaaggtgtgtccccagctctgtccgcggagggccgggagcagggctacacctgagtcagtgagatcgcagtaccc

SEQ ID NO: 21011 - DNA, 400 bp, Homo sapiens
  misc_feature (1)...(400): n = a,t,c or g
gcacaactgagaggtgactggagatggcagcagcccccagcataagaaggcatcattgcctagtgccctggaagttaacccaagcatcattatatcccattattatatcaacagcaaacattgcaattcaaatagtcaatcagccaattttttttttttannnnngacaaaaagtngcctttacngnnnggccntgttnaaatncccnttngcctngnccacatnatcttnnttctnttntnnggggccnagcctntttngntctgtcngtnacatacttaggccatccagttntnangtngaancttcnttanaattggcaaaanngacttatcctgcctacacagtctttacnggtnggagttntttgtnaaangcctgnaactcaaaangggccctg

SEQ ID NO: 21012 - DNA, 358 bp, Homo sapiens
  misc_feature (1)...(358): n = a,t,c or g
ggctgataaggcttgataatgtaattggaggcattaaattttttttttcaaaatggaatatgaataaaattttatatttctcccaaatatttctctcagttcttaaaactgtttattacttttttgcctggtattttcccactaggtctcattgggctccacatccttgctctatgtttatgtaaaatattaaacatcattccctttcatctcactgcaactgcttctctgtttcatccgcactttatttccactttgcattagggaatacaaaactgacccatgtttaagcaacgtagtgtcaatcaccccgtttagattccattttcccaggcggagganaaggtaaataaattgg

SEQ ID NO: 21013 - DNA, 408 bp, Homo sapiens
aatcaattgtgctgacaacacaggagccaaaaacctgtatatcatctccgtgaaggggatcaagggacggctgaacagacttcccgctgctggtgtgggtgacatggtgatggccacagtcaagaaaggcaaaccagagctcagaaaaaaggtacatccagcagtggtcattcgacaacgaaagtcataccgtagaaaagatggcgtgtttctttattttgaagataatgcaggagtcatagtgaacaataaaggcgagatgaaaggttctgccattacaggaccagtagcaaaggagtgtgcaaacttgtggccccgggattgcatccaatgctggcagcattgcatgattctccagtatatttgtaaaaaataaaaaaaaactaaacccattaaaaaaaaaaaaaa

SEQ ID NO: 21014 - DNA, 598 bp, Homo sapiens
  misc_feature (1)...(598): n = a,t,c or g
gcggcacgagattgggtacaatgggatgccaaatgggtgcagtgatgacgtgttgccttggagaaggacagcagagaataagctggacaccaaatacccgtacgtgtgccatgcggagctgaatgccatcatgaacaaaaattcgaccgatgtgaaaggctgtagtatgtatgttgccttgttcccttgtaatgaatgcgctaagctcatcatccaggcaggtataaaagaagtgattttcatgtctgataaataccatgatagtgacgaggcaactgctgcgaggctcctgtttaatatggccggggtgacattccggaaattcataccgaagtgcagcaagattgtcattgactttgattcaattaacagcagaccgagtcaaaagcttcagtgagttacatctcattcaatctccagaagattgggattatcgtcttctaagaggttgctaatgcctttcatcttgaagttacacataacttnttactanccagtatggcaaagcgtaggcgtctaaagaatatnaagcctcaaatcttccttactgtctctcttgnnacatggaatctacatgtgnttgaactattgctttacg

SEQ ID NO: 21015 - DNA, 335 bp, Homo sapiens
ctaagttataatttagggggtacagacatattcattgagagaatattcaaagcagggccatagtactgtttgtgaagaaagctttatctagtattaccatgactgatcatagcaacagtggctgttttgaggggttgtgtataccccaggcattttttaaagttactttagacatgtatctcatttaactcttacaacagccctgtggtcgacgcggccgcgaattccagatctatgaatcgtagatactgaaaaaccccgcaagttcacttcaactgtgcatcgtgcaccatctcaatttctttcatttatacatcgttttgccttcttttatg

SEQ ID NO: 21016 - DNA, 525 bp, Homo sapiens
  misc_feature (1)...(525): n = a,t,c or g
tgnnnttggaaaanncngantcccttctatgacatgattacgaatttaatacgactcactatagggaatttggccctcgaggccaagaattcggcacgagaagagcttaaggtattctagaagcttagaaaagaaaggagcagggagaaataattaaaaatgcaagtatgaaaagaaaacaaagactagaatgatgagaacctctggcatccttacctggtaagaagcccctggagcattgcttctaatatactccaatagaaaataggcccccacagttacaggaggcgggaggttaaaatagccggttctcccgggaatctttagttgccaccctttcctgggaggcagtcagataggaaattaaagaacagtttcagaatatagtacatanaaaataatggtatagcagtgatctaaaataatggagccctgggtttacaaccaaatgtttctcaactggaaaaaaatgtngattatttcgtgtcaggttgttgctatggaagngnantactaattttgggg

SEQ ID NO: 21017 - DNA, 461 bp, Homo sapiens
  misc_feature (1)...(461): n = a,t,c or g
ntttnatgncntgattacgaatttaatacgactcactatagggaatttggccctcgaggccaagaattcggcacgagcggggtttcactgtgttagccaggatggtcttgacctgatctcatgatccgcctgccttggcctcccaaagtgctgggattacaggcatgagccaccacgcctggccgctaggctttcttaatactcacctccaaagagcttaaggtattctagaagcttagaaaagaaaggagcagggagaaataattaaaaatgcaagtatgaaaagaaaacaaagactagaatgatgagaacctctggcatccttacctggtaagaagcccctggagcattgcttctaatatactccaatagaaaataggcccccacagttacaggaggcgggaggttaaaatagccggttctcccgggaatctttagttgccccctttcctgggaggcag

SEQ ID NO: 21018 - DNA, 339 bp, Homo sapiens
gctcccggttttgctgaaaatgaggtttttgttttctcttcttgttttgtttggatggttccaggaggaaaaggggagaatgctgagctcatgcagccgagttcgtactgagagtctcagcatttcttccctgcccctccccgctgctcttcatgtgtgtgactgtgctccctgggtccttctcttctgggtacactcatattttgtcagtttactctaagtgaattacccagattcagaaaaggataattttcttcctccctcaaaaaggtgttttgttttggagacagggttttgctgtgtcacccaggctggagtgcagtggtgcaaactcatctc

SEQ ID NO: 21019 - DNA, 625 bp, Homo sapiens
  misc_feature (1)...(625): n = a,t,c or g
gttgaataccacaagtaatatttaggaatacttagtcaaaatatagtcaaaagaaatgaaagagttatctatcttttgatctttcttcctgaaaatttggtccaaggcaaataccttataatcctatttaaagaatattcacaggctgggttcagtggtaatctcagcactttttaaggcccaaggtgggtgaatcacttgaagccagggtttgagactaagnctggtcaacatgacaaaaccctatctctactaaaaatgcaaaaattacttggtgtggtggggtacacctgtatcccagctacttgggtgcatgangctgagaatcacttgagcccaanancanaggtgtatgagccatgatgcacactnatccacctgggtgcaaatnanancttccaaaagcaaaaggtnccnaantcgtactcaaccantcataaacncgataacanaatgttatancacggccgactatgccctaagcttcttaagtcaaatgctganaaacacanatttgncaattctaatccgttggggaggtcaggtttatatacccccgtggtattgaatcaccatgnttaaatcaaatnccaaggcatttnatcaaaacctnaagggggccaaa

SEQ ID NO: 21020 - DNA, 938 bp, Homo sapiens
  misc_feature (1)...(938): n = a,t,c or g
cgcccgacggagcctgttcgcgtcgactgcccagagtccgcgaatcctccgctccgagcccgtccggactcccccgatcccagctttctctcctttgaaaacactaagaataatgtcactgcatcagtttttactagagccaatcacctgtcatgcctggaacagggatcgtactcagattgccctcagtcccaataatcacgaagtgcacatctataagaagaacgggagccagtgggtgaaagctcatgaactcaaggagcacaacggacacatcacaggtattgactgggctcccaagagcgaccgcattgtcacttgtggggcagaccgcaatgcctatgtctggagtcagaaagatggtgtttggaagccaaccctggtgatcctgagaattaatcgcgcagctacttttgtgaagtggtcccccctagagaacaaatttgctgtgggcancggctctcgtgtgatctccatctgttatttcgagcaggagaatgactggtgggtttgcaagcacatcaagaagcccatccgctccaccgtcctcagcttggattggcatcccaacaacgttttgctggcagcaggatcatgtgacttcaaatgcagagtgttttctgcctacattaaagaagtggatgaaaagccagccagcacgccctggggcagcaagatgccttttgggcagctgatgtcagagtttggtggcagtggcactggtggctgggtccacggggtaagcttctctgccagtgggagccgcctggcctgggtcagccacgacagcaccgtgtctgttgctgatgcctcaaaaagtgtgcaggtctcgactctgaagacagagttcctgccgctcctaagtgtgtcatttgtctcagagaacagcgtcgtggctgctggccatgactgctgccaatgctctttaactacgatga

SEQ ID NO: 21021 - DNA, 409 bp, Homo sapiens
ggtgctaatgagaaatgaaaagacagttaatgtttgctgagtatctactatgtgcaaggacctatgtatggtcagatgctccaaggtgaactagagcaggtaaagtagatcccaggtcaaaccttggtagtttcccctaccagtccttttcccaccattacaaaagagtgacaaaagtcattctggtttctcctttggaaatacgaaaggcttagaggtataaagtactcaaaaggatccacacagaagagagaaaaggggctggatatccaaacctgaataatcgaagttctgtggccagcgtatgtgacagtctgtcatatggagtatttgcgaccccacctgaagatgtgtgcggaaagtggaaaatctcgtctaattctaggattctgaggagcatcacacagcg

SEQ ID NO: 21022 - DNA, 341 bp, Homo sapiens
gtaccatgttggccaggctggtcttgaactcccgacctcgtgatctgccctcctcggcctcccaaagtgctgggattacaggtgtgagccaccacgcccggcctagaattccatttttaacgtgggttaacccagcacttcccaaactcttttgacagggaacccttctcttccccaaggagcttcttacagaacaggtgttctcaggaacacattcgaggagccccctgctaatgagagccagagagcccctgggttcgcacactccaatgctggccatctgaatccggagctgtgggtgggaggggaccctgagccttgggcactaaagggatggcata

SEQ ID NO: 21023 - DNA, 404 bp, Homo sapiens
aattcggcacgagatggaaatgaggtcagttggggagctgggccttcctcgtgcctgagggatacttacctgtggtttaataatgaccggagctggtgtggtccacagaagagtgtcttctgtggaagttctctcttctttattacacacagttcatatttttctaaaagtatttttactctattactattactaaaatagcatgcacatgaattaaagaatgcattcaaataaatgtatgtacaatgcaaaacagatctccccactcagcctccagttccacaactcgcaggtgactatcttctgtttctggtggatccttccaagaattttccatttctcatcacaaatgtaacaatgagtgtaaacagcctcttttttctccaaaataaatgagagcttgc

SEQ ID NO: 21024 - DNA, 494 bp, Homo sapiens
  misc_feature (1)...(494): n = a,t,c or g
caggncgnganggngnannaacnaccccnncgntgnnnaacngcnaacnnacncnnnnngagagnnnaccnncnccngncngnaccnnnggnaagggngngggtnaagcnnacggcnncantagnngnantntantgncactnaaaccnaggnnnnnnnnggctgccttaagatcccccccccccccagagctggtattgttggnttactgccaccccatcttgaaggaaggccaattctccttcntgatctgcacgcaggcctggagcntctntccccnttcagcctggggctcgcacngtgtggccccatcacctagaatgggtgttccctgagcggactcntccctntgagntaccccttcntcatcaagnactgggttacccagatcctncatatcaggaagcaagtcttaatcattagtgcttggtatacagtaggtgggcaaaaaacgtgttaanttgaaaagtgtagactgaggaatggaattcagc

SEQ ID NO: 21025 - DNA, 218 bp, Homo sapiens
gcgaggtgctccaccaccaccaagggggaggggagcaccacctccaagaggtagagctggctattcacagaggggggcacctttgggaccaccaagaggctctaggggtggcagagggggtcctgctcaacagcagagaggccgtggttcccgtggatctcggggcaatcgtgggggcaatgtaggaggcaagagaaaggcagatgggtacaaccagc

SEQ ID NO: 21026 - DNA, 845 bp, Homo sapiens
gggcgcccaagccgccgccgccagatcggtgccgattcctgccctgccccgaccgccagcgcgaccatgtcccatcactgggggtacggcaaacacaacggacctgagcactggcataaggacttccccattgccaagggagagcgccagtcccctgttgacatcgacactcatacagccaagtatgacccttccctgaagcccctgtctgtttcctatgatcaagcaacttccctgaggatcctcaacaatggtcatgctttcaacgtggagtttgatgactctcaggacaaagcagtgctcaagggaggacccctggatggcacttacagattgattcagtttcactttcactggggttcacttgatggacaaggttcagagcatactgtggataaaaagaaatatgctgcagaacttcacttggttcactggaacaccaaatatggggattttgggaaagctgtgcagcaacctgatggactggccgttctaggtatttttttgaaggttggcagcgctaaaccgggccttcagaaagttgttgatgtgctggattccattaaaacaaagggcaagagtgctgacttcactaacttcgatcctcgtggcctccttcctgaatccctggattactggacctacccaggctcactgaccacccctcctcttctggaatgtgtgacctggattgtgctcaaggaacccatcagcgtcagcagcgagcaggtgttgaaattccgtaaacttaacttcaatggggagggtgaacccgaagaactgtggtggacaactggcgcccagctcaccactgaagaacaggcaaatcaaagctttcttcaata

SEQ ID NO: 21027 - DNA, 502 bp, Homo sapiens
  misc_feature (1)...(502): n = a,t,c or g
gggcaggacaattgtttgaaccagggaggcagaggctgcagtgatctgagatagggctactgtcctccagtctgagggaaagccagacttcgtctcaaaaaaacaaccaaaataaacaactgcttctgaatacacaatggaaaaaaatccccaggggttgtgccagggtgaggggaagtagggcttcctgtgtgacttaccaggaatcttggagctggcccatgcaggggtgtgggaggtgacagagaggtctttaaaaccaggtgggcccagccccggcctcttctgtgggcctgaggacggagaaaaggtctcactggtgaggaatctcatctttggggctgctttgcctgagggaggtgcatagagcagggccgagagaggggctattgagaggagaccctggcccccttggtcaagggagcagggcccgaagaggaatgacccccatcacctttttnaaagactgtaggaaggctnaaaaatncctttcggccattgg

SEQ ID NO: 21028 - DNA, 385 bp, Homo sapiens
gttggcttggagtgtggctgcctggattcgaaagtgtgtccttgactccatggagtaattcttgtagttttgcctggaattgagcagcgaatcagacacatgaggctgcctgctcccagagatgcttttcctcctgtttgagctgtatgagccccgcgagccaaggaaggattgtagagaaattaatgtgtccagagagagttgagccctacccaatgggagagttaaccagaagggtttgtggcccctcatccctggtatcatggccactggaaccactcctggtcctcctgggttcctaagcttgaaggggtggttttagggaatagacccctaccctggaaggcaggaggcatgggtcctcacacagccatgcagttggctt

SEQ ID NO: 21029 - DNA, 352 bp, Homo sapiens
gcaccatataccctgactccttagatggcttggctacccgataaagtgaaagcgcgcagtgtatgtgatactgtgctacacagattcacttttcctctgtgctacagggagagatcttctttggcagagtctcactttcctcccctctagtcatatgctcacatcccttcctcggaaataaaaattaagaagatgctactggctttaacagggctcaaacatttaatttgaggccatataatgatcccatcaaactgattattctcagccatcccactccccttagtgtcctccccaagactagagtttcaccaggtagataaacaggcggtaaaacaaggctaggctttca

SEQ ID NO: 21030 - DNA, 378 bp, Homo sapiens
  misc_feature (1)...(378): n = a,t,c or g
gcgcacttaaagttttggaaacatcttgtctacagtgctattttaagcattctatacatatgaataaagaatactttttaaaaaattaaagcacaatataaaattacttgttcacaaggcatcaaatttgacattctaaaatgttgatactaaactaggaaaaataacgtttctattttcacaaatgacacaccatacatcttgagactacaatactactactctagctgtgttttaatctttgaaattcaaaaggcatctttggatatttaagtttaaggtgccacataggtgagtctgaaccggcactggatattaaagtatccttgntatcttcagactaagggcatggttgctgagtgaatacagaagagtgat

SEQ ID NO: 21031 - DNA, 346 bp, Homo sapiens
cgcggccgcgtcgacttttaagttcacagcaaaactaaccagaaagtatagttcaaactgtatgatattctgatgaagccaaactatggaaacagtcaaaagatcattggtggtcagtggtttgcggagacagaggaatgaatgggcagagcacagggggttttccgcatagtgaaactattcagtatgacactataatattaatagtacagtattggttctactccacaaaaccttgctagaactaggtatatcctgagtgttcgataaaattataatttttcacaacattaccctttttggctacagaactatattattttctaattccgttggtatttttact

SEQ ID NO: 21032 - DNA, 390 bp, Homo sapiens
ttttgagtgagcttaaagaagtggagcccaaattagccgcctggatccgaaaacttaatagctttggcttagatgccacaggacctttcttttctcggtatgaagcatctcttaaacagcttgattttagcatcatgactttcctctggaatgagaaatatggtcacaaactagactctatagaaggaaagcaacttgattatttctttgagccaacatcatcgaaggaagcccgctgtttaatatggctgctagaagaacacagagacaagttcccagcattacatagtgctttagatgaattctttgatataatggacagccgctgtactgtgttaaggaaacaagacagtggcgaagcaccgtttagttctaccaaggtgaaaaaca

SEQ ID NO: 21033 - DNA, 330 bp, Homo sapiens
gtcctgactcctgtgcggaacatggtctctagcgaccggcccgtgtcactggaggacgaggtctcccatattatgaaggagatgattggaggctgttgcgtttgctcagacgagagaggctgatccgagaacccgctggtttattgcgacggtcacggctgcagcgtcgcggtgcatcaagcttgctatggcattgttcaagtacccactggaccatggttttgcaggaaatgtgaatctcaggagagagccagccagagtgatggtatgcaattcctgttggttagcctcatctgaaaacgtcactcctggatacatagaacatcactg

SEQ ID NO: 21034 - DNA, 385 bp, Homo sapiens
gatgttctgtctctatgacaatatattttaactgactttctagatgccttaatatttgcatgataagctagttttattggtttagtattcttggtgtttacgcatggaatcactattcctggttatctcaccaacgaaggctaggaggcggcgtcagaggtgctgggtgacagagccatgagccagccattttataagcactctgatttctaaaagttaaaaaaaatatatgaaatctctgtagcctttagttatcagtacagatttattaaatttcggcccttaacccagccttttccagtgtgtaacccagtttgaaatcttaaaaaaagaaaaaatgaaaaaaaaaggaaaaaaagaaaaaaggaaaaaaacagtttgaaca

SEQ ID NO: 21035 - DNA, 474 bp, Homo sapiens
gctggaggattaaatcagagccagtctgctcacattctaggcacaggtacattctctgtgttgtcttttccttagcacaaagtgcagtaacagaatagctgccccgtggttaaagagaaatgattacagaaaagaacagttggagaaaacaaggcaaaagtacttggattttagtcagtgggagtccatcacagtaactaatgggctgagaatgtttctattttttcaccaagtaatccatatgcaaatttcctacagtattcaatatgcacttccaagctcagtaaatgttttctattcttttctgcttagctctctcagctttttccaattaggccctgtttatttagaaaaaaagaaaatgtctaaaggaaggattaagctctgtatcttatggagaaagaatgaatattagaaattctttcaggatctagaggatgcattctttactcatcctcccgctgggatgggtaa

SEQ ID NO: 21036 - DNA, 390 bp, Homo sapiens
ggggagtactgctggcccagagcgagcggattcggagcccagggtcaccaaacgccaggtttggggtgggctgcgccatgctccttggccggctgcagtccagggcgctgcgcctgacgccttcgtcatacccaaattacggcagcttgctgcctccaggccctttcctccgtaaactctgtggcgcagtttggagctgcgggctcgggtgggtggggggcttgacatgatgggcatccgcaggagcaaatagagcgctagcgcaggcattcgcgtaggccaatggagagccggcggaggcggggcgccgcgctccggaacccccagcggggccgaacttaactactgaattgctggagttggttcgtggccgggggcctgtgaggtctt

SEQ ID NO: 21037 - DNA, 423 bp, Homo sapiens
  misc_feature (1)...(423): n = a,t,c or g
gactggagaaacaatgcttttgggaaaacatcaaggatgaagaacaaggccacggaggtgattcagacaacagtaatgcagtgatccagggcccagggcaagctggctgtaaggaacgggtgcggggcctcacaggtgctgccggcctggacagggaagacaagggcctgggatcagcaggacttggaaaggaaatgacggaagcccatagcttatgaagtgattagtcagagtgcttgaagaacaccatgcacattcccatttcactccctgcaaatgataggacatgaccagagattccttaacagagatgactttttaaatattagataaaccagacgcagggaaattttctctccagaatgcactctagttagcaatnagaatgacagaggagacttcagggagctgaagantgcagca

SEQ ID NO: 21038 - DNA, 420 bp, Homo sapiens
  misc_feature (1)...(420): n = a,t,c or g
gcaggacttattcagattttaatctgtctgaaaacagtgacagtccgttgctgagttttaagcaggagcgtaactgattcgataagcattttagaaagattattctggccagatgtgaggtgattgtctgcatagctgtgagagccaggagttaaaattgacaagacctcagggataagggaggcgtcaagggcgagtcctgtggtttctggcgataccattccctggagtttcgtgcactggaggaaatagttcggtaagtgagaactcattganaatactaaaaatgggcatgtacctaggagtggaattgctggatcatgaggtntgtcttgtgtttaactttctgaggaagtgccaggacttntncanagtggttgcnccatgttacattccatcggnnatgggatgaangttctc

SEQ ID NO: 21039 - DNA, 288 bp, Homo sapiens
  misc_feature (1)...(288): n = a,t,c or g
gtccttttatatatggcttattttatttagcataatgtcctcaagggtcatccatgttgtagcatgtgtcagaatttccttcctctttaaggatgaataatattccattgtatgtatataccacattttgtttatctgttcatccactgatggacgttcagactgtttccaccttttggctattttgagtgatgctgctatgaatgttgtatgcccatctcttttaaactcctatgtgtatggatatgtntatctctttctaattttgactattaaaaccaatctgga

SEQ ID NO: 21040 - DNA, 55 bp, Homo sapiens
attagcaggtgccctttatgctgtccttgaaagggaggtgttagattgcagcagg

SEQ ID NO: 21041 - DNA, 382 bp, Homo sapiens
gaaaagagctcacagggcatctgaggaaagattactaacacacacctcaaatgactgtgtctgatttcctagaaggactcagaaagggagtgatcactgtggattggactggatagtgcctcatgctggaggtgggctttgagtgcagccgtgaaggtcaagaaaaagtgatataaacactggctccttccttttgaagggacaccacactctttgggcttagtggttatagatgcctttagcgcagcccaggagcaagcatttgttgtctacctaccacgtgcttggctttggaaatgcaaataaaaaaggaggtcactattttatgaaaggatgatttttttctaccctgatgtagccagctgcaagctttaaaaaggca

SEQ ID NO: 21042 - DNA, 720 bp, Homo sapiens
ataagtttccaggagaagtaaccctgctctgtggaattgcaagaatctatgaggaaatgaacaatatgtcatcagcagcagaatattacaaagaagttttgaaacaagacaatactcatgtggaagccatcgcatgcattggaagcaaccacttctattctgatcagccagaaatagctctccggttttacaggcggctgctgcagatgggcatttataacggccagctttttaacaatctggggctgtgttgcttctatgcccagcagtatgatatgactctgacctcatttgaacgtgccctttctttggctgaaaatgaagaagaggcagctgatgtctggtacaacttgggacatgtagctgtgggaataggagatacaaatttggcccatcagtgcttcaggctggctctggtcaacaacaacaaccacgccgaggcctacaacaacctggctgtgctggagatgcggaagggccacgttgaacaggcaagggcactattacaaactgcatcatcattagcaccccatatgtatgaaccgcattttaattttgcaacaatctctgataagattggagatctgcagagaagctatgttgctgcgcagaagtctgaagcagcatttccagaccatgtggacacacaacatttaattaagcggccgcaagcttattccctttagtgagggttaattttagcttggcactgccgcgttt

SEQ ID NO: 21043 - DNA, 334 bp, Homo sapiens
tggagacaaagatccgcaaaaggtcagttggagaaaggaggtaaataagtttgaacgtggagagaaaactgatcagagcaaggttgagggaaaatgagcacgtacagaagatggaggcgtcaagcagatttgaaggaggacggcagaagtgcagcagatttggaggcggttttccatgtaagtgccactggcttccactatccgttattgagtgaagactctctggcataatctgttggatctgagaagcctgttgtgacacttcccatgtgttaaatggcacccaacaaagtggatcagggctatttttacatgtgaactaacaaacatctgt

SEQ ID NO: 21044 - DNA, 510 bp, Homo sapiens
  misc_feature (1)...(510): n = a,t,c or g
ggcgcaggcatacgcactgttttctcctgatgtgaggaagggtcctcatttggtcctcagctaaagctgcatctgagtgaaagtcagtttcctgganaaggctcctcggcaggatgattccgttactttacgattctgtagtgaaggaccgcaacgagttagctaacagtgactggcctctgagagtctcaggtgtgaagtacaggtcaccataggaatggacacaccctgctctgccctctgggtggtgggttgggttgcatggtctgaagctctctgactccacagtaacctggggtctatcgacagcaaacagcagtagctcatgaaggcagaacctgccctgctggaaggccggggtgtgtatggattccccgttgtgctgtttgctgacggatgatagtttcatctctgatangacggaggtgggacccacatgtacttagaganactgggctgggcgcaatggttanccctgtatccaacacttttggaaggccaagnaagggg

SEQ ID NO: 21045 - DNA, 285 bp, Homo sapiens
  misc_feature (1)...(285): n = a,t,c or g
gggatgtcaccatgttgcttaggctggccttgaactcctgggctcaaaagatcctcctgcctcagccagacatgtattattgtctggctctgattataatcatcctagtggatatgaaatagtatctcgtggttctggtttgcatttccctaatgactaatgatgttgagtatcttcatgagtgtattagccactcatatatcttctttggtaaaaggtctattcaaaccttgnnnctattttttattgcnttgngcttaaannantgcnttggnnaanatgccc

SEQ ID NO: 21046 - DNA, 347 bp, Homo sapiens
ggactagaataatacttttaaagtgcttacagaaagtagctgctgatctagaaattcataccctgcaaaaaatatccttcaaaaatgaaggtgaaatggggctgggtgcagtggctcacgcctgtaatcccagcaccatgcccggctaattcttttgatttttagtagaaatgaggtctcactgtgttgcccaggttggtcttgaattcctgagcaaaaaagattctcctgcctcagcgtcccaaattgctgagatgacagctgtgagccactgtgcccattttgtttttggtttgtttgttttttaatttggctcttttagttgattttcatgggagcattgatct

SEQ ID NO: 21047 - DNA, 608 bp, Homo sapiens
  misc_feature (1)...(608): n = a,t,c or g
ggagtttttatcatgaatggctattggatttgtcaagtggtttttcagtgtctgttgagatgattgtgtggtttgtgtcctttgttcgtgtggtctgttaacattatttgttttgtggtaaattctttaaagtttagttgccatgtgaaacctgaaaccctaatcagtgaatttcttggactgtgttaccttaaaattcattgaactttgaataggtattttaatccttcataattttgtagcacgatacattggtcatttgaaaaatagtggcacagagttacatagattttccaaatgttggcatttcattatatacgacaacaaaaattacaatcattggtgttggccactgatcttataagaacagtatttaagtattgggaagataacagactcacagtgatgggcacaagtttttcaggatttaaattttctcttgaaagggttgaagtttatcattggcaacaaatactaataattttttacatganaaggcncctttagtcaattgcaggatannggtcncctcangaacaaannccggaanatggnacggtaacccgcaantantncttacttaaaangtttnangggcnnggccgggg

SEQ ID NO: 21048 - DNA, 697 bp, Homo sapiens
caaatttacatgtattggagaccagaccagaagcccttctgaattaagatctcacattcttgaaggtggcattgaagagcactaagatcggaagatgagtgagcttgaccagttacggcaggaggccgagcaacttaagaaccagattcgagacgccaggaaagcatgtgcagatgcaactctctctcagatcacaaacaacatcgacccagtgggaagaatccaaatgcgcacgaggaggacactgcgggggcacctggccaagatctacgccatgcactggggcacagactccaggcttctcgtcagtgcctcgcaggatggtaaacttatcatctgggacagctacaccaccaacaaggtccacgccatccctctgcgctcctcctgggtcatgacctgtgcctacgcgccctcagggaactttgtggcctgtggggggttggacaacatctgctccatctacagcctcaagacccgcgagggcaacgtcagggtcagccgggagctgcctggccacactgggtacctgtcgtgttgccgcttcctggatgacaaccaaatcatcaccagctctggggataccacctgtgccctgtgggacattgagacaggccagcagacagtgggttttgctggacacagtggggatgtgatgtccctgtccctggccccgatggccgacgtttgtgtcagc

SEQ ID NO: 21049 - DNA, 443 bp, Homo sapiens
  misc_feature (1)...(443): n = a,t,c or g
cttcttagattatgggacatttacttgataatatcagtcacgggtaaaggcagttttgcaaactggattgggaaagaacaaggnaccatttttggcttcctatttagcaatcttttgagccctatcattccctagagatatagtataaatctccgtagtatggactagacagtgaacagtggccattttaatagggaggcaaatcatctgtaatagttcaccagttatgggccgggcgtggtggctcacctctgtaatcccagcactttgggaggccgaggtgggcgaatcacgaggtcaggagttcgagaccagcctggcccacgtggggaaaccctgctctactaaaaatacaaaaataaataactgatcttaaggggggggccctataatccnagttccttgggagnttaccncgagaatcntttgaacccgggaggggg

SEQ ID NO: 21050 - DNA, 431 bp, Homo sapiens
  misc_feature (1)...(431): n = a,t,c or g
gataccgtttgacatgattacgaatttaatacgactcactatagggaatttggccctcgaggccaagaattcggcacgagcaaaatccgtgaggtgactcagagactcaatggtgaaattcaggctctggaactaccacaaaaagctgaagcattaaaactgtttttagaggaaaccaaggccacagttgcagtgtatctggaaagcctacaggacaccaaaataaccttaatcatcaattggttacaggaggctttaagttcagcatctttggctcacatgaaggccaaattccgagagaccctagaagatacacgagaccgaatgtatcaaatggacattcagcatgaacttcagacgatacctgtctctggtaggccaggtttatagcacacttgtgacctacatttctgatngntggactcttgctg

SEQ ID NO: 21051 - DNA, 349 bp, Homo sapiens
gattttaagaattaaaaataggctgggtgtggtggcttgcatctgtaatcccagcactttgagaggccaaggtgctgagatcacaggcatgagccaccgcgcctggcagcatgtattacttttgaataataatttttaaaagccataaagagcaatttggtaatatcaaacttacaatgcattacttcttttcccttctttattgtggagaaatatacataacagaaaattgaccatcttaagcttcttttaagtgtatagttcagtggcataagtacatttgcaccatcatgcaaccatcaccatcatctgtctctagaattttttcatcatcccaaactgaaactca

SEQ ID NO: 21052 - DNA, 366 bp, Homo sapiens
ggaaaaacagataccaaaaaagaactggggaggaagagtttcacacataaaaaacatcaaatttaaaacagcatttgttaatcatctgagctaattggatatgctgaaacgtgatgccgatcagtaccctctgctgaatagtttgggtagagcctgtccgagatggaacaagtgccaccagtggaattggttcccaccttgacattgaactccatttgcaaagcctgtcttcctattggcttttggtatcatttcgagggtccccattccccagcagctgctacctttgagagtcctagaggcaaagatcagtctgctctgaacactgaggagattttggcatcttccacattaaggggaaccagc

SEQ ID NO: 21053 - DNA, 351 bp, Homo sapiens
gttactaaatagcaagatattacattttaaaaataatgtgttctaagactacggtgaatgaatggaacaaaaccacttagtgctggtatttagcttgtaatgataaaataatttgtaagcttcaaaaaaatagatgctaaacacttaaactttcaaactacagtgtataaattatgatacatgtcagggggcgctagtgaaggatgacaagccaactctagtcacaaaacaggagcagagaaacaagaaaccacagaaatacgaggaacgtgtgggaacacagctgccccatttcaaaaatgcgggcacaagtgaagttcagtaactagcataaacacagctggtcaagga

SEQ ID NO: 21054 - DNA, 632 bp, Homo sapiens
ggcctaatctctatgacagggtctagactttcctcagggtccaggggcagcacctcagggtgaactggaaaactcgaccgcactttagtgccaggaccatggccaacctggagcgcaccttcatcgccatcaagccggacggcgtgcagcgcggcctggtgggcgagatcatcaagcgttttgagcagaaaggattccgccttgttggtctgaaattcatgcaagcttccgaagatcttctcaaggaacactacgttgacctgaaggaccgtccattctttgccggcctggtgaaatacatgcactcagggccggtagttgccatggtctgggaggggctgaatgtggtgaagacgggccgagtcatgctcggggagaccaaccctgcagactccaagcctgggaccatccgtggagacttctgcattcaggttggcaggaacattatacatggcagtgattctgtggagagtgcagagaaggagatcggcttgtggtttcaccctgaggaactggtagattacacgagctgtgctcagaactggatctatgaatgacaggagggcagaccacattgcttttcacatccatttcccctccttcccatgggcagaggaccaggctgtaggaaa

SEQ ID NO: 21055 - DNA, 538 bp, Homo sapiens
  misc_feature (1)...(538): n = a,t,c or g
gagttgtctcaaagtatgagaaggaaaagccaactgggcaagacagacttaactcagcaggcctgcggtgctcagatgctgtgttccaaagacgggcctgtctttaagaatagaccttggctggcttctgggagataatctgagcccttggaatattctgccccagtagtgtggttttctatgcctgagaccttgagccacactatatttatagtgaacatcagtttttgtttgtcctggggccttggcaatactgtaccaccttgatagatctttttatgctaataatgtgatttgggttaaccttttttttgctggggttgagggtgtgggagagagctggagctgagtagctgaggtcagtcacatggatattgcttgnctatgtcatagaccccccagtaaaaccctggacactaanacctgggggaacttccctggttgggaacacttcacatgggntgncacatgtcattgctaggaatataagtacatnctcntgngactccactgggaaggganaggncattccccctga

SEQ ID NO: 21056 - DNA, 472 bp, Homo sapiens
  misc_feature (1)...(472): n = a,t,c or g
gattttgggacttacccttttgtaacctcttcaaattgtactgttggaggtgtttgtactggtttgggtatgccacctcaaaatgttggagaagtgtatggagttgtgaaagcttatacaactagagttggtattggtgcctttcctacagagcaagacaatgaaattggagaattattacaaacaaggggtagagagtttggtgtaactactggaaggaaaagaagatgtggctggttggacctcgttttgctcaaatatgctcatatgatcaatggatttactgcgttggcacttaccaagttggatattttggacatgtttacggaaatcaaagttggagttgcttacaagttagatggtgaaatcatacctcatatcccagcaaaccaagaagtcttaaataaagttgaagttcaatataagactctnccaggatggaacacagacntatcaaatgcnagggcgttta

SEQ ID NO: 21057 - DNA, 372 bp, Homo sapiens
gcaagtacagccacggtagctcaggaaagaacccaccccctcaaactgaaagcagtaaaatgaacccgagaacctggagtcccaggggggcctgagcaggcagggtctccacgattcgtgtgctcacagcggaaaagacaggaggcagaaggtgaggccacagtcattgaggccctgcaggcccctccggacgtcaccacggtggccgtggaggagacaataccctcattcacggggaggagcccaaaccactgacccacagactctgcaccccgacgccagagatacctggagcgacggctgctgaaagaggctgtccacctggcggaaccaccggagcccggaggcttgggggctccgccttggctgctt

SEQ ID NO: 21058 - DNA, 319 bp, Homo sapiens
  misc_feature (1)...(319): n = a,t,c or g
gacctgctttaagaaaaacttgcaaccatgtgcaagtcttcatttcaacatatttttccccatccacttaagcatttatcctttgagttataaacagtccaattacactattttaaaatatacaattaaattattattgactatagagatgctattgtgctatcaaatagtaggtcttattcattctttctaactatattttttgtacctattaaccatccccaccgcctccccaccccagccctgtactacccttcccagcctctggtaatcatccttctgctctctaccgccatgagnncaatngctttgattntta

SEQ ID NO: 21059 - DNA, 533 bp, Homo sapiens
  misc_feature (1)...(533): n = a,t,c or g
ggcctgggcgacagagtgaaactccgtctcaaaaaaataaataaataataaataaataaactcaaaaaccaaacaaaggctggtgagaaaatagctcatttcttgtcttattccagagtaaggagtggtgacagattaggaaaagcatcaaaaaagtggcttccagtgaacaaaatcaggaagtttgagtaaagaatttctcttttgctaaaaacttaaatataaaagtttagtcaggaatttgtacccacacatgtatactgcttttaacatttttctctagacatttgaaatattttattttctctttaaaaaagcagcaccaaaacctaaatttaatagtaatgtttctgatttatcagcttctttccatcttacactgttgaattctgtactgcttctaaagcacctacaattaactctacaagaactgcacaattacactcggcattgcctcttctaatctacatcgaattcttagcttctccatacagcaaatgatcctataatcatattagccaaatgatnaactt

SEQ ID NO: 21060 - DNA, 380 bp, Homo sapiens
ggcatagtcatgattcttcatttgacatggcatttggaaaggcatttgagttcccttcttagaataatggatgatgcctgtatttctcagatagaatattgccattgaaggtatttgatatggtgaaacagtgttgctggtttatgtacttcagttgctttgttttgtaagttcatgaaccacatgggaatttaaataactttgcagttttgatacaaagccttcttacctggtcatttacaatagaaagatccatctctgcaactaattcgtctaaagccagctgttgaccaatatcaaatatttattcctgtgcctctcttctgactagatgctttgccaacgtttgtatctcttgttatctctggaggtcagttatt

SEQ ID NO: 21061 - DNA, 357 bp, Homo sapiens
gaatccacccaccagctaccttcctccatggaccaggtgtgcgtgtcaggcaaagggtgaggcacggggtagagaaaaggcataaaatcccccctttccctggctctccctctaagttacatttgaaatcccagctcaccaactcttaaagctgtcccccatttccaatcctgcttctactcgctccagcttctgatggcctcttgggtttgtattctcctccatctgaaatagccccccttcccttaaaatgtccttgggtggacagtcctccaaagcctccccacagcccacagcagaacccgcttggcctggctctcctaggatggggcctctgcagcctcctctcatgcacac

SEQ ID NO: 21062 - DNA, 463 bp, Homo sapiens
  misc_feature (1)...(463): n = a,t,c or g
tcagctntgacatgattacgaatttaatacgactcactatagggaatttggccctcgaggccaagaattcggcacgaggtgggagggtgtcctgacgaatgggcaggtaatttggggtgcctcgaagcgttttggatctcaggccaatgtgggttccacaattgtgacaatttggctctttgggcttctgtccaatgttccgaatggcccactcacagggcgcttgccgagggaccctctgcgactgaggcggactggcatggacgacccccggggtcatgccagccccgtcaccaggacccagaagcctcaggcctctagactgctagtcgggctgcgtgcaggggggctgagctgggggcacaagtgggggcgaggtaaacctcccagaggccgagtccctgccgcaccctaggcgccgcggtggtggctgctatggcatcaccagacccgtggctccggg

SEQ ID NO: 21063 - DNA, 434 bp, Homo sapiens
ggtacccatctcccttctttgtatttggtgaaaagattcgaactcgagccatctctgctaaaggcatgactttagtcacccccctgcagttgcttctctttgcctccaagaaagtccaatctgatgggcagattgtgcttgtagatgactggattaaactgcaaatatctcatgaagctgctgcctgtatcactggtctccgggcagccatggaggctttggttgttgaagtaaccaaacaacctgctatcatcagccagttggaccccgtaaatgaacgtatgctgaacatgatccgtcagatctctagaccctcagctgctggtatcaaccttatgattggcagtacacggtatggagatggtccacgtcctcccaagatggcccgatacgacaatggaagcggatatagaaggggaggttctagttacagt

SEQ ID NO: 21064 - DNA, 112 bp, Homo sapiens
agcacttgagaggacacgcctcagagaggccctgccgatgcaacgaatgtgggaagagcttcagtcgcagggaccacctcgtcaggggcattcaagaagaaacaccacactg

SEQ ID NO: 21065 - DNA, 463 bp, Homo sapiens
  misc_feature (1)...(463): n = a,t,c or g
gcagacatcatgtccagtgcttttccagactgtaggaagctgagccatcctgctcaagctctgtgaggaggaagcagaatgtatagggcttgaaacataggctgtgatttactatcccagacctcccactccaaagctatggctgttgcctgggcagagctgggggagtgagcagggctctggcctgatatcaccccatctggctgtgcacttggatttccttggctttaggctaagcccatgctgagcctcttgtactcatcctcttgtcgggcacatcagccttgtgtgtcctcagcgtcacagcccagatacagcttcccttaaatgtaagctaaatgtcctggctcccagcctcatcaagggcccattgntcttttcatggggaaagatggaaaatatgatctgaacctgacctttngcccatgaatcttgggggaacaattccnggaaanatcttttt

SEQ ID NO: 21066 - DNA, 388 bp, Homo sapiens
gacatgggcgatggggagggaagaggaataagaaaagtcacgaggtagaattaggggccttgaaaatatgacaaactctgagggaaacaaagacaatgtggaaagaataacttaattttaattccatctccagagagatttgaggtgtatttaagatgaaaaacaggatactacaaagaaacggaaaactcaggagttcaagaccagcctaggcaagatggcaacatcccgtctctacaaaataatttttaaaaattagccaagcatggtggcatgtgcctgtggtcctagctacttgggaggctgaagtgggaagatcacttgagcccaggagttcaaggcttcagtgagccatgatggtgccactgcactccagcctgggggacag

SEQ ID NO: 21067 - DNA, 454 bp, Homo sapiens
gctatgacatgattacgaatttaatacgactcactatagggaatttggccctcgaggccacaaagtcaatgatgggacaaacaggtgtaaaattacctagagcaaaaattcatccttctcatcatgtaattaacattcttggtgcttatgatgatttcaatcttcgtctactgtctttaaatgtggaaatatttatgcaagaaagccctgagaggctgggtgcggtggctcacacctgtaatcctatcacttagggaggccaaggccagcacatcccctgaggtcaggagttcgagaccaacctggtcaacacggtgaaaccccatctctactaaaaatacaaaaattagctgggcgtggtggcacatgcctgtaatcccagctactggggaggctgaggcaggagaatcaattgaacccgggaggcaggggttgcagtgagctgagatcgcgc

SEQ ID NO: 21068 - DNA, 342 bp, Homo sapiens
gaaaaatagtagaacaagcaacataaaacaatgaaggaaaacctcacttgaaggcccaggtcaacatctaagcctgttgagacttagataatcgagtctacctcttcagtaggtttgtgtggatggcctggagggcaggtgccctctgctccccagtgctacctctctcttccctagggccttttgtggattgacagtagtcccctccgtaggagctcacagtctagattagaagtgttttaatttctacacacccatagtgcacacttgtatattgaaaagatagggaagagagaaacatttatggaatcagtcgttggcaccttcaatacttcatgattt

SEQ ID NO: 21069 - DNA, 468 bp, Homo sapiens
  misc_feature (1)...(468): n = a,t,c or g
taangaccntttgacatgattacgaatttaatacgactcactatagggaatttggccctcgaggccaagaattcggcacgagataatgtgcactgctctgagcccaaaggtacgcagtgggcctggcctctctgatatgcatcagtatagccaatggctagccagacatgaagctaatttgctaccaatgaaagaagatctggccttgtggttaaccaatctattagggaaggagattacagcagaaacttttatggagaagttggacaatggtgccttgctctgtcaacttgcagaaactatgcaggagaaattcaaggagagcatggatgctaacaagcccacaaagaatctaccgttgaagaagatcccatgcaaaaccagtgcaccctcgggctccttttttgccagagacaatacagcaaatttcttatcctggtgccgagatttaggggtggatgaaacgtg

SEQ ID NO: 21070 - DNA, 633 bp, Homo sapiens
  misc_feature (1)...(633): n = a,t,c or g
gttgtaaaacgncggccagtgccaagctaaaattaaccctcactaaagggaataagcttgcggccgcttaattaaagatctgttaccattgggatgataacctgaggacccccactggaaatctcccatcttttgaaaaacctggaagtgaggagtgtgcacggatgctgaatgtttgggaatgagaggatgagtgagtgaggcttgaaaacacaccacattgaaaatcctgccacagcagcagccgcagccgccaacagcagcgctgttagtgagctaagtaagcactgacttcgtagaaaaccataacatcggccatcttggaaaagagaaaaacaatggagttacttatttaaaaaaaaagaaagaaagttatctcttcccaggagaggctagaagtagcttttctgtcttttggccagtgccgagtggaatgcctggtttgggggaggaggagggactgggttcagctgtggtgctttgttgtaaaaggcagcctggcctttgctactgaggagaaagatggagcctgggtctcaagcccaccttcgctgtacctttgccacatggtactgtatgcttgccagctagaaggagggtcagggattttttacagtctgagaatgagtgtgg

SEQ ID NO: 21071 - DNA, 311 bp, Homo sapiens
gaggcaatggtgccagtgaagcgggggtttgtttcaaagagccacaccttcatgttggcacaggcatcccactttgccttgcccttttcttcaaagccattgaagcccaggcccgtcaaaatgcatactccttctgtgaccagccaacaggtgacatatttgtacagcacaaacttgccccagatcagcatgtacatgcagcggaaccagaaggggtggttgtcatagtcttcagtgaggagatagtcttctgtgatgtgggggctgagcagtgtgtagcccactaggtagaaaaggcccagactcaggcg

SEQ ID NO: 21072 - DNA, 463 bp, Homo sapiens
agaagcaataagacttcattgactgtgtcagggaaaagggaggcaaggtcctggtccactgtgaggctgggatctcccgttcacccaccatctgcatggcttaccttatgaagaccaagcagttccgcctgaaggaggccttcgattacatcaagcagaggaggagcatggtctcgcccaactttggcttcatgggccagctcctgcagtacgaatctgagatcctgccctccacgcccaacccccagcctccctcctgccaaggggaggcagcaggctcttcactgataggccatttgcagacactgagccctgacatgcagggtgcctactgcacattccctgcctcggtgctggcaccggtgcctacccactcaacagtctcagagctcagcagaagccctgtggcaacggccacatcctgctaaaactgggatggaggaatcggccagccccaagagca

SEQ ID NO: 21073 - DNA, 344 bp, Homo sapiens
gaccacgcctccaataggaagaatcaatacaaacaaaacagtgtgcaccccaaaaaagcatatcctgacttgctcattatagccaatatttaaaaaaatccggaacacacagggccatgggagtggctgttggagaaattttcatgaaggaagaaagattacaactaagttttaaaatgctagttttgtttgttttgtcttggagaggaggtaaaagtgggagtaaaaatagggagtttggtgtaaggtgagaaaagcaaaggaaacctgcatggatgggctggagggtgtgatgggagaacagtgagaagtacgtttggggaagcaattggaaatagcagcta

SEQ ID NO: 21074 - DNA, 416 bp, Homo sapiens
  misc_feature (1)...(416): n = a,t,c or g
ggcttacagggaggatggagagggaagggtgatggcttctggagggttgactaattttttaatctgttctccagacccaactgtaaggcttcccctgaggcatcaagtctctatctagccctggagtcttggttctggggttgatgagttgcagacatacctttcctctcctcctaccctgttccctccactctcatgcctttctcagttcatgccanggggacctttgcccactgacctcacacacagcctgttttctatcctgcgttcctccccaggcaggcggacacttccagtcttcgtttacaccctgcgtcaggagtgatagaccaaatatgggcacctgtcctgcatccactgngccataacagcccttgnccacctaatnttccaggaacccggtttggggccatgct

SEQ ID NO: 21075 - DNA, 339 bp, Homo sapiens
tgaaaatccattagttatgtatgcaaaagaaaaatcgacatttttatataaacctaagttcctcgtatttttctcatagaaaagaagggggctgggaaaagaatgacaaagctgtgcacatacatgcatttggtggaactcactgtcattgttatctacagtaaaaagcagaaaactggaagcaagaggtggcttatgatgtccatgttttggtgaaagcaaaattaagatgtactgactaatggtaaaatgggaagaagcagccctggctataatcagaccactgtgagataaagaattaccagaaaagcaaccaagattacatagttcaaatacata

SEQ ID NO: 21076 - DNA, 331 bp, Homo sapiens
cataaactcagtattttaactcaaaattcatgtaacaagatagccaaaagcataggatttcttaaaattctgaattcgtcttttctgagaaacataaatttacatatttttcaacagaaggctatcaaaattttaattaagtttaaaatacaaaattggatcaagacattcaccctaaattctgaatttttgtcagaaaagagatttgattttcatgaaggtaaagctttcttcactattctggaacataaaactttattcagtgtaatttaagtcttatatatactctactgaattctaactgatctcctgaaaatgttgatctacgtgt

SEQ ID NO: 21077 - DNA, 338 bp, Homo sapiens
gaaatattaggagattatacacaggactgaattaaattttattctctgcaaatcctgactctataaaacttttccctcattttctaaaatctagccaaaataaccaaggaaacccattactgtgattggtgacatcatattcatggttgaagtggttcatatatcttgcttgtcctgttattttaatcaaactaatggaaattcatatgtacatttttcacatcctccaattacttatgttaagagacctcggaaccattggagaaaagggagttgcctctatatgtaatgccagacctatggcccctgaagggctttcactttgctatagacatagt

SEQ ID NO: 21078 - DNA, 397 bp, Homo sapiens
gttcaaacaatacttccaaaccaagccactcagttgatgctcacactgctgaagtgaactgcctttctttcaatccttatagtgagttcattcttgccacaggatcagctgacaagactgttgccttgtgggatctgagaaatctgaaacttaagttgcattcctttgagtcacataaggatgaaatattccaggttcagtggtcacctcacaatgagactattttagcttccagtggtactgatcgcagactgaatgtctgggatttaagtaaaattggagaggaacaatccccagaagatgcagaagacgggccaccagagttgttgtttattcatggtggtcatactgccaagatatctgatttctcctggaatcccaatgaaccttgggtgat

SEQ ID NO: 21079 - DNA, 480 bp, Homo sapiens
  misc_feature (1)...(480): n = a,t,c or g
gctgcctttctttcaatccttatagtgagttcattcttgccacaggatcagctgacaaggtcagtttcgtttattttaatagaaaacatgatttctctaggtttttttgaattgcagagatattttacttacagtattttttttttcttaaaaaattgattactctngcttttctttttgtncatanactgttgccttgngggatctganaaatctgaaacttaagttgcattcctttgagtcacataaggatgaaatattccaggtaaganaaactaangctactattttgttngttttaanaaaaacctgctgggcgcggtcgntcacgcctgtaatcccagcactttgggaggctgaagcggncggatcacaaggtcaggagatcganaccatcctggctaacacggggaaaccctgnctntactaaaaatttnaaaaattancccggcntgggggcggatcccntaacccagtact

SEQ ID NO: 21080 - DNA, 339 bp, Homo sapiens
ctagatccaaagagaggagaagggaggtagccaaaggtaacaaatgtctctataaactggtaatcttgagggtatgagtatgtgttggagaggaagggagagggctattagagacagattctagttttggacttggagaaagacaatgaagagaacagatagagaattttattttagccaggtgcggtggctcacgcctgtaatcccagcactttgggaggccaaagcaggcggatcacaaggtcaggagatcaagaccatcctggccaacacagtgaaaccccgtctctactaaaaagtacaaaaaattaacccgggcgtggtggcgggcgcctgcaa

SEQ ID NO: 21081 - DNA, 373 bp, Homo sapiens
  misc_feature (1)...(373): n = a,t,c or g
ggcctggagctcattgcctcagagaacttctgcagccgagctgcgctggaggccctggggtcctgtctgaacaacaagtactcggagggttatcctggcaagagatactatgggggagcagaggtggtggatgaaattgagctgctgtgccagcgccgggccttggaagcctttgacctggatcctgcacagtggggagtcaatgtccagccctactccgggtccccagccaacctggccgtctacacagcccttctgcaacctcacgaccggatcatggggctggacctgccccantgggggccatctcacccacggctacatgtctgatgtcaagcggatatcagccacgtccatcttcttcgagtctatg

SEQ ID NO: 21082 - DNA, 157 bp, Homo sapiens
  misc_feature (1)...(157): n = a,t,c or g
gaaagatggcagctaccatgttccgggctacgctgcggggatggagaaccggtgtccagcggtgctgcagtctacggctgttgagccagacccagggccctccagattaccccaggtttgtggantctgaggntgactannaanctgngaagcccct

SEQ ID NO: 21083 - DNA, 446 bp, Homo sapiens
gcggcacgagaactgggtgacaacataatttgtaaaacaaacccccatgacacaagattacctgtataacaaacctgcacatatacccatgaacttaaaataaaagttaaataaattttaaaaagaatcactttgaaatttccatttaattactagttctgcaataataataatacactggtccaggcacagtggctcacacctgtaatcccagcgctttgggaggctgaggtgagagaattgcttgaacccatgagtttgagaccagcctgggcaatataacaagaccccatctctacaaaaaatacaaaaattagttgaggcagggtgcagtggctcacgcccgtaatcccagcactttgggaggtcgaggtgggtggattgcctgagctcaggagttcaagatcagcctgggcaacaggtgaaaccctgctattaaaatacaa

SEQ ID NO: 21084 - DNA, 411 bp, Homo sapiens
  misc_feature (1)...(411): n = a,t,c or g
ggaaactgtaaaaatagttcgtatagaaaaggctcgtgatattccgttgggtgctacagttcgtaatgaaatggactctgtcatcattagccggatagtcaaagggggtgctgcagagaaaagtggtctgttgcatgaaggagatgaagttctagagattaatggcattgaaattcgggggaaagatgtcaatgaggtttttgacttgttgtctgatatgcatggtactttgacttttgtcctgattcccagtcaacagatcaagccgcctcctgccaaggaaacagtaatccatgtaaaagctcattttgactatgacccctcagatgacccttatgttccatgtcnagagtaagnctgcttttcaaaaggggatatacttcatgngatcagtccngaagatcccccctg

SEQ ID NO: 21085 - DNA, 412 bp, Homo sapiens
acttggttggatgaggatttccatctacatctaccaagaatggtggaggcataagatgaggagcctgctgagtttgctcatctaagacataattattagaatctctaataagtggtcgatagtcagtatggaagaagtcgacgcggccgcgaattccagatctatgaatcgtagatactgaaaaaccccgcaagttcacttcaactgtgcatcgtgcaccatctcaatttctttcatttatacatcgttttgccttcttttatgtaactatactcctctaagtttcaatcttggccatgtaacctctgatctatagaattttttaaatgactagaattaatgcccatcttttttttggacctaaattcttcatgaaaatatattacgagggcttattcagaagctttggctt

SEQ ID NO: 21086 - DNA, 362 bp, Homo sapiens
ggcaagatggtaattcttacaagtcattatattacctaattatccttgattatgtaattttcttcataatcctctacccaccccattttgtccttttaaaagtttaaatcattggaaagctagcccaatgattttggaaattccctttcaccttcatcagaatgcattggattaagcaaaccaaataatctctttcagactgtctaaatcttttacggctggtgttacttttagagacacatggctatgtaattacacagtagagtcacattgcgtatttgtaagaatatagttataagtgcccaggaaaaaggggttgggggagaattaagagggagtaaattatccaaaaggctctgggc

SEQ ID NO: 21087 - DNA, 345 bp, Homo sapiens
gcagatcaagtgtctgcagatgggcccagggcctgtaggtcagacattgccctttttccccagcctcaagcacaggggacacagggtgggctaggccagagcgccacctcctcagagaggcccctgggctccccactgagcatgatgagcctgggtgaggggaggcgcctgctgcggatgccccgggaggaggccgcatgtccggtgtcccttggacattgctggtcttcgcctgggggcgggctggtcaggagaccgattgggtaacactcctgatttcggcttctctgaaacatgagaggctgcagatgctggagccactgcccagggtccctactgccccct

SEQ ID NO: 21088 - DNA, 356 bp, Homo sapiens
gcggcacgaggtaagtccaggccacaattcttaagccgtgggtagtgttaacttcctccaaagttcaagggttttagtggaagcagagtaactacccaaacttcaattggtagaaatgtccaaggtgaagcaggcacggtgccccccacactccatcactaaatccctttaatttgtgttaaaatcatgcttagtaaggctccatgtcttagcattgtcattgttcctcagaaaaggaaaagaaatttctagatgatatttattaagacaactaggaacaaaaattgagagcccctgtgatggtatcagtgtcagtttttccatgtattatgcagttatgcagggtgatccttttt

SEQ ID NO: 21089 - DNA, 503 bp, Homo sapiens
  misc_feature (1)...(503): n = a,t,c or g
gaataccctgggtcagggagggtgtagggaacagaaccacacatattattagtataattgtgcatagctaagatttctacagaaaacactctgacagtattaacataaaaatgcagcctactttcaccctcccacttctaaaaatgtcttacacgtgtgcaaatgtctgtgcatgccaagatttcgtgatatattgtgaatataacagcaaagactggagacaaacttaatgcttcctcggtaagtgattagttaaataaatggcagtccagtctgacaatggaatactatgcagacataaaaaagaatgagtatctctatgtactgatgtattcatctccagcataagtgaaaaaacagtgtttcggatacgctagtgtttctgagacaaaatatgtaaatgaaagtagaacatttctggaaggggatgtacaaaactggtaacaanggtgnttctgaaaaagggaanctgggggcacnngccanaatgaagntccnttttt

SEQ ID NO: 21090 - DNA, 392 bp, Homo sapiens
gctttttggcaatgccacggcaaagttggtgtttcagcacatgctagagtgagctccggcttcgtgtctttaaccaactccactaatgtttcactgggtagacggagctggcctctatatttagccaaaagcctttgcctcttttcaggcatcaaaaatgggttttgtcattgcctttgtctttgagagcagcagtttgaggtctgactccttcagttgtcctgtgagctgggcgttgcagtctgctcgaatcaagtgttggaacccccccacccctcagcccatcgtgaaacgacagctgtcagcctggggggcggctgctgaggaggtgcagcaggaatggggctgggccctgaggttttactttccgagccaatggcccctggaacatg

SEQ ID NO: 21091 - DNA, 340 bp, Homo sapiens
atttttgtatttttagtagagacggggtttcaccatgttggccaggatggtctcgatctcttgacttcatgatccacctgccttggcctcccaaagtgctgggattacaggcataagccaccgtgcccagcccaccctaccctcttatccctaattaagatcatctctactgctcactttgaaatctactgatgaactctatttcatattgaagccctcctttgaccataaaatccaaccaaaaaatatggcttctcccactttgggtaagccttttatgttcttttttttctgtgatcacaaatttgtcatttgactttaaaccctgtaggttgtatta

SEQ ID NO: 21092 - DNA, 312 bp, Homo sapiens
  misc_feature (1)...(312): n = a,t,c or g
gatatcagatgctgcaaaatgcaaagattaataagatatctctacatgccttaaggattttatagctctccagggtagggagaactaagtagaataaaaagcattatatataacctgctgttataagtgtttggcatacagtactaggtgaaaaagaaattcttctgacttggatagtcaggaaatgggggagggatccagagagggtaaagtatgtaagaagaatagttgtggggctgttgcaacaggcaaaacggcactgaggactgagaccaaaagtgtagttgtgtgaatgatgangaagggagttag

SEQ ID NO: 21093 - DNA, 326 bp, Homo sapiens
gcggcacgagctccctttcctcctctgagtcccgactggggccacatgcagcctgacttctttgtgcctgttgctgtccctgcagtcttcagagggccaccgcagctccagtgccacggcaggaggctgttcctgaatagcccctgtggtaagggccaggagagtccttccatcctccaaggccctgctaaaggacacagcagccaggaagtcccctgggcccctagctgaaggacagcctgctccctccgtctctaccaggaatggccttgtcctgtggaaggcactgccccatcccaaactaatctaggaatcactgtctaacc

SEQ ID NO: 21094 - DNA, 396 bp, Homo sapiens
aattcggcacgaggtcttggaaaccaagtccattaaaggatgatctattaagatgagaagcaataattgaccactggatttaataacacagagatccctgatggttttaaaaagtgtttcagtagaatggtagcagcaaaaacccaattagatgaggttaggagggggattggagatagcatgtatagacaatcctttcaataaattttgctacacactgttgaaacaaactaattacagcctgagaaggactctgtacttcttcatttgagtccttgtgggtaaactgtaacgtagcttaatcatcagacaaaattgaaaacctaatttagtagtgtgcacctgtaacaatactccagtgttggccaatcccagcaaccattacttccactactc

SEQ ID NO: 21095 - DNA, 344 bp, Homo sapiens
  misc_feature (1)...(344): n = a,t,c or g
ggttttaagtaaatgtatttaaaacaaattttcatggtctgaattgtatatgtaaatgcatatctgtgtaagtatatgcaagtgtatattcttctactgattcagtcagacacgaaatccaactgaattacccggtagactgaatatctgacgggatttctatatggacatagcacagatgaaccaaaaatgtatttatattcacctgagttttaatgtttttaaacaaagttttctcctgcagtgcttttctatatgaaatagttgagtcaagcttgggcttttttcttcgtgtcccaagtcatgtaatggatagngaatttatccaaaacgccattgtaccg

SEQ ID NO: 21096 - DNA, 370 bp, Homo sapiens
ctcaagtagacagaggaaggagagaacgtggctaggtaagaattgaggttatgaggggtcactgttcaggaagctgtggatctcagatccagtgtgcagtctgaacagtgagtgttgagtgtgaggggtctgtttatccaaaagacagtactgaatctatggaactgacatacacagtctctgaatgaaggagggatactgaatatagtttttataaggcaaaataaaaaggtgtacaatagtgaagttaaaattgcttccagacgagaaggcatcacttagtattgaccaaaaaaagtgtcaatgatactaactggaggtatttggcaccatacttgggcgaaaggtcatgatggaaaataaagaagcc

SEQ ID NO: 21097 - DNA, 370 bp, Homo sapiens
gaaaagtatagaaaagaagagaggaagacctcccaccttccctggagtaaatcaaaataacacatggaaaggacatttcagagttaccaaagggaaacaaagaagatagcctgaaaaaaattaaaaggacaccttctgctacgtttcagcaagccacaaagattaaaaaattaagagcaggtaaactctctcctctcaagtctaagtttaagacagggaagcttcaaataggaaggaagggggtacaaattgtacgacggagaggaaggcctccatcaacagaaaggataaagaccccttcgggtctcctcattaattctgaactggaaaagccccagaaagtccggaaagacaaggaaggaacacctcc

SEQ ID NO: 21098 - DNA, 424 bp, Homo sapiens
gacctccacagaccagcctgtcacccccaagctcacatgctagggccactaggagaaagacaaataggtcctctgtcaagactcccaaaccagttgaaccagcagcctctgatcttgagccttttacccccacagaccagtccgtcacccctgaggccatagctcagggtggtcagagcaaaacactgaggtcttccacagtaagagctatgccggttcctaccacccctgaattccaatctcctgtcaccacagaccagcctatttcccctgagcctattactcaacccagttgcatcaagaggcagagagccgctgggaaccctggctccctcgcagctcccattgaccataagccttgctctgcacccttggaacctaaatcccaggcctcaaggaaccaaagatggggagcagtgagagc

SEQ ID NO: 21099 - DNA, 366 bp, Homo sapiens
gattattttatggtaactatcactagaaaaggctctgggttcagatggttttatgtgtgagttatttcagggcacagataccttgtaggtaaaacaactggaaacgttggaaataggtgggaagctatttttagaaagcaggtatagccctggtagcaaagcaagtgagctggcagaagaaacccattttcagtcttgattctggtcagatgtgagaagtccctggatgtcctggcccagccccatgcttctgtgccaggtcacagctgccctccgtccgatgactcaggccccatccccccttttgtgggttgggtcagactgctccctgatgcctacctccagtgcactgtggcctggctcacc

SEQ ID NO: 21100 - DNA, 496 bp, Homo sapiens
  misc_feature (1)...(496): n = a,t,c or g
atttgnnnnnaacagctatgacatgattacgaatttaatacgactcactatagggaatttggccctcgaggccaagaattcggcacgagggcacggcccagaagatgcagctgggctatcggctccagcagattgcagctgctgtggaaaacaaggtcacagatctataggaacccaggagccacggcctgctgttgcttcagcctggcctgggcagccctggaagctcggaggagaggccaccttcttaggtgcctgtagtgactgacaagcagagttagtggaaggtgactcccagtctcctggtggctctggcctcggccctgctggatccacctcctagacccggggcctcaaggctcatggggtagtacccagcctgctccccgagtccagcgaccctgtgacaccggtctgcagggagttggggactaagggcttcagagagtggctggaagagactccaggcccctggggagactgnactgnttctgaa

SEQ ID NO: 21101 - DNA, 552 bp, Homo sapiens
  misc_feature (1)...(552): n = a,t,c or g
gttngntnntaaatttgaaacctntgaaatccttatgactgatcacgaatttaatacgactcactatagggaatttggccctcgaggccaagaattcggcacgagattttgtgtatctaaaaggaaagagttttgatagggaacttggaattagctccttgcatatggtacttcattctatactgataactacttaattttatgctataaagcagtggttctcaatatgaagtcagaagagacttatgtaaacaaaatttttgaactatgtttaatatttcagaaaatctaacaattacacatttgtacagaatcaaactgcatgagtttttaaaatttggctatgattttaacaatttaatgggataatactagttttgttattgggatcagaatctctgattggcagttatatatttctttggttaataaaaatcggagaaattgttacttttaaaatgcagattttggccaggcatggtggctcacgcctgtaatcccaacagtttgggccggctgaggcaggaggattgcttgagccaggagttaaga

SEQ ID NO: 21102 - DNA, 327 bp, Homo sapiens
attactagagctactactagcactagatggcctagaagggctgcctactagtgaagaggaggccgggaatttaagctccagtactttaattgaagactgagaagtagatgtacttgtactcctagatgacctagaagaaaaaccagaattataaattcaatgcaaagtttatattttagtatagaccctctcattattggcaaaaggtaccataattccataagtaaagacatcaaaaaagtacatattaatagtgttaagtttttaaatgaccatcaatagatatcaaacaatttaaacaggaaaggaaagatgaacatagatgag

SEQ ID NO: 21103 - DNA, 546 bp, Homo sapiens
  misc_feature (1)...(546): n = a,t,c or g
gcggcacgagcaaaactgttccaaaattcatggtggtgatggttgcaccattctgtgaatatattaaaagcattgaattatatgcttcaaataggtgaattgtatggtatgtgagctatatcttaataaaactgttatgatttcttaaagagagaaacatagaaaataacaacaaaatgagataatgatgaaaaggaacacaatagaccatcttcactccttctagcaacccattctctcatagggcaaaggaaaagcaaagtgacagcttccaaatgaaatcagagatgtctcccaaccctaaataaataaacccgtacttgcttcacagacagggtgaagactctggattccatatgataacaaagctttatttccaaataaagtatgaatatggagatcaaaggacagctgaccngggccagtcccaaaaaggttcanagaggctgtangtctntgtnncnaatgttnaaanganttcntcctnccctggnnntcctataancttantgncntnatgacttatngaccatnatacnnaagggg

SEQ ID NO: 21104 - DNA, 509 bp, Homo sapiens
  misc_feature (1)...(509): n = a,t,c or g
gactgcatagggctcggcgtggtggtgggcacctgtaatcccagctaccctggagactgaggcagaagaatcgcttgaacccaggaggcggagattgcagtgagccaagattacgccactgcactccagcctgggcaccaagagcaaaaccctgtctcaaaaaaataaacaaataaaaagatttctgtctgccacacggctgggccatgtgtaaagacacattcctgttggttttatgtgtcttgaattctaatgggttttgtgttgttgtttttgttttttgagacaaggtctcattctgtcacccaggcaggactgtggtggcaccatcatggctcagcgcagcctccttttccccaggctcaagtgatcctcttgccccagcctcccacgtggctgggactacaggtgtgtaccaacactcccggataattttttttattttttaattttaagtanagacagtctcactatgttgcccaagctggtctccaactcctgggtctcaa

SEQ ID NO: 21105 - DNA, 458 bp, Homo sapiens
  misc_feature (1)...(458): n = a,t,c or g
ggtgntnnnnatntgaaacccttnttgatgacncgaatttaatacgactcactatagggaatttggccctcgaggccaagaattcggcacgagaattgtttctttatgttcttaaaggaaagataaaaattcaggatattttagcatgcagcttcctagatgatttattggaggtaaatgtttttaaactacttaattgtatcacttgacagttgctatcttctaattatgtctttgtgttccattagctaagggatgaggaactgtccaaggagagtcaagaaacaaattggttttctgctccttctgccctaagagtttatgtagagacggtgtttcactatgttggccaggctggtctggaactcctgacctctgatctgccctcctcagcctcccaaagtgctgggattaccggcgtgagccaccacgcccgacctccttttggcattcttatc

SEQ ID NO: 21106 - DNA, 456 bp, Homo sapiens
gaacatggtgaaaccctgtttctactaaaaatacaaaaattagctgggcatcgaggagcgtgcctgtaatcccagctactcgggaggctgaggcaggagaatcgcttgaacccgggaggcagaggttgcagtgagccgagatcgtgccactgcactccagcctgggtgacagagcaagactccgtctcaaaaaagatggccatgctggccaaggctgggctcataggaaatatctgtagtaggatgaaaggaatctggcctagggagccccggactcggtttacctaccccgtactcatcccactcatctgctaccctagtgtccatcatgccctggatgaatcgtaggtgggagggacagaagccaagaacaccaggcacacggggtggggggaatggggggagcccaggtgatccctttggaaagtggattgacctctccctgtggaatgaagc

SEQ ID NO: 21107 - DNA, 381 bp, Homo sapiens
gaggttaagaaaataaatgtcaccaggtacttgagaaacccctcgattgtctacctcgatcgtacttccttgctacccacccctcccagggacaaccactgtcctgaatttcacgataattattcctttgcctttcatttctgttttatcacctttgtatgtatctttaaacaacatatacccttttttacttatgtaaatggactgactcatactgcatacatcttctatgacttgattcttttgttcaatattatatctgagattcatccatggtgatgcaaataggtgcattattttttttcactgctctgtagtctggcattgtatgaatacagcacaatgtatcagttttaatattggggatcattagcattattc

SEQ ID NO: 21108 - DNA, 338 bp, Homo sapiens
gctgtttttcccacctcctttctttcctctttggaaaattgggtaaatgctgagttttttctcttatccttgcactttcacagaccttgaattggttgactctcctttagtaaatccccttcatgcaaatgcttgttccgaatttcctaaatctcgttcatcctttccttctctttttttgtgaaatatttaagtaatttgtattaaaatccatatagttcatgtgtctctactaatgtgataacattgtgtttgaaatctattaaaaggagactcaaatatcctctgtgacatttttgctgagatttcatttcatttttttttttttactaattttt

SEQ ID NO: 21109 - DNA, 413 bp, Homo sapiens
  misc_feature (1)...(413): n = a,t,c or g
gctcacgcctgtaatcccagcactttgggaggccgaggcgggcggatcacctgaggtcgggagtttgagaccagcctgatcaacatggagaaacctcgtctctactaaaaacacganaaaattanctggncgngntggngcatgcctcattnacnnacaaggnanagtctccttggatacctgatattttagttttaagacagatgctnacnaanganantnttatttattttactacctacctanaacccnaactggagatggnactacccctcnttngctgntnaaattttgcgtcttgagcttgaaagtctgcctaaatgcataacaaaaactacttgctcctacttttgggatccctttaacaagtattngcctttgaactacgtggataatttcaaaggcgaagttcc

SEQ ID NO: 21110 - DNA, 340 bp, Homo sapiens
aattcggcacgaggaaatgattagatctgcttcctatgcatggccctgctcctgcaggatggagaaggctggggggttcccctggttcccgggcattgttccttatcagcagagtcacctccagggtaactagagatggggctggttttcagttcctggcagtgatccttgggacttcctattgtgagaatgagccttttgatgcctttttaaagaaactttaattctgaatgaattctaaattaatggcttttaaacttttttgtttgtgacctatagtaagaaatataaattaccataagcttcatccaaacataaataaatataggtggaacagaaa

SEQ ID NO: 21111 - DNA, 349 bp, Homo sapiens
gaaattaggcagcagagatttgttaggatcagcagaattgtccttacattaattcactgttataagccataagcaattaggacattttccattggcactcatttagttatgagaaacactctctggccataggatgtggccttttaaatactgctgatcttcaatattagagaaatgtacttgacagccagcacttcatcagacttccggcttatagaaaggaatgctatatccttccaaagttgtatgactgaaatcaactcaagaggagacactaaggtgttacgcatgcaggaaattgatggggacccccagcaaagatgccaaactaagtacctgcagagggcta

SEQ ID NO: 21112 - DNA, 345 bp, Homo sapiens
gcaacccactcagcaggcaccccagggccctccagtgggggccatgcttcccagagcggagacaacagcagtgagcaaggggatggtttagacaacagtgtagcttcacctggtacaggtgaccgatgatgatccggataaggacaaaaaacgccagaagaaaagaggcattttccccaaagtagcaacaaatatcatgagagcatggctcttccagcatctcacacatccgtacccttccgaagagcagaagaaacagttagcgcaagacacaggacttacaattctccaagtaaacaactggtttattaatgccagaagaagaatagtacagcccatgattgc

SEQ ID NO: 21113 - DNA, 1069 bp, Homo sapiens
accagctatgacatgattacgaatttaatacgactcactatagggaatttggccctcgaggccaagaattcggcacgagcgaagctctgtgggacctcttgggggcaaggtggggtgaggccggggagtagggaggtcaggcgggtctgagcccacagagcaggagagctgccaggtctgcccatcgaccaggttgcttgggccccggagcccacgggtctggtgatgccatagcagccaccaccgcggcgcctagggctgcggcagggactcggcctctgggaggtttacctcgcccccacttgtgcccccagctcagcccccctgcacgcagcccgactagcagtctagaggcctgaggcttctgggtcctggtgacggggctggcatgaccccgggggtcgtccatgccagtccgcctcagtcgcagagggtccctcggcaagcgccctgtgagtgggccattcggaacattggacagaagcccaaagagccaaattgtcacaattgtggaacccacattggcctgagatccaaaacgcttcgaggcaccccaaattacctgcccattcgtcaggacacccacccacccagtgttatattctgcctcgccggagtgggtgttcccgggggcacttgccgaccagccccttgcgtccccaggtttgcagctctcccctgggccactaaccatcctggcccgggctgcctgtctgacctccgtgcctagtcgtggctctccatcttgtctcctccccgtgtccccaatgtcttcagtggggggccccctcttgggtcccctcctctgccatcacctgaagacccccacgccaaacactgaatgtcacctgtgcctgccgcctcggtccaccttgcggcccgtgtttgactcaactcagctcctttaacgctaatatttccggcaaaatcccatgcttgggttttgtctttaaccttgtaacgcttgcaatcccaataaagcattaaaagtcatgctcgtgccgaattcttggcctcgagggccaaattccctatagtgagtcgtattaaattcgtaatcatgtcataa

SEQ ID NO: 21114 - DNA, 991 bp, Homo sapiens
  misc_feature (1)...(991): n = a,t,c or g
gctatgacatgattacgaatttaatacgactcactatagggaatttggccctcgaggccaagaattcggcacgaggcctgggaaggagagatttttagtgacatgttcagtgggttgcttgctagaatttttttaaaaaaacaacaatttaaaatcttatttaagttccaccagtgcctccctccctccttcctctactcccacccctcccatggtccccccattcctcaaatccattttaaagagaagcagactgactttggaaagggaggcgctggggtttgaacctccccgctgctaatctcccctgggcccctccccggggaatcctctctgccaatcctgcgagggtctaggcccctttaggaagcctccgctctctttttccccaacagacctgtcttcacccttgggctttgaaagccagacaaagcagctgcccctctccctgccaaagaggagtcatcccccaaaaagacagagggggagccccaagcccaagtctttcctcccagcagcgtttccccccaactccttaattttattctccgctagattttaacgtccagccttccctcagctgagtggggagggcatccctgcaaaagggaacagaagaggccaagtccccccaagccacggcccggggttcaaggctagagctgctggggaggggctgcctgttttactcacccaccagcttccgcctcccccatcctgggcgcccctcctccagcttagctgtcagctgtccatcacctctcccccactttctcatttgtgcttttttctctcgtaatagaaaagtggggagccgctggggagccaccccattcatccccgtatttccccctctcataacttctccccatcccaggaggagttctcaagcctggggtggggccccggtgggtgccgggggcgaatcaacctgtgtgctgcnaaggacgagacttctnttgaacagtggngctgtggaaacatattgaaa

SEQ ID NO: 21115 - DNA, 314 bp, Homo sapiens
cttgacttttttttgccttttctgtgagaacaagctaaattaaaatgtttctgtttagacataagtaaacatcccacttccccctgtcattgtaaacagaaggataatttggatggggaatgagtcttttatttagctcattacttaaaaccatggcccacaattatatataatcagcctctgggggaaggggctggtgctcgggtgcgctgagctgctggttctttgagctgcagctcccagacatatgtcctggcgactgccatgctgtctgcatattgtttcaggaggtcacttgattccttccaccgtgg

SEQ ID NO: 21116 - DNA, 440 bp, Homo sapiens
gaaacattgcaaggttatttagtattgcaaaatgtgacatgaagatcatggctttctttttgcctttctgtgaccttgtctctcaggaaatttttactaggttattatcttatctgtttcacagttccaaagcactagatctattatttgcaagcatgattgtgcccagagcctcatgtttaacactggatagaaaatgcaaatcaaaatcacaatgaggtatcacctcacaccagtggatgtcacctatttaaaaaaaacacacgcctgtaatcccagcactttgggaggccaaggcaggcctacattgtgtgaatgaatgaaataaggttaagaaataagaaaaagaaataaggttaaggtcaaccatagtggctcacacctgtaatcccagcactttgggaggccaaggtaggaagatcgcttgagcccaggaattc

SEQ ID NO: 21117 - DNA, 707 bp, Homo sapiens
gggcagcattcaagtccgatggttcctgaatggacaggaggaaacagctggggtcgtgtccaccaacctgatccgtaatggagactggaccttccagatcctggtgatgctggaaatgaccccccagcagggagatgtctacacctgccaagtggagcacaccagcctggatagtcctgtcaccgtggagtggaaggcacagtctgattctgcccggagtaagacattgacgggagctgggggcttcgtgctgggcctgctcttccttggggccgggctattcatctacttcaagaatcagaaagggcactctggacttcacccaacaggactcgtgagctgaagtgcagatgaccacattcaagggggaaccttctgccccagctttgcatgatgaaaagctttcctgcttggctcttattcttccacaagagaggactttctcaggccctggttgctaccggttcagcaactctgcagaaaatgtccatccttgtggcttcctcagctcctgcccttggcctgaagtcccagcattgatggcagtgcctcatcttcaactttagtgctcccctttacctaaccctacggcctcccatgcatctgtactccccctgtgtgccacaaatgcactacgttattaaatttttctgaagcccagagttaaaaatcatctgtccacctggctccaaagacaaaaaataaaa

SEQ ID NO: 21118 - DNA, 772 bp, Homo sapiens
cctttaagatcatgcccctggaggatatgaatgagttcaccacacatattctggaagtgatcaatgcacacatggtactaagcaaagccaacagccagccctcagcagggagagcacctatcagcaatccaggaatgagtgaagcagggaactttggtgggaatagcttcatgccagcaaatggcctcactgtggcccaaaaccaggtgttgaatttgattaaggcttgtccaagacctgaagggttgaactttcaggatctcaagaaccagctgaaacacatgtctgtatcctcaatcaagcaagctgtggattttctgagcaatgaggggcacatctattctactgtggatgatgaccattttaaatccacagatgcagaataactggatctaactgggtacctgagatattttacagctggacctagtttcacaatctgttgtctccagctctgcatatgtctggccagggggcttctaggaagtaggtttcatctatcaaatgtctcctctgacttccttttgaaacttactgctcttctgttttattttgttttgtttgaagctcagagggagatgggcaattgacatggatgcaatccagggtgggatttcttgaggaagttacaaataagcttgttacaacatcaagatagatggaattggaaggatgctaccaggagagtacttacatagtgctcaggagtttctcttcttagaatgtttactgctgaatgaattgaagccagggacccaggggccgtttatta

SEQ ID NO: 21119 - DNA, 483 bp, Homo sapiens
  misc_feature (1)...(483): n = a,t,c or g
ttgaancccnttgaaanccatcagctatgacatgattacgaatttaatacgactcactatagggaatttggccctcgaggccaagaattcggcacgaggtgggatataccaaggcagaggagcccatagccatgaggagcctcggggccctgctcttgctgctgagcgcctgcctggcggtgagcgctggccctgtgccaacgccgcccgacaacatccaagtgcaggaaaacttcaatatctctcggatctatgggaagtggtacaacctggccatcggttccacctgcccctggctgaagaagatcatggacaggatgacagtgagcacgctggtgctgggagagggcgctacagaggcggannnnnncntgaccagnntnntngngaaangngnntntganganacctctggagcttatgagaaaacagatctgatgggaagtttctctatnacaaatncnaatggnacattaccnttgg

SEQ ID NO: 21120 - DNA, 502 bp, Homo sapiens
  misc_feature (1)...(502): n = a,t,c or g
aggggnnntgnnntntgnnntnnaaaacccttgttgnattaccattttaatacgactactatagggaatttggccctcgaggccaagaattcggcacgaggcgtgctgacctggagaagctgacctccctctctgaccgttacgtgagtcactttgagaccgaggggccccacgtcctgctgtattttgactcggtccccacctcccgggagtgcgtgggctttgaggctgtgcaggaagtgccggtggggctggtgcagccggccagcgcaaccctgtacgactactacaaccccgagcgcagatgttctgtgttttacggggcaccaagtaagagcagactcttggccaccttgtgttctgctgaagtctgccagtgtgctgaggggaagtgccctcgccagcgtcgcgccctggagcggggtctgcaggacgaggatggctacaggatgaagtttgcctgctactacccccgtgtggagtacggcttccaggttaaggt

SEQ ID NO: 21121 - DNA, 776 bp, Homo sapiens
  misc_feature (1)...(776): n = a,t,c or g
tccaatagctatgacatgattacgaatttaatacgactcactatagggaatttggccctcgaggccaagaattcggcacgagaacgaggactatgaggactatgagtacgatgagcttccagccaaggatgacccagatgcccctctgcagcccgtgacacccctgcagctgtttgagggtcggaggaaccgccgcaggagggaggcgcccaaggtggtggaggagcaggagtccagggtgcactacaccgtgtgcatctggcggaacggcaaggtggggctgtctggcatggccatcgcggacgtcaccctcctgagtggattccacgccctgcgtgctgacctggagaagctgacctccctctctgaccgttacgtgagtcactttgagaccgaggggccccacgtcctgctgtattttgactcggtccccacctcccgggagtgcgtgggctttgaggctgtgcaggaagtgccggtggggctggtgcagccggccagcgcaaccctgtacgactactacaaccccgagcgcagatgttctgtgttttacggggcaccaagtaagagcagactcttggccaccttgtgttctgctgaagtctgccagtgtgctgaggggaagtgccctcgccagcgtcgcgccctggancgggtctgcaggacgaggatggctacaggatgaatttgctgctacnaccccgtnttgagtacggntccaaggtaaaggtcccnanaanacacaaanctgcttccgctcttggaacaaaaacacc

SEQ ID NO: 21122 - DNA, 558 bp, Homo sapiens
  misc_feature (1)...(558): n = a,t,c or g
gnnnnnnnnnnnngtnnnnnncccccctttgncaaccgctttgacatnattacgaatttaatacgactcactatagggaatttggccctcgaggccaagaattcggcacgaggagaaagaggagcggaagaaacagcaggagaaggaagacaaggatgaaaagaagaagggggaggatgaagacaaaggtcctccctgtggcccagtgaactgcaatgaaaagatcgtggtccttctgcagcgcttgaagcctgagatcaaggatgtcattgagcagctcaacctggtcaccacctggttgcagctgcagatacctcggattgaggatggtaacaattttggagtggctgtccaggagaaggtgtttgagctgatgaccagcctccacaccaagctagaaggcttccacactcaaatctctaagtatttctctgagcgtggngatgcagtgactaaagcagccaagcagccccatgtgggtgattatcggcagctggtgcacgagctggatgaggcagagtaccgggacatccggctgatggtcatggagatcccaat

SEQ ID NO: 21123 - DNA, 889 bp, Homo sapiens
gccagcccgaggcccaagccaaggtggatgtgtttcgtgaagacctctgtaccaagacagagaacctgctcgggagctatttccccaagaagatttctgagctggatgcatttttaaaggagccagctctcaatgaagccaacttgagcaatctgaaggccccattggacatcccagtgcctgatccagtcaaggagaaagagaaagaggagcggaagaaacagcaggagaaggaagacaaggatgaaaagaagaagggggaggatgaagacaaaggtcctccctgtggcccagtgaactgcaatgaaaagatcgtggtccttctgcagcgcttgaagcctgagatcaaggatgtcattgagcagctcaacctggtcaccacctggttgcagctgcagatacctcggattgaggatggtaacaattttggagtggctgtccaggagaaggtgtttgagctgatgaccagcctccacaccaagctagaaggcttccacactcaaatctctaagtatttctctgagcgtggtgatgcagtgactaaagcagccaagcagccccatgtgggtgattatcggcagctggtgcacgagctggatgaggcagagtaccgggacatccggctgatggtcatggagatcccatgcttatgctgtgttatatgacatcatcctgaagaacttcgagaagctcaagaagcccaggggagaaacaaagggaatgatctattgagagccctctctcccattctgtgatgagtacagcagagaccttcctgctttttactggggactccagattttccccaaacttgcttctgttgagatttttccctcaccttgcctctcaggcacaataaatatagttataccactaaaaaaaaaaaaaa

SEQ ID NO: 21124 - DNA, 759 bp, Homo sapiens
tatgacatgattacgaatttaatacgactcactatagggaatttggccctcgaggccaagaattcggcacgagccaagctggcgaagtgaagaaactcaggaacgggaacggtcgaggacaggaagtgagtcatcacaaactgggacctccaccacatctagcagaaatgcacgaaggagagagagtgagaagtctctagaaaatgaaacactcaataaggaggaagattgccactctccaacttctaaacctcccaaacctgatcagcccctaaaggtaatgccagcccctccaccaaaggagaatgcttgggtgaagcgaagttctaaccctcctgctcgatctcagagctcagacacagagcagcagtcccctacaagtggtgggggaaaagtagctccagctcaaccatctgaggaaggaccaggaaggaaagatgaaaataaagtagatgggatgaatgccccaaaaggccaaactgggaactctagccgtggtccaggagacggagggaacagagaccactggaaggagtcagataggaaagatggcaaaaaggatcaagactccagatctgcacctgagccaaagaaacctgaggaaaatccagcttccaagttcagttctgcaagcaagtatgctgctctctctgttgatggtgaagatgaaaatgagggagaagattatgccgaatagacctctacatcctgtgcttttctcctagtttctctccaccctggaacattcgagagcaaatc

SEQ ID NO: 21125 - DNA, 663 bp, Homo sapiens
gccccattgtcatcaaccatgtcattagtgtcgaccctaacgaccagaagaagacagcctgttacgacatcgatgtggaggtggacgacccactgaaggcccaaatgagcaattttctggcctctaccaccaatcagcaggagatcgcctcccttgatgtcaagatccatgagaccattgagtccatcaaccagctgaagacccagagagatttcatgctcagttttagcaccgacccccaggacttcatccaggaatggctccgttcccagcgccgagacctcaagatcatcactgatgtgattggaaatcctgaggaggagagacgagctgctttctaccaccagccctgggcccaggaagcagtaggcaggcacatctttgccaaggtgcagcagcgaaggcaggaactggaacaggtgctgggaattcgcctgacctaactgctcagggatctttcttcccagccctggagcctggagggagaccaccctctgggtccttgctggggccgcagacacgtaggctggggtgaggagtgtctgctgtcaccctctactctccagctttagttttataaatgtagtgataggattccttgttgcttggtccccaaagccttatactttttgcattggctttaattgggttcagcagatgcct

SEQ ID NO: 21126 - DNA, 431 bp, Homo sapiens
  misc_feature (1)...(431): n = a,t,c or g
nacccgntatgacatgattacgaatttaatacgactcactatagggaatttggccctcgaggccaagaattcggcacgaggtttctctatcacaaatccaaatggaacataaccatggagtcctatgtggtccacaccaactatgatgagtatgccattttcctgaccaagaaattcagccgccatcatggacccaccattactgccaagctctacgggcgggcgccgcagctgagggaaactctcctgcaggacttcagagtggttgcccagggtgtgggcatccctgaggactccatcttcaccatggctgaccgaggtgaatgtgtccctggggagcaggaaccagagcccatcttaatcccgagagtccggagggctgtgctaccccaagaagaggaaggatcagggggtgggcaactggtaactga

SEQ ID NO: 21127 - DNA, 742 bp, Homo sapiens
  misc_feature (1)...(742): n = a,t,c or g
gatgttcttagcactttnaattcctgtccaaattttttgttctcccccttctgcccatnttaaatgtaagcttttcaaggttttttggaggctttttgtaaattgtgataggaactttggaccttgaacttacgtatcatgtggagaagagccaatttaacaaactaggaagatgaaaagggaaattgtggccaaaactttgggaaaaggaggttcttaaaatcagtgtttcccctttgtgcacttgtagaaaaaaaagaaaaaccttctagagctgatttgatggacaatggagagagctttccctgtgattataaaaaaggaagctagctgctctacggtcatctttgcttagagtatactttaacctggcttttaaagcagtagtaactgccccaccaaaggtcttaaaagccatttttggagcctattgcactgtgttctcctactgcaaatattttcatatgggaggatggttttctcttcatgtaagtccttggaattgattctaaggtgatgttcttagcactttaattcctgtcaaattttttgttctccccttctgccatcttaaatgtaagctgaaactggtctactgtgtctctagggttaagccaaaagacaaaaaaaattttactacttttgagattgcccaatgtacagaattatataattctaacgcttaaatcatgtgaaagggttgctgctgtcagccttgcccactgtgacttcaaacccaagg

SEQ ID NO: 21128 - DNA, 461 bp, Homo sapiens
  misc_feature (1)...(461): n = a,t,c or g
gnntnnnnnctttgnaaancctttntgaccgattacgaatttaatacgactcactatagggaatttggccctcgaggccaagaattcggcacgagcccgggattccgccaatttggagagcctggccaaactgggcatccgctacatcctcaatgtcacccccaacctcccaaacttcttcgagaagaatggtgactttcactacaagcagatccccatctccgaccactggagccagaacctgtcgcggttctttccggaggccattgagttcattgatgaggccttgtcccagaactgcggggtgctcgtccactgcttggcgggggtcagccgttctgtcaccgtcactgtggcctacctcatgcagaagctccacctctctctcaacgatgcctatgacctggtcaagaggaagaagtctaacatctcccccaacttcaacttcatggggcaggtgg

SEQ ID NO: 21129 - DNA, 687 bp, Homo sapiens
gtttgagactgctgtccaacagccagccttccttcccagtggagatcttgcccttcctctacttgggctgtgccaaagactccaccaatttggagagcctggccaaactgggcatcaagtacatcttgaacgtcacccccaatttgccgaatctctttgagaacgcaggagagtttaaatacaagcaaatccccatctcggatcactggagccaaaacctgtcccagtttttccctgaggccatttctttcatagatgaagcccggggcaagaactgtggtgtcttggtacattgcttggctggcattagccgctcagtcactgtgactgtggcttaccttatgcagaagctcaatctgtcgatgaacgatgcctatgacattgtcaaaatgaaaaaatccaacatatcccctaacttcaacttcatgggtcagctgctggacttcgagaggacgctgggactcagcagcccatgtgacaacagggttccagcacagcagctgtattttaccaccccttccaaccagaatgtataccaggtggactctctgcaatctacgtgaaagaccccacacccctccttgctggaatgtgtctggcccttcagcagtttctcttggcagcatcagctgggctgctttctttgtgtgtggcccaggtgtcaaaatgacaccagctgtctgtact

SEQ ID NO: 21130 - DNA, 1047 bp, Homo sapiens
cccacgcgtccgcagggctcccaaaatggcgagtgaggctgcggggactcgctgagcagcggagggggagcgtgcagagccgctgcggccctcacagtccggagcccggccgtgccgtgccgtagggaacatgcacttttccattcccgaaaccgagtcccgcagcggggacagcggcggctccgcctacgtggcctataacattcacgtgaatggagtcctgcactgtcgggtgcgctacagccagctcctggggctgcacgagcagcttcggaaggagtatggggccaatgtgcttcctgcattccccccaaagaagcttttctctctgactcctgctgaggtagaacagaggagagagcagttagagaagtacatgcaagctgttcggcaagacccattgcttgggagcagcgagactttcaacagtttcctgcgtcgggcacaacaggagacacagcaggtccccacagaggaagtgtccttggaagtgctgctcagcaacgggcagaaagttctggtcaacgtgctaacttcagatcagactgaggatgtcctggaggctgtagctgcaaagctggatcttccagatgacttgattggatactttagtctattcttagttcgagaaaaagaggatggagccttttcttttgtacggaagttgcaagagtttgagctgccttatgtgtctgtcaccagccttcggagtcaagagtataagattgtgctaaggaagagttattgggactctgcctatgatgacgatgtcatggagaaccgggttggcctgaacctgctttatgctcagacggtatcagatattgagcgtgggtggatcttggtcaccaaggaacagcaccggcaactcaaatctctgcaagagaaagtctccaagaaggagttcctgagactggcccagacgctgcggcactatggctacttgcgctttgatgcctgtgtggctgacttcccagaaaaggactgtcctgtggtggtgaaccgcgggcaacagtgagctcagcctgcagctccgcctgctggcca

SEQ ID NO: 21131 - DNA, 729 bp, Homo sapiens
atcagctatgacatgattacgaatttaatacgactcactatagggaatttggccctcgaggccaagaattcggcacgagtttttaactttgcaagaaataaatttttatttttcttcattatcatacagcatttaagaataataaatctgtcttgaggtttcaaatctgagatatctatggcaagtttataaaaagtacattgatcaaggtacaatttttaacattaatatacacattccataatctcatctatttaacattaacacaggcctttgttgttgttatttttttctccctacaatatttcctgactctgtaggacagtggtcctcagttgggggttgactctgtcccctaggggcatctggcaacatccggcataactgtgggtgtcacatgagagggacgctgctcaccatcctgcaatgcacagcacagaccccaccacaggggttttatccagcccaaatgtcaacagtgtcaagtttaagcaactcttaccgagtgggactcaattcccattttatgaacacctctgtgctcactgtaattctgaaaacacagactttgctaactggtaaatactatttacaagaagattcaacctaatcaatatcacttatcaaaagcagtggctgactgtaagtatcaacatgtttccagaatgaataaaccacacaatcaactcagaatgatacaaattagggtccatatcatttaatttcccc

SEQ ID NO: 21132 - DNA, 1196 bp, Homo sapiens
agctatgacatgattacgaatttaatacgactcactatagggaatttggccctcgaggccaagaattcggcacgaggggaggcggtggcccttctgttgctagaccgagcctgtgggatataccaaggcagaggagcccatagccatgaggagcctcggggccctgctcttgctgctgagcgcctgcctggcggtgagcgctggccctgtgccaacgccgcccgacaacatccaagtgcaggaaaacttcaatatctctcggatctatgggaagtggtacaacctggccatcggttccacctgcccctgggctgaagaagatcatggacaggatgacagtgagcacgctggtgctgggagagggcgctacagaggcggagatcagcatgaccagcactcgttggcggaaaggtgtctgtgaggagacgtctggagcttatgagaaaacagatactgatgggaagtttctctatcacaaatccaaatggaacataaccatggagtcctatgtggtccacaccaactatgatgagtatgccattttcctgaccaagaaattcagccgccatcatggacccaccattactgccaagctctacgggcgggcgccgcagctgagggaaactctcctgcaggacttcagagtggttgcccagggtgtgggcatccctgaggactccatcttcaccatggctgaccgaggtgaatgtgtccctggggagcaggaaccagagcccatcttaatcccgagagtccggagggctgtgctaccccaagaagaggaaggatcagggggtgggcaactggtaactgaagtcaccaagaaagaagattcctgccagctgggctactcggccggtccctgcatgggaatgaccagcaggtatttctataatggtacatccatggcctgtgagactttccagtacggcggctgcatgggcaacggtaacaacttcgtcacagaaaaggagtgtctgcagacctgccgaactgtggcggcctgcaatctccccatagtccggggcccctgccgagccttcatccagctctgggcatttgatgctgtcaaggggaagtgcgtcctcttcccctacgggggctgccagggcaacgggaacaagttctactcagagaaggagtgcagagagtactgcggtgtccctggtgatggtaggcagccctgcagggtgcca

SEQ ID NO: 21133 - DNA, 609 bp, Homo sapiens
  misc_feature (1)...(609): n = a,t,c or g
aggcaacatgcccaagttttattgtgactactgcgatacatacctcacccatgactctccatctgtgagaaagacacactgcagtggaaggaaacacaaagagaatgtgaaagactattatcagaaatggatggaagagcaggctcagagcctgattgacaaaacaacggctgcatttcaacaaggaaagatacctcctactccattctctgctcctcctcctgcaggggcgatgataccacctccccccagccttccgggtcctcctcgccctggtatgatgccagcaccccatatggggggcccgcccatgatgccaatgatgggccctcctcctcctgggatgatgccagtgggacctgctcctggaatgaggccgcccatgggaggccatatgccaatgatgcctgggcccccaatgatgagacctcctgcccgtctcatgatggtgcccagtcagcccagaatgactcggccagacagataaggatagaggggaggcctcattgcatcagtgttgttttgttgttgttattgttgtgtttttttttgtttgtaatgttttgctttatttttgagacagagtcttnctctgncgggnanatttga

SEQ ID NO: 21134 - DNA, 744 bp, Homo sapiens
ctaaaaaatagtctttctcacttttccttgatcttcatctaaaacacctggaaggtatctcagatgaagacatcatcaacattactcttcctactggagtccaagtacaaacttattatgttaagacatggagagggtgcttggaataaggagaaccgtttttgtagctgggtggatcagaaactcaacagcgaaggaatggaggaagctcggaactgtgggaagcaactcaaagcgttaaactttgagtttgatcttgtattcacatctgtccttaatcggtccattcacacagcctggctgatcctggaagagctaggccaggaatgggtgcctgtggaaagctcctggcgtctaaatgagcgtcactatggggccttgatcggtctcaacagggagcagatggctttgaatcatggtgaagaacaagtgaggctctggagaagaagctacaatgtaaccccgcctcccattgaggagtctcatccttactaccaagaaatctacaacgaccggaggtataaagtatgcgatgtgcccttggatcaactgccacggtcggaaagcttaaaggatgttctggagagactccttccctattggaatgaaaggattgctcccgaagtattacgtggcaaaaccattctgatatctgctcatggaaatagcagtagggcactcctaaaacacctggaaggtatctcagatgaagacatcatcaacattactcttcctactggagtc

SEQ ID NO: 21135 - DNA, 319 bp, Homo sapiens
ggttctacaaggctgatggagagtcgtgttcagcatctatgatgtaccaggaaggaactcaccccagaggtgctgcaagagtggctggatgaattggaggagatgatgctggtggtccacatgccccgcttccgcattgaggacggcttcagtttgaaggagcagctgcaagacatgggccttgtcgatctgttcagccctgaaaagtccaaactcccaggtattgttgcagaaggccgagatgacctctatgtctcagatgcattccataaggcatttcttgaggtaaatgaagaaggcagtgaagcagctgcaagta

SEQ ID NO: 21136 - DNA, 905 bp, Homo sapiens
  misc_feature (1)...(905): n = a,t,c or g
agctatgacatgattacgaatttaatacgactcactatagggaatttggccctcgaggccaagaattcggcacgaggccaagctccagcccctggacttcaaggaaaatgcagagcaatccagagcggccatcaacaaatgggtgtccaataagaccgaaggccgaatcaccgatgtcattccctcggaagccatcaatgagctcactgttctggtgctggttaacaccatttacttcaagggcctgtggaagtcaaagttcagccctgagaacacaaggaaggaactgttctacaaggctgatggagagtcgtgttcagcatctatgatgtaccaggaaggcaagttccgttatcggcgcgtggctgaaggcacccaggtgcttgagttgcccttcaaaggtgatgacatcaccatggtcctcatcttgcccaagcctgagaagagcctggccaaggtagagaaggaactcaccccagaggtgctgcaagagtggctggatgaattggaggagatgatgctggtggtccacatgccccgcttccgcattgaggacggcttcagtttgaaggagcagctgcaagacatgggccttgtcgatctgttcagccctgaaaagtccaaactcccaggtattgttgcagaaggccgagatgacctctatgtctcagatgcattccataaaggcatttcttgaggtaaatgaanaaggcagtgaancactgcnantaccgctgttgttgattgcnggccgttcgctaaaccccaacagggtngacttttcaagggccaacanggcctttcctggttttttataaaaaaaaatttcctctgaaacactnatttatctttccntggggcaaaattacccacccccttgttttttaanttaaaaatgttcttaa

SEQ ID NO: 21137 - DNA, 1205 bp, Homo sapiens
ggacgggccagcgagaggcagccaggatccacaatcacttgccagagatccagaagttttccagtcgaatcagagaggccaagttagcaggagaccatattgagtattacaaggcttcctcggagatggcactttaccagaaaaaacatggtattaaactctataaacctctcattctccctgtgactcaggccccaatcttcatctccttcttcattgctttgagagagatggccaaccttcctgtgcccagcctgcagacaggtggcctctggtggttccaggatctcacggtatccgatcccatctacatattaccactggcagtcactgctacaatgtgggctgttcttgagctaggtgctgagacaggtgtgcaaagttctgaccttcagtggatgagaaatgtcatcagaatgatgcccctgataaccttgcccataaccatgcatttccccacggcagtgtttatgtactggctctcctccaatttgttttccctggtccaagtatcctgtctccggattccagcagtacgcactgtacttaaaatcccccagcgtgttgtacatgacctggacaaattacctccacgggaaggcttcctagagagcttcaaaaaaggctggaaaaatgctgaaatgacgcgtcagctgcgagagcgtgaacaacgcatgcggaatcagttggagctagcagccaggggtcctttacgacagacctttacccacaaccctctcctacaacctggaaaggataaccctcccaatatccctagcagcagcagcaaaccaaagtcaaagtatccctggcacgacacacttggctgacttatgttctgtgcgcattctggcaggaattctgtctcttcagagactcatcctcaaaacaagacttgacactgtgtccttgccccagtcctaggaactgtggcacacagagatgttcattttaaaaacggatttcatgaaacactcttgtacttatgtttataagagagcactgggtagccaagtgatcttcccattcacagagttagtaaacctctgtactacatgctgcttcctgatacttattgaacagggaaatgagtgtgcacttcagaaaactgaagaatacccagcattttgggaggccgaggtgggtggatcacctgagatcaggagtttgagaccagcctggccaacatggggaaacgccatctt

SEQ ID NO: 21138 - DNA, 492 bp, Homo sapiens
ggcgctccgctggcttcttggacaattgcgccatgtgtgctgctcggctagcggcggcggcggcggcggcccagtcggtgtatgccttctcggcgcgcccgctggccggcggggagcctgtgagcctgggctccctgcggggcaaggtactacttatcgagaatgtggcgtccctctgaggcaccacggtccgggactacacccagatgaacgagctgcagcggcgcctcggaccccggggcctggtggtgctcggcttcccgtgcaaccagtttgggcatcaggagaacgccaagaacgaagagattctgaattccctcaagtacgtccggcctggtggtgggttcgagcccaacttcatgctcttcgagaagtgcgaggtgaacggtgcgggggccgcaccctctcttcgccttcctgcgggaggccctgccagctcccagcgacgacgccaccgcgcttatgaccgaccccaagctcatcacctggtct

SEQ ID NO: 21139 - DNA, 463 bp, Homo sapiens
  misc_feature (1)...(463): n = a,t,c or g
anaccccttgacatgattacgaatttaatacgactcactatagggaatttggccctcgaggccaagaattcggcacgaggtgaggatacaccagaggcagggtattttgctgtagcagtggtgaagaaatcagcttctgacctcacctgggacaatctgaaaggcaagaagtcctgccatacggcagttggcagaaccgctggctggaacatccccatgggcctgctctacaataagatcaaccactgcagatttgatgaatttttcagtgaaggttgtgcccctgggtctaagaaagactccagtctctgtaagctgtgtatgggctcaggcctaaacctgtgtgaacccaacaacaaagagggatactacggctacacaggcgctttcaggtgtctggttgagaagggagatgtggcctttgtgaaacaccagactgtcccacagaacactgggggaaaaa

SEQ ID NO: 21140 - DNA, 544 bp, Homo sapiens
  misc_feature (1)...(544): n = a,t,c or g
ggagaaggtgatccaggtgccccccaagaaagtgaagggctggctgctgcccgaaatgccaggcctgatcaccgacatcctgctctccctggacgaccgcttcctctacttcagcaactggctgcatggggacctgaggcagtatgacatctctgacccacagagaccccgcctcacaggacagctcttcctcggaggcagcattgttaagggaggccctgtgcaagtgctggaggacgaggaactaaagtcccagccagagcccctagtggtcaagggaaaacgggtggctggaggccctcagatgatccagctcagcctggatgggaagcgcctctacatcaccacgtcgctgtacagtgcctgggacaagcagttttaccctgatctcatcagggaaggctctgtgatgctgcaggttgatgtaacacagtaaaaggagggctgaattgaccccaacttcctggtggacttcgggaangancccttggnccaacccttncccatgagntcgctacctgggggcaattntnctctaaatctg

SEQ ID NO: 21141 - DNA, 918 bp, Homo sapiens
  misc_feature (1)...(918): n = a,t,c or g
ggagaaggtgatccaggtgccccccaagaaagtgaagggctggctgctgcccgaaatgccaggtgagtgcctagggcataggaaagttgattcttggcctgggaaacaagagtccttaaaggctctactcgccccctgcccacaggcctgatcaccgacatcctgctctccctggacgaccgcttcctctacttcagcaactggctgcatggggacctgaggcagtatgacatctctgacccacagagaccccgcctcacaggacagctcttcctcggaggcagcattgttaagggaggccctgtgcaagtgctggaggacgaggaactaaagtcccagccagagcccctagtggtcaagggaaaacgggtggctggaggccctcagatgatccagctcagcctggatgggaagcgcctctacatcaccacgtcgctgtacagtgcctgggacaagcagttttaccctgatctcatcagggaaggctctgtgatgctgcaggttgatgtagacacagtaaaaggagggctgaagttgaaccccaacttcctggtggacttcgggaaggagccccttggcccagcccttgcccatgagctccgctaccctgggggcgattgtagctctgacatctggatttgaactccaccctcatcacccacactccctattttgggccctcacttccttggggacctggcttcattctgctctctcttggcacccgacccttgggagcatgtaccacacagacaagctgagactgtggcaatgtgatgagtcatatgcattcactgaccactgttgcttgttgctcactgtgctgcttttccatgagctcttggaggcaccaagaaatanactngaaaccctgtccttcaaaaaagnnnntnnaannnggaannnnnnanttttttt

SEQ ID NO: 21142 - DNA, 763 bp, Homo sapiens
gctgcacccactcccttcatacaatctagtcagaatagcagttctagagcacaggttctcagtctaagctatggaaaagctccccttatccaacagagtttaaaagtagtgacttgggtttttgcgagtgctttgtttactaaggactttggggaggaaccatgctaagccatgaccagtgaggagaagcaacagagcctgtctgtccccatgagcggagtctgtcctctgctcttctgcagtcaggtcactgcctactgcctgggggctctagtcattccaatggaagacgaatgtaacctgcgtggtgatgtgacaactgtttcctccctgaccccagaggatctggctctaggttgggatcaatcctgaatttcgttatgtgttaatttacttttattaaaaaagtatagtatatataatacaaaacaataacccttctggggtttcttgtggcggttgaaatagtcccacatgtggtcatcagaaaataagccattcctcataccaatataggatcagctccttgacctctgaggggcaggagtgcttcctggtgtgtgtattagaatcccttcctgccttgtttcatggcagtgaaatgcctcttggtcctgtccaagtgtatctttcactgatttctgaatcatgttctagttgcttgaccctgccacatgggtccagtgttcatctgagcataactgtactaaatcctttttccatatcagtataataaaggagtgatgtgcaaaaaaaaaaaaaa

SEQ ID NO: 21143 - DNA, 965 bp, Homo sapiens
  misc_feature (1)...(965): n = a,t,c or g
cccgcctttgaaacccttccctttgacaccttatgacatgactacgaatttaatacgactcactatagggaatttggccctcgaggccaagaattcggcacgagggagtttgtggaggcctgtttgaataaggagccgagctttagacccactgctaaggagttattgaagcacaagtttatactacgcaatgcaaagaaaacttcctacttgaccgagctcatcgacaggtacaagagatggaaggccgagcagagccatgacgactcgagctccgaggattccgacgcggaaacagatggccaagcctcggggggcagtgattctggggactggatcttcacaatccgagaaaaagatcccaagaatctcgagaatggagctcttcagccatcggacttggacagaaataagatgaaagacatcccaaagaggcctttctctcagtgtttatctacaattatttctcctctgtttgcagagttgaaggagaagagccaggcgtgcggagggaacttggggtccattgaagagctgcgaggggccatctacctagcggaggaggcgtgccctggcatctccgacaccatggtggcccagctcgtgcagcggctccagaggtaactacccagggcccctatgggctggggaaggagagacctgcacttgggctgggatttagttgatgagtttggtacttgattcttggcctgtctgttcctgttatcttgcaggcctcagggtagacagagttgaattagaggagactttgttctgaattttagaaatcaatgtgaatgaaggatctgaatctggaaactactggaaagcccacaggacctagtgcatttgtagcttttgccacataaatacagggtctcgtgccgaattcttggcctcgagggccaaattccctatagtgagtcggtattaaattcgtaatcatgtcatancggttatccaaa

SEQ ID NO: 21144 - DNA, 526 bp, Homo sapiens
  misc_feature (1)...(526): n = a,t,c or g
ggaggcagaggagttcgaagatgctcctgatgtggagccgctggagcctacacttagcaacatcatcgagcagcgcagcctgaagtggatcttcgtcgggggcaagggtggtgtgggcaagaccacctgcagctgcagcctggcagtccagctctccaaggggcgtgagagtgttctgatcatctccacagacccagcacacaacatctcagatgcttttgaccagaagttctcaaaggtgcctaccaaggtcaaaggctatgacaacctctttgctatggagattgaccccagcctgggcgtggcggagctgcctgacgagttcttcgaggaggacaacatgctgagcatgggcaagaagatgatgcaggaggccatgagcgcatttcccggcatcgatgaggccatgagctatgccgaggtcatgaggctggtgaagggcatgaacttctcggtggtggtatttgacacggcacccacggccanaccctgaggctgntnaacttcccaccttgtggancggggc

SEQ ID NO: 21145 - DNA, 476 bp, Homo sapiens
  misc_feature (1)...(476): n = a,t,c or g
ggngnntnntttgaaacatttgaaancgttatgacatgattacgaatttaatacgactcactatagggaatttggccctcgaggccaagaattcggcacgagggagggtttgtctacataccgggcaagtgtggtctggtgcctgtcttggcagaaaactacaataagagcgataattgtgaggatacaccagaggcagggtattttgctgtagcagtggtgaagaaatcagcttctgacctcacctgggacaatctgaaaggcaagaagtcctgccatacggcagttggcagaaccgctggctggaacatccccatgggcctgctctacaataagatcaaccactgcagatttgatgaatttttcagtgaaggttgtgcccctgggtctaagaaagactccagtctctgtaagctgtgtatgggctcaggcctaaacctctgtgaacccaacancaaagagggatactatggctc

SEQ ID NO: 21146 - DNA, 480 bp, Homo sapiens
tataaatataaatacgatataaccctggtgggcaaaggagaaatggccacagggaatgggcggcggctccacctggggattcctgaggccgtgtttgtggaagatgtagattccttcatgaaacagcctgggaatgagactgcagatacagtattaaagaagctggatgaacagtaccagaagtataagtttatggaactcaaccttgctcaaaagaaaagaaggctaaaaggtcagattcctgaaattaaacagactttggaaattctaaaatacatgcagaagaaaaaagagtccaccaactcaatggagaccagattcttgctggcagataacctgtattgcaaagcttcagttcctcctaccgataaagtgtgtctgtggttgggggctaatgtaatgcttgaatatgatattgatgaagctcaggcattgttggaaaagaatttatcgactgccacaaagaatcttgattccctg

SEQ ID NO: 21147 - DNA, 852 bp, Homo sapiens
cgccacattcgcttcctgctttcggtgtgtctgttgtgtcttgttgcgggcaccgcagtcgccgtgaagatggcgtctaccagccgtttggatgctcttccaagagtcacatgtccaaaccatccagatgcgattttagtggaggactacagagccggtgatatgatctgtcctgaatgtggcttggttgtaggtgaccgggttattgatgtgggatctgaatggcgaactttcagcaatgacaaagcaacaaaagatccatctcgagttggagattctcagaatcctcttctgagtgatggagatttgtctaccatgattggcaagggcacaggagctgcaagttttgacgaatttggcaattctaagtaccagaatcggagaacaatgagcagttctgatcgggcaatgatgaatgcattcaaagaaatcactaccatggcagacagaatcaatctacctcgaaatatagttgatcgaacaaataatttattcaagcaagtatatgaacagaagagcctgaagggaagagctaatgatgctatagcttctgcttgtctctatattgcctgtagacaagaaggggttcctaggacatttaaagaaatatgtgccgtatcacgaatttctaagaaagaaattggtcggtgttttaaacttattttgaaagcgctagaaaccagtgtggatttgattacaactggggacttcatgtccaggttctgttccaacctttgtcttcctaaacaagtacagatggcagctacacatatagcccgtaaagctgtggaattggacttggttcctgggaggagccccatctctgtggcagcggcagctatttacatggcc

SEQ ID NO: 21148 - DNA, 787 bp, Homo sapiens
  misc_feature (1)...(787): n = a,t,c or g
cgctatgacatgattacgaatttaatacgactcactatagggaatttggccctcgaggccaagaattcggcacgagggcgcggtgggtgtctgcgggggtctcgcggggcggctgcggtgtttcaccgggaaaggctcgaggagagcgcggctcacgagagataacccagctgtgctccctggaaccttcaatttcaaggcctccctgcctctactaggcgccttagctcactatggggaaccacttgactgagatggcgcccactgcctcctccttcttgccccacttccaagccctgcatgtcgtggtcattgggctggactctgctggaaagacctccctcctttaccgcctcaagttcaaggagtttgtccagagtgtccccaccaaaggcttcaacaccgagaagatccgggtgcccctcgggggatcgcgtggcatcaccttccaagtgtgggacgtcggggggcaggagaagctgcgaccactgtggcgctcttatacccgccggacagacggtctagtgtttgtggtggacgctgcggaggctgagcggctggaggaagccaaggtggagttgcaccgaatcagccgggcctcggacaaccagggcgtgccagtgctggtgctggccaacaagcaggaccagcccggggcactgagcgctgctgaggtggagaanaggctggcagtccgagagctagcagccgcactctnctcatgtgcaaggctgcagcgctgtggacggtctgggcctgcacagggccttgagcgcctctatgaaaa

SEQ ID NO: 21149 - DNA, 611 bp, Homo sapiens
attggatcaactatttcttcagatcgttctgattcagagcgagaggagattgaagtggatgttgaaagcacagagttctcccatggagaagtggacaatataagtaccaccagcatcagtgacattgatgaccacagcagcctgccgagtattgggagtgacgagggttactccagtgccagtgtcaaactttcattcacttcatagaacccagcatgacataacagtgcagggcaaaatattcactgggccaattcaatacaaacaatctcttaaattgggttcatgatgcagtctcctctttaaaacaaaacaaaacaaaacaaaactatacttgaacaaaagggtcagaggacctgtatttaagcaaatacttagcaaaaagtggggcagagcctcccaaggagaacaaatattcagaatattcatattggaaaaatcacaatttttaatggcagcagaaaacttgtgtgaaattttcttgatttgagttgattgagaagaggacattggagatgccatcctctttctcttttctagtttgctcatactacattgagtagacacatttaaggatggggttatgaacccttcctgagctttatggtcct

SEQ ID NO: 21150 - DNA, 440 bp, Homo sapiens
aaccggaggagcctcgggcctgggcctggccacggttggagcgacttgtggggcagggagcctctgctgtgcttctggacctgcccaactcgggtggggaggcccaagccaagaagttaggaaacaactgcgttttcgccccagccgacgtgacctctgagaaggatgtgcaaacagctctggctctagcaaaaggaaagtttggccgtgtggatgtagctgtcaactgtgcaggcatcgcggtggctagcaagacgtacaacttaaagaagggccagacccataccttggaagacttccagcgagttcttgatgtgaatctcatgggcaccttcaatgtgatccgcctggtggctggtgagatgggccagaatgaaccagaccagggaggccaacgtggggtcatcatcaacactgccagtgtggctgccttcgagggt

SEQ ID NO: 21151 - DNA, 688 bp, Homo sapiens
gctgaccattgtttttaatttatgaaatcaagtttaacacacaagaagcctataaacactgcaatacagaaaaattaagctgctgcattgaattcttactccaaaacaatgcaaatctgcatgaggtctctcccgctatgggtgtgagtggaagagagggagacttttttacctggggttggtggtggagtgaaacacaagggtgggagaggttttgcaaatagccagagaacagaaaccaatgtgcagtcactgacacacttgaccagggcagttaatttgcacttgtacttggctgtggctgttccggctgtggctccttcggcttctttgtcttcttcttcttccaagcaggggccggcttgccagactgagtgggatacttggttttctggctctccgtaaacagtggctgggacagcaggtggcgcagctccttcttcagaaccttcatctgcttttgtctccgacgttcttcttgctggtcagcttttcctcccttatacatgtcttcttccagctcaatctccagggcagctgctgcctgctcaatccaagagttgtgcaggcaagcctggaagttccgatactcagatttctcaatctgtcgagctaaacggattcgctccttgaccacatccatgtattttgtctgcacggggaacagtgggatatcctcatctttctc

SEQ ID NO: 21152 - DNA, 453 bp, Homo sapiens
  misc_feature (1)...(453): n = a,t,c or g
ttnnnnnnntttnnnaacagctatgacatgattacgaatttaatacgactcactatagggaatttggccctcgaggccaagaattcggcacgagcagttcctgtgcagagagagagggcactgcagcacccaggcgctggtgagaaggagtttctggctcacactattctctgccttccattggcattgactcagctgaaacttggcacatcttgtcctcttagtcatgcgctggcatctaccacttgtgcccaaatccaccatggcctcacgtcaccaggcccacatattaccaggttcctttggctctgcaagcctgtggtgcttgggcacgcttggctgctttttcttccccctgctgggtattgggggggcttctgagacactgacttccttggcctctcactcagtccttgccagatgggggcttctcctatacgcttgcagagcccc

SEQ ID NO: 21153 - DNA, 1113 bp, Homo sapiens
gaaaggacaagtcaccgaaattccagctctttggctcccctagtgggcagaaagatctgctgttcaaggactctgccattgggttttcgagggtgcccccgaggatagattctgggctgtaccttggctccggctacttcactgccatccagaacttgaggaaaagtgaggaggaagtggctgcccggcgtgcgcgggtcgtgtggtgtgcggtgggcgagcaggagctgcgcaagtgtaaccagtggagtggcttgagcgaaggcagcgtgacctgctcctcggcctccaccacagaggactgcattgccctggtgctgaaaggagaagctgatgccatgagtttggatggaggatatgtgtacactgcaggcaaatgtggtttggtgcctgtcctggcagagaactacaaatcccaacaaagcagtgaccctgatcctaactgtgtggatagacctgtggaaggatatcttgctgtggcggtggttaggagatcagacactagccttacctggaactctgtgaaaggcaagaagtcctgccatacggcagttggcagaaccgctggctggaacatccccatgggcctgctctacaataagatcaaccactgcagatttgatgaatttttcagtgaaggttgtgcccctgggtctaagaaagactccagtctctgtaagctgtgtatgggctcaggcctaaacctctgtgaacccaacaacaaagagggatactatggctacacaggcgcctttcaggtgtctggttgagaagggagatgtggcctttgtgaaacaccagactgtcccacagaacactgggggaaaaaaccctgatccatgggctaagaatctgaatgaaaaagactatgagttgctgtgccttgatggtaccaggaaacctgtggaggagtatgcgaactgccacctggccagagcccccgaatcacgctggtggtcacacggaaagataaggaagcttgcgtccacaagatattacgtcaacagcagcacctatttggaagcacgtaactgactgctcgggcaacttttgttggtcccggtcggaaaccaaggaccttctgtcagagatgacacagtatgtttggccaaa

SEQ ID NO: 21154 - DNA, 687 bp, Homo sapiens
gattctgacttcctctgattttggcatgtggagacactcctataaggagagttcaagcctgtgggagtagaaaaatctcattcccagagtcagaggagaagagacatgtaccttgaccatcgtccttcctctcaagctagccagagggtgggagcctaaggaagcgtggggtagcagatggagtaatggtcacgaggtccagacccactcccaaagctcagacttgccaggctccctttctcttcttccccaggtccttcctttaggtctggttgttgcaccatctgcttggttggctggcagctgagagccctgctgtgggagagcgaagggggtcaaaggaagacttgaagcacagagggctagggaggtggggtacatttctctgagcagtcagggtgggaagaaagaatgcaagagtggactgaatgtgcctaatggagaagacccacgtgctaggggatgaggggcttcctgggtcctgttccctaccccatttgtggtcacagccatgaagtcaccgggatgaacctatccttccagtggctcgctccctgtagctctgcctccctctccatatctccttcccctacacctccctccccacacctccctactcccctgggcatcttctggcttgactggatggaaggagacttaggaacctaccagttggccatgatgtct

SEQ ID NO: 21155 - DNA, 539 bp, Homo sapiens
  misc_feature (1)...(539): n = a,t,c or g
gtnnngnntnntnttgatnccntttganaccntttgactgantacgaatttaatacgactcactatagggaatttggccctcgaggccaagaattcggcacgaggtgctatccctgtacgcctctggccgtaccactggcatcgtgatggactccggtgacggggtcacccacactgtgcccatctacgaggggtatgccctcccccatgccatcctgcgtctggacctggctggccgggacctgactgactacctcatgaagatcctcaccgagcgcggctacatgcttcaccaccacggccgagcgggnnnncntgcgtgacattangganaagctgtgctacntcnccctggacttcaagcaananatggccacggntgcttccagctcctccctggagaagagctaccagctgnctgacggncaggncatcaccattggcaatgancggntccgntgcctgangcactcttnagccttncttnctgggcatggagtcctgtggnatccacgaaactacntnaacttnatcatgaa

SEQ ID NO: 21156 - DNA, 1116 bp, Homo sapiens
  misc_feature (1)...(1116): n = a,t,c or g
ggaaattccaagctaagctagaacacgagtacatccagaacttcaaaatactacaagcaggttttaagagaatgggtgttgacaaaataattcctgtggacaaattagtaaaaggaaagtttcaggacaattttgaattcgttcagtggttcaagaagtttttcgatgcaaactatgatggaaaagactatgaccctgtggctgccagacaaggtcaagaaactgcagtggctccttcccttgttgctccagctctgaataaaccgaagaaacctctcacttctagcagtgcagctccccagaggcccatctcaacacagagaaccgctgcggctcctaaggctggccctggtgtggtgcgaaagaaccctggtgtgggcaacggagacgacgaggcagctgagttgatgcagcaggtcaacgtattgaaacttactgttgaagacttggagaaagagagggatttctacttcggaaagctacggaacattgaattgatttgccaggagaacgagggggaaaacgaccctgtattgcagaggattgtagacattctgtatgccacagatgaaggctttgtgatacctgatgaagggggcccacaggaggagcaagaagagtattaacagcctggaccagcagagcaacatcggaattcttcactccaaatcatgtgcttaactgtaaaatactcccttttgttatccttagaggactcactggtttcttttcataagcaaaaagtacctcttcttaaagtgcactttgcagacgtttcactccttttccaataagtttgagttaggagcttttaccttgtagcagagcagtattaacatctanttggttcacctggaaaacagagaggctgaccgtggggctcaccatgcggatgcgggtcacactgaatgctggagagatgttatgtaatatgctgaggtggcgacctcagtggagaaatgtaaagactgaattgaattttaagctaatgtgaaatcagagaatgttgtaataagtaaatgccttaagagtatttaaaatatgcttccacatttcaaaatataaaatgtaacatgacaagagatttgcgttgaattggtctgggaaagangggca

SEQ ID NO: 21157 - DNA, 604 bp, Homo sapiens
acctttgatgacctgattacgaatttaatacgactcactatagggaatttggccctcgaggccaagaattcggcacgagatcttccaaagaataagaacaaaatagaacctcaaacagcagctaaaatatgccgttcagatttgtaaggggatggactatttgggttctcggcaatacgttcaccgggacttggcagcaagaaatgtccttgttgagagtgaacaccaagtgaaaattggagacttcggtttaaccaaagcaattgaaaccgataaggagtattacaccgtcaaggatgaccgggacagccctgtgttttggtatgctccagaatgtttaatgcaatctaaattttatattgcctctgacgtctggtcttttggagtcactctgcatgagctgctgacttactgtgattcagattctagtcccatggctttgttcctgaaaatgataggcccaacccatggccagatgacagtcacaagacttgtgaataccgttaaaagaaggaaaacgcctgccgtgcccacctaactgtccagatgaggtttatcaacttatgaggaaatgctgggaattccaaccatccaatcggacaag

SEQ ID NO: 21158 - DNA, 596 bp, Homo sapiens
gtgctctgtctttctcagaaaaccaaatatggcatcttccatgaggagcttgttttctgaccacgggaaatatgttgaatctttccggaggtttctcaaccattccacggaacaccagtgcatgcaggaattcatggacaagaagctgccaggcataataggaaggattggagacacaaaatcagaaattaagattctaagcataggcggaggtgcaggtgaaattgatcttcaaattctctccaaagttcaggctcaatacccaggagtttgtatcaacaatgaagttgttgagccaagtgctgaacaaattgccaaatacaaagagcttgtagccaagacatcgaacctcgagaacgtaaagtttgcttggcataaggagacatcatctgaataccaaagtagaatgttggagaaaaaggagcttcaaaagtgggactttattcatatgattcaaatgctgtattatgtaaaagacatcccagctaccctgaaattcttccatagtctcttaggtaccaatgctaagatgctcattattgttgtgtcaggaagcagtggctgggacaagctgtggaaaaagtacggatcacgct

SEQ ID NO: 21159 - DNA, 653 bp, Homo sapiens
gatttttttttgtatttttaatgggggtagcagctggactacccacgttctcacacccaccgtccgccctgctcctccctggctgccctggccctgaggtgtgggggctgcagcatgttgctgaggagtgaggaatagttgagccccaagtcctgaagaggcgggccagccaggcgggctcaaggaaagggggtcccagtgggaggggcaggctgacatctgtgtttcaagtggggctcgccatgccgggggttcataggtcactggctctccaagtgccagaggtgggcaggtggtggcactgagcccccccaacactgtgccctggtggagaaagcactgacctgtcatgcccccctcaaacctcctcttctgacgtgccttttgcacccctcccattaggacaatcagtcccctcccatctgggagtccccttttcttttctaccctagccattcctggtacccagccatctgcccaggggtgccccctcctctcccatccccctgccctcgtggccagcccggctggttttgtaagatactgggttggtgcacagtgattttttttttgtaatttaaacaggcccagcattgctggttctatttaatggacatgagataatgttagaggttttaaagtgattaaacgtg

SEQ ID NO: 21160 - DNA, 710 bp, Homo sapiens
aattcggcacgagtggcgaattgcctggtgtggagaaacatccggggctgatggactggattgattagaggctcatccaaaatagaggaagcatgcgaaatctacgccagagcagcaaacatgttcaaaatggccaaaaactggagtgctgctggaaacgcgttctgccaggctgcacagctgcacctgcagctccagagcaagcacgacgcagccacctgctttgtggacgctggcaacgcattcaagaaagccgacccccaagaggccattaactgtttgatgcgagcaatcgagatctacacagacatgggccgattcacgattgcggccaagcaccacatctccattgctgagatctatgagacagagttggtggacatcgagaaggccattgcccactacgagcagtctgcagactactacaaaggcgaggagtccaacagctcagccaacaagtgtctgctgaaggtggctggttacgctgcgctgctggagcagtatcagaaggccattgacatctacgaacaggtggggaccaatgccatggacagccccctcctcaagtacagcgccaaagactacttcttcaaggcggccctctgccacttctgcatcgacatgctcaacgccaagctggctgtccaaaagtatgaggagctgttcccagctttctctgattcccgggaatgcaagttgatgaaaaaatt

SEQ ID NO: 21161 - DNA, 631 bp, Homo sapiens
ggcagctcctccagcccagccccttgccaagaaaaaaggcgtaaagcggaaagcagatactaccacccctacacctacagccatcttggctcctggttctccagctagccctcctgggagtcttgagcctaaggcagcacggcttccccctatgcgtagagagagtggtcgccccatcaagcccccacgcaaagacttgcctgactctcagcaacaacaccagagctctaagaaaggaaagctttcagaacagttaaaacattgcaatggcattttgaaggagttactctctaagaagcatgctgcctatgcttggcctttctataaaccagtggatgcttctgcacttggcctgcatgactaccatgacatcattaagcaccccatggacctcagcactgtcaagcggaagatggagaaccgtgattaccgggatgcacaggagtttgctgctgatgtacggcttatgttctccaactgctataagtacaatcccccagatcacgatgttgtggcaatggcacgaaagctacaggatgtatttgagttccgttatgccaagatgccagatgaaccactagaaccagggcctttaccagtctctactgccatgccccctggcttggccaaa

SEQ ID NO: 21162 - DNA, 453 bp, Homo sapiens
  misc_feature (1)...(453): n = a,t,c or g
taacagctatgacatgattacgaatttaatacgactcactatagggaatttggccctcgaggccaagaattcggcacgaggctgtgctacgtcgccctggacttcgagcaggagatggccaccgccgcatcctcctcttctctggagaagagctacgagctgcccgatggccaggtcatcaccattggcaatgagcggttccggtgtccggaggcgctgttccagccttccttcctgggtatggaatcttgcggcatccacgagaccaccttcaactccatcatgaagtgtgacgtggacatccgcaaagacctgtacgccaacacggtgctgtcggcggaccaccatgtatccggcattgccgacaggatgcaaaaggagatcaccgcctgcgcccagcaccatgaagatcangatcatcgacccccanacgcangnactcnnngnnnatcg

SEQ ID NO: 21163 - DNA, 615 bp, Homo sapiens
ggaaccatggagggtgtagaagagaagaagaaggaggttcctgctgtgccagaaacccttaagaaaaagcgaaggaatttcgcagagctgaagatcaagcgcctgagaaagaagtttgcccaaaagatgcttcgaaaggcaaggaggaagcttatctatgaaaaagcaaagcactatcacaaggaatataggcagatgtacagaactgaaattcgaatggcgaggatggcaagaaaagctggcaacttctatgtacctgcagaacccaaattggcgtttgtcatcagaatcagaggtatcaatggagtgagcccaaaggttcgaaaggtgttgcagcttcttcgccttcgtcaaatcttcaatggaacctttgtgaagctcaacaaggcttcgattaacatgctgaggattgtagagccatatattgcatgggggtaccccaatctgaagtcagtaaatgaactaatctacaagcgtggttatggcaaaatcaataagaagcgaattgctttgacagataacgctttgattgctcgatctcttggtaaatacggcatcatctgcatggaggatttgattcatgagatctatactgttggaaaacgcttcaaagag

SEQ ID NO: 21164 - DNA, 458 bp, Homo sapiens
gcggcacgagggcgtagcagagtggtcgttgtctttctaggtctcagccggtcgtcgcgacgttcgcccgctcgctctgaggctcctgaagccgaaaccagctagactttcctccttcccgcctgcctgtagcggcgttgttgccactccgccaccatgttcgaggcgcgcctggtccagggctccatcctcaagaaggtgttggaggcactcaaggacctcatcaacgaggcctgctgggatattagctccagcggtgtaaacctgcagagcatggactcgtcccacgtctctttggtgcagctcaccctgcggtctgagggcttcgacacctaccgctgcgaccgcaacctggccatgggcgtgaacctcaccagtatgtccaaaatactaaaatgcgccggcaatgaagatatcattacactaagggccgaagataacgcggataccttggcgct

SEQ ID NO: 21165 - DNA, 501 bp, Homo sapiens
  misc_feature (1)...(501): n = a,t,c or g
gnnnnnnttttgnnaacnntttnnnnnnntntgnaaancgctatgacatgattacgaatttaatacgactcactatagggaatttggccctcgaggccaagaattcggcacgagggagagtgacaacaacacagcccttttgctttctaagaagttgatctacttccagctgcaccgggccctcaagatgattgtggatcccgtggagccacatggcgagatgaagtttcagtgggacctcaatgcctggaccaagagtgccgaggcctttggcaagattgtggcagagcgtcctggcactaactcaacaggccctgcacccatggcccctccaagagccccagggcccctgagcaagcagggctctggcagcagccagcccatggaggtgcaggaaggctatggctttgggtcaggagatgatccctactcaagtgcagagccccatgtgtcaggtgtgaaacggtcccgctcaggtgagggcgaggtgagcggccttat

SEQ ID NO: 21166 - DNA, 879 bp, Homo sapiens
ggatgcccagaaggtgactgaggggcagcaggagcgcctggagcggcagcactggaccatgaccaagatccagaagcaccaggagcacattctgcgctttgcctcttgggctctggagagtgacaacaacacagcccttttgctttctaagaagttgatctacttccagctgcaccgggccctcaagatgattgtggatcccgtggagccacatggcgagatgaagtttcagtgggacctcaatgcctggaccaagagtgccgaggcctttggcaagattgtggcagagcgtcctggcactaactcaacaggccctgcacccatggcccctccaagagccccagggcccctgagcaagcagggctctggcagcagccagcccatggaggtgcaggaaggctatggctttgggtcaggagatgatccctactcaagtgcagagccccatgtgtcaggtgtgaaacggtcccgctcaggtgagggcgaggtgagcggccttatgcgcaaggtgccacgagtgagccttgaacgcctggacctggacctcacagctgacagccagccacccgtcttcaaggtcttcccaggcagtaccactgaggactacaaccttattgttattgaacgtggcgctgccgctgcagctaccggccagccagggactgcgcctgcaggaacccctggtgccccacccctggctggcatggccattgtcaaggaggaggagacggaggctgccattggagcccctcctactgccactgagggccctgagaccaaacctgtgcttatggctcttgcggagggtcctggtgctgagggtccccgcctggcctcacctagtggcagcaccagctcagggctgaagtggtggctctg

SEQ ID NO: 21167 - DNA, 464 bp, Homo sapiens
  misc_feature (1)...(464): n = a,t,c or g
tgnnnttnaaaatttgaaaccctttntgaacgattacgaatttaatacgactcactatagggaatttggccctcgaggccaagaattcggcacgagacgagggctacgccctcccccacgccatcctgcgtctggacctggctggccgggacctgaccgactacctcatgaagatcctcactgagcgaggctacagcttcaccaccacggccgagcgggaaatcgtgcgcgacatcaaggagaagctgtgctacgtcgccctggacttcgagcaggagatggccaccgccgcatcctcctcttctctggagaagagctacgagctgcccgatggccaggtcatcaccattggcaatgagcggttccggtgtccggaggcgctgttccagccttccttcctgggtatggaatcttgcggcatccacgagaccaccttcaactccatcatgaagtgtgacgtggac

SEQ ID NO: 21168 - DNA, 671 bp, Homo sapiens
agctatgacatgattacgaatttaatacgactcactatagggaatttggccctcgaggccaagaattcggcacgagcagacagtgggttttgctggacacagtggggatgtgatgtccctgtccctggcccccgatggccgcacgtttgtgtcaggcgcctgtgatgcctctatcaagctgtgggacgtgcgggattccatgtgccgacagaccttcatcggccatgaatccgacatcaatgcagtggctttcttccccaacggctacgccttcaccaccggctctgacgacgccacgtgccgcctcttcgacctgcgggccgatcaggagctcctcatgtactcccatgacaacatcatctgtggcatcacctctgttgccttctcgcgcagcggacggctgctgctcgctggctcagacgacgccacctgcaacatctgggatgccatgaagggcgaccgtgcaggagtcctcgctggccacgacaaccgcgtgagctgcctcggggtcaccgacgatggcatggctgtggccacgggctcctgggactccttcctcaagatctggaactaatggccccacccccactgggcccaggccaggaggggccctgcccatgcccacactacaggccagggctgcggggctggcgcaatcccagcccccttcc

SEQ ID NO: 21169 - DNA, 440 bp, Homo sapiens
  misc_feature (1)...(440): n = a,t,c or g
gnnngngnnntgnnnttntnncnatgaannctttggtatgcatgattacgaatttaatacgactcactatagggaatttggccctcgaggccaagaattcggcacgagccggtgacggggtcacccacactgtgcccatctacgaggggtatgccctcccccatgccatcctgcgtctggacctggctggccgggacctgactgactacctcatgaagatcctcaccgagcgcggctacagcttcaccaccacggccgagcgggaaatcgtgcgtgacattaaggagaagctgtgctacgtcgccctggacttcgagcaagagatggccacggctgcttccagctcctccctggagaagagctacgagctgcctgacggccaggtcatcaccattggcaatgagcggttccgctgccctgaggcactcttccagccttcc

SEQ ID NO: 21170 - DNA, 743 bp, Homo sapiens
  misc_feature (1)...(743): n = a,t,c or g
ctatgactgattacgaatttaatacgactcactatagggaatttggccctcgaggccaagaattcggcacgaggaacaattccccgcagcctcagaatgtcgtgtttgatgttcagatccccaaaggagcattcatttccaacttctccatgactgtggacggcaagacatttaggagctctattaaggagaaaactgtgggccgagctctttatgcacaggccagagcaaaaggcaagacggctggcttggtgaggagcagcgctcttgatatggaaaacttcagaacggaagtaaatgtcctcccaggagcaaaggtgcagttcgaacttcactaccaggaggtgaagtggaggaagctgggctcctatgagcacaggatctatctgcaacctggacggctggccaaacacttagaggtagatgtgtgggttatcgaaccacagggactgagatttcttcatgttcccgacacatttgaaggccatttcgatggtgttccggtcatttctaaaggacaacagaaggcgcacgtctccttcaagcccacggtagcacagcagagaatatgccctagctgccgggagactgcggtanatggggaactggtggtgctgtatgacntgaaaagagaagagaangctggtgaactgncaggtgtttaatggatattttgtccacctctttgctccangannnctggaccccaattcncatntnncnatcctcttttgtnatccgat

SEQ ID NO: 21171 - DNA, 1076 bp, Homo sapiens
tgattacgaatttaatacgactcactatagggaatttggccctcgaggccaagaattcggcacgagttttgtttgtgactatgaatgggaagaagtcacaccctgtaaccactccaactccctaaggagtcacctcttctttaaggaatagctttcccttgtatctaaaaaacttggaactgacatgaatgaacgttggccactcttacccctccaggggtcacaatctataacgcctaggacccaagaatatcagaaataagtaagcaataaaactaattctggcaggaatcagggtggcaataggactagcagcaccctggggtggctttgcctaccatgagttaacgctaaagaacttggctcaaatcctagaatccttagccaccaacggagatcaggcattaaagagaattcaagagttccccagactctggaaaatgtagttgttgataacagactagcattggattatttactagctgaacaaggtggggtcttgtgcagttattaataaaacctgctgcacatatattaactctggacaggttgaggttaacattcaaaagatctatgagcaagctacctagttacatagatataaccagggcactgcccccaactatatctggtcaaccatcaaaagtgccttcccaagtctcacctgtttttcacctcttctaggacctttgacaactgtcttgttacaaatgtttggtccttgcttctttaacctcttagtaaagtttgtgtattctagattaccacagttccagagacaatgctggcacaaggcttccagcccatcctgtccactgacacggagaatgaaatcgtcctgcctctgggctccttagatcaggtatccagagatttttactcctccagtgccaggcagggcctacgtccataaactcagcaggaagtagttacggaaaacagatctccgcccttctgcagcccccttaagattaaggaggagtatctaatctctgaagggggaatgaggtaggaggtgggactcaactctggaagtggggctcaagcactcagaccaaactgagcactagctaaaa

SEQ ID NO: 21172 - DNA, 1504 bp, Homo sapiens
catgattacgaatttaatacgactcactatagggaatttggccctcgaggccaagaattcggcacgagctcatggctatagtcctggaaattgccatgattgttctatttggattatttgttgagtatgaaacggaccagactgttctcgagcagctcaacatcaccaagccaacagacatgggcatattctttgagttatatcctctgttccaagatgtacatgttatgatatttgttgggtttggcttcctcatgaccttcctgaagaaatatggcttcagcagtgtgggtatcaacctactcgttgctgctttgggcctccagtggggcactattgtacagggaatcctgcaaagccagggacagaaatttaacattggaatcaaaaacatgataaatgcagacttcagtgcagccacagttctgatatcttttggagctgtcctgggaaaaacgagccccacccaaatgctgatcatgacaattttagaaattgttttctttgcccacaatgaatacctggttagtgaaatatttaaggcctctgacattggagcatcaatgacgatccatgcctttggggcctactttggcttggctgtagcaggcatcttgtatcgatctggactgagaaaggggcatgaaaatgaagagtccgcatactactcagacttgtttgcaatgattgggactctctttctgtggatgttttggcccagctttaactcggccattgctgaacctggagacaaacagtgcagggccattgtaaacacgtacttctctctcgctgcctgtgtgctcacagcctttgccttctccagcctagtggagcaccgaggcaagctcaacatggttcacattcagaatgccacccttgctggaggagttgctgtgggcacttgtgcggatatggcaattcacccatttggttctatgattattgggagcattgcaggaatggtctctgtgcttggatacaagttcctgactccactttttactactaaactgaggatccatgatacatgtggggtccataacctccacggcttacctgggtgtagtgggaggccttgcaggcattgtggcagtagcaatgggcgcctccaacacgtctatggccatgcaggcagctgcactgggttcctctatcggaacagcagttgttggaggtctgatgacaggtttaattctaaagttgcctctctggggacagccatctgaccagaactgctatgatgattctgtttattggaaggtccctaagacgagataacttgacaatcagttccatggacatggtgaccacagccagctggaacctgaagtctaaacaccattcctgctctccagcttcctttcccattatccagaatcaagtccaaataaacaaaaagggagtaaccaaagagagtatggaccagagtgaatagatcctaagtcccaaatggccagtgtaaaaatgtccttatgtctgatgctgtctcttgctcttcaat

SEQ ID NO: 21173 - DNA, 372 bp, Homo sapiens
  misc_feature (1)...(372): n = a,t,c or g
ggggctttgggccgggtgttgggaatgtgaaggcttcagtaacctcccgtcaaggagctcccagttttgttgaggagaccaagacgtaggcagatactgtacagcttggacgatgccggcggtgatcttctggcagtgggagaaccagtccttcaatgccttagtcaactacaccaacaggaatgcggcttcccccacatcagtcagaaagcgccgcccttggtgggccgatgggtgccctttgccgctgtggttgcngctaacngnntnnntatncccatgatgcgacagctggagcncatnangggnanttgcntcgaaggacangaatgttttgaaatttgtcattcccggancacatgagacatagag

SEQ ID NO: 21174 - DNA, 1063 bp, Homo sapiens
  misc_feature (1)...(1063): n = a,t,c or g
ggaagatggcggacgaggagaagctgccgcccggctgggagaagcgcatgagccgcagctcaggccgagtgtactacttcaaccacatcactaacgccagccagtgggagcggcccagcggcaacagcagcagtggtggcaaaaacgggcagggggagcctgccagggtccgctgctcgcacctgctggtgaagcacagccagtcacggcggccctcgtcctggcggcaggagaagatcacccggaccaaggaggaggccctggagctgatcaacggctacatccagaagatcaagtcgggagaggaggactttgagtctctggcctcacagttcagcgactgcagctcagccaaggccaggggagacctgggtgccttcagcagaggtcagatgcagaagccatttgaagacgcctcgtttgcgctgcggacgggggagatgagcgggcccgtgttcacggattccggcatccacatcatcctccgcactgagtgagggtggggagcccaggcctggcctcggggcagggcagggcggctaggccggcagctcccccttgcccgcagccagtggccgaaccccccactccctgcaccgtcacacagtatttattgttcccacaatggctgggagggggcccttcagattgggggccctggggtccccactccctgtcatccccagttggggctgcgaccgccagattctcccttaaggaattgacttcagcaggggtgggaggctcccagacccagggcagtgtggtgggaggggtgttccaaagagaaggcctggtcagcagagccgccccgtgtccccccaggtgctggaggcagactcgagggccgaattgtttctagttaggccacgctcctctgttcagtcgcaaaggtgaacactcatgcggcccagccatgggccctttgagcaactgtgcagcaccctttcacccccaattaaacccagctcgtgccgaattcttggcctcgagggccaaattccctatagtgagtcgtattaaattcgtaatcatgtcatagcgnttttcaaaggnnnncaaa

SEQ ID NO: 21175 - DNA, 431 bp, Homo sapiens
ggttatgtgagcatgatagccatcttcctctttgtcagcttctttgaaattgggccaggcccgatcccctggttcatggtggctgagtttttcagtcaaggaccacgtcctgctgctttagcaatagctgcattcagcaattggacctgcaatttcattgtagctctgtgtttccagtacattgcggacttctgtggaccttatgtgtttttcctctttgctggagtgctcctggcctttaccctgtttacattttttaaagttccagaaaccaaaggaaagtcttttgaggaaattgctgcagaattccaaaagaagagtggctcagcccacaggccaaaagctgctgtagaaatgaaattcctaggagctacagagactgtgtaaaaaaaaaaccctgctttttgacatgaacagaacaataagggaac

SEQ ID NO: 21176 - DNA, 422 bp, Homo sapiens
tcttcagccagggtccacgtccagctgccattgccgttgcaggcttctccaactggacctcaaatttcattgtgggcatgtgcttccagtatgtggagcaactgtgtggtccctacgtcttcatcatcttcactgtgctcctggttctgttcttcatcttcacctacttcaaagttcctgagactaaaggccggaccttcgatgagatcgcttccggcttccggcaggggggagccagccaaagtgacaagacacccgaggagctgttccatcccctgggggctgattcccaagtgtgagtcgccccagatcaccagcccggcctgctcccagcagccctaaggatctctcaggagcacaggcagctggatgagacttccaaacctgacagatgtcagccgagccgggcctggggctccttt

SEQ ID NO: 21177 - DNA, 468 bp, Homo sapiens
atttaatacgactcactatagggaatttggccctcgaggccaagaattcggcacgagtgtgtttggccctggctggccgggacctggccgactacgtggtgaagatcctcgaggggcccgctacagcttcatcaccacagtgaagtgggggattgtgcgtgacatccaggaaaagctatgctgtgttgccttggacttgcagcaggagatggccactgccgtgtcctcttccttcctggagaagagctacaagctctcccacagcctggtggtcaccatcagcaatgagtggttctggtgtccagaggcgctgtcccagccctccttcctgggcatggaatcttgctgcatccaggagaccatcttgacctccatcatgaagtgtgatgtggatatctgcaaggacctgtacaccaatgtggtgctgtctggcagcattgcatgcacccaagtatcacacacaggatg

SEQ ID NO: 21178 - DNA, 762 bp, Homo sapiens
gggcagcaatgcctgctacatggaggagatgaagaacgtggagatggtggagggggaccaggggcagatgtgcatcaacatggagtggggggcctttggggacaacgggtgtctggatgatatcaggacacactacgacagactggtggacgaatattccctaaatgctgggaaacaaaggtatgagaagatgatcagtggtatgtacctgggtgaaatcgtccgcaacatcttaatcgacttcaccaagaagggattcctcttccgagggcagatctctgagacgctgaagacccggggcatctttgagaccaagtttctctctcagatcgagagtgaccgattagcactgctccaggtccgggctatcctccagcagctaggtctgaatagcacctgcgatgacagtatcctcgtcaagacagtgtgcggggtggtgtccaggagggccgcacagctgtgtggcgcaggcatggctgcggttgtggataagatccgcgagaacagaggactggaccgtctgaatgtgactgtgggagtggacgggacactctacaagcttcatccacacttctccagaatcatgcaccagacggtgaaggaactgtcaccaaaaatgtaacgtgtccttcctcctgtctgaggatggcagcggcaagggggccgccctcatcacggccgtgggcgtgcggttacacacagaggcaagcaactaagagtccgggatccccagcctactgcctctccagcacttctctcttc

SEQ ID NO: 21179 - DNA, 441 bp, Homo sapiens
gcacctccttgattctcagttttgctggaggccgcaaccaggcccgcgccgccaccatgtttcgaaatcagtatgacaatgatgtcactgtttggagcccccagggcaggattcatcaaattgaatatgcaatggaagctgttaaacaaggttcagccacagttggtctgaaatcaaaaactcatgcagttttggttgcattgaaaagggcgcaatcagagcttgcagctcatcagaaaaaaattctccatgttgacaaccatattggtatctcaattgcggggcttactgctgatgctagactgttatgtaattttatgcgtcaggagtgtttggattccagatttgtattcgatagaccactgcctgtgtctcgtcttgtatctctaattggaagcagtatcctttttatgttagcatttatggatatgaactttgaag

SEQ ID NO: 21180 - DNA, 494 bp, Homo sapiens
gtgcgtagcatttgctgcatgggttaattgagaatagaaatttgcccctggcaaatgcacacacctcatgctagcctcacgaaactggaataagccttcgaaaagaaattgtccttgaagcttgtatctgatatcagcactggattgtagaacttgttgctgattttgaccttgtattgaagttaactgttccccttggtattaacgtgtcagggctgagtgttctgggatttctctagaggctggcaagaaccagttgttttgtcttgcgggtctgtcagggttggaaagtccaagccgtaggacccagtttcctttcttagctgatgtctttggccagaacaccgtgggctgttacttgctttgagttggaagcggtttgcatttacgcctgtaaatgtattcattcttaatttatgtaaggttttttttgtacgcaattctcgattctttgaagagatgacaacaaattttggttttctactgttatgtga

SEQ ID NO: 21181 - DNA, 809 bp, Homo sapiens
gcttcaaaattgctgcccttattggaatcatggttggctctttctacatccctgggggctatttcagctcagtctggtttgttgttggcatgataggggccgccctcttcatcctcattcagctggtgctgctggtagattttgctcattcttggaatgaatcatgggtaaatcgaatggaagaaggaaacccaaggttgtggtatgctgctttactgtctttcacaagcgccttttatatcctgtcaatcatctgtgtcgggctgctctatacatattacaccaaaccagatggctgcacagaaaacaagttcttcatcagtattaacctgatcctttgcgttgtggcttctattatatcgatccacccaaaaattcaggtatgattggttactacttttttctcctgtgaaaggtttttaattctaagcttaaaatctaggtaccctttcttatgaatttatgtctaagtttatccacttgaacatttttccatattataaaggcttcataattctatttcatgcctatatcataattaaatgaatttcactatcattaaagtcgacgcgggcgcgaattccagatctatgaatcgtagatactgaaaaaccccgcaagttcacttcaactgtgcatcgtgcaccatctcaatttctttcatttatacatcgttttgccttcttttatgtaactatactcctctaagtttcaatcttggccatgtaacctctgatctatagaattttttaaatgactagaattaatgcccatcttttttttggacctaaattcttcatgaaaatatg

SEQ ID NO: 21182 - DNA, 568 bp, Homo sapiens
  misc_feature (1)...(568): n = a,t,c or g
cgctatgactgattacgaatttaatacgactcactatagggaatttggccctcgaggccaagaattcggcacgagaaatatgttgctgtggagctgaagtcagcctttgaggaaaccggcaagaccaaggaggtgattggcacgggctatggcatcctggaccagaaggcctctggagtcaaatacaccaagtcggacttgcggttaatcgaagtcactgagaccatttgcaagaggctcctggattatagcctgcacaaggagaggaccggcagcaatcgatttgccaagggcatgtcagagacctttgagacattacacaacctggtacacaaaggggtcaaggtggtgatggacatcccctatgagctgtggaacgagacttctgcagaggtggctgacctcaagaagcagtgtgatgtgctggtggaagagtttgaggaggtgatcgaggactggtacaggaaccaccaggaggaagacctgactgaattcctctgcgccaaccacgtgctgaagggaaaagacaccagttgcctggcagagcattggtccggaangaagggag

SEQ ID NO: 21183 - DNA, 516 bp, Homo sapiens
agctatgacatgattacgaatttaatacgactcactatagggaatttggccctcgaggccaagaattcggcacgaggattacaaacccattcattacatagtataaggaattcacagtatattgactatatagtgtctaatgatcttgggcagatactgtcaaacttacaatatctatatagatgtaggtctttttaaatttacctagtcattcttctatcatgtatattgatgctgaaagaggaactggtcagctcctctggacaacaaattcttagtctataatattaggagacatcttctgttttgcaaatgtctgtgaatctgagcaacctggcattctgcttactggccagaaagctggcgggtgacatttgtaacatttcctctttgagactctgagttcacctagagaagtctaagcataacagctttctttcccagcacgagcctttatagctctctttagctcaaccactctgccatccagccaatggatgcccttccctgacccca

SEQ ID NO: 21184 - DNA, 968 bp, Homo sapiens
gagaccgtgtttcagaataatccttacttgagagtagccattttcttgcctgtacttgtcagaactagaggaaatagccaagactaatgaaaaagattactctaacccttaaaagacttttaaattcactactagagtggtcattttaaaaatacatccatgttttaacttatttgagccttctttatgagtaaatgattcctccttgttctgtctttcaaaccagctaaatatttgtcacaaaagtgcttttttctcactgttgcctattttcatatatcaggttttaaatagttttaattttttaataaaattttctctacgttctatatgcaattgttatatatctatttgaatagctgaaggactaaaatacttttttaagagataacttcaggaaaccattatattttactatctgcatgctgttaactgtggtacactgtgaaatatgttgattacaaacccattcattacatagtataaggaattcacagtatattgactatatagtgtctaatgatcttgggcagatactgtcaaacttacaatatctatatagatgtaggtctttttaaatttacctagtcattcttctatcatgtatattgatgctgaaagaggaactggtcagctcctctggacaacaaattcttagtctataatattaggagacatcttctgttttgcaaatgtctgtgaatctgagcaacctggcattctgcttactggccagaaagctggcgggtgacatttgtaacatttcctctttgagactctgagttcacctagagaagtctaagcataacagctttctttcccagcacgagcctttatagctctctttagctcaaccactctgtccatccagccaatggatgtcccttcccctgtaccccaatttcaagcttattttaggaagccttgaactaccatgtatcctggctcctagctgagtttattagagg

SEQ ID NO: 21185 - DNA, 704 bp, Homo sapiens
  misc_feature (1)...(704): n = a,t,c or g
atcgcttctatctagtgacaggatgattactttgcttaacatctcaggaagaaagtgtttaggagccctcatttctcttacaccattgacagcctcatttgcatttccactatttagatattcagtcacaacagtttcagttagtttaaggagttcttcctttgacggtggtggctttttgctggtcttggcaggcttttcctggataagtggtggattagttttgagaccaagctgaggtgtctgtcccagaggtggtgtttgagtgcgtggtggttgtgcactaggaggaatcatagttatctggggctgaagctttggcacttgatttttattcattaggaacgactgagcaggcctcaggctaatctcatctgcattaagctgtcctttcttagaaaaccgaggtggcatatccttcgactgtccttgcagctgggataagagtccctgactctggttatggtagagctggcttagcccctggcttttcataaacttgcctcccatctctccaaactgcgattgtgtgggaggcatgatgtgtcccccatggccattgaagagttgatttgaacgatgacgtcccatggtgggtgaaaatctatcctggataactcctggaccagtaccaattccgctacctggcatttgccaaacatatcancaagtctccaangggtcctatcattttcatcctgggg

SEQ ID NO: 21186 - DNA, 520 bp, Homo sapiens
cagagcctcctggaatacctagagaaacagcgcaacagaattggctgtaggaccatagtctattgggggattggtaggaaccgttaccagctggaaattcctgagaatttcaccactcgcaatttgccagaagaatacgagttgaaatctaccaagaagggctgtaaacgatactggaccaaaactattgaaaagaagttggctaatctcataaatgctgaagaacggagggatgtatcattgaaggactgcatgcggcgactgttctataactttgataaaaattacaaggactggcagtctgctgtagagtgtatcgcagtgttggatgttttactgtgcctggctaactatagtcgagggggtgatggtcctatgtgtcgcccagtaattctgttgccggaagataccccccccttcttagagcttaaaggatcacgccatccttgcattacgaagactttttttggagatgattttattcctaatgacattctaataggctgtgaggaagaggacc

SEQ ID NO: 21187 - DNA, 936 bp, Homo sapiens
gttttttttaataaaagatcctcagctacagtctttccattttccttgcttctcttattgcacacccccagcccattttgcttctctcttggattttgttttttcagatccacatttattgggtttcctgtccagcttcttggaaaggagctcaatcttggaaagactgatctttccaaaatattttccctggtctgaagctttggtctgaacttctcaaggcttagagaatccagttacagaccttttggggttcaggatgctatagattgacaccctcctgcctgtttttctctgcatcccaacctggccaaggcccctcctgtggggtgcccatctgtgcctttattccggctgtgccctcgactttccagcttcccatgtttctttggttaggtttctctcccttccttctttctccttccccaatccgcctgtttcgtcagggcccagtttgtttcctcatacaccttcctcactaccccaccccacatggttgactctttccctcagctccaccagctcttcatcatgccactcatttcaaaacttgagcaaaacagggcagtcaggatctgatgtctttctggtctccctaagaaaactaagctcttgagggacagcccttggcaatgctttcctatctgctgagcatggtgaccttccttaggacttccagagttcagttccttctggcagagaggttttctttctccatgccatatggatgtgactcaaatgaggggtcccacagcttttcctggctaccacttgctgtgaccttatacatgttggggtttgctcttaaagaggagagcaggaagaaaggttggtttcagaaaccaagagggtcggcagtggacgcgtacattttgtcacggagtccacagagctgagcttttgagcagactctgagaagtatcattgcttgggttg

SEQ ID NO: 21188 - DNA, 1569 bp, Homo sapiens
gtttgaaacctttgacatgattacgaatttaatacgactcactatagggaatttggccctcgaggccaagaattcggcacgagcccagccaagcactgtcaggaatcctgtgaagcagctccagctatgtgctgtctctctatgcctctggccgtaccactggcatcgtgatggactccggtgacggggtcacccacactgtgcccatctacgaggggtatgccctcccccatgccatcctgcgtctggacctggctggccgggacctgactgactacctcatgaagatcctcaccgagcgcggctacagcttcaccaccacggccgagcgggaaatcgtgcgtgacattaaggagaagctgtgctacgtcgccctggacttcgagcaagagatggccacggctgcttccagctcctccctggagaagagctacgagctgcctgacggccaggtcatcaccattggcaatgagcggttccgctgccctgaggcactcttccagccttccttcctgggcatggagtcctgtggcatccacgaaactaccttcaactccatcatgaagtgtgacgtggacatccgcaaagacctgtacgccaacacagtgctgtctggcggcaccaccatgtaccctggcattgccgacaggatgcagaaggagatcactgccctggcacccagcacaatgaagatcaagatcattgctcctcctgagcgcaagtactccgtgtggatcggcggctccatcctggcctcgctgtccaccttccagcagatgtggatcagcaagcaggagtatgacgagtcgggcccctccatcgtccaccgcaaatgcttctaaacggactcagcagatgcgtagcatttgctgcatgggttaattgagaatagaaatttgcccctggcaaatgcacacacctcatgctagcctcacgaaactggaataagccttcgaaaagaaattgtccttgaagcttgtatctgatatcagcactggattgtagaacttgttgctgattttgaccttgtattgaagttaactgttccccttggtatttgtttaataccctgtacatatctttgagttcaacctttagtacgtgtggcttggtcacttcgtggctaaggtaagaacgtgcttgtggaagacaagtctgtggcttggtgagtctgtgtggccagcagcctctgatctgtgcagggtattaacgtgtcagggctgagtgttctgggatttctctagaggctggcaagaaccagttgttttgtcttgcgggtctgtcagggttggaaagtccaagccgtaggacccagtttcctttcttagctgatgtctttggccagaacaccgtgggctgttacttgctttgagttggaagcggtttgcatttacgcctgtaaatgtattcattcttaatttatgtaaggttttttttgtacgcaattctcgattctttgaagagatgacaacaaattttggttttctactgttatgtgagaacattaggccccagcaacacgtcattgtgtaaggaaaaataaaagtgctgccgtaaaaaaaaaaaaaa

SEQ ID NO: 21189 - DNA, 789 bp, Homo sapiens
  misc_feature (1)...(789): n = a,t,c or g
ggtgtcctttgttattcataatctgccaataattgccaagatggctgccgtcagcaaggccagtggacggtttgggcttcttcaaggaacctcagctgaaacctctgggggattactgatttgtctgccaagagaacaggcggctcgcttttgttctgaaatcaaatcctccaagtacggagagggtcaccaagcgtggatcgttggcattgtggaaaagggaaaccgaacggcccggatcattgacaagccgcgagttattgaagtcctgcctcgtggggccacagctgctgttcttgctcctgacagttcaaatgcctcctctgagcctagctcgtgagatgaaagaacagaagttgtttggaccttagagccattgtccacaatcacggatggttctcaagagttgattgtaagaaatttccaaagaaggctgcctgcatagtggttccggctgccctttctaggtgattggaatcagcccatctaaagcagtctttatatgcattccgaggccagagtaacattttgaactttggggggatatttgttcatcacttgggtagaagaggagcaaaaatacctctgttttctcttgccaaagtaagatgaagctattccaggttgagggatttttctttgcacggggttgattaatttctgcacagggagtgagattattaaagtaacacacacacaaagtaaattgcaaaatgaaaaaaattagaagcaaatgagttttggaccaatattgntgataaatctaaattgttaagagagatcttatat

SEQ ID NO: 21190 - DNA, 451 bp, Homo sapiens
gagttccgcttcctgtccgactgtggtgtctttgctgagggtcacattgagctgcaggttgaatccggggtgcctttaggattcagcaccatggcggaagacatggagaccaaaatcaagaactacaagaccgccccttttgacagccgcttccccaaccagaaccagactagaaactgctggcagaactacctggacttccaccgctgtcagaaggcaatgaccgctaaaggaggcgatatctctgtgtgcgaatggtaccagcgtgtgtaccagtccctctgccccacatcctgggtcacagactgggatgagcaacgggctgaaggcacgtttcccgggaagatctgaactggctgcatctccctttcctctgtcctccatccttctcccaggatggtgaagggggacctggtacccagtgatccccaccccaggatcctaaatcatg

SEQ ID NO: 21191 - DNA, 733 bp, Homo sapiens
gatgggcgccgcatcatcctgctggccgagggtcggctggtcaacctgggttgtgccatgggccaccccagcttcgtgatgagtaactccttcaccaaccaggtgatggcgcagatcgagctgtggacccatccagacaagtaccccgttggggttcatttcctgcccaagaagctggatgaggcagtggctgaagcccacctgggcaagctgaatgtgaagttgaccaagctaactgagaagcaagcccagtacctgggcatgtcctgtgatggccccttcaagccggatcactaccgctactgagagccaggtctgcgtttcaccctccagctgctgtccttgcccaggccccacctctcctccctaagagctaatggcaccaactttgtgattggtttgtcagtgtcccccatcgactctctggggctgatcacttagtttttggcctctgctgcagccgtcatactgttccaaatgtggcagcgggaacagagtaccctcttcaagccccggtcatgatggaggtcccagccacagggaaccatgagctcagtggtcttggaacagctcactaagtcagtccttccttagcctggaagtcaggagtggagtcacaaagcccatgtgttttgccatctaggccttcacctggtctgtggacttatacctgtgtgcttggtttacaggtccagtggttcttcagcccatgacagatgagaaggggctatat

SEQ ID NO: 21192 - DNA, 463 bp, Homo sapiens
  misc_feature (1)...(463): n = a,t,c or g
ggnnnntngnntnnnnccnactgagancnttatnntgtgantacgaatttaatacgactcactatagggaatttggccctcgaggccaagaaattcggcacgaggggcagcacctgggggagccctggctgggtgcggctcgctctttgcctgacgggcttagtgctctcgctctacgcgctgcacgtgaaggcggcgcgcgcccgggaccgggattaccgcgcgctctgcgacgtgggcaccgccatcagctgttcgcgcgtcttctcctccaggtggggcaggggtttcgggctggtggagcatgtgctgggacaggacagcatcctcaatcaatccaacagcatattcggttgcatcttctacacactacagctattgttaggttgcctgcggacacgctgggcctctgtcctgatgctgctgagctccctggngctctcgctggntctgctaccnggcc

SEQ ID NO: 21193 - DNA, 741 bp, Homo sapiens
cccctttgaaaacgctatgacatgattacgaatttaatacgactcactatagggaatttggccctcgaggccaagaattcggcacgagggagtgcgagcacggccggccaatcgccgagtcagagggccaggaggggcgcggccattcgccgcccggcccctgctccgtggctggttttctccgcgggcgcctcgggcggaacctggagataatgggcagcacctgggggagccctggctgggtgcggctcgctctttgcctgacgggcttagtgctctcgctctacgcgctgcacgtgaaggcggcgcgcgcccgggaccgggattaccgcgcgctctgcgacgtgggcaccgccatcagctgttcgcgcgtcttctcctccaggttgcctgcggacacgctgggcctctgtcctgatgctgctgagctccctggtgtctctcgctggttctgtctacctggcctggatcctgttcttcgtgctctatgatttctgcattgtttgtatcaccacctatgctatcaacgtgagcctgatgtggctcagtttccggaaggtccaagaaccccagggcaaggctaagaggcactgagccctcaacccaagccaggctgacctcatctgctttgctttggcatgtgagccttgcctaagggggcatatctgggtccctagaaggccctatatgtggggcttctagattaccccctcctcctgccatacccacacatgacaatgg

SEQ ID NO: 21194 - DNA, 757 bp, Homo sapiens
  misc_feature (1)...(757): n = a,t,c or g
gggatatcattgttcaaatacaggacaaagatctctttcttctccagtggctgaccagattacaggtcagccttcgtctcagttacaacctattacatatggtccttcacattcagggtctgctacaacagcttccccagcagcttctcatcccttggctagttcaccgctttctgggccaccatctcctcagcttcagcctatgccttaccaatctcctagctcaggaactgcctcatcaccgtctccagccaccagaatgcattctggacagcactcaactcaagcacaaagtacgggccaggggggtctttctgcaccttcatccttaatatgtcacagtttgtgtgatccagcgtcatttccacctgatggggcaactgtgagcattaaacctgaaccagaagatcgagagcctaactttgcaaccattggtctgcaggacatcactttagatgatgtgaacgagataattgggagagacatgtcccagatttctgtttcccaaggagcaggggtgagcaggcaggctcccctcccgagtcctgagtccctggatttaggaagatctgatgggctctaacagtgcttactgcagccttgtgtccaccaccaacttctcagcatgtttctctccttggaccttgggtttccaactctgcagccttcaggtctggggccaggagtgggaccaccatttgtggggaaagtacattcctccactcaggcttgggtaaatttggnaaanaacaggaca

SEQ ID NO: 21195 - DNA, 735 bp, Homo sapiens
gttcatactgcagtcggtcagtgttcggttgaaggattctgtgtgctgtcggacccagagggtgacggcgccgctaggatgaagctcgtgagatttttgatgaaattgagtcatgaaactgtaaccattgaattgaagaacggaacacaggtccatggaacaatcacaggtgtggatgtcagcatgaatacacatcttaaagctgtgaaaatgaccctgaagaacagagaacctgtacagctggaaacgctgagtattcgaggaaataacattcggtattttattctaccagacagtttacctctggatacactacttgtggatgttgaacctaaggtgaaatctaagaaaagggaagctgttgcaggaagaggcagaggaagaggaagaggaagaggacgtggccgtggcagaggaagagggggtcctaggcgataatgtctctcaagatttcaaagtcatatgagatttgggatattttttgtacaggttgtgtttgtttatgtcagtttttaataaacataaatgtgggacagagctgtctatttagtatatcaaagttttagtagtttcctccacattcacgaaattaccacagtgagagctaagcatttctactgggcagtttcatttttagttgatcaggttttaagtttttgaactaaaatttttttttttctttttatgatgaataaggttaaaataaaagccttagacaaattaaatttggcagag

SEQ ID NO: 21196 - DNA, 512 bp, Homo sapiens
  misc_feature (1)...(512): n = a,t,c or g
aacagctatgacatgattacgaatttaatacgactcactatagggaatttggccctcgaggccaagaattcggcacgagcgggggtgtgatccttttccacgagaccctctaccaaaaggacagccagggaaagctgttcagaaacatcctcaaggaaaaggggatcgtggtgggaatcaagttagaccaaggaggtgctcctcttgcaggaacaaacaaagaaaccaccattcaagggcttgatggcctctcanagcgctgtgctcagtacaagaaagatggtgttgactttgggaagtggcgtgctgtgctgaggattgccgaccagngtccatccagcctcgctatccaggaaaacgccaacgccctggctcgctacgccagcatctgtcagcagaatggactggtacctattgttgaaccagaggtaattcctgatgganaccatgacctggacactgccagtatgttactganaangcctgctgctgctacaangccctgaatgacc

SEQ ID NO: 21197 - DNA, 771 bp, Homo sapiens
gccgtaccattgtgctccatgacacgagcctgccagatgtgtctgctacagactttgagaaggttgatctgacccagttcaagtggatccacattgagggccggaacgcatcggagcaggtgaagatgctgcagcggatagacgcacacaacaccaggcagcctccagagcagaagatccgggtgtccgtggaggtggagaagccacgagaggagctcttccagctgtttggctacggagacgtggtgtttgtcagcaaagatgtggccaagcacttggggttccagtcagcagaggaagccttgaggggcttgtatggtcgtgtgaggaaaggggctgtgcttgtctgtgcctgggctgaggagggcgccgacgccctgggccctgatggcaaattgctccactcggatgctttcccgccaccccgcgtggtggatacactgggagctggagacaccttcaatgcctccgtcatcttcagcctctcccaggggaggagcgtgcaggaagcactgagattcgggtgccaggtggccggcaagaagtgtggcctgcagggctttgatggcatcgtgtgagagcaggtgccggctcctcacacaccatggagactaccattgcggctgcatcgccttctcccctccatccagcctggcgtccaggttgccctgttcaggggacagatgcaagctgtggggaggactctgcctgtgtcctgtgttccccacagggagaggctctggggggatggctgggggatgcagagcctca

SEQ ID NO: 21198 - DNA, 490 bp, Homo sapiens
ggaccagctgctgccaaacctgagggctgtggggtggaatgagctggaaggccgtgatgccatcttcaagcagtttcatttcaaagacttcaacagggcctttgggttcatgacaagagtggccctgcaggctgagaaactggaccaccatcctgaatggtttaacgtgtacaacaaggtccacatcacgctgagcacccatgagtgtgccggcctttcagaacgggacataaacctggccagcttcatcgaacaagtagcagtgtccatgacatagaccctgcccttcctctttgaattcttccgggggaaggggtgactgaactgggagtccagggagggagctgaggagcccttaccctcccaccactcccctcccaagacccagccgccgccgttgagggctgagtccttgctgtgggatgtgccagtgcccaccaacaccaggaatttaaaccttttccctggacaattttttaatcctgggggc

SEQ ID NO: 21199 - DNA, 417 bp, Homo sapiens
  misc_feature (1)...(417): n = a,t,c or g
gggaagaaaacatgacagaaacagatgccttctataaaaggtaaagctgtgctcttttctaataaaggtctcttcctttgatggtcatgatcagcctacagaaatcaaagcaagaatgggtcctgggagctaggaagtaaaactgagtaggccaagttttagcctttggggagctcatttgtagataggcaggttgtgctgcccctggttgtcgagggacccggagtgatgttcagaatgcatattaattggcatggcatgagcctagagctagaacttggttctgagcctcgtggttattcctggttgctggatcctgggggccaggggaaagacatcaaggcaaaggttaggggatgtgtcaaggatggcncatggctgntctttaccaattggccagaanaganattttcaagg

SEQ ID NO: 21200 - DNA, 424 bp, Homo sapiens
ggcaaaccaaaccattattcatttattggcttaagtatgctttctcctgaaaactttagcattgggtgcaaatattcagtatggttctcggagaccaaagggttttaagccagggcacaaccagaaaagtggctctctttggtagggagaggggctccaatatttcgttctctccccatggggcactgacagagaaatgaaatagttttatctggaaaattccagagctattatttactccttaccaagggaagttacttcttgtaaaaacttttaagccatttatcaacaagttcttgttgactcagggcataatgagttcctgagacatgcttttttgggggctggggctttaggtagaagaatttcaaggaaaagaattctcagcagagctcaagattgtagaaactcagcagaagctggt

SEQ ID NO: 21201 - DNA, 516 bp, Homo sapiens
  misc_feature (1)...(516): n = a,t,c or g
tnnnnttttgaaatntgaatcccntttatgacatgattacgaatttaatacgactcactatagggaatttggccctcgaggccaagaattcggcacgagacatcctcaaggaaaaggggatcgtggtgggaatcaagttagaccaaggaggtgctcctcttgcaggaacaaacaaagaaaccaccattcaagggcttgatggcctctcagagcgctgtgctcagtacaagaaagatggtgttgactttgggaagtggcgtgctgtgctgaggattgccgaccagtgtccatccagcctcgctatccaggaaaacgccaacgccctggctcgctacgccagcatctgtcagcagaatggactggtacctattgttgaaccagaggtaattcctgatggagaccatgacctggaacactgccagtatgttactgagaaggtcctggctgctgtctacaaggccctgaatgaccatcatgtttacctggagggcaccctgctaaagcccaacatggtga

SEQ ID NO: 21202 - DNA, 1280 bp, Homo sapiens
  misc_feature (1)...(1280): n = a,t,c or g
gcagttctggaaaacaaggcagaagtgatagttcaagtaagaaggatgtgattgagctgacagacgacagctttgataagaatgttctggacagtgaagatgtttggatggttgagttctatgctccttggtgtggacactgcaaaaacctagagccagagtgggctgccgcagcttcagaagtaaaagagcagacgaaaggaaaagtgaaactggcagctgtggatgctacagtcaatcaggttctggcctcccgatacgggattagaggatttcctacaatcaagatatttcagaaaggcgagtctcctgtggattatgacggtgggcggcaagatccgacatcgtgtcccgggcccttgatttgttttctgataacgccccacctcctgagctgcttgagattatcaacgaggacattgccaagaggacgtgtgaggagcaccagctctgtgttgtggctgtgctgccccatatccttgatactggagctgcaggcagaaattcttatctggaagttcttctgaagttggcagacaaatacaaaaagaaaatgtgggggtggctgtggacagaagctggagcccagtctgaacttgagaccgcgttggggattggagggtttgggtaccccgccatggccgccatcaatgcacgcaagatgaaatttgctctgctaaaaggctccttcagtgagcaaggcatcaacgagtttctcagggagctctcttttgggcgtggctccacggcacctgtaggaggcggggctttccctaccatcgttgananagagccttgggacggcagggatggcgagcttcccgtggaggatgacattgacctcagtgatgtggagcttgatgacttagggaaagatgagttgtgagagccacaacagaggcttcagaccattttcttttcttgggagccagtggatttttccagcagtgaagggaattctctacactcagatgactctaccagtggccttttaaccaagaagtagtacttgattggtcatttgaaaacactgcaacagtgaacttttgcatctcaagaaaacattgaaaaattctatgaattgttgtagccggtgaattgagtcgtattctgtcacataatattttgaagaaaacttggctgtcgaaacatttttctctctgactgctgcttgaatgttcttggaggctgtttcttatgtatgggttttttttaatgtgatcccttcatttgaatattaatggctttttccattaaagaataaaatattttggcaatgg

SEQ ID NO: 21203 - DNA, 560 bp, Homo sapiens
ggatgaacaaaataagggactaattgatgaaattacaaagaaaaatattcagctaaagaaggagatccaaaagcttgaaacggagttacaagaggctaccaaagaattccagattaaagaggatattcctgaaacaaagatgaaattcttatcagttgaaactcctgagaatgacagccagttgtcaaatatctcctgttcgtttcaagtgagctcgaaagttccttatgagatacaaaaaggacaagcacttatcacctttgaaaaagaagaagttgctcaaaatgtggtaagcatgagtaaacatcatgtacagataaaagatgtaaatctggaggttacggccaagccagttccattaaattcaggagtcagattccaggtttatgtagaagtttctaaaatgaaaatcaatgttactgaaattcctgacacattgcgtgaagatcaaatgagagacaaactagagctgagcttttcaaagtcccgaaatggaggcggagaggtggaccgcgtggactatgacagacagtccgggagtgcagtcatcacgtttgtgg

SEQ ID NO: 21204 - DNA, 689 bp, Homo sapiens
accgctatgacatgattacgaatttaatacgactcactatagggaatttggccctcgaggccaagaattcggcacgagagctaaaatccctcttcggatccacagtcaaccgccctgaacacatcctgcaaaaagcccagagaaagcacttatgattgaattagaaggaagtctgtaaaatttggctgtgatcatagggtaagatgttatctaacagaagccggaaacccaatgtctcctgctgagatgcttgagtgcctgtcaggatctaaaaattttcctcaagaattactgtatgtcattggaaagacgttcttttgagtggcttccaggagccagacagagggagcgccatggattactacagaaaatatgcagctatctttctggtcacattgtcggtgtttctgcatgttctccattccgctcctgatgtgcaggattgcccagaatgcacgctacaggaaaacccattcttctcccagccgggtgccccaatacttcagtgcatgggctgctgcttctctagagcatatcccactccactaaggtccaagaagacgatgttggtccaaaagaacgtcacctcagagtccacttgctgtgtagctaaatcatataacagggtcacagtaatggggggtttcaaagtggagaaccacacggcgtgccactgcagtacttgttat

SEQ ID NO: 21205 - DNA, 460 bp, Homo sapiens
  misc_feature (1)...(460): n = a,t,c or g
cccctttganaaccgttatgacatgattacgaatttaatacgactcactatagggaatttggccctcgaggccaagaattcggcacgagcattactttaagtactgcaaaatctcagcattggctctgctgaagatggtgatgcatgccagatcgggaggcaacttggaagtgatgggtctgatgctaggaaaggtggatggtgaaaccatgatcattatggacagttttgctttgcctgtggagggcactgaaacccgagtaaatgctcaggctgctgcatatgaatacatggctgcatacatagaaaatgcaaaacaggttggccgccttgaaaatgcaatcgggtggtatcatagccaccctggctatggctgctggctttctgggattgatgttagtactcagatgctcaatcagcagttccaggaaccatttgtagcagtggtgattgatccaac

SEQ ID NO: 21206 - DNA, 908 bp, Homo sapiens
tttgactcctttgactcaacagctatgacatgattacgaatttaatacgactcactatagggaatttggccctcgaggccaagaattcggcacgaggttcccgtggtgcggagggtcaaggcccacacccggaaacctagcgaggtaaagttgcgtcttggttgtagagacgacaacttctccgcttcctcggcgatggcggcgtccgggagcggtatggcccagaaaacctgggaactggccaacaacatgcaggaagctcagagtatcgatgaaatctacaaatacgacaagaaacagcagcaagaaatcctggcggcgaagccctggactaaggagtgaggagtcaccattactttaagtactgcaaaatctcagcattggctctgctgaagatggtgatgcatgccagatcgggaggcaacttggaagtgatgggtctgatgctaggaaaggtggatggtgaaaccatgatcattatggacagttttgctttgcctgtggagggcactgaaacccgagtaaatgctcaggctgctgcatatgaatacatggctgcatacatagaaaatgcaaaacaggttggccgccttgaaaatgcaatcgggtggtatcatagccaccctggctatggctgctggctttctgggattgatgttagtactcagatgctcaatcagcagttccaggaaccatttgtagcagtggtgattgatccaacaagaacaatatccgcagggaaagtgaatcttggcgcctttaggacatacccaaagggctacaaacctcctgatgaaggaccttctgagtaccagactattccacttaataaaatagaagattttggtgtacactgcaaacaatattatgccttagaagtctcatatttcaaatcctctttggatcgg

SEQ ID NO: 21207 - DNA, 452 bp, Homo sapiens
  misc_feature (1)...(452): n = a,t,c or g
tttgaancctgtaaacagctatgacatgattacgaatttaatacgactcactatagggaatttggccctcgaggccaagaattcggcacgagaacgccaacgccctggctcgctacgccagcatctgtcagcagaatggactggtacctattgttgaaccagaggtaattcctgatggagaccatgacctggaacactgccagtatgttactgagaaggtcctggctgctgtctacaaggccctgaatgaccatcatgtttacctggagggcaccctgctaaagcccaacatggtgactgctggacatgcctgcaccaagaagtatactccagaacaagtagctatggccaccgtaacagctctccaccgtactgttcctgcagctgttctggcatctgctttttgctggtggcatgagtgaagaggatgccactctnaacctcaatgctat

SEQ ID NO: 21208 - DNA, 781 bp, Homo sapiens
ctatagggaatttggccctcgaggccaagaattcggcacgaggggaataatagcacatgatttgggctctagaattccagtcccctttctcggggtcaggttctaccctccatgtgagaatatttttcccaggactagagcacaacataatttttatttttggcaaagccagaaaaagatctttcattttgcacctgcagccaagcaaatgcctgccaaattttagatttaccttgttagaagaggtggccccatattaacaaattgcatttgtgggaaacttaaccacctacaaggagataagaaagcaggtgcaacactcaagtctattgaataatgtagttttgtgatgcattttatagaatgtgtcacactgtggcctgatcagcaggagccaatatcccttactttaaccctttctgggatgcaatactaggaagtaaagtgaagaatttatctctttagttagtgattatatttcacccatctctcaggaatcatctcctttgcagaatgatgcaggttcaggtcccctttcagagatataataagcccaacaagttgaagaagctggcggatctagtgaccagatatatagaaggactgcagccactgattctctcttgtccttcacatcacccatgttgagacctcagcttggcactcaggtgctgaagggtaatatggactcagccttgcaaatagccagtgctagttctgacccaaccacagaggatgctgacatcatttgtattatgttccaaggctactacagagaagg

SEQ ID NO: 21209 - DNA, 923 bp, Homo sapiens
  misc_feature (1)...(923): n = a,t,c or g
gctgatgaaaccctctcggctttatgatgcttatgaactgaaacatgccttgaagggagctggaacaaatgaaaaagtactgacagaaattattgcttcaaggacacctgaagaactgagagccatcaaacaagtttatgaagaagaatatggctcaagcctggaagatgacgtggtgggggacacttcagggtactaccagcggatgttggtggttctccttcaggctaacagagaccctgatgctgtaattgatgaagctcaagttgaacaagatgctcaggctttatttcaggctggagaacttaaatgggggacagatgaagaaaagtttatcaccatctttggaacacgaagtgtgtctcatttgagaaaggtgtttgacaagtacatgactatatcaggatttcaaattgaggaaaccattgaccgcgagacttctggcaatttagagcaactactccttgctgttgtgaaatctattcgaagtatacctgcctaccttgcagagaccctctattatgctatgaagggagctgggacagatgatcataccctcatcagagtcatggtttccaggagtgagattgatctgtttaacatcaggaaggagtttaggaagaattttgccacctctctttattccatgattaagggagatacatctggggactataagaaagctcttctgctgctctgtggagaagatgactaacgtgtcacggggaagagctccctgctgtgtgcctgcaccaccccactgccttccttcagcacctttagctgcatttgtatgccagtgcttaacacattgccttattcatactagcatgctcatgaccaacacatacacgtcatagaagaaaatagtggtgcttctttctgatctctagtggagatctctttgctgctgnagactaaag

SEQ ID NO: 21210 - DNA, 667 bp, Homo sapiens
tatgacatgattacgaatttaatacgactcactatagggaatttggccctcgaggccaagaattcggcacgaggggatggcagcggtggctggaggaccttgtgtccttcctggagagaaaggtccttcctgcctggtggccctggggacctgaaccttctgctgtccctcttgtccttgatgggctgggctgaggacagccccactggtccctcattgggagcttggctgcatcagggaatccccaccccgggctaggtttgcttggagcatcgggatgccaggatccccagtccttgttaccctcatgtgccactcccagggctgcccccgagatggtttctctgctgaagaggaataactgtgggaaagccctggacatcgcccgccaggcccgagacatgctgggggggaatgggatttctgacgagtatcacgtgatccggcacgccatgaacctggaggccgtgaacacctacgaaggtacacatgacattcacgccctgatccttgggagagctatcacgggaatccaggcgttcacggccagcaagtgagccgctccatcaggggcccgaaactctcaagcccctttctggagagatgcctggctggaccgtaggagcgctgtgctctgagcttagaaagggaggtggcggatggagtg

SEQ ID NO: 21211 - DNA, 732 bp, Homo sapiens
gagcgcccagagagacaccagagaacccaccatggccccctttgagcccctggcttctggcatcctgttgttgctgtggctgatagcccccagcagggcctgcacctgtgtcccaccccacccacagacggccttctgcaattccgacctcgtcatcagggccaagttcgtggggacaccagaagtcaaccagaccaccttataccagcgttatgagatcaagatgaccaagatgtataaagggttccaagccttaggggatgccgctgacatccggttcgtctacacccccgccatggagagtgtctgcggatacttccacaggtcccacaaccgcagcgaggagtttctcattgctggaaaactgcaggatggactcttgcacatcactacctgcagtttcgtggctccctggaacagcctgagcttagctcaacgccggggcttcaccaagacctacactgttggctgtgaggaatgcacagtgtttccctgtttatccatcccctgcaaactgcagagtggcactcattgcttgtggacggaccagctcctccaaggctctgaaaagggcttccagtcccgtcaccttgcctgcctgcctcgggagccagggctgtgcacctggcagtccctgcggtcccagatagcctgaatcctgcccggagtggaagctgaagcctgcacagtgtccaccctgttcccactcccatctttcttccggacaatgaa

SEQ ID NO: 21212 - DNA, 366 bp, Homo sapiens
gccggttgctgcttgctgtgagtgtctctagggtgatacgtgggtgagaaaggtcctggtccgcgccagagcccagcgcgcctcgtcgccatgcctcggaaaattgaggaaatcaaggacttcctgctcacagcccgacgaaaggatgccaaatctgtcaagatcaagaaaaataaggacaacgtgaagtttaaagttcgatgcagcagatacctttacaccctggtcatcactgacaaagagaaggcagagaaactgaagcagtccctgccccccggtttggcagtgaaggaactgaaatgaaccagacacactgattggaactgtattatattaaaatactaaaaatcctaaaaaaaaaaaaaa

SEQ ID NO: 21213 - DNA, 1142 bp, Homo sapiens
gggaaaacactgaagagaaccgccggcagttccgagaaatcctcttctctgtggacagttccatcaaccagagcatcgggggtgtgatccttttccacgagaccctctaccagaaggacagccagggaaagctgttcagaaacatcctcaaggaaaaggggatcgtggtgggaatcaagttagaccaaggaggtgctccccctggcaggaacaaacaaagaaaccaccattcaagggcttgatggcctctcagagcgctgtgctcagtacaagaaagatggtgttgactttgggaagtggcgtgctgtgctgaggattgccgaccagtgtccatccagccctcgctatccaggaaaacgccaacgccctggctcgctacgccagcatctgtcagcagaatggactggtacctattgttgaaccagaggtaattcctgatggagaccatgacctggaacactgccagtatgttactgagaaggtcctggctgcctgctaaagcccaacatggtgactgctggacatgcctgcaccaagaagtatactccagaacaagtagctatggccaccgtaacagctctccaccgtactgttcctgcagctgttcctggcatctgctttttgtctggtggcatgagtgaagaggatgccactctcaacctcaatgctatcaacctttgccctctaccaaagccctggaaactaagtttctcttatggacgggccctgcaggccagtgcactggctgcctggggtggcaaggctgcaaacaaggaggcaacccaggaggcttttatgaagcgggccatggctaactgccaggcggccaaaggacagtatgttcacacgggttcttctggggctgcttccacccagtcgctcttcacagcctgctatacctactagggtccaatgcccgccagcctagctccagtgcttctagtaggagggctgaaagggagcaacttttcctccaatcctggaaattcgacacaattagatttgaactgctggaaatacaacacatgttaaatcttaagtacaagggggaaaaaataaatcagttattgaaacataaaaatgaataccaaggacctgatcaaatttcacacagcagtttccttgcaacactttcagctccg

SEQ ID NO: 21214 - DNA, 659 bp, Homo sapiens
ccatgttcgacaggctggtctcgaactcccacctcagcctcccaaactgctgggattacaggtgtgagccaccgtgaccagccaatgtgccttcttatagtgtctactcattggtctttgttctgcccagtgataacaatgggataacgcctgctacacatcttcattgtgaaacccttcccctgtgctgagattaaatgaactctaagattattaaatagtatattttccttgacagcctagcgtttgatgattttaaagccttatgtataaataaaccaaaggaagtaagcagtcatattgctaatttgctaactcctatctattgaatggtgaagttttaaaaatttccccaggtaagtttaagattcaaacaccatctattgagcacctacattgtgtgccaggtagtaaaataggtgctttcatacacattgtctcaattcctgtgaggtcagaattatctctgcatttgaaacttgaggaaacatgctcagagtgcaagaagcttccttgcctgagatcacctagaaaggaaccctcagagccggcaactgaatcttggtccctgtgatgtcaagcccattgctctcccactgcagaacatggcctctagattaatgccaccgattcaggaacacctccgacagtcttgaaat

SEQ ID NO: 21215 - DNA, 508 bp, Homo sapiens
ctgagtcagtctcgccagctgccggtctttcgggggctccgtaactttctatccgtccgcgtcagcgccttgccaccctcatctccaatatgcctggtccgacccccagtggcactaacgtgggatcctcagggcgctctcccagcaaagcagtggccgcccgggcggcgggatccactgtccggcagaggaaaaatgccagctgtgggacaaggagtgcaggccgcacaacctcggcaggcaccggggggatgtggcgattctacacagaagattcacctgggctcaaagttggccctgttccagtattggttatgagtcttctgttcatcgcttctgtatttatgttgcacatttggggcaagtacactcgttcgtagattcagttacatccatctgtcatctgaagaaggaggaaaaaacccaacatttcttggaccaaaagtatagtgactatctgttcatgagagaaattttctgtaagcttgctgttttacaggggatttat

SEQ ID NO: 21216 - DNA, 501 bp, Homo sapiens
gcagaaactatatggatttccctataagattcctgctgttgttgaggaaaaggatgcagtatttattccagcagggtgggataatgataagaaaataggaatattacatgaaaattttcaaacattaaaagcagaagataattttgaagacatcataactaaaccacctgttcgaaagtttgtacatgagaaggaaattatggcagaagatgatcaggtgtttcttatgaagctacagtcccttttagcaaagcaaccaccaactgcagctggaaggcctgtggatgcctcaccaagagtcccaggaggctccccacgaacaccaaatagatctgtatcatctaatgttgccagcgtgtcacccattcctgctgggtcaaaaaaaattgatccaaacatgaaagctggagctacaagtgaaggcgttctggcaaatttcttcaacagtttgttgagtaaaaagacaggctctcctggaagtcctggtgctggtggggtgca

SEQ ID NO: 21217 - DNA, 658 bp, Homo sapiens
  misc_feature (1)...(658): n = a,t,c or g
gagctccaggccaaccctttttgcccacccccatctgcccacaggacgtgatgcctgggccacggcaggagctgctctgtgccttctggaagagtgacagcgacaggggagggcactgggccaccgagggctgccaggtgctgggcagcaagaacggcagcaccacctgccaatgcagccacctgagcagctttgcgatccttatggctcattatgacgtggaggactggaagctgaccctgatcaccagggtgggactggcgctgtcactcttctgcctgctgctgtgcatcctcactttcctgctggtgcggcccatccagggctcgcgcaccaccatacacctgcacctctgcatctgcctcttcgtgggctccaccatcttcctggccttctgctggatgagcctcgaaggcctggagctctactttcttgtggtgcgcgtgttccaaggccagggcctgagtacgcgctggctctgcctgatcggctatggcgtgcccctgctcatcgtgggcgtctcggctgccatctacagcaagggctacggccgcccagatactgctggntggactttgagcagggcttcctctggagcttcttgggacctgtgaccttcataatttgngcaatgctgcattttcgtgataaccgctgg

SEQ ID NO: 21218 - DNA, 341 bp, Homo sapiens
cagctatgacatgattacgaatttaatacgactcactatagggaatttggccctcgaggccaagaattcggcacgagctgcactgtgacaagctgcatgtggatcctgagaacttcaagctcctgggaaatgtgctggtgaccgttttggcaatccatttcggcaaagaattcacccctgaggtgcaggcttcctggcagaagatggtgactggagtggccagtgccctgtcctccagataccactgagctcactgcccatgatgcagagctttcaaggataggctttattctgcaagcaatcaaataataaatctattctgctaagaaaaaaaaaaaaaa

SEQ ID NO: 21219 - DNA, 452 bp, Homo sapiens
  misc_feature (1)...(452): n = a,t,c or g
tgttngatncccttggatgntgtattttacnccctggggatgatgtatataactatctattcgatgatgaagataccccaccaaacccaaaaaaagagatctctcgaggatccgaattcgcggtgccaaagtgatgggccagcacacagaccagcacgttgcccaggagcctgaagttctcaggatccacgtgcagcttgtcacagtgcagctcactcagtgtggcaaaggtgcccttgaggttgtccaggtgagccaggccatcactaaaggcaccgagcactttcttgccatgagccttcaccttagggttgcccataacagcatcaggagtggacagatccccaaaggactcaaagaacctctgggtccaagggtagaccaccagcagctgccagggcctcaccaccaacttctccacgtcaccttgcccacaggcanaacggcagact

SEQ ID NO: 21220 - DNA, 471 bp, Homo sapiens
  misc_feature (1)...(471): n = a,t,c or g
gnnnnnnnnnnntttgnnnctttganancngntatgacatgattacgaatttaatacgactcactatagggaatttggccctcgaggccaagaattcggcacgagcgctcccagacatgggtccctcggcttcctgcctcggaagcgcagcagcaggcatcgtgggaaggtgaagagcttccctaaggatgacccatccaagccggtccacctcacagccttcctgggatacaaggctggcatgactcacatcgtgcgggaagtcgacaggccgggatccaaggtgaacaagaaggaggtggtggaggctgtgaccattgtagagacaccacccatggtggttgtgggcattgtgggctacgtggaaacccctcgaggcctccggaccttcaagactgtctttgctgagcacatcagtgatgaatgcaagaggcgtttctataagaattggcataaatctaagaagaaggc

SEQ ID NO: 21221 - DNA, 463 bp, Homo sapiens
  misc_feature (1)...(463): n = a,t,c or g
gnngnnnnggnnnnnnngttgntnnnnnaggtgntacttcctatgacatgattacgaatttaatacgactcactatagggaatttggccctcgaggccaagaattcggcacgagggaagttgctgagaaatggggtggaatagggaactgtaatggccactgaagcacgtgagagaccctcgcaaaatgatgtgaaaggaccagtttcttgaagtccagtgtttccacggctggatacctgtgtgtctccataaaagtcctgtcaccaaggacgttaaaggcattttattccagcgtcttctagagagcttagtgtatacagatgagggtgtccactgctgctttccttcggaatccagtgcttccacagagattagcctgtagcttatatttgacattcttcactgtctgttgtttacctaccgtagctttttaccgttcacttccccttccaactatgtcc

SEQ ID NO: 21222 - DNA, 556 bp, Homo sapiens
  misc_feature (1)...(556): n = a,t,c or g
ggcaatttccattcttttaaatgggtgaaaaatggtaatataacaatatatgatatataaaccttaaatgaaaaaaatgatctattgcagatatttgatgtagttttcttttttaaattaatcagaaaccccacttccattgtattgtctgacacatgctctcaatatataataaatgggaaatgtcgattttcaataatagacttatatgcaggctgtcgttccggttatgttgtgtaagtcaactcttcagcctcattcactgtcctggcttttatttaaagaaaaaaaaggcagtattccctttttaaatgagctttcaggaagttgctgagaaatggggtggaatagggaactgtaatggccactgaagcacgtgagagaccctcgcaaaatgatgtgaaaggaccagtttcttgaagtccagtgtttccacggctggatacctgtgtgtctccataaaagtcctgtcaccaaggacgttaaaggcattttattccagcgtcttctagagagcttantgtatacagatgagggtgtccactgctgctttcct

SEQ ID NO: 21223 - DNA, 469 bp, Homo sapiens
  misc_feature (1)...(469): n = a,t,c or g
tttgaaatccgtatgncatgattacgaatttaatacgactcctatagggaatttggccctcgaggccaagaattcggcacgaggtgtcccaattgagaagatttacaacaaaacccagcgggagaagtttgcctgggccattgacatggctgatgaagactatgagttttagccagtctcaagaggcagagttctgtgaagaggaacagtgtggtttgggaaagatggataaactgagcctcacttgccctcgtgcctgggggagagaggcagcaagtcttaacaaaccaacatctttgcgaaaagataaacctggagatattataagggagagctgagccagttgtcctatggacaacttatttaaaaatatttcagatatcaaaattctagctgtatgatttgttttgaattttgtttttattttcaagagggcaagtggatgggaatttgtcagcgttctaccagg

SEQ ID NO: 21224 - DNA, 726 bp, Homo sapiens
gcggcacgagggctgatgccaaggtcatgaaggatgcaaagacgaagaaggtagtagagtcaaagaagaaggctgttcagagactggaggaacagttgatgaagctggaagttcaagccacagaccgagaggaaaataaacagattgccctgggaacctccaaactcaattatctggaccctaggatcacagtggcttggtgcaagaagtggggtgtcccaattgagaagatttacaacaaaacccagcgggagaagtttgcctgggccattgacatggctgatgaagactatgagttttagccagtctcaagaggcagagttctgtgaagaggaacagtgtggtttgggaaagatggataaactgagcctcacttgccctcgtgcctgggggagagaggcagcaagtcttaacaaaccaacatctttgcgaaaagataaacctggagatattataagggagagctgagccagttgtcctatggacaacttatttaaaaatatttcagatatcaaaattctagctgtatgatttgttttgaattttgtttttattttcaagagggcaagtggatgggaatttgtcagcgttctaccaggcaaattcactgtttcactgaaatgtttggattctcttagctactgtatgcaaagtccgattatattggtgcgtttttacagttagggttttgcaataacttctatattttaatagaaataaattcct

SEQ ID NO: 21225 - DNA, 513 bp, Homo sapiens
  misc_feature (1)...(513): n = a,t,c or g
caacagctatgacatgattacgaatttaatacgactcactatagggaatttggccctcgaggccaagaattcggcacgagtgcaagaggcgtttctataagaattggcataaatctaagaagaaggcctttaccaagtactgcaagaaatggcaggatgaggatggcaagaagcagctggagaaggacttcagcagcatgaagaagtactgccaagtcatccgtgtcattgcccacacccagatgcgcctgcttcctctgcgccagaagaaggcccacctgatggagatccaggtgaacggaggcactgtggccgagaagctggactggcccgcgagaggcttgagcagcaggtacctgtgaaccaagtgtttgggcaggatgagatgatcgacgtcatcgggtgaccaagggcaangctncaaagggtcncantcgttggcncccaaaaattgccccaanacccncgaggcttgccaaggggcctnntttgggcatnggatctnntnggacc

SEQ ID NO: 21226 - DNA, 410 bp, Homo sapiens
  misc_feature (1)...(410): n = a,t,c or g
tttgaanactttgtatgacatgattacgaatttaatacgactcactatagggaatttggccctcgaggccaagaattcggcacgagccggctctctgtggatggcaggtcatgtgaagacatcaatgagtgcagcagcagcccctgtagccaggagtgtgccaacgtctacggctcctaccagtgttactgccggcgaggctaccagctcagcgatgtggatggagtcacctgtgaagacatcgacgagtgcgccctgcccaccgggggccacatctgctcctaccgctgcatcaacatccctggaagcttccagtgcagctgcccctcgtctggctacaggctggcccccaatggccgnaactgncaagaactttgatnaatgtgtgactggcatccacaactgctcca

SEQ ID NO: 21227 - DNA, 948 bp, Homo sapiens
ggtctgctcctgcttcgtgggctaccagctgctgtctgatggtgtctcctgtgaagatgtcaatgaatgcatcacgggcagccacagctgccggcttggagaatcctgcatcaacacagtgggctctttccgctgccagcgggacagcagctgcgggactggctatgagctcacagaggacaatagctgcaaagatattgacgagtgtgagagtggtattcataactgcctccccgattttatctgtcagaatactctgggatccttccgctgccgacccaagctacagtgcaagagtggctttatacaagatgctctaggcaactgtattgatatcaatgagtgtttgagtatcagtgccccgtgccctatcgggcatacatgcatcaacacagagggctcctacacgtgccagaagaacgtgcccaactgtggccgtggctaccatctcaacgaggagggaacgcgctgtgttgatgtggacgagtgcgcgccacctgctgagccctgtgggaagggacatcgctgcgtgaactctcccggcagtttccgctgcgaatgcaagacgggttactattttgacggcatcagcaggatgtgtgtcgatgtcaacgagtgccagcgctaccccgggcgcctgtgtggccacaagtgcgagaacacgctgggctcctacctctgcagctgttccgtgggcttccggctctctgtggatggcaggtcatgtgaagacatcaatgagtgcagcagcagcccctgtagccaggagtgtgccaacgtctacggctcctaccagtgttactgccggcgaggctaccagctcagcgatgtggatggagtcacctgtgaagacatcgacgagtgcgccctgcccaccgggggccacatctgctcctaccgctgcatcaacatccctggaagcttccagtgcagctgcccctcgtctgg

SEQ ID NO: 21228 - DNA, 483 bp, Homo sapiens
atccgctatgacatgattacgaatttaatacgactcactatagggaatttggccctcgaggccaagaattcggcacgagttcctgcgcaggagccgcagggccgtaggcagccatggcgcccagccggaatggcatggtcttgaagccccacttccacaaggactggcagcggcgcgtggccacgtggttcaaccagccggcccgtaagatccgcagacgtaaggcccggcaagccaaggcgcgccgcatcgccccgcgccccgcgtcgggtcccatccggcccatcgtgcgctgccccacggttcggtaccacacgaaggtgcgcgccggccgcggcttcagcctggaggagctcagggtggccggcattcacaagaaggtggcccggaccatcggcatttctgtggatccgaggaggcggaacaagtccacggagtccctgcaggccaacgtgcagcggctgaaggagtaccgctccaaac

SEQ ID NO: 21229 - DNA, 1154 bp, Homo sapiens
gatcaatgatgcaatgctgatggctgtgcagttgctggacagcagcaaccaggaggagcggctgcccgaagggagtgtctcactcatcatcctgctcaccgatggcgaccccactgtgggggagactaaccccaggagcatccagaataacgtgcgggaagctgtaagtggccggtacagcctcttctgcctgggcttcggtttcgacgtcagctatgccttcctggagaagctggcactggacaatggcggcctggcccggcgcatccatgaggactcagactctgccctgcagctccaggacttctaccaggaagtggccaacccactgctgacagcagtgaccttcgagtacccaagcaatgccgtggaggaggtcactcagaacaacttccggctcctcttcaagggctcagagatggtggtggctgggaagctccaggaccgggggcctgatgtgctcacagccacagtcagtgggaagctgcctacacagaacatcactttccaaacggagtccagtgtggcagagcaggaggcggagttccagagccccaagtatatcttccacaacttcatggagaggctctgggcatacctgactatccagcagctgctggagcaaactgtctccgcatccgatgctgatcagcaggccctccggaaccaagcgctgaatttatcacttgcctacagctttgtcacgcctctcacatctatggtagtcaccaaacccgatgaccaagagcagtctcaagttgctgagaagcccatggaaggcgaaagtagaaacaggaatgtccactcaggttccactttcttcaaatattatctccagggagcaaaaataccaaaaccagaggcttccttttctccaagaagaggatggaatagacaagctggagctgctggctcccggatgaatttcagacctggggttctcagctccaggcaacttggactcccaggacctcctgatgttcctgactatgctgcttaccaccccttccgccgtctggccatcttgcctgcttcagcaccaccagccacctcaaatcctgatccagctgtgtctcgtgtcatgaatatgaaaatcgaagaaacaaccatgacaacccaaaccccaggggttgaggtgactggcaagtatgata

SEQ ID NO: 21230 - DNA, 519 bp, Homo sapiens
  misc_feature (1)...(519): n = a,t,c or g
tnnnnnntnnnnntttgantctgaanncccngctatgacatgattacgaatttaatacgactcactatagggaatttggccctcgaggccaagaattcggcacgaggcatgatggtagcagaaaccttatcaccaaggtgcaggagctgacttcttccaaagagttgtggttccgggcagcggtcattgccgtgcccattgctggagggctgattttagtgttgcttattatgttggccctgaggatgcttcgaagtgaaaataagaggctgcaggatcagcggcaacagatgctctcccgtttgcactacagctttcacggacaccattccaaaaaggggcaggttgcaaagttagacttggaatgcatggtgccggtcagtgggcacgagaactgctgtctgacctgtgataaaatgagacaagcagacctcagcaacgataagatcctctcgcttgttcactggggcatgtacagtgggcacgggaagctggaattcgtatgacggagtcttatct

SEQ ID NO: 21231 - DNA, 749 bp, Homo sapiens
gctatgacatgattacgaatttaatacgactcactatagggaatttggccctcgaggccaagaattcggcacgaggcctgcttctctagacttcttgatcctcagaactcaaattccccactcacccatggctgcctggactctcttgcaagcacgacagacatctgccaagccaaacaggcccgaaaccactctggcaccaccatacccacattggaatgctgtcatgaagacatgtgcaattacagagggctgcacgatgttctctctcctcccaggggtgaggcctcaggacaaggaaacaggtatcagcatgatggtagcagaaaccttatcaccaaggtgcaggagctgacttcttccaaagagttgtggttccgggcagcggtcattgccgtgcccattgctggagggctgattttagtgttgcttattatgttggccctgaggatgcttcgaagtgaaaataagaggctgcaggatcagcggcaacagatgctctcccgtttgcactacagctttcacggacaccattccaaaaaggggcaggttgcaaagttagacttggaatgcatggtgccggtcagtgggcacgagaactgctgtctgacctgtgataaaatgagacaagcagacctcagcaacgataagatcctctcgcttgttcactggggcatgtacagtgggcacgggaagctggaattcgtatgacggagtcttatctgaactacacttactgaacagcttgg

SEQ ID NO: 21232 - DNA, 536 bp, Homo sapiens
  misc_feature (1)...(536): n = a,t,c or g
gtgnnnnnntttggnacngttgactgattacgaatttaatacgactcactatagggaatttggccctcgaggccaagaattcggcacgagttagcctttttagaggttggaggacaaaaatatattattatccatatcttctgattttgccttccagaaaaaaaatgtcatttgtgcctggcaatgcctaagcaccctgtaagtgggtattagatctcaaatattgactgcaaaaatggagagttagtgaagagaaagcttaaatgtccaatagcagattatttcctcaaacttgtttggtgttaatttcgcaaaagcagccgtgaaggcaaaccttatggatgattctggttctattgcaagcggtggcttttcaggcatgcctctcagcttggaaacactcccatgcagagtcatcggtgtcatcctaacggagacagctatgtggctgcaatctgcgtgtgacctatacttaccaagcacaaaggttactggaatttgntcagcatatctgtcacagtaaatggaaatttttc

SEQ ID NO: 21233 - DNA, 982 bp, Homo sapiens
gctatgacatgattacgaatttaatacgactcactatagggaatttggccctcgaggccaagaattcggcacgaggcgggatttgatggcgtgatgtctcacagaaagttctccgctcccagacatgggtccctcggcttcctgcctcggaagcgcagcagcaggcatcgtgggaaggtgaagagcttccctaaggatgacccatccaagccggtccacctcacagccttcctgggatacaaggctggcatgactcacatcgtgcgggaagtcgacaggccgggatccaaggtgaacaagaaggaggtggtggaggctgtgaccattgtagagacaccacccatggtggttgtgggcattgtgggctacgtggaaacccctcgaggcctccggaccttcaagactgtctttgctgagcacatcagtgatgaatgcaagaggcgtttctataagaattggcataaatctaagaagaaggcctttaccaagtactgcaagaaatggcaggatgaggatggcaagaagcagctggagaaggacttcagcagcatgaagaagtactgccaagtcatccgtgtcattgcccacacccagatgcgcctgcttcctctgcgccagaagaaggcccacctgatggagatccaggtgaacggaggcactgtggccgagaagctggactgggcccgcgagaggcttgagcagcaggtacctgtgaaccaagtgtttgggcaggatgagatgatcgacgtcatcggggtgaccaagggcaaaggctacaaaggggtcaccagtcgttggcacaccaagaagctgccccgcaagacccaccgaggcctgcgcaaggtggcctgtattggggcatggcatcctgctcgtgtagccttctctgtggcacgcgctgggcagaaaggctaccatcaccgcactgagatcaacaagaagatttataagattggccagggctaccttatcaaaggacggg

SEQ ID NO: 21234 - DNA, 445 bp, Homo sapiens
  misc_feature (1)...(445): n = a,t,c or g
ggaaggtgtccaccctgcccgcgatcacactgaagctgggaggcaaaggctacaagctgtccccagaggactacacgctcaaggtgtcgcaggccgggaagaccctctgcctgagcggcttcatgggcatggacatcccgccacccagcgggccactctggatcctgggcgacgtcttcatcggccgctactacactgtgtttgaccgtgacaacaacagggtgggcttcgccgaggctgcccgcctctagttcccaaggcgtccgcgcgccagcacagaaacagaggagagtcccagagcaggaggcccctggcccggcggcccctcccacacacacccacacactcgcccgcccactgtcctgggcgccctggaagccggcggcccaagcccgacttgctgttttgttctgtggttttcccctccctgggttcanaaatgctg

SEQ ID NO: 21235 - DNA, 651 bp, Homo sapiens
  misc_feature (1)...(651): n = a,t,c or g
gttaatacgactcactatagggaatttggccctcgaggccaagaattcggcacgagcgggacggaaaactggcggcttggtttgttcagcgcgtcgcggtcatggctctcgtttcaggcctccacggtgtgcacctggagtcaggagcgcgcttgtgcgtacagttcggttcagttactaaaagatgtaactgaactgcagatccttggtgaaatatctttcaacaaatctctatatgagggactgaatgcagagaaccacagaactaagatcactgtcgtcttcctgaaagatgagaagtaccattctttgcctatcatcattaaaggcagcgttggtggacttctggtgttgatcgtgattctggtcatcctgttcaagtgtggcttttttaaaagaaaatatcaacaactgaacttggagagcatcaggaaggcccagctgaaatcagagaatctgctcgaagaagagaattaggacctgctatccactgggagaggctatcagccagtcctgggacttggagacccagcatcctttgcattactttttccttcaggatgatctaagcacatggactgtggtagaatattaatttttaaccatacattgcccaaaatgnctgtgcattgtgccaaaaagtaacntaag

SEQ ID NO: 21236 - DNA, 606 bp, Homo sapiens
gggcgcaggcgcaagataagctaggagccgcgcgagtcgtagtgtcgctgtttgcgggtctccgcgcgggaccggggcgcagcggggtcgctgaggcgagggtgtcatgtcagacaacgaggacaattttgatggcgacgactttgatgatgtggaggaggatgaagggctagatgacttggagaatgccgaagaggaaggccaggagaatgtcgagatcctcccctctggggagcgaccgcaggccaaccagaagcgaatcaccacaccatacatgaccaagtacgagcgagcccgcgtgctgggcacccgagcgctccagattgcgatgtgtgcccctgtgatggtggagctggagggggagacagatcctctgctcattgccatgaaggaactcaaggcccgaaagatccccatcatcattcgccgttacctgccagatgggagctatgaagactggggggtggacgagctcatcatcaccgactgagctggagtcatcttcctgcccttgccccatgcccaattttcattctcactttatatgtgtaaataataaaatattcaactttccaaaaaaaaaagtcgacgcggccgcgaattcca

SEQ ID NO: 21237 - DNA, 444 bp, Homo sapiens
  misc_feature (1)...(444): n = a,t,c or g
cngctatgacatgattacgaatttaatacgactcactatagggaatttggccctcgaggccaagaattcggcacgagggtgtccccttgggacgtcaatgcttactattcggtatctgaccatgtggtagtctttccagctggactcctccaacccccattcttccaccctggctatcccagagccgtgaactttggcgctgctggcagcatcatggcccacgagctgttgcacatcttctaccagctcttactgcctgggggctgcctcgcctgtgacaaccatgccctccaggaagctcacctgtgcctgaagcgccattatgctgcctttccattacctagcagaacctccttcaatgactccctcacattcttagagaatgctgcagacgttggggggctagccatcgcgctgcaggcatacagcaagaggctgttacgg

SEQ ID NO: 21238 - DNA, 496 bp, Homo sapiens
  misc_feature (1)...(496): n = a,t,c or g
ntttgaancccattganncccaacagctatgacatgattacgaatttaatacgactcactatagggaatttggccctcgaggccaagaattcggcacgaggacgaccgcgtccacctcgcaggtgcgccagaactaccaccaggactcagaggccgccatcaaccgccagatcaacctggagctctacgcctcctacgtttacctgtccatgtcttactactttgaccgcgatgatgtggctttgaagaactttgccaaatactttcttcaccaatctcatgaggagagggaacatgctgagaaactgatgaagctgcagaaccaacgaggtggccgaatcttccttcaggatatcaagaaaccagactgtgatgactgggagagcgggctgaatgcaatggagtgtgcattacatttggaaaaaaatgtgaatcagtcactactggaactgcacaaactggccactgacaaaaatgacccccatttgtgtgactt

SEQ ID NO: 21239 - DNA, 757 bp, Homo sapiens
tgacatgattacgaatttaatacgactcactatagggaatttggccctcgaggccaagaattcggcacgagcacactgggaaacatcattaaatcacgtgcctgcttccccttcgccttctgccgtgattgtcagtttcctgaggcctccccagccacgcttcctgtacagcctgcagaactgtgagtcaattaaacctcttttcttcataaattacccagtttctcatagttctttatagcagtgtgaaaacagactaatggacccttctggttgaaggaatgcagccattctgcttgtttgactatgtcctttctattcatctctatttcctgggaggtgtttatccaagtgcaataggaggtattggtgaccgcacagtcccctcagtgttctgctagtaaatagttgaaggttgatcattgatcttctgcgttttcagtctggcatggaaaagcccctgtgcaactggtaaagatatcaataagcaccaggaggtatctaaatccaccaggagccataggcatcacgttgacgtccatttaccagtcttccctggcaagattcttctgaattgtgctgccttggccaaaagaggtatgggaggggctgggcgcagtggcttgtgcctgtaatcccaacattttgggaaaccaattcaggtggatcgttagaggtcaggggttcaagaccatcctggccaacatggtgacatcccatctctactaaaaatacaataagttagctgggtttgggg

SEQ ID NO: 21240 - DNA, 476 bp, Homo sapiens
  misc_feature (1)...(476): n = a,t,c or g
tttgaanctctnaactccctatgattaccaatttaatacgactcactatagggaatttggccctcgaggccaagaattcggcacgaggacacagataaatttaaaggattctgctatgtagaattcgatgaagtggattcccttaaggaagccttgacatacgatggtgcactgttgggcgatcggtcacttcgtgtggacattgcagaaggcagaaaacaagataaaggtggctttggattcagaaaaggtggaccagatgacagaggcttcagggatgacttcttagggggcaggggaggtagtcgcccaggcgaccggcgaacaggcccccccatgggcagccgcttcagagatggccctcccctccgtggatccaacatggatttcagagaacccacagaagaggaaagagcacagagaccacgacttcancttaaaacctnganagtcgtganggcccctcaatcaagtac

SEQ ID NO: 21241 - DNA, 537 bp, Homo sapiens
  misc_feature (1)...(537): n = a,t,c or g
tnatntgaaatcctcnnganncccttntatgacatgattacgaatttaatacgactcactatagggaatttggccctcgaggccaagaattcggcacgagaccagatgacagaggcttcagggatgacttcttagggggcaggggaggtagtcgcccaggcgaccggcgaacaggcccccccatgggcagccgcttcagagatggccctcccctccgtggatccaacatggatttcagagaacccacagaagaggaaagagcacagagaccacgactccagcttaaacctcgaacagtcgcgacgcccctcaatcaagtagccaatcccaactctgctatcttcgggggtgccaggcctagagagggaagtcgttcaaaaggagcaagaatgagcctgcggttgggagggaatggggccgtggggggttagagcaggaccacagcctggtgangtcccggcagcccgtctgancccgcactctggcctgcattgcctctacagcggaacacagcttggantgcatgtaactgtacaa

SEQ ID NO: 21242 - DNA, 350 bp, Homo sapiens
aaagagcacagagaccacgactccagcttaaacctcgaacagtcgcgacgcccctcaatcaagtagccaatcccaactctgctatcttcgggggtgccaggcctagagaggaagtcgttcaaaaggagcaagaatgagcctgcggttgggagggaatggggcgtggggggttagagcaggaccacagcctggtgagtccccgggcagccgtcctgcagccgccactcctgcgcctgccattggcctcctcacagcggaaacacagcttgtgagtgcatgtcagctgttaacaagtggtttttagtacattctgggctttgctgtatctatctagtgcctgtttgtgcgtt

SEQ ID NO: 21243 - DNA, 490 bp, Homo sapiens
cggacttcgacacctacgacgatcgggcctacagcagcttcggcggcggcagagggtcccgcggcagtgctggtggccatggttcccgtagccagaaggagttgcccacagagcccccctacacagcatacgtaggaaatctacctttcaatacggttcagggcgacatagatgctatctttaaggatctcagcataaggagtgtacggctagtcagagacaaagacacagataaatttaaaggattctgctatgtagaattcgatgaagtggattcccttaaggaagccttgacatacgatggtgcactgttgggcgatcggtcacttcgtgtggacattgcagaaggcagaaaacaagataaaggtggctttggattcagaaaaggtggaccagatgacagaggcttcagggatgacttcttagggggcaggggaggtagtcgcccaggcgaccggcgaacaggcccccccatgggcagccgcttcag

SEQ ID NO: 21244 - DNA, 455 bp, Homo sapiens
gggcccgcccctcacacaggcatggccacttcgtcgtattcatcccgaccttcctcctcatcaaaggttgccttggcatcatcagcatccagacactgaagctccacgttcctgaagatgagcggcagcaggacgcgccgcagcggcacagtgaggatgaggacgaagggcagggccagggaggccggcgtggacttcaccacccacagcactgccaggcagatgatctggatgcccgtgaataagtgcatgcgccaggtcttcacccgcttgacgtagggcacatctgggtgatacttgggtggcttgaacagaagcaagatgcggtcaaagagctggatgccgctgagcgacgtgacccccatgtacaggaagatcccaaagagcacagccaatgggatccgacgcagcacagcccccatgacgatggacaggcccacgaggctggcgatgag

SEQ ID NO: 21245 - DNA, 717 bp, Homo sapiens
cgggcgtcgggaagacgctgctggtgaaacggctgcaggaggtgagctcccgggatgggaaaggcgacctgggggagccgcccccgacacggcccacggtgggcaccaatcttactgacatcgtggcacagagaaagatcaccatccgggagcttggggggtgcatgggccccatctggtccagttactatggaaactgccgttctctcctgtttgtgatggacgcctctgaccccacccagctctctgcatcctgtgtgcagctcttaggtctcctttctgcagaacaacttgcagaagcatcggtgctgatactcttcaataaaatcgacctaccctgttacatgtccacggaggagatgaagtcattaatcaggcttccagacatcattgcttgtgccaagcagaacatcaccacggcagaaatcagcgcccgtgaaggcactggcttagcaggggtgctggcctggctccaggccacccacagagccaacgattgactgcacggcagaggcgcagctggcctgagctggggagaggtggcagagggcagtatggctttgctgccaatagtttcttctcacaggggcagaataacccaaagtaaccctacatgatggggctctgtgctgagatgcaatgatgtgtaaactgaggcatgtggagatggaagttgacatctggcctctgaaaaaagtgccccaggggctaggcatg

SEQ ID NO: 21246 - DNA, 498 bp, Homo sapiens
  misc_feature (1)...(498): n = a,t,c or g
ggagcttcagcaatggtacctcatggcggaaagagacagtccagctatggccaggccccagtggctattcatccctggcaaccctggagggcagcatggatggagaggagcaggccccccagctctacgtcctgtatgagaaaggccggaaccactacacagagagcatctccgtggccaaaatcagtgtctatgggacactctgagctgtgccactgccacaggggtattctgcctttaggactacacggatctgnnaanggtatnntnangangcnttctanncttacccctccaacacccctctgcctctggctcaggttgctcaaagcacagatcctctcttaccccgtccccaggtttgaaacacatagcctcatttcaaggtgtagccaggttcccccgactttcctctgggatataaaaaagggggtaagggggcaaagagagccctctgggcctctcctcccatacacactacactggcccttttccccc

SEQ ID NO: 21247 - DNA, 952 bp, Homo sapiens
caaagaaacccattcatgtgtatggaatcaactgtttatagtcttttcacactgcagctttgggaaaacttcattccttgatttgtgtttgtcttggccttcctggtgtgcagtactgctgtagaaaagtattaatagcttcatttcatataaacataagtaactcccaaacacttatgtagaggactaaaaatgtatctggtatttaagtaatctgaaccagttctgcaagtgactgtgttttgtattactgtgaaaataagaaaatgtagttaattacaatttaaagagtattccacataacttcttaatttctacattccctcccttactcttcgggggtttcctttcagtaagcaacttttccatgctcttaatgtattcctttttagtaggaatccggaagtattagattgaatggaaaagcacttgccatctctgtctaggggtcacaaattgaaatggctcctgtatcacatacggaggtcttgtgtatctgtggcaacagggagtttccttattcactctttatttgctgctgtttaagttgccaacctcccctcccaataaaaattcacttacacctcctgcctttgtagttctggtattcactttactatgtgatagaagtagcatgttgctgccagaatacaagcattgcttttggcaaattaaagtgcatgtcatttcttaatacactagaaaggggaaataaattaaagtacacaagtccaagtctaaaactttagtacttttccatgcagatttgtgcacatgtgagagggtgtccagtttgtctagtgattgttatttagagagttggaccactattgtgtgttgctaatcattgactgtagtcccaaaaaagccttgtgaaaatgttatgccctatgtaacagcagagtaacataaaataaaagtacattttataaaccattaaaaaaaaaaaaaa

SEQ ID NO: 21248 - DNA, 563 bp, Homo sapiens
  misc_feature (1)...(563): n = a,t,c or g
acagctatgactgattacgaatttaatacgactcactatagggaatttggccctcgaggccaagaattcggcacgaggtggctttgaagaactttgccaaatactttcttcaccaatctcatgaggagagggaacatgctgagaaactgatgaagctgcagaaccaacgaggtggccgaatcttccttcaggatatcaagaaaccagactgtgatgactgggagagcgggctgaatgcaatggagtgtgcattacatttggaaaaaaatgtgaatcagtcactactggaactgcacaaactggccactgacaaaaatgacccccatttgtgtgacttcattgagacacattacctgaatgagcaggtgaaagccatcaaagaattgggtgaccacgtgaccaacttgcgcaagatgggagccgcccgaatctggcttggcggaatatctctttgacaagcacaccctgggaacagtgataatgaaagctaagcctcgggctaatttcccatagccgtgggngactttcctggcacccaagcagtgcattctggttgggttcct

SEQ ID NO: 21249 - DNA, 508 bp, Homo sapiens
tgaggtggcggtcggtctcgccttgtcgccagctccattttcctctctttctcttcccctttccttcgcgcccaagagcgcctcccagcctcgtagggtggtcacggagcccctgcgccttttccttgctcgggtcctgcgtccgcgcctgccccgccatgaatgaggagtacgacgtgatcgtgctgggcaccggcctgacggaatgtatcctgtcaggtataatgtcagtgaatggcaagaaagttcttcatatggatcgaaacccttactacggaggagagagtgcatctataacaccattggaagatttatacaaaagatttaaaataccaggatcaccacccgagtcaatggggagaggaagagactggaatgttgacctgattcccaaattcctcatggctaacgggcagctggtaaagatgctactgtatacagaggtgactcgctacctggacttcaaggtggtggagggcagctttgtctacaaggggggcaagatcta

SEQ ID NO: 21250 - DNA, 521 bp, Homo sapiens
  misc_feature (1)...(521): n = a,t,c or g
nnnnnnnnnnnnnnnncnnnnnnnngnnnnnnnngnnnnnngnnnnnnntnnntngcccctttgaanccttgnttgaacccatttaatacgactcactatagngaatttggccctcgaggccaagaattcggcacgagcttgaattctacagcaggagcaagcggtggtgcttatggtagccaaatgatgggaggcatgggcttgtcaaaccagtccagctacgggggcccagccagccagcagctgagtgggggttacggaggcggctacggtggccagagcagcatgagtggatacgaccaagttttacaggaaaactccagtgattttcaatcaaacattgcataggtaaccaaggagcagtgaacagcagctactacagtagtggaagccgtgcatctatgggcgtgaacggaatgggagggntgtctagcatgtncagtatgagtgggtggatgggggaatgnaattgatcgatcctgatcactggactctttgggncaaccctttnttttttttt

SEQ ID NO: 21251 - DNA, 1040 bp, Homo sapiens
tgacatgattcgaatttaatacgactcctatagggaatttggccctcgaggccaagaattcggcacgagaccttacagagctactgagaatgacatttataattttttttcaccgctcaaccctgtgagagtacacattgaaattggtcctgatggcagagtaactggtgaagcagatgtcgagttcgcaactcatgaagatgctgtggcagctatgtcaaaagacaaagcaaatatgcaacacagatatgtagaactcttcttgaattctacagcaggagcaagcggtggtgcttacgaacacagatatgtagaactcttcttgaattctacagcaggagcaagcggtggtgcttatggtagccaaatgatgggaggcatgggcttgtcaaaccagtccagctacgggggcccagccagccagcagctgagtgggggttacggaggcggctacggtggccagagcagcatgagtggatacgaccaagttttacaggaaaactccagtgattttcaatcaaacattgcataggtaaccaaggagcagtgaacagcagctactacagtagtggaagccgtgcatctatgggcgtgaacggaatgggagggatgtttagtatatccagtatgattggtaaatgggaaatataattgattctgatcactcttggtcagcttctctttctttatctttctttctccttttttaagaaaacgagttaagtttaacagttttgcattacaggcttgtgattcatgcttactgtaaagtggaagttgagattattttaaaacttcaagctcagtaattttgaacactgaaacattcatctaggacataataacaaagttcagtattgaccataactgttaaaacaatttttagctttcctcaagttagttatgttgtaggagtgtacctaagcagtaagcgtatttaggttaatgcagtttcacttatgttaaatgttgctcttataccacaaatacattgaaaacttcggatgcatgttgagaaacatgcccttctgtaaactcaa

SEQ ID NO: 21252 - DNA, 639 bp, Homo sapiens
tttgaaaccctattacatgatcacgaatttaatacgactcactatagggaatttggccctcgaggccaagaattcggcacgagctagtctggaactgacagagataagtagagaaaatgttccaaagtctggcacgccccagcttcctagtaatagaggaggagacatttctaaaatcgcacccagaactgtctacaccaagagcaaagattcgactgtcaatcacactttgacttgcaccaaaataccacctatgaactatgtgtcaaagagcctgccattcgctgcaaggttgaacacccccatgggccctggacgaactgttgtcgttaaaggagaagtgaatgcaaatgccaaaagctttaatgttgacctactagcaggaaaatcaaaggatattgctctacacttgaacccacgcctgaatattaaagcatttgtaagaaattcttttcttcaggagtcctggggagaagaagagagaaatattacctctttcccatttagtcctgggatgtactttgagatgataatttactgtgatgttagagaattcaaggttgcagtaaatggcgtacacagcctggagtacaaacacagatttaaagagctcagcagtattgacacgctggaaattaa

SEQ ID NO: 21253 - DNA, 570 bp, Homo sapiens
gagcccggctgcggatctgggaagcgcctcttcacggcactgggatccgcatctgcctgggatcatcaagccctagaagctgggtttctttaaattagggctgccgttttctgtttctccctgggctgcggaaagccagaagattttatctagcttatacaaggctgctggtgttccctctttttttccacgagggtgtttttggctgcaattgcatgaaatcccaatggtgtagaccagtggcgatggatctaggagtttaccaactgagacatttttcaatttctttcttgtcatccttgctggggactgaaaacgcttctgtgagacttgataatagctcctctggtgcaagtgtggtagctattgacaacaaaatcgagcaagctatggatctagtgaaaagccatttgatgtatgcggtcagagaagaagtggaggtcctcaaagagcaaatcaaagaactaatagagaaaaattcccagctggagcaggagaacaatctgctgaagacactggccagtcctgagcagcttgcccagtttcaggcccagctgcagactggctccc

SEQ ID NO: 21254 - DNA, 1294 bp, Homo sapiens
aacagtttatgacatgattacgaatttaatacgactcactatagggaatttggccctcgaggccaagaattcggcacgagcagaaatgctgttcctttgggaaccacggccaaagaagagatggagcggttctggaataagaatataggttcaaaccgtcctctgtctccccacattactatctacagttggtctcttcccatggcgatgtccatctgccaccgtggcactggtattgctttgagtgcaggggtctctctttttggcatgtcggccctgttactccctgggaactttgagtcttatttggaacttgtgaagtccctgtgtctggggccagcactgatccacacagctaagtttgcacttgtcttccctctcatgtatcatacctggaatgggatccgacacttgatgtgggacctaggaaaaggcctgaagattccccagctataccagtctggagtggttgtcctggttcttactgtgttgtcctctatggggctggcagccatgtgaagaaaggaggctcccagcatcatcttcctacacattattacattcacccatctttctgtttgtcattcttatctccagcctgggaaaagttctccttatttgtttagatccttttgtattttgagatctccttggagcagtagagtacctggtagaccataatagtggaaaagggtctagttttccccttgtttctaaagatgaggtggctgcaaaaactccccttttttgcccacagcttgcctactctcggcctagaagcagttattctctctccatattgggctttgatttgtgctgagggtcagcttttggctccttcttcctgagacagtggaaacaatgccagctctgtggcttctgccctggggatgggccgggttggggggtgggttggtgaggctttgggtgccactgcctgtgggttgctggcttaaaggacaattctcttcattggtgagagcccaggccattaacacctacacagtgttattgaaagaagagaggtgggggtggaggggaattagtctgtcccagctagagggaagataaagagggctagttagttcttggagcagctgcttttgaggagaaaatatatagctttggacacgaggaagatctagaaaattatcattgaacatattaatggttatttctttttcttggatttccagaaaagcctcttaattttatgctttctcatcgaagtaatgtaccctttttttctgaaactgaattaaatactcattttatctttgaaaaaaaaaaaaaa

SEQ ID NO: 21255 - DNA, 506 bp, Homo sapiens
  misc_feature (1)...(506): n = a,t,c or g
gaatttgaatnccatagctatgacatgattacgaatttaatacgactcactatagggaatttggccctcgaggccaagaattcggcacgagtggccactgacaaaaatgacccccatttgtgtgacttcattgagacacattacctgaatgagcaggtgaaagccatcaaagaattgggtgaccacgtgaccaacttgcgcaagatgggagcgcccgaatctggcttggcggaatatctctttgacaagcacaccctgggagacagtgataatgaaagctaagcctcgggctaatttccccatagccgtggggtgacttccctggtcaccaaggcagtgcatgcatgttggggtttcctttaccttttctataagttgtaccaaaacatccacttaagttctttgatttgtaccattccttcaaataaagaaatttggtacccaggtgttgctttgaggtcttgggatgaatcagaaatctatccaggctatcttccagattcctt

SEQ ID NO: 21256 - DNA, 561 bp, Homo sapiens
  misc_feature (1)...(561): n = a,t,c or g
gatccaggttgaaaactgaccgtgtgatgtttgatttgggcttcatttcgtgtgtaggagcacggttagactcactgttaaggaanctggatgcacttctctaaaaggctgcactttccgtgagcacttttcgtggtacaatccacatgacccactttctcccctgggggacgttggttcaaaggttggtagcacttggggagagtatcttaacacagtttcttgacagcagctctggaacttagtatttctgccccgagttttgccacactgagactttgagtagctcctggtggactcaaccctgttcaactcagagacgggcctcctctcactgatgcaaagctttaaggcttctctgactgttctgaaactcttcgtattcttgtcaagtctaaagagactgaagaaaagatttaaatactaataaaaatcagtagataatttctgtaggttctgctggaggaatacaaactgtttggtgntttaaatttaagtgtagaaattgnagaatgtggaattagcacagatccttcctggctttctgtttcacttgatcat

SEQ ID NO: 21257 - DNA, 492 bp, Homo sapiens
ggtaactcacgtagtgctccacctacacgagggcccccgccatcttatggtggaagcagtcgctatgatgattacagcagctcacgtgacggatatggtggaagtcgagacagttactcaagcagccgaagtgatctctactcaagtggtcgtgatcgggttggcagacaagaaagagggcttcccccttctatggaaagggggtaccctcctccacgtgattcctacagcagttcaagccgcggagcaccaagaggtggtggccgtggaggaagccgatctgatagagggggaggcagaagcagatactagaaacaaacaaaactttggaccaaaatcccagttcaaagaaacaaaaagtggaaactattctatcataactacccaaggactactaaaaggaaaaattgtgttactttttttaaattccctgttaagttcccctccataatttttatgttcttgtgaggaaaaaagtaaaacatgtttaat

SEQ ID NO: 21258 - DNA, 510 bp, Homo sapiens
  misc_feature (1)...(510): n = a,t,c or g
accgntatgactgattacgaatttaatacgactcactatagggaatttggccctcgaggccaagaattcggcacgaggtggacgaaccttgaaggagcctccaagcctgaaccaaagcactacagatcacctgctatcttcatagcaccatgagtgaagaatctgatggaaagcttattgaagacagcctgattcagctgagatgtcactttacatggaagttgttaattgaagcccctgaaattcctgatttagaaaacaggatctgggaagagattcagttcctggacaccaaatacaatgtgggaatacacaacctactagcctatgtgaaacacctgaaaggccagaatgaggaagccctggtcagcttgaaaaaggctgaagacttaattcagaaagaacatgccaaccaagcagatattagaagtctggtgacctggggcaactttgcctgggtgtattaccacatgggcagattggcagaagcccagacttacctggacaagg

SEQ ID NO: 21259 - DNA, 540 bp, Homo sapiens
tgaacttgcggggtttttcagtatctacgattcatagatctggaattcgcggccgcgtcgaccttttgcccagttcggttctgacctcgatgctgccactcaacaacttttgagtcgtggcgtgcgtctaactgagttgctgaagcaaggacagtattctcccatggctattgaagaacaagtggctgttatctatgcgggtgtaaggggatatcttgataaactggagcccagcaagattacaaagtttgagaatgctttcttgtctcatgtcgtcagccagcaccaagccttgttgggcactatcagggctgatggaaagatctcagaacaatcagatgcaaagctgaaagagattgtaacaaatttcttggctggatttgaagcttaaactcctgtggattcacatcaaataccagttcagttttgtcattgttctagtaaattagttccatttgtaaaagggttactctcatactccttatgtacagaaatcacatgaaaaataaaggttccataatgcgttaaaaaaaaaaaaaa

SEQ ID NO: 21260 - DNA, 777 bp, Homo sapiens
taaatccatccatccaaaggcagagaaccaaaggggccatggaaggttctctgtgctcctcctacccttccagtgccctaggcctggcgactgcccctgccttttagacccgccctccccttttatacctgctcttgttctactgagaaaagcctctccagcaataatgttttctagtcacttcctccgtctccgggacggcgtgcctggacactgtaccgactttgatagatttctacactgaggtttgaattcatatcgcctgagttgcttttacttctctatacaaaatgattttgaagagattttaaagacgttcccttttgtattctcttcctcatccaccgccactgggcctgtcactgatggtggctctggtgtgaagtttgctttgtactgagggttggggtggggaagcaatttgtattttattgtttcttagcacaagcaggtgaactgggagcagctctgtgactccccctctttcacttcatagctcaccaggactgttttataaactgctgtatttggaaaccccttctttacttcccaggccagcaagctcttcactgaaactggttgaagggtgttgcacccttttgggcctagaattctgaactttatctgttctgtttctgtgggaggagaaggggaagtatgttttggggggctgcttcctgtctgagtaagccctcaggagcctctgctcccctgtgaacccactgaaccttctgagcccccactgcttctatggggctctctcttctgccttctcag

SEQ ID NO: 21261 - DNA, 553 bp, Homo sapiens
ggtaaaatgggtatattgatgataatacccacattacaggatggttactgaggaccaaagatacatgtaaaatagggctttgtaaactccacagggactgttctatagcagtcatcatttgtctttgaacgtacccaaggtcacatagctgggatttgaactgagccgtgcagctgggatttgaaccaggccttctgatttcaaggtccgagctctgtcctctgtcagtcatgcgtccactttcccttcccctgtgactcctcccttccccactctgctcccagcccctaccttgagaccctcttctctgggcccagagagaggcgtcctggtgaggacaaggtacaggcaaggatgatccagggattgggcctgggactcaggcctcctaagtgtttggttcctccctccaaacactcattagttcactcattcattcattccacaaacatttactgagggccccggaatcagtggactccgaggggactgagacaagccctgccctggggtgggggtggggggcaaggtacagttgattctacatttggat

SEQ ID NO: 21262 - DNA, 415 bp, Homo sapiens
  misc_feature (1)...(415): n = a,t,c or g
gctatnacatgattacgaatttaatacgactcactatagggaatttggccctcgaggccagcaggtgaaagccatcaaagaattgggtgaccacgtgaccaacttgcgcaagatgggagcgcccgaatctggcttggcggaatatctctttgacaagcacaccctgggagacagtgataatgaaagctaagcctcgggctaatttccccatagccgtggggtgacttccctggtcaccaaggcagtgcatgcatgttggggtttcctttaccttttctataagttgtaccaaaacatccacttaagttctttgatttgtaccattccttcaaataaagaaatttggtacccaaaaaaaaanaaaaaaannnntttantnangnggcngaannntnntccctttaagggggggtaa

SEQ ID NO: 21263 - DNA, 514 bp, Homo sapiens
  misc_feature (1)...(514): n = a,t,c or g
tctatgacatgattacgaatttaatacgactcactatagggaatttggccctcgaggccaagaattcggcacgagcgtctgaggttatcaataagctcctagtccagacgccatgggtcatttcacagaggaggacaaggctactatcacaagcctgtggggcaaggtgaatgtggaagatgctggaggagaaaccctgggaaggctcctggttgtctacccatggacccagaggttctttgacagctttggcaacctgtcctctgcctctgccatcatgggcaaccccaaagtcaaggcacatggcaagaaggtgctgacttccttgggagatgccataaagcacctggatgatctcaagggcacctttgcccagctgagtgaactgcactgtgacaagcttcatgtggatcctgagaacttcaagctcctggggaaatgttgctggtgacgttttggcaatccctttcngcnaataatcaccctgangttcngcttcctggcataataatgt

SEQ ID NO: 21264 - DNA, 517 bp, Homo sapiens
gccagaagtcatccttgagttgggctggtcacagccttgtgatgtgtggagtataggctgcatcatctttgaatactatgtgggattcaccctcttccagacccatgacaacagagagcatctagccatgatggaaaggatcttgggtcctatcccttcccggatgatccgaaagacaagaaagcagaaatatttttaccggggtcgcctggattgggatgagaacacatcagctgggcgctatgttcgtgagaactgcaaaccgctgcggcggtatctgacctcagaggcagaggaacaccaccagctcttcgatctgattgaaagcatgctagagtatgaaccagctaagcggctgaccttgggtgaagcccttcagcatcctttcttcgcccgccttcgggctgagccgcccaacaagttgtgggactccagtcgggatatcagtcggtgacgatcaggccctgggcccccctgcatcttttatagcaatgggtgtcaatcaaggcactggggg

SEQ ID NO: 21265 - DNA, 708 bp, Homo sapiens
ggtgggcagcccccaccccctccctctggtcctcttcccccatggcaacaacagcagcagcagcctccgccaccccctccgcccagcagcagtatggcttccagtacccccttgccatggcagcaaagatccctccccgcggcggcgatggcccgagccatgagagtgaggactttccgcgcccattggtgacccttccaggcagacagcctcagcaacgcccctggtggacaggatggttcggcaaagcagcctgagttatttttgtggacggaatcggaacacgctggctccatatcgtgaaatttttattaatttttttttttttcctttgttacttctttatcttttcctttcttcagactccgtccaaggagatgctctccccggtcttctgctgcaatttagattcctttcccttctctccagttctccttcccttaccaaggagaggggagcaaatggttttgggcaagggctttggccattcatgtcaagctggttgtgggtttttcaaggtgccatagccacccccaaagatgtttgtttaaagcgtggggttttttaatctctgccacccttgtcaagggagtcttgtaaagttgccgagggtaggttcatctccaggtttcgggattcccatccgtcctggcgatcctgccagcagtgggtgggcagcctgagctccctcgggctcgcctgccagcc

SEQ ID NO: 21266 - DNA, 532 bp, Homo sapiens
  misc_feature (1)...(532): n = a,t,c or g
gccgggtgagtgagagagttggttggtgttgggccggaggaaagcgggaagactcatcggagcgtgtggatttgagccgccgcattttttaaccctagatctcgaaatgcatcgtgattcctgtccattggactgtaaggtttatgtaggcaatcttggaaacaatggcaacaagacggaattggaacgggcttttggctactatggaccactccgaagtgtgtgggttgctagaaacccacccggctttgcttttgttgaatttgaagatccccgagatgcagctgatgcagtccgagagctagatggaagaacactatgtggctgccgtgtaagagtggaactgtcgaatggtgaaaaaagaagtagaaatccgtggcccacctccctcttggggtcgtcgccctcgagatgattatcgtaggaggatcctccaactcctctaactctccaagaaaggaaaacttctctcncaacccgnncaagtcccttccaaanataaggnaaannananatcnnnnccccgnngaaa

SEQ ID NO: 21267 - DNA, 1006 bp, Homo sapiens
acccttgctatgacatgattacgaatttaatacgactcactatagggaatttggccctcgaggccaagaattcggcacgaggccgagagtcgtcggggtttcctgcttcaacagtgcttggacggaacccggcgctcgttccccaccccggccggccgcccatagccagccctccgtcacctcttcaccgcaccctcggactgccccaaggcccccgccgccgctccagcgccgcgcagccaccgccgccggccgccgcctctccttagtcgccgccatgacgaccgcgtccacctcgcaggtgcgccagaactaccaccaggactcagaggccgccatcaaccgccagatcaacctggagctctacgcctcctacgtttacctgtccatgtcttactactttgaccgcgatgatgtggctttgaagaactttgccaaatactttcttcaccaatctcatgaggagagggaacatgctgagaaactgatgaagctgcagaaccaacgaggtggccgaatcttccttcaggatatcaagaaaccagactgtgatgactgggagagccgggctgaatgcaatggagtgtgcattacatttggaaaaaaatgtgaatcagtcactactggaactgcacaaactggccactgacaaaaatgacccccatttgtgtgacttcattgagacacattacctgaatgagcaggtgaaagccatcaaagaattgggtgaccacgtgaccaacttgcgcaagatgggagcgcccgaatctggcttggcggaatatctctttgacaagcacaccctggggagacagtgataatgaaagctaagcctcgggctaatttccccatagccgtggggtgacttccctggtcaccaaggcagtgcatgcatgttggggtttcctttaccttttctataagttgtaccaaaacatccacttaagttctttgatttgtaccattccttcaaataaagaaatttggtacccaaaaaaaaaaaaaa

SEQ ID NO: 21268 - DNA, 651 bp, Homo sapiens
tatgactgattacgaatttaatacgactcactatagggaatttggccctcgaggccaagaattcggcacgagcccaccacaatggatgaccctcctcctcctgaagatgatgagaacaaagaaaagcgaacagatgatatccctgtttgggaccaagaattcctgaaagttgaccaaggaacactttttgaactcattctggctgcaaactacttagacatcaaaggtttgcttgatgttacatgcaagactgttgccaatatgatcaaggggaaaactcctgaggagattcgcaagaccttcaatatcaaaaatgactttactgaagaggaggaagcccaggtacgcaaagagaaccagtggtgtgaagagaagtgaaatgttgtgcctgacactgtaacactgtaaggattgttccaaatactagttgcactgctctgtttataattgttaatattagacaaacagtagacaaatgcagcagcaagtcaattgtattagcagaatattgtcctcattgcatgtgtagtttgagcacagatcccaaaccttacggccaagtttcttctagtatgatggaaagtttcttttttctttgctctgaataaaactgaactgtgggttctctataagtggcaaaaaaaaaaaaaa

SEQ ID NO: 21269 - DNA, 800 bp, Homo sapiens
gcttatatttgatccaaataactaccttcctaaagaaagcatgctgaaaactaccctcactgcctttggatttgcttcagctgacctcatcgagattggcttggaaggaaaaggctttgagccaacattggaagctctttttgggaagcaaggatttttcccagacagtgtcaacaaagctttgtactgggttaatggtcaagttcctgatggtgtctctaaggtcttagtggaccactttggctataccaaagatgataaacatgagcaggatatggtaaatggaataatgctcagtgttgagaagctgattaaagatttgaaatccaaagaagtcccggaagccagagcctacctccgcatcttgggagaggagcttggttttgccagtctccatgacctccagctcctgggaaagctgcttctgatgggtgcccgcactctgcaggggatcccccagatgattggagaggtcatcaggaagggctcaaagaatgacttttttcttcactacatcttcatggagaatgcctttgaactccccactggagctggattacagttgcaaatatcttcatctggagtcattgctcccggagccaaggctggagtaaaactggaagtagccaacatgcaggctgaactggtggcaaaaccctccgtgtctgtggagtttgtgacaaatatgggcatcatcattccggacttcgctaggagtggggtccagatgaacaccaacttcttccacgaatcgggtctggaggctcatgttgcccaaaaagctgggaagctgaatttat

SEQ ID NO: 21270 - DNA, 553 bp, Homo sapiens
ggctcaggctcctggaaaggaccgtccacccctccgcgctggcggtgtggacgcggaactcagcggagaaacgcgattgagagcagtgtgtggattacactatcactggaaaaatacgaattgagaagaaggaaaagactggaagatgcagaccttggttcctgttagtggaaacactgtaaggtcccagaaatggaaaagaaaatgaaataaatcagcagttatgaggcagagcctaagagaactatggcaacatcaggtgactgtcccagaagtgaatcgcagggagaagagcctgctgagtgcagtgaggcgggtctcctgcaggagggagtacagccagaggagtttgtggccatcgcggactacgctgccaccgatgagacccagctcagttttttgagaggagaaaaaattcttatcctgagacaaaccactgcagattggtggtggggtgagcgtgcgggctgctgtgggtacattccggcaaaccatgtggggaagcacgtggatgagtacgaccccgaggacacgtggcaggatgaagagtact

SEQ ID NO: 21271 - DNA, 752 bp, Homo sapiens
gctttgtggccagccgattggagagtgtggtttatgcatcgtggagccgggttcaggctgacctcaactgcatgaaggatctctatgcaatgagtgcaaactggaagtacttgataaatctttgtggtatggattttcccattaaaaccaacctagaaattgtcaggaagctcaagttgttaatgggagaaaacaacctggaaacggagaggatgccatcccataaagaagaaaggtggaagaagcggtatgaggtcgttaatggaaagctgacaaacacagggactgtcaaaatgcttcctccactcgaaacacctctcttttctggcagtgcctacttcgtggtcagtagggagtatgtggggtatgtactacagaatgaaaaaatccaaaagttgatggagtgggcacaagacacatacagccctgatgagtatctctgggccaccatccaaaggattcctgaagtcccgggctcactccctgccagccataagtatgatctgtctgacatgcaagcagttgccaggtttgtcaagtggcagtactttgagggtgatgtttccaagggtgctccctacccgccctgcgatggagtccatgtgcgctcagtgtgcattttcggagctggtgacttgaactggatgctgcgcaaacaccacttgtttgccaataagtttgacgtggatgttgacctctttgccatccagtgtttggatgagcatttgagacacaaagctttggagacatta

SEQ ID NO: 21272 - DNA, 694 bp, Homo sapiens
  misc_feature (1)...(694): n = a,t,c or g
ggtaatttagcagaactcttactggtagaaaaaatagacctgaattatgtgtaactttttggaaggtttaatctgatatcaaaatantcattgaaatacaattccattgtaaagttgtacagaaagttatagagattatattgtgatgctggaacttggagtgagacacacatcatttggcatttgagttgaatggtaattcacagtaatgctgccgttgttcgggacttaaagacacttgacctgtttgggctgttgccacttaaaagttcatgaccacaaatgtccacagtgtcttcctctgaggaaactcgaatcctgaaatggaaattctttgtggcagataactggcttatgacaccttgaaaagttcaagtgctcatataacacaccacactgaaccccctttcctacagcaatatgttcactatgttaccaatttgcaacttgtgcttcaatagtggaatctactttcattgttaacactgagctaaagaaaaaaagccgtgtgttttatgaatgaccttatctgtttcctggataatacctttaagaataatgtcctgagtcaggcgtggtggtgcgtgcatctagtcccaactatttgggaggctgaggcaggaggatcgcttgagcccaggagtttaaagctgcagatgccctgtggttgcacctgtgaataactgcacttcac

SEQ ID NO: 21273 - DNA, 550 bp, Homo sapiens
ctttggcaaaagtaattgcaacttcttctaggtattctattgtccgttcctctggaggttttagtcctggtcccaggggttccaccagttggtcaaccagtcccattttctttgccctgtctgcacgaatgcttctaccagtcagcatcatgtccaaagcagcaggcacacccaccattttgggcagcctttgtgtgcctcctgctcctggtaaggcccccagcaaaacttcaggggtacctaatactgtttttctgtcttttgttgctattctgtattggcatgaaatggcaacctcaagtcctcctcccaggcaggatccattgatggcagccacaataggctttgtggacttttcaagtttctcaactattctctgtgcttcttgtgatagctgtgttacttcttgaagggtcttgcaagcggctaacatgttgatatcagcacctgcaataaagcagcctggctttgatgagataaggacggcacttctgatttgatcactagcccagatttcattcataacttctgagaactctgaatgtagctc

SEQ ID NO: 21274 - DNA, 345 bp, Homo sapiens
ggaaatggacacaagtcccctgtgtttctccattctgttggttttatgcatctttatccaatcaagtgcccttggacaaagcctgaaaccagagccatttggaagaagagctcaagctgttgaaacaaacaaaacgctgcatgagatgaagaccagattcctgctctttggagaaaccaatcagggctgtcagattcgaatcaatcatccggacacgttacaggagtgcggcttcaactcctccctgcctctggtggacggcgtgctagaaaactggatctggcagatggtggccgcgctgaagtctcagccggcccagccagtgaacgtggggctggtggactg

SEQ ID NO: 21275 - DNA, 805 bp, Homo sapiens
aggtccaaaaaaaagatgggcattaattctagtcatttaaaaaattctatagatcagaggttacatggccaagattgaaacttagaggagtatagttacataaaagaaggcaaaacgatgtataaatgaaagaaattgagatggtgcacgatgcacagttgaagtgaacttgcggggtttttcagtatctacgattcatagatctggaattcgcggccgcgtcgacttttgaggtattgatgactttattattctgcaggtacatgtccaggggcccagcctctgggcccagtaactcagctactctttgtggctttcttcatggctttttttgtgggctgccacgcccatctttatcaccagaatgaggaactcctggaagttaactgcaccatcagtgttgatatccaactctttgaaccagacgtctgcaccctttttcctgatatactgaggacactcggtctctagcaatttcttcaggtcatccctgtagacggcatggaaattcccctttatcagggagtacttgtggtagacgtcgatgatagagttcaaggctttctccagctcggtcaacatgatgcccacggacttgccccaccaggtcttgtcgacgcggccgcgaattccagatctatgaatcgtagatactgaaaaaccccgcaagttcacttcaactgtgcatcgtgcaccatctcaatttctttcatttatacatcgttttgccttcttttatgtaactatactcctctaagtttcaatcttggccatgtaacctctgatctatatgaattttttaaag

SEQ ID NO: 21276 - DNA, 497 bp, Homo sapiens
  misc_feature (1)...(497): n = a,t,c or g
gaaattaccaagaaagcctggaccccgggtgaaacggagaaatggacacaagtcccctgtgtttctccattctgttggttttatgcatctttatccaatcaagtgcccttggacaaagcctgaaaccagagccatttggaagaagagctcaagctgttgaaacaaacaaaacgctgcatgagatgaagaccagattcctgctctttggagaaaccaatcagggctgtcagattcgaatcaatcatccggacacgttacaggagtgcggcttcaactcctccctgcctctggtgatgataatccacgggtggtcggtggacggcgtgctagaaaactggatctggcagatggtggccgcgctgaagtctcagccggcccagccagtgaacgtggggctggtggactggatcaccctggcccacgaccactacaccatcgccgtccgcaacacccgccttgtgggcaaggagtcgcggtcttctccggttgntgctggg

SEQ ID NO: 21277 - DNA, 804 bp, Homo sapiens
gggctccggaaaggcgtttgggatgccaacgatgaggctgctgtcatttgtggtgttggctctatttgctgtcactcaagcagaggaaggagccaggcttttggcttccaaatcactgctgaacagatacgccgtggagggacgagacctgaccttgcagtacaacatctacaatgttggctcaagtgctgcattagacgtggaactatctgatgattccttccctccagaagactttggcattgtgtctggaatgctcaatgtcaaatgggaccggattgcccctgctagcaatgtctcccacactgtggtcctgcgccctctcaaggctggttatttcaacttcacctcggcaacaattacttacctggcccaggaggatgggcccgttgtgattggctctaccagtgcacctggacagggaggaatcctggctcagcgggagtttgacaggcgattctcccctcattttctggactgggcagcctttggggtcatgacccttccctccatcggcatccccctgctattgtggtactccagcaagaggaaatatgacactcccaaaacgaagaagaactgattggggcttccacagccctcctctcccaagaaatccaggctcctctcccaagaaatccaggtgctttccagactccaaagggtatcttaaatgcaatctcttctctcttagcccttggccactttctcctggatcctgccctgctctcagccatattgaaggaccagccctaggagtctgcgagagcctccttggttccatcgtgaagccataaacaggaa

SEQ ID NO: 21278 - DNA, 359 bp, Homo sapiens
aggggattatgtatataactatctattcgatgatgaagataccccaccaaacccaaaaaaagagatctctcgaggatccgaattccagatctatgaatcgtagatactgaaaaaccccgcaagttcacttcaactgtgcatcgtgcaccatctcaatttctttcatttatacatcgttttgccttcttttatgtaactatactcctctaagtttcaatcttggccatgtaacctctgatctatagaattttttaaatgactagaattaatgcccatcttttttttggacctaaattcttcatgaaaatatattacgagggcttattcagaagctttggacttcttcgccaaaggttggg

SEQ ID NO: 21279 - DNA, 573 bp, Homo sapiens
ggaggagattgccatggcgaccgtcacagcgctgcgccgcacagtgccccccgctgtcactgggatcaccttcctgtctggaggccagagtgaggaggaggcgtccatcaacctcaatgccattaacaagtgccccctgctgaagccctgggccctgaccttctcctacggccgagccctgcaggcctctgccctgaaggcctggggcgggaagaaggagaacctgaaggctgcgcaggaggagtatgtcaagcgagccctggccaacagccttgcctgtcaaggaaagtacactccgagcggtcaggctggggctgctgccagcgagtccctcttcgtctctaaccacgcctattaagcggaggtgttcccaggctgcccccaacactccaggccctgccccctcccactcttgaagaggaggccgcctcctcggggctccaggctggcttgcccgcgctctttcttccctcgtgacagtggtgtgtggtgtcgtctgtgaatgctaagtccatcaccctttccggcacactgccaaataaacagctatttaagggggaaaaaaaaaaaaaa

SEQ ID NO: 21280 - DNA, 1100 bp, Homo sapiens
  misc_feature (1)...(1100): n = a,t,c or g
gcttggtcttttancatagtgtgtcaggtcttcatattttgggcccagggcacagagaagtcacagctctccggcatcctgtgacctttaccctctttgccaagggaaaatgtggcccaccaaagcaagaaacttgagggcatgggtcaccccagccctggcatctgcccagagcccgagaaggaaggaacaatgatcctccagctacctcacggggctggcacaggtgaccactgccctggcatcacccagctgtgtccggcagcctgaaccccatctgtggggatgccaggaggaaaatacaaaagtccttaggtgaacactgagaaagcaagatgcagcagaaacctccangccagaactacccagtcttggncctatggtggagatanagcatacctggcgatcatgtgtcttacactctaaggtcacctggttgcactatggcctcatctgtggctctgaaaatgaagatttggaaggagatcatcacagctaatgtttaacaagcccctcctgtgtgccaaatcattcacccctcaccacaaccgaatgagctaaggattctcattatatatagtttatggagagggaagtgcagacataaagaggtgaattatcttacccagatcacacagctgataagtggtggaggcagaatagaatctaaacagtgtggctccggagcccacatgcattgattcgacaagtgtttattgagcacctgccgcggacaaggccttgtgtgattaaatagggttataattagtaatataaaaatgagaaatcactaatgctttttagacttaacattttgtttttttgtaggtttcaggcacagaactgtatatccaataatagtgaaatggatcccactaattatgacagaaatgatgatacatttaaatgacttggatgttttataggtatgatctcgtgaaaccttgagagaaactgaatgacgaatgaaactattgttcctgtttcacacagaagaaaactgaggttaaaaggggtaaagtaattttgcatggcatgaagtagaaattcaaagtacaggaatttgaacttggttctgtccttttctgaagcccttgacc

SEQ ID NO: 21281 - DNA, 456 bp, Homo sapiens
  misc_feature (1)...(456): n = a,t,c or g
ntttgganaccgctatgacatgattacgaatttaatacgactcactatagggaatttggccctcgaggccaagaattcggcacgagacagacaagacctccctggaacccttctgattgtcttagacactgtggttgcaaaacccatggaaagcctcatttgtgtggaaagtcagaggaaaaatgatccagtggacacttggggattatctgtcattcaagatccttccttcaaccccaaggccagctcccatctcatttccagaaaggctcatacctggcttgcagggaagcatctgtcttgtcattccaggtgccagaatcctctcagagtcattgaagggtgttcacccatcccacccaaggcttggcacactgccagtgtcttagcagggtcttgtgagggctgggggcatccaggcactcagaaggcaaaggaaccaccctacccatttgg

SEQ ID NO: 21282 - DNA, 778 bp, Homo sapiens
tatgacatgattacgaatttaatacgactcactatagggaatttggccctcgaggccaagaattcggcacgagcggcacgaggccaccgccgaggaaaaccgtgtgctattagccatggtcaaccccaccgtgttcttcgacattgccgtcgacggcgagcccttgggccgcgtctcctttgagctgtttgcagacaaggtcccaaagacagcagaaaattttcgtgctctgagcactggagagaaaggatttggttataagggttcctgctttcacagaattattccagggtttatgtgtcagggtggtgacttcacacgccataatggcactggtggcaagtccatctatggggagaaatttgaagatgagaacttcatcctaaagcatacaggtcctggcatcttgtccatggcaaatgctggacccaacacaaatggttcccagtttttcatctgcactgccaagactgagtggttggatggaaggtggagagcaccaagacagacagccgggataaacccctgaaggatgtgatcatcgcagactgcggcaagatcgaggtggagaagccctttgccatcgccaaggagtagggcacagggacatctttctttgagtgaccgtctgtgcaggccctgtagtccgccacagggctctgagctgcactggccccggtgctggcatctggtggagcggacccactcccctcacattccacaggcccatggactcacttttgtaacaaactcctaccaacactgaccaataaaaaaa

SEQ ID NO: 21283 - DNA, 418 bp, Homo sapiens
  misc_feature (1)...(418): n = a,t,c or g
cnngctatgacatgattacgaatttaatacgactcactatagggaatttggccctcgaggccaagaattcggcacgagctcagagtcattgaagggtgttcacccatcccacccaaggcttggcacactgccagtgtcttagcagggtcttgtgagggctgggggcatccaggcactcagaaggcaaaggaaccaccctacccatttggcctctggagggggcagaagaaagaaagaaacctcatcctatattttacaaagcatgtgaattctggcattagctctcataggagacccatgtgcttccttgctcagtgcaaaactgatgattctacttgctgtagatgaatggttaacacgagctagttaaacagtgccattgttttgccagtgaagcctccaaccctaagccactggg

SEQ ID NO: 21284 - DNA, 455 bp, Homo sapiens
  misc_feature (1)...(455): n = a,t,c or g
ttgganacctttatgaccngattacgaatttaataacgactcactatagggaatttggccctcgaggccaagaattcggcacgaggaggaaaaatgatccagtggacacttggggattatctgtcattcaagatccttccttcaaccccaaggccagctcccatctcatttccagaaaggctcatacctggcttgcagggaagcatctgtcttgtcattccaggtgccagaatcctctcagagtcattgaagggtgttcacccatcccacccaaggcttggcacactgccagtgtcttagcagggtcttgtgagggctgggggcatccaggcactcagaaggcaaaggaaccaccctacccatttggcctctggagggggcagaagaaagaaagaaacctcatcctatattttacaaagcatgtgaattctggcattaactctcatagganaacc

SEQ ID NO: 21285 - DNA, 861 bp, Homo sapiens
tatgacatgattacgaatttaatacgactcactatagggaatttggccctcgaggccaagaattcggcacgaggcaactctatcttaagaactgcccagcctcagctgaaaacccgaatctgagaaggaattgcgtcatgtaagggaagctggaattaagggagctgagccagtcatggttgtggcgtgtgagtcaggagacctaggtttcagcccctctctactgtcagcgagctgtgcaacgtgggcaagtcattgtcctctgagctgcagtttcctcatctgtcacatcgctacagacaagacctccctggaacccttctgattgtcttagacactgtggttgcaaaacccatggaaagcctcatttgtgtggaaagtcagaggaaaaatgatccagtggacacttggggattatctgtcattcaagatccttccttcaaccccaaggccagctcccatctcatttccagaaaggctcatacctggcttgcagggaagcatctgtcttgtcattccaggtgccagaatcctctcagagtcattgaagggtgttcacccatcccacccatttggcctctggagggggcagaagaaagaaagaaacctcatcctatattttacaaagcatgtgaattctggcattagctctcataggagacccatgtgcttccttgctcagtgcaaaactgatgattctacttgctgtagatgaatggttaacacgagctagttaaacagtgccattgttttgccagtgaagcctccaaccctaagccactgggacggtggccagagatgccagcagcctctgtcgcccttagtcatataaccaaaatccagaccttatccacaacccgg

SEQ ID NO: 21286 - DNA, 537 bp, Homo sapiens
tatgacatgattacgaatttaatacgactcactatagggaatttggccctcgaggccaagaattcggcacgagtgagtgatcactctgattctcccctgtgtacacattaataagttttgatgcctttttcctactaatctgcattttgtgagttgatttttcagtaaaccttcagaggacaaaggggaagtttttcccttggcccctactgtcagaggcatttgaaccaaagtgaataggagctgggtaaaatgaggctgagacctactgggctgcattcccaggcagttaggcattcttagtcacaggatgagataggaggttggcacaagatacaggtcataaagaccttgctgataaaacaggttgcagtaaagaagccggccaaaacctgccaaatccaagatggtaatgaaagtgacctctggtcgtcctcattgctacactcccaaacagcaccatgacagtttacaaaggctatggcaatgtcaggaagttaccctatatgatctagaaaggggaggcatgaataattc

SEQ ID NO: 21287 - DNA, 629 bp, Homo sapiens
tttgaagaccacgaatttaatacgactcactatagggaatttggccctcgaggccaagaattcggcacgagcgtggacaaggagaacctcaccatgccgggcctcaggttcgacaacatccagggagatgcagttaaagacttgatgcttcgctttctgggtgaaaaagctgcagcaaagagacaagtcctaaatgccgactcagtggaacaatcttttgttggattgaaacagctaatcagctgcagaaactggagggcagcagtggacctgtgcggacgtctcctcacagcccacggccagggctacggcaagagcgggctgctcaccagccacacgacagattcactgcagctctggtttgtcaggctggcactactagtgaagttgggccttttccagaatgctgagatggaatttgaacccttcggaaatcttgatcagccagatctttattacgagtactacccgcacgtgtaccctgggcgcaggggctccatggtccccttctcgatgcgcatcttgcacgcggagcttcagcagtacctggggaacccacaggagtcgctggatagactgcacaaggtgaagactgtctgcagcaagatcctggccaatttggagcaagg

SEQ ID NO: 21288 - DNA, 389 bp, Homo sapiens
ctggagaagcccatccggatcccccggttcctgtccgtcaaagcctcccatgttttaaaaggatttttaaataaggaccccaaagagaggctcggctgccggccacagactggattttctgacatcaagtcccacgcgttcttccgcagcatagactgggacttgctggagaagaagcaggcgctccctccattccagccacagatcacagacgactacggtctggacaactttgacacacagttcaccagcgagcccgtgcagctgaccccagacgatgaggatgccataaagaggatcgaccagtcagagttcgaaggctttgagtatatcaacccattattgctgtccaccgaggagtcggtgtgaggccgcgtgcgtctctgtcg

SEQ ID NO: 21289 - DNA, 585 bp, Homo sapiens
ggaggagacctaatgtttcatatgcagcgacaaagaaaacttcctgaagaacatgccagattttactctgcagaaatcagtctagcattaaattatcttcatgagcgagggataatttataggagatttgaaactggacaatgtattactggactctgaaggccacattaaactcactgactacggcatgtgtaaggaaggattacggccaggagatacaaccagcactttctgcggaaccccgaattacatcgcccccgaaatcctgcggggagaggagtacgggttcagcgtggactggtgggcgctgggagtcctcatgtttgagatgatggccgggcgctccccgttcgacatcatcaccgacaacccggacatgaacacagaggactaccttttccaagtgatcctggagaagcccatccggatcccccggttcctgtccgtcaaagcctcccatgttttaaaaggatttttaaataaggaccccaaagagaggctcggctgccggccacagactggattttctgacatcaagtcccacgcgttcttccgcagcatagactgggacttgctggagaagaa

SEQ ID NO: 21290 - DNA, 506 bp, Homo sapiens
  misc_feature (1)...(506): n = a,t,c or g
gtgcctttagtgatggcctggctcacctggacaacctcaagggcacctttgccacactgagtgagctgcactgtgacaagctgcacgtggatcctgagaacttcaggctcctgggcaacgtgctggtctgtgtgctggcccatcactttggcaaagaattcaccccaccagtgcaggctgcctatcagaaagtggtggctggtgtggctaatgccctggcccacaagtatcactaaggtcgacgcggccgcgaattccagatctatgaatcgtagatactgaaaaaccccgcaagttcacttcaactgtgcatcgtgcaccatctcaatttctttcatttatacatcgttttgcttcttttatgtaactatactcctctaagtttcaatcttggcntgtaacctctgatctatagaatttttaaatgctagaattaatgccatctttttttggacctaatctcatgaaattatacgaggctattagagcttggacttcttccaagg

SEQ ID NO: 21291 - DNA, 715 bp, Homo sapiens
gccaaattcaacagacgtagaggaaacgctggaacggataaagaacaacgacccaaaacttgaagaagttaacctcaataatatccggaatatccccatccccaccctcaaggcatatgcagaagccctgaaagaaaactcatatgtgaagaagttcagcatcgtggggacacggagtaatgaccccgtggcgtatgcccttgctgagatgctcaaggagaacaaggtgttgaagacactgaatgtggaatccaacttcatttctggagctgggattctgcgcctggtagaagccctcccatacaacacttctctggtggaaatgaaaattgacaaccagagccagcccctgggcaacaaagtggaaatggagattgtgagcatgttggaaaaaaacgcaacacttctcaaattcggctaccactttacccagcaaggaccccggcttcgggcatccaacgcaatgatgaacaacaatgaccttggtgagtagaaatatgcttcctgccctgcccgcagtcctgttattccctccacctgtgctggggatgccagggaaaattctgtaaatgcctctccgagtcttcttgagccttgattttcacattgatccgcggcttccttgatttctgtgtttgtacctcatctccaccctggactacgagctccttgacttcaggagctaaggcttgagtcctttcctcctcaaagcaca

SEQ ID NO: 21292 - DNA, 435 bp, Homo sapiens
  misc_feature (1)...(435): n = a,t,c or g
tttgaataccttttgagacncgattacgaatttaatacgactcactatagggaatttggccctcgaggccaagaattcggcacgagcctcagcagaggacttctatgactgcagggtggagcactggggcttggaccagccgctcctcaagcactgggaggcccaagagccaatccagatgcctgagacaacggagactgtgctctgtgccctgggcctggtgctgggcctagtcggcatcatcgtgggcaccgtcctcatcataaagtctctgcgttctggccatgacccccgggcccaggggaccctgtgaaatactgtaaaggtgggaatgtaaagaggaggccctaggatttgtagaatgtaaggaagggaggaaaaattcaatctgataagtgttcattgatcttctaatgggttaaaagcattcagccc

SEQ ID NO: 21293 - DNA, 715 bp, Homo sapiens
  misc_feature (1)...(715): n = a,t,c or g
ctatgacatgattacgaatttaatacgactcactatagggaatttggccctcgaggccaagaattcggcacgagccactatctccccttcctgccctcaactgaggacgtttacgactgcagggtggagcactggggcttggatgagcctcttctcaagcactgggagtttgatgctccaagccctctcccagagactacagagaacgtggtgtgtgccctgggcctgactgtgggtctggtgggcatcattattgggaccatcttcatcatcaagggagtgcgcaaaagcaatgcagcagaacgcagggggcctctgtaaggcacatggaggtgatggtgtttcttagagagaagatcactgaagaaacttctgctttaatgactttacaaagctggcaatatttacaatccttgacctcagtgaaagcagtcatcttcagcattntccagccctatagccaccccaagtgtggatatgcctcttcgattgctccgtactctaacatctagctggcttccctgtctattgccttttcctgtatctattttcctctatttcctatcattttattatcaccatgcaatgcctctggaataaaacatacaggagtctgtctctgctatggaatgccccatggggcatctcttgtgtacttattgtttaaggtttcctcaaactgtgatttttctgaacgcaataaactattttgatg

SEQ ID NO: 21294 - DNA, 579 bp, Homo sapiens
gctggaagaaaagggcccgggcagaccccactgttgaaagtgaggaggcgtttaagaatagaatggaggttaaagtgaagattcctgaagaattaaaaccatggcttgttgaggactgggacttagttaccaggcagaagcagctgtttcaactccctgccaagaaaaatgtagatgcaattctggaggagtatgcaaattgcaagaaatcgcagggaaatgttgataataaggaatatgcggttaatgaagttgtggcaggaataaaagaatatttcaatgtgatgttgggcactcagctgctctacaaatttgagaggccccagtatgctgaaatcctcttggctcaccctgatgctccaatgtcccaggtttatggagcaccacacctactgagattatttgtaagaattggagcaatgttggcctatacgccccttgatgagaaaagccttgcattattgttgggctatttgcatgatttcctaaaatatctggcaaagaattctgcatctctctttactgccagtgattacaaagtggcttctgctgagtaccaccgcaaagccctgtgagccg

SEQ ID NO: 21295 - DNA, 915 bp, Homo sapiens
cggacgcgtgggttctgcaccagtattgtggctcaagactccagaggccacatttaccatggtcggaatttggattatccttttgggaatatcttacgcaagctgacagtggatgtgcaattcttaaagaatgggcagattgcattcacaggaactacttttattggctatgtaggattatggactggccagagcccacacaagtttacagtttctggtgatgaacgagataaaggctggtggtgggagaatgctatcgctgccctgtttcggagacacattcccgtcagctggctgatccgcgctaccctgagtgagtcggaaaacttcgaagcagctgttggcaagttggccaagactccccttattgctgatgtttattacattgttggtggcacgtccccccgggagggggtggtcatcacgaggaacagagatggcccagcagacatttggcctctagatcctttgaatggagcgtggttccgagttgagacaaattacgaccactggaagccagcacccaaggaagatgaccggagaacatctgccatcaaggcccttaatgctacaggacaaggcaaacctcagcctggaggcacttttccagtgaaagcaggccaggtgcggtggctcacgcctgtaatcccagccctttgggaggccaaggcgggtggaacacttgaggtcaggagttcaagaccagcctggccaacatggtgaaacctcgtctctactaaaaatacaaaaatcaaccaggcatgacggtgcacgcctgttatcacagctacttgggaagcagcggctggagaattgcttgaacctgggaagtcgaggctgcaagtgagctgagatcatgccatggcagtctagcctgggcaacagagcgagactctgtttcaaaaaaaaaaaaaa

SEQ ID NO: 21296 - DNA, 427 bp, Homo sapiens
  misc_feature (1)...(427): n = a,t,c or g
nttttgaaatctggaatccctttagnacgaacctaatacgattcactatagggaatttggccctcgaggccaagaattcggcacgagactgtgaaaatgatcatggtgccaaaagcagtctatggattcgatgcaattcccatcaaaataccatcagcatttttcatggagctttaaaaagcaatcctaaaattcaaatggaaccaaaaaagaccctacatagccaaagcaagactaagcaaaaagaacacatctggaggcatcacatcacctgactttatactacaaggctgtagttaccaaaacagtatggtactggtatgaaaacaggcaagtagaccaatggaacagaatagagaacccagaaataaagccaaatacttacagttaactgatctttgacaaagcaaacaaaaacataaagtgg

SEQ ID NO: 21297 - DNA, 866 bp, Homo sapiens
ggagttcatcatgagccgttgctaatgccaggccagtaaaagtataacagcaaataaccattggttaatctggacttatttttggacttagtgcaacaggttgaggctaaaacaaatctcagaacagtctgaaatacctttgcctggatacctctggctccttcagcagctagagctcagtatactaatgccctatcttagtagagatttcatagctatttagagatattttccattttaagaaaacccgacaacatttctgccaggtttgttaggaggccacatgatacttattcaaaaaaatcctagagattcttagctcttgggatgcaggctcagcccgctggagcatgagctctgtgtgtaccgagaactggggtgatgttttacttttcacagtatgggctacacagcagctgttcaacaagagtaaatattgtcacaacactgaacctctggctagaggacatattcacagtgaacataactgtaacatatatgaaaggcttctgggacttgaaatcaaatgtttgggaatggtgcccttggaggcaacctcccattttagatgtttaaaggaccctatatgtggcattcctttctttaaactataggtaattaaggcagctgaaaagtaaattgccttctagacactgaaggcaaatctcctttgtccatttacctggaaaccagaatgattttgacatacaggagagctgcagttgtgaaagcaccatcatcatagaggatgatgtaattaaaaaatggtcagtgtgcaaagaaaagaactgcttgcatttctttatttctgtctcataattgtcaaaaaccagaattaggtcaagttcatagtttctgtaattggc

SEQ ID NO: 21298 - DNA, 469 bp, Homo sapiens
  misc_feature (1)...(469): n = a,t,c or g
cngcttgacatgattacgaatttaatacgactcactatagggaatttggccctcgaggccaagaattcggcacgagttcagcctttttgtgctggtttttcccccatctttgtggatttatctacctctagtctttgatgttggtgactttcagatggagtctttgagtagatgtgctaatcctttttagcacatctgtgtttgtttctttccttccaacagtcaggcccctctgctgccagtctgctggagtttcctgacccagtttgcgtggatatcaccagcggaggctgcagagcagcaaagattgctgcctgttttttcctctggaatcttcaacccagaggggcacctgccagatgccagccagagctcttctgtatgaggtgtctgtcggcccaactgggagctgacagtcattatacacgggggtcagggacccacttgaggaggcagactgacccttagc

SEQ ID NO: 21299 - DNA, 607 bp, Homo sapiens
  misc_feature (1)...(607): n = a,t,c or g
agcagctatgacatgattacgaatttaatacgactcactatagggaatttggccctcgaggccaagaattcggcacgagaaaacccccacctccctgcaacagggcacctgggggaaggggcagttggggggtgcagcttcagcagacttaaatgtccctgcctgctggctctgaagagagcagcagatctcccagcacagcgttggagctctgataagggacagactgcctcctcaagtgggtccctgacctccgtgtatcctgaccaggagacacctcccagtaggggccaaaagacacttcatacaggagagctctggctggcatctggcaggtgctcagtaaggccactgcagccagtgggacgaagcttccagaggaaggaacaggcagcaatctttgctgttctgcagcctctgctggtcatacccaggcaaagagggtctggagtggacctccagcaaactccagcagacctgcagcagaggggcttgactgttagaaggaaaacctcgtgccgaattcttggcctcgagggccaaattccctatagtgagtcgtattaaattcgtaatcatgtcatagctgttgntcaaannaaagggt

SEQ ID NO: 21300 - DNA, 427 bp, Homo sapiens
  misc_feature (1)...(427): n = a,t,c or g
ttnnnnnnccnnntttnnnnancagctatgacatgattacgaatttaatacgactcactatagggaatttggccctcgaggccaagaattcggcacgaggatcttttttggttccatattaattttagaatagatttttctagttctgtaaaaaatgatgttagtaacttgataggaatagtattgaatctgtagactgttttgggtgctatagccattttagggatattcattcttccaattcatgagcataaaatgtgtttccatttgtttgtgtcatctgtgatttctttcggcagtgttttgtggttctccttgtagagatctctcacctccttggttaaacgtagtcctaagattttgctgttgccattgtttgtttgtttcagctatcgtaaataaaattgcattctttatttggctctca

SEQ ID NO: 21301 - DNA, 856 bp, Homo sapiens
gctgtccggggcctttatcaaaaaaagactcagccaagacaaggaggtagagaggggactgggggactgggagtcagagccctggctgggttcaggtcccacgtctggccaggcactgccttctcctctctgggcctttgtttccttgttggtcagaggagtgattgaaccagctcatctccaaggatcctctccactccatgtttgcaatgcttttatatggcccagccttgtaaataaccacaaggtccactccctgctccacgaagccttaagccataggcccaggatatttctgagagtgaaaccatgactgtgaccaccttctgtccccagccctgtcctggttccttcctatgcccaggtaccacccttcagaccccagttctaggggagaagagacttcccaacagccttagctgccagtgctggtcactaaccaacaaggttggcaccccagctaccccttctttgcagggcttaaggcccccaaacatagcccctgccccggaggaagcttggggaacccatgagttgtcagctttgactttatctcctgctctttctacatgactgggcctcccttgggctggaagaattggggattctctattggaggtgagatcacagcctccagggccccccaaatcccagggaaggacttggagagaatcatgctgttgcatttagaactttctgctttgcacaggaaagagtcacacaattaatcaacatgtatattttctctatacatagagctctatttctctacggttttataaaagccttgggttccaaccaggcagtagatgtgcttctgaaccgcaaggagcaaacactgaaataaaatagttta

SEQ ID NO: 21302 - DNA, 668 bp, Homo sapiens
  misc_feature (1)...(668): n = a,t,c or g
ttttctccaaaggagtgcttgtggagatcggatcttttctccagcaattgggggaaagaaggctttttctctgaattagcttagtgtaaccagcggcgtatattttttaggcgccttttcgaaaacctagtagttaatattcatttgtttaaatcttattttatttttaagctcaaactgcttaagaataccttaattccttaaagtgaaataattttttgcaaaggggtttcctcgatttggagctttttttttcttccaccgtcatttctaactcttaaaaccaactcagttccatcatggtgatgttcaagaagatcaagtcttttgaggtggtctttaacgaccctgaaaaggtgtacggcagtggcgagaaggtggctggccgggtgatagtggaggtgtgtgaagttactcgtgtcaaagccgttaggatcctggcttgcggagtggctaaagtgctttggatgcagggatcccagcagtgcaaacagacttcggagtacctgcgctatgaagacacgcttcttctggaagacaaccaacaggtgagaatgaatggngatcatgagactgggaacaaatatgagtacaagttcggnttgagctcctcaaggggcccctgggaanaccttcaaaggaaaaaatggggntaaacacngggggaa

SEQ ID NO: 21303 - DNA, 445 bp, Homo sapiens
ggcggaccttcccagctagaattcactccacttggacatgggccccagataccatgatgctgagcccggaaactccacatcctgtgggacctgggccatagtcattctgcctgccctgaaagtcccagatcaagcctgcctcaatcagtattcatatttatagccaggtaccttctcacctgtgagaccaaattgagctaggggggtcagccagccctcttctgacactaaaacacctcagctgcctccccagctctatcccaacctctcccaactataaaactaggtgctgcagcccctgggaccaggcacccccagaatgacctggccgcagtgaggcggattgagaaggagctcccaggaggggcttctgggcagactctggtcaagaagcatcgtgtctggcgttgtggggatgaactttttggtttggtcttccttttta

SEQ ID NO: 21304 - DNA, 554 bp, Homo sapiens
cgcttcctggtcctcgcctcctccgctgtctccctggagttcttgcaagtcggccaggatgtctcaggctgagtttgagaaagctgcagaggaggttaggcaccttaagaccaagccatcggatgaggagatgctgttcatctatggccactacaaacaagcaactgtgggcgacataaatacagaacggcccgggatgttggacttcacgggcaaggccaagtgggatgcctggaatgagctgaaagggacttccaaggaagatgccatgaaagcttacatcaacaaagtagaagagctaaagaaaaaatacgggatatgagagactggatttggttactgtgccatgtgtttatcctaaactgagacaatgccttgtttttttctaataccgtggatggtgggaattcgggaaaataaccagttaaaccagctactcaagggtgctcaccatacggctctaacagattagggctaaaacgattactgactttccttgagtatttttatctgaaatcattaaaagtgtattgttactttaaaaaaaaaaaaaa

SEQ ID NO: 21305 - DNA, 517 bp, Homo sapiens
  misc_feature (1)...(517): n = a,t,c or g
anaccgntttacatgattacgaatttaatacgactcactatagggaatttggccctcgaggccaagaattcggcacgagagagagccaggttggaatgggcagcaggtagggagatccctggggaggagctgaagcccatttggcttcagtgtcccccaaacccccaccaccctcttcctaggccgccctccccactgttaccaacatgaagctgctcgcagcaactgtgctactcctcaccatctgcagccttgaaggagctttggttcggagacaggcaaaggagccatgtgtggagagcctggtttctcagtacttccagaccgtgactgactatggcaaggacctgatggagaaggtcaagagcccagagcttcaggccgaggccaagtcttactttgaaaagtcaaaggagcagctgacacccctgatcaagaangctggaacggactgggtaacttcttgactatttcgnggaacttggaaccaanctggccccccaggaaagggccaaac

SEQ ID NO: 21306 - DNA, 561 bp, Homo sapiens
  misc_feature (1)...(561): n = a,t,c or g
ttgactgattacgaatttaatacgactcactatagggaatttggccctcgaggccaagaattcggcacgagggagagggagagagccaggttggaatgggcagcaggtagggagatccctggggaggagctgaagcccatttggcttcagtgtcccccaaacccccaccaccctcttcctaggccgccctccccactgttaccaacatgaagctgctcgcagcaactgtgctactcctcaccatctgcagccttgaaggtgggtgtgatatggagagggggccaaaagggagaatgtgctggtggttatagctacctatctgcctgtgctcttatatccaggtctggcaaccaaagggctcaaaaggaagatcattccctctctaaagcccagaaagcccatccaaagatctggctggatacctttttggggagggggcagagagctggggtgggtactggcagaggtatggcaggaggccaggattcactgctgtggacccagctgaaaagagtgtgtgtgtgtgtgtgtgtgtgtgtggncaagagctttggttcagaa

SEQ ID NO: 21307 - DNA, 434 bp, Homo sapiens
  misc_feature (1)...(434): n = a,t,c or g
gagagagctagcaccatgagcttcaataccctgggtcttctgctaaggatttaccacctgactctagtatagtatcacattacagataaaggaaatcaaaatatcttacccccaaataacattctttttgccataaatagccctgcaaagggccactttgtgaagagaaaacttgcatctgtaaaacatttctatttacataagtagattttttccccttccaggttctcccaatcctgaagagattaactcagagtctagcaacttttaaaggtctaaataagaaacacttgccaccaggcagatggctcactcttgtaatcccagcactttgggaagccgaggtggttggatcatttgagcccaggagttncagaccaccctgggcaacacagggagaccttgtctctataaaaaattagccaggtgtgggg

SEQ ID NO: 21308 - DNA, 1024 bp, Homo sapiens
gagctgagtcgaggtggaccctttgaacgcagtcgccctacagccgctgattccccccgcatcgcctcccgtggaagcccaggcccgcttcgcagctttctccctttgtctcataaccatgtccaccaacgagaatgctaatacaccagctgcccgtcttcacagattcaagaacaagggaaaagacagtacagaaatgaggcgtcgcagaatagaggtcaatgtggagctgaggaaagctaagaaggatgaccagatgctgaagaggagaaatgtaagctcatttcctgatgatgctacttctccgctgcaggaaaaccgcaacaaccagggcactgtaaattggtctgttgatgacattgtcaaaggcataaatagcagcaatgtggaaaatcagctccaagctactcaagctgccaggaaactactttccagagaaaaacagccccccatagacaacataatccgggctggtttgattccgaaatttgtgtccttcttgggcagaactgattgtagtcccattcagtttgaatctgcttgggcactcactaacattgcttctgggacatcagaacaaaccaaggctgtggtagatggaggtgccatcccagcattcatttctctgttggcatctccccatgctcacatcagtgaacaagctgtctgggctctaggaaacattgcaggtgatggctcagtgttccgagacttggttattaagtacggtgcagttgacccactgttggctctccttgcagttcctgatatgtcatctttagcatgtggctacttacgtaatcttacctggacactttctaatctttgccgcaacaagaatcctgcacccccgatagatgctgttgagcagattcttcctaccttagttcggctcctgcatcatgatgatccagaagtattagcagatacctgctgggctatttcctaccttactgatggtccaaatgaacgaattggcatggtggtgaaaacaggagttgtgccccaacttgtgaagcttcta

SEQ ID NO: 21309 - DNA, 463 bp, Homo sapiens
gcctatgatggctcgaaggctctccatgtcaccaacatcaaaaaatggaaggagccctgccgaatagaactctacagagtcgtagagagtttagccaaggcacaggagacatcaggagaagaaatttccaaattttacctgccaaactgcaacaagaatggattttatcacagcagacagtgtgagacatccatggatggagaggcgggactctgctggtgcgtctacccttggaatgggaagaggatccctgggtctccagagatcaggggagaccccaactgccagatatattttaatgtacaaaactgaaaccagatgaaataatgttctgtcacgtgaaatatttaagtatatagtatatttatactctagaacatgcacatttatatatatatgtatatgtatatatatacagtaactactttttatactccatacataacttgatatagaagctggt

SEQ ID NO: 21310 - DNA, 536 bp, Homo sapiens
  misc_feature (1)...(536): n = a,t,c or g
ggcggcaaggcagcgatggcgatttttagtgtgtatgtggtgaacaaagctggcggcttgatttaccagttggacagctacgcgccacgggctgaggctgagaaaactttcagttatccgctggatctgctgctcaagctacacgatgagcgtgtgttggttgctttcggccagcgggacggcatccgagtgggtcatgcagtgctggccatcaatggcatggacgtgaatggcaggtacacggccgacgggaaagaggtgctggagtatctgggtaaccctgctaattacccggtgtccattcgatttggccggccccgcctcacttctaatgagaagcttatgctggcctccatgttccactcgctctttgccatcggctcccagctgtctcctgaacagggaagctcaggtattgagatgctggagacagacacattcaaattgcactgctaacaagacactgacanggatcaaantttgtggtccancanatcctangcaaactgggaaaaaantccccttncccaaaaatt

SEQ ID NO: 21311 - DNA, 729 bp, Homo sapiens
agctgctggaaaagtgtgccatgaccgctctgagctccaagctgatctcccagcagaaagctttctttgctaagatggtggtggatgcagtgatgatgctcgatgatttgctgcagcttaaaatgattggaatcaagaaggtacagggtggagccctcgaggattctcagctggtagctggtgttgcattcaagaagactttctcttacgctgggtttgaaatgcaacccaaaaagtaccacaatcccaagattgcccttttgaatgtcgagctcgagttgaaagctgagaaagacaatgctgagataagagtccacacagttgaggattatcaggcaattgttgatgctgagtggaacattctctatgacaagttagagaagatccatcattctggagccaaagttgtcttgtccaaactccccattggggatgtggccacccagtactttgctgacagggacatgttctgtgctggccgagtacctgaggaggatctgaagaggacaatgatggcctgtggaggctcaatccagaccagtgtgaatgctctgtcagcagatgtgctgggtcgatgccaggtgtttgaagagacccagattggaggcgagaggtacaatttttttactggctgccccaaggccaagacatgcaccttcattctccgtggcggcgcccgagcagtttatggaggagacagagcggccctgcatgatgccatcatgatcg

SEQ ID NO: 21312 - DNA, 927 bp, Homo sapiens
  misc_feature (1)...(927): n = a,t,c or g
tatgacatgattacgaatttaatacgactcactatagggaatttggccctcgaggccaagaattcggcacgagatcctatatctagaaaacagatagtttcagcccaaaagcttcttaatctgataagcaacttcagcagtcaggatacaaaattaatgcacacaaatcagtagctcttctatataccaacagcaaccaagctgagaatcaaatcaagaactcaaccccttttacaatagctgcaaaaataaaataaaatacttaggaatatacctaaccaaggaggtgaaagacctctacaaggaaaactacaaaacactgctgaaagaaatcacagatgacacaaacaaatggaagaacattccatgctcatgggtaggaagaatcaatattgtgaaaatgaccatactgcccaaagcaatctacagattcaatgcaatccctatcaaaataccaatgacattcttcacagaaatagacaaaacaatcctaaaatttatatggaaccacaaaagacccagaatagccaagacaagactaagcaaaaagaacaaagctggaggcatcacgctacctgacttcaaactatactacaaagctatagtaaccaaaacagcatggtactggcataaaaacagacacatagaccaatggaacagaatagagaacccagaagccatatatctacagccaactcatttttgacagatgccaagaacatacattggggaaagaacagtctcttcaataaatggttctgggaagactggatattcatatgcagaagaatgaaactagactcctatctcacaaaaatcaaatcaaagtgctgggattacaggcgtgagccaccacacccggngacttcatccctgctgccggttnctgngtaagggcgacacccaggccccaaacaacncttaaaa

SEQ ID NO: 21313 - DNA, 459 bp, Homo sapiens
  misc_feature (1)...(459): n = a,t,c or g
gtgnnnntnnttggaancctttgaaaccgtttgactgantacgaatttaatacgactcactatagggaatttggccctcgaggccaagaattcggcacgagcaccattaagaagcctgtgggaaagacaaaggaggaactggctttggagaaaaagcgggaattagaaaagcggttacaagatgtcagcggacagctcaattctactaaaaagccccccaagaaagcgaatgagaaaacagagtcatcctctgcacagcaagtagcagtgtcacgccttagcgcttccagctccagctcagattccagctcctcctcttcctcgtcgtcgtcttcagacaccagtgattcagactcaggctaaggggtcaggccagatggggcaggaaggctccgcaggaccggacccctagaccaccctgccccacctgcccttcccctttgctgtgacacttcttat

SEQ ID NO: 21314 - DNA, 486 bp, Homo sapiens
  misc_feature (1)...(486): n = a,t,c or g
gntttggnnaccngtnngtnnngnnctntgaanaacgctatgacatgattacgaatttaatacgactcactatagggaatttggccctcgaggccaagaattcggcacgaggctttggagaaaaagcgggaattagaaaagcggttacaagatgtcagcggacagctcaattctactaaaaagccccccaagaaagcgaatgagaaaacagagtcatcctctgcacagcaagtagcagtgtcacgccttagcgcttccagctccagctcagattccagctcctcctcttcctcgtcgtcgtcttcagacaccagtgattcagactcaggcttaggggtcaggccagatggggcaggaaggctccgcaggaccggacccctagaccaccctgccccacctgccccttccccctttgctgngacacttcttcatctacccccccctgccccctttaggagagctggctntgcannggnngagggatgc

SEQ ID NO: 21315 - DNA, 787 bp, Homo sapiens
gagaaaaaagagaaaaagaagaaacggaaggcagagaagcatcgaggccgagctggggccgatgaagatgacaaggggcctagggcaccccgcccacctcaacctaagaagtccaagaaagcaagtggcagtgggggtggcagtgctgctttaggcccttctggctttggaccttctggaggaagtggcaccaagttatgattcagaggaggaggaagagagcaggcccatgagttacgatgagaagcggcagctgagcctggacatcaacaaattacctggggagaagctgggccgagttgtgcatataatccaagccagggagccctctttacgtgattcaaacccagaagagattgagattgattttgaaacactcaagccatccacacttagagagcttgagcgctatgtcctttcctgcctacgtaagaaaccccggaagccctacaccattaagaagcctgtgggaaagacaaaggaggaactggctttggagaaaaagcgggaattagaaaagcggttacaagatgtcagcggacagctcaattctactaaaaagccccccaagaaagcgaatgagaaaacagagtcatcctctgcacagcaagtagcagtgtcacgccttagcgcttccagctccagctcagattccagctcctcctcttcctcgtcgtcgtcttcagacaccagtgattcagactcaggctaaggggtcaggccagatggggcaggaaggctccgcaggaccggacccctagaccaccctgccccacgccgagccctc

SEQ ID NO: 21316 - DNA, 734 bp, Homo sapiens
ggaagaaaagtacaaggatgccatccatttctataacaagtctctggcagagcaccgaaccccagatgtgctcaagaaatgccagcaggcagagaaaatcctgaaggagcaagagcggctggcctacataaaccccgacctggctttggaggagaagaacaaaggcaacgagtgttttcagaaaggggactatccccaggccatgaagcattatacagaagccatcaaaaggaacccgaaagatgccaaattatacagcaatcgagctgcctgctacaccaaactcctggagttccagctggcactcaaggactgtgaggaatgtatccagctggagccgaccttcatcaagggttatacacggaaagccgctgcgctggaagcgatgaaggactacaccaaagccatggatgtgtaccaaaaggcgctagacctggactccagctgtaaggaggcggcagacggctaccagcgctgtatgatggcgcagtacaaccggcacgacagccccgaagatgtgaagcgacgagccatggccgaccctgaggtgcagcagatcatgagtgacccagccatgcgccttatcctggaacagatgcagaaggacccccaggcactcagcgagtacgtagagtcagagaggcggccttgctggaaatggagaacaaaagcaggcagatgagtgcacgcggctggggggtggtatgctcagtctgcgaggaagaggaattctg

SEQ ID NO: 21317 - DNA, 586 bp, Homo sapiens
ggtttgaattgttaattcacagaatagcacaaactacaattaaaactaagcacaaagccattctaagtcattggggaaacggggtgaacttcaggtggatgaggagacagaatagagtgataggaagcgtctggcagatactccttttgccactgctgtgtgattagacaggcccagtgagccgcggggcacatgctggccgctcctccctcagaaaaaggcagtggcctaaatcctttttaaatgacttggctcgatgctgtgggggactggctgggctgctgcaggccgtgtgtctgtcagcccaaccttcacatctgtcacgttctccacacgggggagagacgcagtccgcccaggtccccgctttctttggaggcagcagctcccgcagggctgaagtctggcgtaagatgatggatttgattcgccctcctccctgtcatagagctgcagggtggattgttacagcttcgctggaaacctctggaggtcatctcggctgttcctgagaaataaaaagcctgtcatttcaaacgtcgacgcggccgcgaattccagatctatgaatcgtagatactgaaaa

SEQ ID NO: 21318 - DNA, 934 bp, Homo sapiens
  misc_feature (1)...(934): n = a,t,c or g
ggagatgcctgggccattcgctattttgtgtctgaaggcttcgagttcttctgtgcccagtccttctccaagaacttcgggctctacaatgagagagtcgggaatctgactgtggttggaaaagaacctgagagcatcctgcaagtcctttcccagatggagaagatcgtgcggattacttggtccaatccccccgcccagggagcacgaattgtggccagcaccctctctaaccctgagctctttgaggaatggacaggtaatgtgaagacaatggctgaccggattctgaccatgagatctgaactcagggcacgactagaagccctcaaaacccctgggacctggaaccacatcactgatcaaattggcatgttcagcttcactgggttgaaccccaagcaggttgagtatctggtcaatgaaaagcacatctacctgctgccaagtggtcgaatcaacgtgagtggcttaaccaccaaaaatctagattacgtggccacctccatccatgaagcagtcaccaaaatccagtgaagaaacaccacccgtccagtaccaccaaagtagttctctgtcatgtgtgttccctgcctgcacaaacctacatgtacataccatggattagagacacttgcaggactgaaaggctgctctggtgaggcagcctctgtttaaaccggccccacatgaagagaacatcccttgagacgagtttggagactgggattagagcctttggaggtcaaagcaaattaagatttttatttaagaataaaagagtactttgatcatgaganataggtatcttgtccctctcaccanaanggagtgttgtgtgtggcggncgacgtgngttcnangtgggtggttnggcccggnnnaaagtccannnccanacacaacttgncnggannanccagnntgtcnttgt

SEQ ID NO: 21319 - DNA, 925 bp, Homo sapiens
gttggaattctctcacctctaacatcagaacatcaattccagtggaacagtcttcccatttacaggtcttctctccaactcttcacggaaagtgcctgcaaaaacagaggtggatacgaggacaggttggagctgcagggactggcgagtctgctttcttctactgccctgagcctgaacgcttctgcttaatctgagaatcacatttggtttgttgagcctaatatttgttgagattttgcaggaccctgatcttttgtggtcctgtaaaagatactgaggaatgtctttcagccaagccaagaggatggtttcaataaacctaataatctgaagttcagtatcattttgattgataactttctttgccttgtttgcctgtattttctcctgtttcagggggaaggtggctctgccataaacagagttcagggaaatgaacatgtcacctcataggacatctgatttaggtctcttgcagaatagggtggtgaaagctgaaggaactccctaggggttttagctgttagatcacatgggaggacagcatcttcttccctgccaatttcagatataattggagggagaatttcaggtcttagactataaggatagaatccctttgcttttgcccttgatcacatgtatactaaggtattaagtggcccaagtctttcctttcaccaaagggcagggagaagtgtctatggacagcagggttccaattcttgtcattccaggaatatctgaatattcctggaatgtggaccctgagacagtgctcaggggccactgggagccaatattaggcattgactctcagccaggagtctgactggtctaacaccacactgcaactcctgacctcttgaagtactaagctactttgctgttagtgacagttattacaggttctcagcccatt

SEQ ID NO: 21320 - DNA, 501 bp, Homo sapiens
gcttttaaacttgggaaataagcacctgtatttttttccaaaactgtttttaaagctgtatacgcatacatatatatatttttactctgtcttactctgtcacccaggctagagtgcagtggcgcgatctcagctcactgcagccttgacctcctgggttccagtgattctcatgcctcatcctcccaagtagctggaactacaggtgtgcaccaccatgcctggttcatttttgtgtttttagtagagatggggttttaccatattgcccaggctggtcttctggcttctggatatcgcccaccttggcctcccaaagtgctgggattacagggatgagccaccgtgcctggctgggtatttatattatcattctagtttcagagtatacagaagtttcatcccatcatttggaaaaataaaggcatctgaagtacaatattacttatagaaatagtttatattcctattaaatcttaatcttgtggcatcagggtattc

SEQ ID NO: 21321 - DNA, 434 bp, Homo sapiens
  misc_feature (1)...(434): n = a,t,c or g
gnnnnngnntttgatgcccttnntntttgannncctgctatgacatgattacgaatttaatacgactcactatagggaatttggccctcgaggccaagaattcggcacgagccactccattgctccggaatgttcagttcaactatccccatacatcagtcacggacgtcactcaaaacaatttccataactactttggaggctcagagattgtggtggcaggaaaatttgaccctgctaaattggatcaaatagagagcgttatcacggcgacttcggctaacacgcagttagtcttggagaccctggcccagatggacgacttgcaggattttctatcgaaagacaagcatgcagatcccgatttcaccaggaaactgtgggcctatctaaccatcaaccaactgctagctgaacgaagcctggctcctaca

SEQ ID NO: 21322 - DNA, 947 bp, Homo sapiens
atccaggctctgggcacacaggtgaggcagctgcaggaggatgcagcccgcctccaggcggcctatgcgggtgacaaggccgacgatatccagaagcgcgagaacgaggtcctggaagcctggaagtccctcctggacgcctgtgagagccgcagggtgcggctggtggacacaggggacaagttccgcttcttcagcatggtgcgcgacctcatgctctggatggaggatgtcatccggcagatcgaggcccaggagaagccaagggatgtctcctctgtggaactgctcatgaagtatcaccagggcatcaatgcagagattgaaacccggagcaagaacttcagtgcctgcctggagcttggcgagtccctgctgcagcggcagcaccaggcctcagaggagatccgcgagaaactgcagcaggtgatgtccaggaggaaagagatgaatgagaagtgggaagcccgctgggagcggctccgcatgttgctggaggtgtgccagttctcgagggatgcctctgtggctgaggcgtggctgattgcccaggagccctacctggccagcggggactttggacacacagtggacagtgtggagaagctcatcaagaggcatgaggcttttgagaagtccacggccagctgggcagagcgctttgctgccctggagaagcccaccacgcttgagctgaaagaacgccagattgcagagagacccgcagaggagactgggcctcaagaggaggaaggcgagacagcaggggaggctccagtttcccaccatgcggccaccgagagaacgtccccggtcagtctctggtctcgtttgtctagttcctgggagtcactgcagccagagccctctcacccctactaggctcagcccaggtggaggcgagatgagctggcgcagccccgcctccatcctccccacatccctgc

SEQ ID NO: 21323 - DNA, 449 bp, Homo sapiens
ggcagagatttacccgagcgtgttgcggcagcggctgggcttgcaaggcgcgatccaagagggatttaagcagcccagagctccagagaaaaagagagcgagagagaaccacacacagagacggcttaagcgtttacccgaattaaatatatatttttaaaaagaactgttgagttttatcattttcgttaagtgaccgtgcgcagcgctgtaactgcaggatggggaagcagaatagcaaactggcccctgaagtgatggaggacctggtgaagagcacagagtttaatgagcatgaactcaagcagtggtacaaaggatttctcaaggactgtccaagtgggaggctaaatctcgaggaatttcagcagctctatgtgaagttctttccttatggagacgcctccaagtttgcccagcatgccttccgaaccttcgacaagaatggg

SEQ ID NO: 21324 - DNA, 427 bp, Homo sapiens
aattcggcacgagcggcacgagtttcaagtgcgccgcctgtcagaagcatttctgtgtaggtgacagatacctcctcatcaactctgacatagtgtgcgaacaggacatctacgagtggactaagatcaatgggatgatataggcccgagtccccgggcatctttggggaggtgttcactgaagacgccgtctccatggcatcttcgtcttcactcttaggcactttgggggtttgagggtggggtaagggatttcttaggggatggtagacctttattgggtatcaagacatagcatccaagtggcataattcaggggctgacacttcaaggtgacagaaggaccagcccttgagggagaacttatggccacagcccatccatagtaactgacatgattagcagaagaaaggaacatttaggggca

SEQ ID NO: 21325 - DNA, 739 bp, Homo sapiens
gaaggatctgccgaaagctgtggagctcctgggtgacattgtgcagaactgtagtctggaagactcacagattgagaaggaacgtgatgtgatcctgcgggagatgcaggagaatgatgcatctatgcgagatgtggtctttaactacctgcatgccacagcattccagggcacacctctagcccaggctgtggaggggcccagtgagaatgtcaggaagctgtctcgtgcagacttgaccgagtacctcagcacacattacaaggcccctcgaatggtgctggcagcagctggaggagtggagcaccagcaactgttagacctcgcccagaagcacctcggtggcatcccatggacatatgcagaggacgctgtgcccactcttactccatgccgcttcactggcagtgagatccgccaccgtgatgatgctctaccttttgcccacgtggccattgcagtagagggtcctggctgggccagcccggacaatgtggccttgcaagtggccaatgccatcatcggccactatgactgcacttatggtggtggcgtgcacctgtccagcccactggcttcaggtgctgtggccaacaagctatgccagagtttccagaccttcagcatctgctatgcagagacgggcttgctgggtgcacactttgtctgtgaccgaatgaaaatcgatgacatgatgttcgtcctgcaagggcagtggatgcgcctgtgtaccaatgcc

SEQ ID NO: 21326 - DNA, 895 bp, Homo sapiens
gttatgacatgattacgaatttaataccgactcactatagggaatttggccctcgaggccaagaattcggcacgagcggcctcttagttcttctgaaccctgctcctgagctaggtaggaaacatgagcggcaccaacttggatgggaacgatgagtttgatgagcagttgcgaatgcaagaattgtacggagacggcaaggatggtgacacccagaccgatgccggcggagaacccgattctctcgggcagcagccgacggacactccctacgagtgggacctggacaaaaaggcttggttccccaagattactgaagatttcattgctacatatcaggccaattatggcttctctaacgatggcgcatctagttctaccgcaaatgttgaagatgtccatgctaggactgcagaggaacctccacaagaaaaagccccggaacccactgatgccagaaagaagggagaaaaaagaaaggctgagtcaggatggtttcatgttgaagaagacagaaatacaaatgtatacgtgtctggtttgcctccagatattacagtggatgaatttatacaacttatgtccaagtttggcattattatgagagatcctcagacagaagaatttaaggtcaaactttacaaagataatcaaggaaatcttaaaggagacggtctttgctgttatttgaaaagagaatctgtggaacttgcattaaaacttttggatgaagatgaaattagaggctacaaattacatgttgaggtggcaaagtttcaactgaagggagaatatgatgcctcaaagaagaagaagaagtgcaaagactataagaagaagctgtctatgcaacaaaagcagttggattggagacctgagaggcgagccggaccat

SEQ ID NO: 21327 - DNA, 455 bp, Homo sapiens
  misc_feature (1)...(455): n = a,t,c or g
ttnganaccngctatgactgattacgaatttaatacgactcactatagggaatttggccctcgaggccaagaattcggcacgaggtggactatgattttttgaagagactgtccaatgaaaaccatggaattgcacaaaggatttatggaaaccaggacacgtcttcccagcttaagaaattctacaaccaggtctccactccattgctccggaatgttcagttcaactatccccatacatcagtcacggacgtcactcaaaacaatttccataactactttggaggctcagagattgtggtggcaggaaaatttgaccctgctaaattggatcacatagagagcgttatcacggcgacttcggctaacacacagttagtcttggagaccctggcccaagatggacgacttgcaggattttctatcgaaagacaagcatgcagatnccngatttc

SEQ ID NO: 21328 - DNA, 465 bp, Homo sapiens
atcagctatgacatgattacgaatttaatacgactcactatagggaatttggccctcgaggccaagaattcggcacgaggcgatggcggcggggatagtggcttctcgcagactccgcgacctactgacccggcgactgacaggctccaactacccgggactcagtattagccttcgcctcactggctcctctgcacaagaggcggcttccggagtagccctcggtgaagccccagaccacagctatgagtcccttcgtgtgacgtctgcgcagaaacatgttctgcatgtccagctcaaccggcccaacaagaggaatgccatgaacaaggtcttctggagagagatggtagagtgcttcaacaagatttcgagagacgctgactgtcgggcggtggtgatctctggtgcaggaaaaatgttcactgcaggtattgacctgatggacatggcttcggacatcct

SEQ ID NO: 21329 - DNA, 503 bp, Homo sapiens
ttggacatgagctgagggcacggtcgcgggcggtcagccctgttcgcagctacggcgaggaggggcgcgattgctccttgttgccgctccgcttagtggccgcgtccattccgcgcggtgtcccgattttaggggtagggagaagtgtcagcttcaggcatcgcgaggcgtggcggccccatggccccgctgggaggcgccccgcggctggtactgctgttcagcggcaagaggaaatccgggaaggacttcgtgaccgaggcgctgcagagcagacttggagctgatgtctgtgctgtcctccggctctctggtccactcaaggaacagtatgctcaggagcatggcttgaacttccagagactcctggacaccagcacctacaaggaggcccaggcttcttttgcaggaagattgtggagggcatctcccagcccatctggctggtgagtgacacacggagagtgtctgacatccagtggtttcgggaggcctatggggcc

SEQ ID NO: 21330 - DNA, 482 bp, Homo sapiens
ggttagcatcatggatggatccgacgaaggcatattagcttgggttactgtgaattttctgacaggtcagctgcatggccacagacaggagactgtggggaccttggacctagggggagcctccacccaaatcacgttcctgccccagtttgagaaaactctggaacaaactcctaggggctacctcacttcctttgagatgtttaacagcacttataagctctatacacatagttacttgggatttggattgaaagctgcaagactagcaaccctgggagccctggagacagaagggactgatgggcacactttccggagtgcctgtttaccgagatggttggaagcagagtggatctttgggggtgtgaaataccagtatggtggcaaccaagaaggcaagtgatgttttttcactggttaaagttaccgtttacaatggaagctctggaaaagcccatgggaaactttttccaaaactc

SEQ ID NO: 21331 - DNA, 822 bp, Homo sapiens
gaagtttaagtataaggcagacactctcaaggtcgcgcagactggacaagacctcaaagaggagcatccgtgggtcgactacactgccccttccttaatcactctgctgtttacagacctgggcgtgctgacaccctcagcagtcagcgatgagctcatcaagctctatctgtaacctgtgagccctttcctgccaaggtgcagcttacgtagttgaggcagggtgagtagctgcttgacaccccagtgagtcaggccaaaactgagatgtgtttaatgaagatttatggagtaaggacttaaaatcatacatcttggagaacctttcttactcatttcagtcccatctaaaaatgtgtcagctattctaaatcccaacttaaattgttcttacggtttctagaaactttccttttcagtttccagaaatacaagttagataattggctacttaactgatgaaagatgagcccaagtccacctgtcttcatcctcccctgcactccagactgatctgcctaaagcacgcgagatgcaggcgaaaagcagccacacccctctgccacaaatgaccaacagctggtcaggacgttacacgcggtgccttgtaagaggcaagaaacacttgccgaatctgcatctggcttccagtggtaagcacattcctcagcaggatcaagccaaacagtaaaaactaccaagagaacacgaggaaggcagaaacgatgtttagcaacagtattctgcatggttcactgcttaagaaaatgccttctggaatatttgtaaactgaaattctgtatgtgtaagagatgtttaaa

SEQ ID NO: 21332 - DNA, 537 bp, Homo sapiens
  misc_feature (1)...(537): n = a,t,c or g
gnnnnnnnnnnntttgannccctnncttgnaanaccgttatgacatgattacgaatttaatacgactcactatagggaatttggccctcgaggccaagaattcggcacgagagaccatattggatgacctcagagcagaagaccatttctctgtgattgatttcaaccagaacattcgaacttggagaaatgatttaatttcagctacaaaaacacaggttgcagatgccaagaggtatattgagaaaatccagcccagtggaggcacaaacatcaacgaagcactcctacgggcaatcttcattttgaatgaagccaataacttgggactgttagaccccaactccgtctcgctgatcattttggtttctgatggagatccaacagtgggcgaactaaaactgtcaaaaattcagaaaaacgttaaggagaacatccaagacaatatctccttgttcagtttgggcatgggatttgatgtggactatgattttttgaagagactgtcaatgaaaaccatggaattgcccaaggatt

SEQ ID NO: 21333 - DNA, 750 bp, Homo sapiens
gaataagcacacactcactcagatcaaagatgcagtgagggacggcttgagggctgtcaaaaatgctattgatgatggctgtgtggttccaggtgctggtgccgtggaagtggcaatggcagaagccctgattaaacataagcccagtgtaaagggcagggcacagcttggagtccaagcatttgctgatgcattgctcattattcccaaggttcttgctcaaaactctggttttgaccttcaggaaacattagttaaaattcaagcagaacattcagaatcaggtcagcttgtgggtgtggacctgaacacaggtgagccaatggtggcagcagaagtaggcgtatgggataactattgtgtaaagaaacagcttcttcactcctgcactgtgattgccaccaacattctcttggttgatgagatcatgcgagctggaatgtcttctctgaaaggttgaattgaagcttcctctgtatctgaatcttgaagactgcaaagtgatcctgaggattacagctgtggaatttttgtccaagcttcaaataattttgaaagaaattttcccatatgaaaaaaggagagaacactggcatctgttgaaatttggaagttctgaaattatagttacagtattttttaaaaattgcactgaagtgtacacagataaagcaggactttcacccagtgaacaggatgttttgctttagcagcagtgacataaaattccatgttagataagcatatgtt

SEQ ID NO: 21334 - DNA, 539 bp, Homo sapiens
gccgccgccatgtcctccggggctagcgcgagcgccctgcagcgcttggtagagcagctcaagttggaggctggcgtggagaggatcaaggtctctcaggcagctgcagagcttcaacagtactgtatgcagaatgcctgcaaggatgccctgctggtgggtgttccagctggaagtaaccccttccgggagcctagatcctgtgctttactctgaagactctaggagagaagtttgctgaggaatgccttcaagcacaaagtgatgaatgactgccttcaagtctcaagaaaacacttttccctaacttttagagatatttcagccctttcctgtggcctggtcctatagccaaaatcacagatattcatgagtttctacttgagtgagaaaactgggtgaaggaatagaattttaaatagtaataactgcttgttttttttgtgcaagtacttttatacataagataaacaaaaaccttaccaccaaacataccaaaatgcacctcttttcataagtgagttactaagatttctata

SEQ ID NO: 21335 - DNA, 804 bp, Homo sapiens
cccacgcgtccgaaactatgaagagtttgtacaaatgatgacagcaaagtgaagaccttgtacagaatgtgttaaatttcttgtacaaaattgtttatttgccttttctttgtttgtaacttatctgtaaaaggtttctccctactgtcaaaaaaatatgcatgtatagtaattaggacttcattcctccatgttttcttcccttatcttactgtcattgtcctaaaaccttattttagaaaattgatcaagtaacatgttgcatgtggcttactctggatatatctaagcccttctgcacatctaaacttagatggagttggtcaaatgagggaacatctgggttatgccttttttaaagtagttttctttaggaactgtcagcatgttgttgttgaagtgtggagttgtaactctgcgtggactatggacagtcaacaatatgtacttaaaagttgcactattgcaaaacgggtgtattatccaggtactcgtacactatttttttgtactgctggtcctgtaccagaaacattttcgtcgacgcggccgcgaattccagatctatgaatcgtagatactgaaaaaccccgcaagttcacttcaactgtgcatcgtgcaccatctcaatttctttcatttatacatcgttttgccttcttttatgtaactatactcctctaagtttcaatcttggccatgtaacctctgatctatagaattttttaaatgactagaattaatgcccatcttttttttggacctaaattcttcatgaaaatatattacgagggcttattcaga

SEQ ID NO: 21336 - DNA, 433 bp, Homo sapiens
  misc_feature (1)...(433): n = a,t,c or g
gctcatgcccccgtcttgccagtgacacttgaagcctcccgacttccacagagtgcttcaggacacattttgagtggtattttcttttctttttttcttctttttttttttttnnttgtggccnaggnngaaggnnngggnccnganntgggntnncngaaccnttngcntccanggtnaangnaatttttnnncctaacccnccaaagaacnnggancnntaaantggcncnacnnccccnggtaaattnngnnttttggntnaaaacgggntttncccttgtaatncaggngggtntnaaacnctggncctcaagnnacccncnnnntgggccncccaaggngtnaaaannncnggcncnacccaccnggccnnncnngnggggtntttttttnagggcccnggaannctttaaaacggggnaaaaaaaac

SEQ ID NO: 21337 - DNA, 409 bp, Homo sapiens
  misc_feature (1)...(409): n = a,t,c or g
tttgactgattacgaatttaatacgactcactatagggaatttggccctcgaggccaagaattcggcacgagcctggggacttcttttcttttcttcttggtattttattttctttttcttcttcttctttttttttttaancaaagtctnactcnatngctttggcaggagtgcaggggngcagnctcggntnacngnaacttccgcctccngggttnaagcnattctccngcctaagnctccngagaancnggnatnacaagggggcnccaccanacccggttaatttggaattttttagtaaaaanggggttnnaccangtngnccaggcnggnntaaaactccngacctcaggaaatcngcccgcctaagcctcccaaagggctggnaaaacaggggtnanccac

SEQ ID NO: 21338 - DNA, 491 bp, Homo sapiens
  misc_feature (1)...(491): n = a,t,c or g
gnnggnannntgnnttnnnnntttnggaaacnctatgacatgatcnccgaatttaatacgactcactatagggaatttggccctcgaggccaagaattcggcacgagttggtttctgatggagatccaacagtgggcgaactaaaactgtcaaaaattcagaaaaacgttaaggagaacatccaagacaatatctccttgttcagtttgggcatgggatttgatgtggactatgattttttgaagagactgttcaatgaaaaccatggaattgcacaaaggattaatggaaaccaggacaccgtnttcccancttangaaattctacanccaggtctccactccattgctccggaatgttcnttnnnctattcctntacatcagtcacggacggtnnntntnntntnnncnttagtgantttngtggntattattgttntgttnnttgcnntctatncntnctttnntggttnnnatnntnanntcgtatc

SEQ ID NO: 21339 - DNA, 431 bp, Homo sapiens
cttggacacttgacttgaacagctatgactgattacgaatttaatacgactcactatagggaatttggtcctgcacggagccagaactcactctatgccaccttcctccccaagtggactcgccccgtgctgcctttctggaagcgatacctggatggttggaatgccatcttttcctttgggaagaagctgattgatgagaagctcgaagatatggaggcccaactgcaggcagcagggccagatggcatccaggtgtctggctacctgcacttcttactggccagtggacagctcagtcctcgggaggccatgggcagcctgcctgagctgctcatggctggagtggacacgacatccaacacgctgacatgggccctgtaccacctctcaaaggaccctgagatccaggaggccttgcacgaggaagt

SEQ ID NO: 21340 - DNA, 476 bp, Homo sapiens
  misc_feature (1)...(476): n = a,t,c or g
cntatgacatgattacgaatttttacgactcactatagggaatttggccctcgaggccaagaattcggcacgagggggaaccaggtgtcggacatggctcaactcttctactactttgccttggaagctatttgctacatcctgttcgagaaacgcattggctgcctgcagcgatccatccccgaggacaccgtgaccttcgtcagatccatcgggttaatgttccagaactcactctatgccaccttcctccccaagtggactcgccccgtgctgcctttctggaagcgatacctggatggttggaatgccatcttttcctttgggaagaagctgattgatgagaagctcgaagatatggaggcccaactgcaggcagcagggccagatggcatccaggtgtctggctacctgcacttcttactggccagtggacagctcagtcctcgggaggccatgggcagcctgcctgagct

SEQ ID NO: 21341 - DNA, 708 bp, Homo sapiens
gcatggagctatggaaggagcaccgggaccagcacgacctgacctatgggccgttcaccagggaaggacaccactggtaccagctgcgccaggctctgaaccagcggttgctgaagccagcggaagcagcgctctatacggatgctttcaatgaggtgattgatgactttatgactcgactggaccagctgcgggcagagagtgcttcggggaaccaggtgtcggacatggctcaactcttctactactttgccttggaagctatttgctacatcctgttcgagaaacgcattggctgcctgcagcgatccatccccgaggacaccgtgaccttcgtcagatccatcgggttaatgttccagaactcactctatgccaccttcctccccaagtggactcgccccgtgctgcctttctggaagcgatacctggatggttggaatgccatcttttcctttgggaagaagctgattgatgagaagctcgaagatatggaggcccaactgcaggcagcagggccagatggcatccaggtgtctggctacctgcacttcttactggccagtggacacctcagtcctcgggaggccatgggcagcctgcctgagctgctcatggctggagtggacacgacatccaacacgctgacatgggccctgtaccacctctcaaaggaccctgagatccaggaggccttgcacgaagaag

SEQ ID NO: 21342 - DNA, 786 bp, Homo sapiens
gtgctttgtaccgcctcagtggagactggaatcccttacacattgatcctaactttgctagtctagcaggttttgacaagcccatattacatggattatgtacatttggattttctgccaggcgtgtgttacagcagtttgcagataatgatgtgtcaagattcaaggcagttaaggctcgttttgcaaaaccagtatatccaggacaaactctacaaactgagatgtggaaggaaggaaacagaattcattttcaaaccaaggtccaagaaactggagacattgtcatttcaaatgcatatgtggatcttgcaccaacatctggtacttcagctaagacaccctctgagggcgggaagcttcagagtacctttgtatttgaggaaataggacgccgcctaaaggatattgggcctgaggtggtgaagaaagtaaatgctgtatttgagtggcatataaccaaaggcggaaatattggggctaagtggactattgacctgaaaagtggttctggaaaagtgtaccaaggccctgcaaaaggtgctgctgatacaacaatcatactttcagatgaagatttcatggaggtggtcctgggcaagcttgaccctcagaaggcattctttagtggcaggctgaaggccagagggagctctgaagggcacactacactattaataaaaatggaatcattaaatactctcttcacccaaatatgcttgattattctgcaaaagtgattagaactaagatgcaggggaaattgcttaacattttcagatatca

SEQ ID NO: 21343 - DNA, 648 bp, Homo sapiens
  misc_feature (1)...(648): n = a,t,c or g
tcacacatacatcaaacaggccaaaaaaaataaacagcaacttcatagacaaaaaaggaaaaaaaaagaaaccttttatctttggcctttttaaccatctcatacaaaccaactacttatagtacagctaagtacatacacaaaaaagttactggaatgctcggaataagattgtttttctgttgtcatttttgctttttttacaaggttttttttctcctttgagattataatgaacatggtcacaccacaagtaaagtcagaagtaggacagagaacgctccgaaggctggtttggtcatccgagatcattaaaaatggctgaccctaacaatatgtacaaaaatataaaatgtaaataaaaaatacaaacaaatttcctttttaaagtacttttaagaaaaaaagcagggccttggaagttttgtcgacgcggccgcgaattccagatctatgaatcgtagatactgaaaaaccccgcaagttcacttcaactgtgcatcgagcaccatctcaatttctttcatttatacatcgttttgccttcttttatgtanctatactcctctangtttcaatcttggccatgtaacctctgatctatagaattttttanatgctaganttaatgccatctttttttggcct

SEQ ID NO: 21344 - DNA, 482 bp, Homo sapiens
  misc_feature (1)...(482): n = a,t,c or g
aattcggcacgagcaatccttccctcgataaatgtcttggcatcgtttgctttgagcaagaaggttcatctgatatcagtcttctcaatcttgtgtacttactgaataaagtctggctcttttgcactcataaccaatatggttagctgaaccctgcctctcacatgctgttgttacataccttagctggtgattaattttcttgttttcccaagtcaataaaaagattgcagaccaggcacggtggctcacgcctgaaatcccagcactttgggaggccaaggcaggcggatcacttgagctcaggagttcaagtccagcctgggcagcatggtgaaaccgtgtctctacaaaaactacaaaaattagccaggcatggtggcatgtgcctgtaatctcagctacttgagaggctgaagtgggaagatcaaattgagcccacgaagttgangctgtantgagctgtgatggnaccactgcac

SEQ ID NO: 21345 - DNA, 358 bp, Homo sapiens
gttctgtgatctacatgcttatcctaacactagtactctactatttgctgctttattgtatgtattgaaattaagtagtgtaaatcctccaaatttgttctttttcaaaattgttttggctatcccaggtcctttgccttcccatataaattttagaatctgttttagaatcaatttttacaaaaacaaatgcctgctaggattttgatagggattgagtctaatctatagatgaatttgaaagaaaagacatcttaacaatattgagtcttctaagccataaacgtggtatgtctttccattaatttagttcttcttaatttctctcagcaatgttttatagtttttggtatacaga

SEQ ID NO: 21346 - DNA, 404 bp, Homo sapiens
gcaaaagaagtgtaagacttgtacactgaaagaacaaaacattattgaaagaaattaaagaagaccgaaataaatggaaacacacctcatgtttatggattgcaagacttaatattgtgaagatgtcaatactttgcaaattggttcacagattgagtgcaatcactatcaaaattcttgctggctttgtttggcagaaattgataagctgatcctaaaatcatatggaaattcaaggatccagagtagccaaaacagtcttgaaaaagaagaggaaagttagaaggctcacactttccaacttcaaaacatactactttagagttacagtaataaaaatagagtggctgtgtcagaaggataaatatatagatcaatggaatagaattaagagtctagaaata

SEQ ID NO: 21347 - DNA, 911 bp, Homo sapiens
gagcaaccgctgaggcagaggagaagcagccagaggaggacttccagtgcatcgtgtacttctggcagggccgtgaagcctccaatatgggctggctcaccttcaccttcagcctgcaaaagaagttcgagagcctcttccctgggaagctggaggtggtacgcatgacgcagcagcaggagaaccccaagttcctgtcccatttcaagaggaagttcatcatccaccggggcaagaggaaggcggtccagggcgcccaacagcccagcctctaccagatccgcaccaacggcagcgccctctgcacccggtgcatccagatcaacaccgactccagcctcctcaactccgagttctgcttcatcctcaaggttccctttgagagtgaggacaaccagggcatcgtgtatgcctgggtgggccgggcatcagaccctgacgaagccaagttggcagaagacatcctgaacaccatgtttgacacctcctacagcaagcaggttatcaacgaaggtgaggagcctgagaacttcttctgggtgggcattggggcacagaagccctatgatgacgatgccgagtacatgaaacacacacgtctcttccggtgaggccagggccctgaccctcccctcagtcctggcactgctgcttatgacctctggcctcaccttgacccttgattcccaggtgctccaacgagaagggctactttgcagtgactgagaaatgctccgacttttgccaagatgacctggcagatgatgacatcatgttgctagacaatggccaagaggtgtgatgttgccactagccctgcccatccaaggaggcgcccatagacttacttacaaatgggaattctcgggccaggagcaaggggctgttcccaggcacccatgcaaccgtat

SEQ ID NO: 21348 - DNA, 752 bp, Homo sapiens
ggaagtggaggtcctcaaagagcaaatcaaagaactaatagagaaaaattcccagctggagcaggagaacaatctgctgaagacactggccagtcctgagcagcttgcccagtttcaggcccagctgcagactggctccccccctgccaccacccagccacagggcaccacacagccccccgcccagccagcatcgcagggctcaggaccaaccgcatagctgcctatgcccccgcagaactggctgctgcgtgtgaactgaacagacggagaagatgtgctagggagaatctgcctccacagtcacccatttcattgctcgctgcgaaagagacgtgagactgacatatgccattatctcttttccagtattaaacactcatatgcttatggcttggagaaatttcttagttgggtgaattaaaggttaatccgagaattagcatggatataccgggacctcatgcagcttggcagatatctgagaaatggtttaattcatgctcaggagctgtgtgcctttccatcccttccggctccctacccctcacttccaagggttctctctcctgcttgcgcttagtgtcctacatggggttgtgaagcgatggagctcctcactggactcgcctctctcctctcctccccccaggaggaacttgaaaggagggtaaaaagactaaaatgagggggaacagagttcactgtacaaatttgacaactgtcaccaaaattcataaaaaacaatagtt

SEQ ID NO: 21349 - DNA, 1008 bp, Homo sapiens
gcggcacgaggctcatcgctacagtgcgccggcctgccgaggccgaggcccaccgcatccagcagattgccgagggtgaaaaggtgaagcaggtcctcttggcacaggcagaggctgagaagatccgcaaaatcggggaggcggaagcggcagtcatcgaggcgatgggcaaggcagaggctgagcggatgaagctcaaggcagaagcctaccagaaatacggggatgcagccaagatggccttggtgctagaggccctgccccagattgctgccaaaatcgctgccccacttaccaaggtcgatgagattgtggtcctcagtggagacaacagtaaggtcacatcagaagtgaaccgactgctggccgagctgcctgcctctgtgcatgccctcacaggcgtggacctgtctaagatacccctgatcaagaaggccactggtgtgcaggtgtgaggctcctacaggcccactctcttcagcagccacccggccctccctccagcacccgttttaatcccacagaacaacgggaacgttactgactctggtgccttatctcgaagggaccagaagtgctgtgtgttcaggccatctctggctgtcttcctgtctctcctgtctgtccacctcctcctcttcctctcctttaccccactttcactgccactttcatcaggtttgtgtctcatctccctgcgtgtcttttcctttgtctgtctttttctttcccccatgcacatcatgtagattaagctgaagatgtttattacaatcactctctgtggggggtggccctgctgctcctcagaatcctggtgccttgaagttctctgtgcatctgtccatcctccctatggccctggccagagctcagcatgggcaggggttctgggtaggacggtcactgtcctttctcctggactggtcttcccagccctaaaccctgccccaggaagcccacagcctcacctgctgctgcccctctaggtctgggcagccatgacct

SEQ ID NO: 21350 - DNA, 711 bp, Homo sapiens
gggaaggtgtgtctacgacttcgagataatggacttctggccaagccaacccatggcgacattatcaggtttgcgcctccgctggtgatcaaggaggatgagcttcgagagtccattgaaattattaacaagaccatcttgtctttctgagggtagccagctgttttcagtggtccctgggagccagctggagacaggtggtcctgtaaaagctttattcctaatgtgggcacattccactcccatgagtcttcaaaaactttttttttgaatatatttttttcagttgatacataatagaacaacgtttatgaacctgccgtttgctttgtaacgtaactaaataatgtaatggcatctatattcagttgaagtgttttgatgtgcatgtgtacttcctaaggtgaaatgcatctatatacagacagcctctaaatcaagtccttcagtataattgatatatgtttttataatttcctcactggtataagtgtttcatatttgaaaaagttatctctgggtattgcataaaaggcttcatcttataaagtgaaatcattgttattgaattttaggaaggattaatggttaagtgtatataaaatactaatattaagtaaacttcatattggccaacaccagggttgtattctatggatgtcattattttgaattaagaattagtgtttaacattcctaaattgttttgag

SEQ ID NO: 21351 - DNA, 426 bp, Homo sapiens
  misc_feature (1)...(426): n = a,t,c or g
acccgcttngacaacagctatgacatgattacgaatttaatacgactcactatagggaatttggccctcgaggccaagaattcggcacgagcaaggtggaaaacactgaagagaaccgccggcagttccgagaaatcctcttctctgtggacagttccatcaaccagagcatcgggggtgtgatccttttccacgagaccctctaccagaaggacagccagggaaagctgttcagaaacatcctcaaggaaaaggggatcgaggagggaatcaagttagaccaaggaggtgctcctcttgcaggaacaaacaaagaaaccaccattcaagggcttgatggcctctcagagcgctgtgctcagtacaagaaagatggtgttgactttgggaagtggcgtgctgngctgaggattgccgaccagtgtc

SEQ ID NO: 21352 - DNA, 908 bp, Homo sapiens
cagtctgctttgactatgtgttaccgcccattcttcaatgtcagagtggccatcttgtttgtagcaactgtcgcccaaagctcacatgttgtccaacttgccggggccctttgggatccattcgcaacttggctatggagaaagtggctaattcagtacttttcccctgtaagtatgccaccacgggctgttccctgaccctgcaccatacggagaaaccagaacatgaagacatatgtgaataccgtccctactcctgcccatgtcctggtgcttcctgcaagtggcaggggtccctggaagctgtgatgtcccatctcatgcacgcccacaagagcattaccacccttcagggagaagacatcgtctttctagctacagacattaacttgccaggggctgtcgactgggtgatgatgcagtcatgttttggccatcacttcatgctggtgctggagaaacaagagaagtacgaaggccaccagcagttttttgccatcgtcctgctcattggcacccgcaagcaagccgagaactttgcctacagactggagttgaatgggaacccggcggagattgacctgggaggccacgccccgttcgattcatgacggtgtggctgcggccatcatgaacagcgactgccttgttttcgacacagccatagcacatctttttgcagataatgggaaccttggaatcaatgttactatttctacatgttgtccatgatgtgactttcgtaaaccttcaaaattatttgggcatagtgctctatgtttaataaaggtttttatagatgttttattccatatgtcttcacaagtcaggacccacaattacccgtgttttgtttgaacagcagtgtcccatctggcttcgacccaacaaaggtcgacgcggccgcg

SEQ ID NO: 21353 - DNA, 750 bp, Homo sapiens
ggggtatttctttcatactttattaaagtatcaatatccctctctccattgtccagatgaaaatatcctgatataatgcaccaaaaaccatgcagtttcggaacagtctaaagagaagtggtgagactcccagtggagacaccatcagtctccacggactgcataaaattgtgtgccacaattctaactcttttctgaatcttcttcccaagttttctaaactagcacagtaaacagacaaactaatgtgccgtatggcctgctgcaattggcttctctgataacaaatatgtaccttacaacatatgtcatgaatttgcatacaaagattcttgtcattcttaataaactgtggcacttggtatttgaatgtgtgtgaaaataagggaagtcaagagattaaatgctgaacttattaatggaatagaaataataaggaggctgaggctggagaattgcttgaacccgggaggcggaggttgcagtgagccgagatcgtgccactgcgctccagcctgggcatcagagcaagattctgtctcagaaaaaaagaaaaaaaaagaaataataagaaaaacttccagatttcaaagtaacaagaaagaagacaggttggccaaagggaggaaaggggggacataaattaattgactttctattcccaaaatgggctagttatatcaaataaatactcccactgccctttctgagtgagagtgtttctcataagtcaaaaatttctgtttactc

SEQ ID NO: 21354 - DNA, 866 bp, Homo sapiens
gcggcacgagggaaaggtcaagttttattctggtgtcttggggaagctttgttaaatttttgttaatgtgggtaaatctgagtttagttcaactgcttccctacatagactagagggctaaggattctgtctgctgctttgtttcttctaagtaggcatttagatcattcctataggcttcctattttcactttactgctctaatgctgctagtcgtaagtctttagcacactaggtggtatgcctttattagcataaaacaaaaaaaactttaacaggagcttttacatattactgggatggggggtggttcgggatgggtgggcagctgctgaaccctttagggcatttcctctgtaatgtggcgctttcaactgtactgctgcagctttaagtaccttaaagcttctcctgtgaacttcttagggaaatgttaggttcagaactaaagtgttttgggtgggttttgttgcgggggggagggtaacaatgggtggtcttctgatttttatttttgaggttttgtcaactggagtacgtagaggaactttatttacagtactttgatttggcaggttttcttctacttgtgctctgcctggagctgtttccatatgatataaaaagcaagtgtagtattccattactatgtggcttagggatttatttgttttttaaaatcaaccatgttagctgggattagactccctacagtccttcaatggaaaagtaacatttaaaaatcctttgggtaattcgaattacagatttaaaagagcttaagatctggtgttttgttaatgcttctgtttattccagaagcattaaggtaacccattgccaagtatcattcttgcaaattattc

SEQ ID NO: 21355 - DNA, 510 bp, Homo sapiens
cagctatgacatgattacgaatttaatacgactcactatagggaatttggccctcgaggccaagaattcggcacgagggatcccgtccgagccccggccccaagtaacgccgccgccccggagccgccttggaggtccccctccccactaagtgcctctttgcatagcaccagtccccacccgcacgctctctggaccactacagctggacgggcaatggcgggtcggggaggcgcagcacgacccaatggaccagctgctgggaacaagatctgtcaatttaagctggttctgctgggggagtctgcggtaggcaaatccagcctcgtcctccgctttgtcaagggacagtttcacgagtaccaggagagcacaattggagcggccttcctcacacagactgtctgcctggatgacacaacagtcaagtttgagatctgggacacagctggacaggagcggtatcacagcctggcccccatgtactatcggggggcccaggctgccatc

SEQ ID NO: 21356 - DNA, 478 bp, Homo sapiens
  misc_feature (1)...(478): n = a,t,c or g
gnnnnnnttttgaaaccctnttactgattacgaatttaatacgactcactatagggaatttggccctcgaggccaagaattcggcacgagccaaacccaatgaatttactcttgaaaattttgcaaagaatgttccttataggtactttcagccatttggctttgggccccgtggctgtgcaggaaagtacatcgccatggtgatgatgaaagccatcctcgttacacttctgagacgattccacgtgaagacattgcaaggacagtgtgttgagagcatacagaagatacacgacttgtccttgcacccagatgagactaaaaacatgctggaaatgatctttaccccaagaaactcagacaggtgtctggaacactagagaaggctggtcagtacctactctggagcatttctcatcagtagttcacatacaaatcatccatccttgccaatagtgcatcctcacagtgaacactc

SEQ ID NO: 21357 - DNA, 565 bp, Homo sapiens
accccatagctatgacatgattacgaatttaatacgactcactatagggaatttggccctcgaggccaagaattcggcacgaggctgctgcctcacccacagcttttgatatctaggaggactcttctctcccaaactacctgtcaccatggcccaccgatttccagccctcacccaggagcagaagaaggagctctcagaaattgcccagagcattgttgccaatggaaaggggatcctggctgcagatgaatctgtaggtaccatggggaaccgcctgcagaggatcaaggtggaaaacactgaagagaaccgccggcagttccgagaaatcctcttctctgtggacagttccatcaaccagagcatcgggggtgtgatccttttccacgagaccctctaccagaaggacagccagggaaagctgttcagaaacatcctcaaggaaaaggggatcgtggtgggaatcaagttagaccaaggaggtgctcctccagagcgctgtgctcagtacaagaaagatggtgttgactttgggaagtggccgtgctgtgctgaggattgc

SEQ ID NO: 21358 - DNA, 739 bp, Homo sapiens
atgatgtaatcgatggctacccagtgaaaaaggggacaaacattatcctgaatattggaaggatgcacagactcgagtttttccccaaacccaatgaatttactcttgaaaattttgcaaagaatgttccttataggtactttcagccatttggctttgggccccgtggctgtgcaggaaagtacatcgccatggtgatgatgaaagccatcctcgttacacttctgagacgattccacgtgaagacattgcaaggacagtgtgttgagagcatacagaagatacacgacttgtccttgcacccagatgagactaaaaacatgctggaaatgatctttaccccaagaaactcagacaggtgtctggaacactagagaaggctggtcagtacctactctggagcatttctcatcagtagttcacatacaaatcatccatccttgccaatagtgtcatcctcacagtgaacactcagtggcccatggcattttataggcatacctcctatgggttgtcaccaagctaggtgctattggtcatctgctcctgttcacaccagagaaccaggctacaagagaaaaagcagaggccaagagtttgagggagaaatagtcggtgaagaaaccgtatccataaagacccgattccaccaaatgtgctttgagaaggataggccttcattaacaaaatgtatgtctggttccccagtagagctctactgcctcaacccaaggggatt

SEQ ID NO: 21359 - DNA, 495 bp, Homo sapiens
taccgcttgacatgattacgaatttaatacgactcactatagggaatttggccctcgaggccaagaattcggcacgagttcccatcggcgaagatggccctggagacggtgccgaaggacctgcggcatctgcgggcctgtttgctgtgttcgctggtcaagactatagaccagtttgaatatgatggttgtgacaattgtgatgcatatctacaaatgaagggtaaccgagagatggtatatgactgcactagctcttcctttgatggaatcattgcgatgatgagtccagaggacagctgggtctccaagtggcagcgagtcagtaactttaagccaggtgtatatgcggtgtcagtcactggtcgcctgccccaaggaatcgtgcgggagctgaaaagtcgaggagtggcctacaaatccagagacacagctataaagacctagcaagatgcaaggctgccagcatctttgctctccacctcctgcctctgg

SEQ ID NO: 21360 - DNA, 514 bp, Homo sapiens
  misc_feature (1)...(514): n = a,t,c or g
ttgnaaaattgaantctaaagctatgactgattacgaatttaatacgactcactatagggaatttggccctcgaggccaagaattcggcacgagcaaacacacacccaaacacacaaacacagacacacaaacacacacacaaacacacacacaaaacacacaaaaaacacaaacacacacatatacacacacacacacacaccctgaactggaaaccctaactcagtgtgtgtgtatgtgtgtgtatgtgtgtgtgtgtaagagagagagagagagagattaagctgtcctttgagtgaggaccagggaggggaagaagagaacccagggagagtccttccaaaggctgccttcacgagctttccttctggcggggttgggtgaggaccctggaccttgtcttcttgttttttccctttctgctgttttggtcaccctgccccacccttcatggncgcccattgtgcaaggaaacccagagggtacacagcacggcagggcanctgggaagct

SEQ ID NO: 21361 - DNA, 428 bp, Homo sapiens
  misc_feature (1)...(428): n = a,t,c or g
accngctntncttngantaccagctatgacatgattacnaatttantacnactcactatagggaatttggccctcgaggccaagaattcggcacgagcaagtatcttcagagaagattatttcctgctttatcttcagaaactggaaagggtcaaagaaaagacagtagctgggattacaggcatgagcaactgcgcccagctcttgtgtaccttatgtgaggaagtcctgctcaatcaggatcggtcacgcaggccctgatcttgctactctggttccatgtcctatggaagaccaaagtttaccaagatagatttttcccttcatagtggcagatagtgttaacccctgcaccatctgtaactcagaaatccccaccatttcttcccctgggcttcagaatagaattgcctggnttctctgaagat

SEQ ID NO: 21362 - DNA, 534 bp, Homo sapiens
ggttttaaggaaccatgctgatcatcagagaaaccaggcaattctattctgaagcccaggggaagaaatggtggggatttctgagttacagatggtgcaggggttaacactatctgccactatgaagggaaaaatctatcttggtaaactttggtcttccataggacatggaaccagagtagcaagatcagggcctgcgtgaccgatcctgattgagcaggacttcctcacataaggtacacaagagctgggcgcagttgctcatgcctgtaatcccaacacttagggaggctgaggtgggcagatcacctgaggttgggagttcgagaccagcctgaccaacatggagaaatgccatctctactaaaaatacaaaaattgggccgggcatggtgggtgcgttcctgtaatcccagctacttgggaggctgaggcaagagaattgcttgaacccagggaggcagaggttgcagtgagccgagatcacaccattgcactccaccttgggcaacaaaagcaaaactctgtctcaaa

SEQ ID NO: 21363 - DNA, 376 bp, Homo sapiens
gcggcacgagagcgcggcggcaagatggcagtgcaaatatccaagaagaggaagaacacagaatgttcttggtgagaagggccggcggattcgggaactgactgctgtagttcagaagaggtttggctttccagagggcagtgtagagctttatgctgaaaaggtggccactagaggtctgtgtgccattgcccaggcagagtctctgcgttacaaactcctaggagggcttgctgtgcggagggcctgctatggtgtgctgcggttcatcatggagagtggggccaaaggctgcgaggttgtggtgtctgggaaactccgaggacagagggctaaatccatgaagtttgtggatggcctgatgatccacagcgga

SEQ ID NO: 21364 - DNA, 676 bp, Homo sapiens
aaacacctttttaggtacgtggcctttcactggttgtgaattggtatgcatccgtagtagtaagttcacagattcactgcagtgcaggaatgttcttgcatgccaaagactcaactgctttcaaagataatgtgggtgctagatgcagtggcttacatctgtaaccctgttagggtgatcagacccaacaccaggtcgtgggggtgacaaagtccagtggagtcaaaggattgagaaaaagacagtttgagagagaagtaggaccagcagaccatcgggatggtggaggctgtgaaggccgtgagctctgggagcccacactatttattggtaatccaacaaagaaacagatggtgagaatgtgaaggtcagaagggcaccttgcattaagcacatgatttacagctgtgatggtttagcatatgctctgctacttgagataacggagagcaggttcttttaactcaagatacaatcgctcctaggagagcaaggagccagcaagtctagacacattccagggccatgaggggttttatgccctgagccctggattctatctaagcaggaggggttttatgccctaggcttagattatggtgcagcagggtagccttccaccctttagcacagagcttggtgttccagaggccacaaggggttttagaccatggac

SEQ ID NO: 21365 - DNA, 485 bp, Homo sapiens
atttgaaggcgatcttttaaaaagagattaaaccgaaggtgattaaaagaccttgaaatccatgacgcagggagaattgcgtcatttaaagcctagttaacgcatttactaaacgcagacgaaaatggaaagattaattgggagtggtaggatgaaacaatttggagaagatagaagtttgaagtggaaaactggaagacagaagtacgggaaggcgaagaaaagaatagagaagatagggaaattagaagataaaaacatacttttagaagaaaaaagataaatttaaacctgaaaagtaggaagcagaagaaaaaagacaagctaggaaacaaaaagctaagggcaaaatgtacaaacttagaagaaaattggaagatagaaacaagatagaaaatgaaaatattgtcaagagtttcagaaagattaattgggagtggtaggatgaaacaatttggagaagatagaagtttgaagtggaaaac

SEQ ID NO: 21366 - DNA, 476 bp, Homo sapiens
  misc_feature (1)...(476): n = a,t,c or g
gnnnngnnnnngtnnnnncccccccttcgccaccccctttgcctaaccgntatgacatgattacgaatttaatacgactcactatagggaatttggccctcgaggccaagaattcggcacgaggggccatgaacgtggagattggaaaccccacctacaagatgtacgaaggcggagagcctgatgatgtgggaggcctactggacgctgactttgccctggaccctgacaagcccaccaacttcaccaaccccgtgtatgccacactctacatggggggccatggcagtcgccactccctggccagcacggacgagaagcgagaactcctgggccggggccctgaggacgagataggggaccccttggcatagggccctgccccgtcggactgcccccagaaagcctcctgccccctgccagtgaagtccttcagtgagcccctccccagccagcccttcctggccccgncggag

SEQ ID NO: 21367 - DNA, 749 bp, Homo sapiens
gcaagcagagtggggatgtcacctgcaactgcacggatggccgggtggcccccagctgtctgacctgcgtcggccactgcagcaatggcggctcctgtaccatgaacagcaaaatgatgcctgagtgccagtgcccaccccacatgacagggccccggtgtgaggagcacgtcttcagccagcagcagccaggacatatagcctccatcctaatccctctgctgttgctgctgctgctggttctggtggccggagtggtattctggtataagcggcgagtccaaggggctaagggcttccagcaccaacggatgaccaacggggccatgaacgtggagattggaaaccccacctacaagatgtacgaaggcggagagcctgatgatgtgggaggcctactggacgctgactttgccctggaccctgacaagcccaccaacttcaccaaccccgtgtatgccacactctacatggggggccatggcagtcgccactccctggccagcacggacgagaagcgagaactcctgggccggggccctgaggacgagataggggaccccttggcatagggccctgccccgtcggactgcccccagaaagcctcctgccccctgccagtgaagtccttcagtgagcccctccccagccagcccttccctggccccgccggatgtataaatgtaaaaatgaaggaattacattttatatgtgagcgagcaagccggcaagcgagcacagtattattt

SEQ ID NO: 21368 - DNA, 457 bp, Homo sapiens
  misc_feature (1)...(457): n = a,t,c or g
ttcgncacancttgngtnattacgaatttantacgactcactatagggaatttggccctcgaggccaagaattcggcacgagtgaatttctttgatttaactgacttaacaactgactaaccattgatgagcactcctgatttttatctagaacattcagatttaccataatgttccttagtggtagaggtgtgagcctagtgatgtagaaagatacactgacttggtgcaaggccatctgcttaccacatcacaccacttggagatctttgcttccttgcttttatgtttgtacacaacacctaaaaccagttttgctgctataattctatactgtnnnnnnnnctgcgattttatctgttaaccaaataanacatantagaatttcctaatgagatatatctttatacttaaacagcttttttagaggtgagttttanagaagtctcttaattct

SEQ ID NO: 21369 - DNA, 442 bp, Homo sapiens
  misc_feature (1)...(442): n = a,t,c or g
antcccnncctntgaanaccgtttgactgattacgaatttaatacgactcactatagggaatttggccctcgaggccaagaattcggcacgagtacttttaacgtatgtatttcattgctgtgtcacactctgtgttttgtgaggtgaatgtcttccttttctttctccctaaccactaatgttagaattgatttccaagaatcggcatgtatacttaatactgaatttctttgatttaactgacttaacaactgactaaccattgatgagcactcctgatttttatctagaacattcagatttaccataatgttccttagtggtagaggtgtgtgcctagtgatgtagaaagatacactgacttggtgcaaggccatctgcttaccacatcacaccacttggagatctttgcttccttgcttttatgtttgtacacaacac

SEQ ID NO: 21370 - DNA, 592 bp, Homo sapiens
ttgctggaaaaagaagctgagctccgccgcatgcaagagatgattgcaaggatgcaggcgcagatgcagatgcagatgcagggcggggatggcgatggcggggctctcgggcaccacgtgtaaggtgatgtgcacatatcaagaagtcagagaaaacactttcctggataaaaaagaaaacattccagatgcatgatccagctgtgtgttttcaatccttgggagggtgccatccacattttaacagtacctgtgcctgagaatttaatttttaaaagactttgatgtgtttttgtatgaagtacttttaacgtatgtatttcattgctgtgtcacactctgtgttttgtgaggtgaatgtcttccttttctttctccctaaccactaatgttagaattgatttccaagaatcggcatgtatacttaatactgaatttctttgatttaactgacttaacaactgactaaccattgatgagcactcctgatttttatctagaacattcagatttaccataatgttccttagtggtagaggtgtgtgcctagtgatgtagaaagatacactgacttggtgcaaggccatctgct

SEQ ID NO: 21371 - DNA, 528 bp, Homo sapiens
  misc_feature (1)...(528): n = a,t,c or g
gatgagatttctgcttgtatatttctaaaaagaggaaggagcccaaaccatcctctccttaccactcccatccctgtgagccctaccttacccctctgcccctagccaaggagtgtgaatttatagatctaactttcataggcaaaacaaaagcttcgagctgttgcgtgtgtgagtctgttgtgtggatgtgcgtgtgtggtccccagccccagactggattggaaaagtgcatggtgggggcctcggggctgtccccacgctgtccctttgccacaagtctgtggggcaagaggctgcaatattccgtcctgggtgtctgggctgctaacctggcctgctcaggcttcccaccctgtgcggggcacacccccaggaagggaccctggacacggctcccacgtccaggcttaagggggatgcacttcccgcacctccagtcttctgtgtagcaactttaaccacgtttgtcggtcacgtccaatcccgagacggtgaatgacccaaanaaaggntcccgacaccaaa

SEQ ID NO: 21372 - DNA, 597 bp, Homo sapiens
cggccgcgtcgacacaaccatcacgcctcaggagatcaatggcaaatgggaccacgtgcggcagctggtgcctcggagggaccaagctctgacggaggagcatgcccgacagcagcacaatgagaggctacgcaagcagtttggagcccaggccaatgtcatcgggccctggatccagaccaagatggaggagatcgggaggatctccattgagatgcatgggaccctggaggaccagctcagccacctgcggcagtatgagaagagcatcgtcaactacaagccaaagattgatcagctggagggcgaccaccagctcatccaggaggcgctcatcttcgacaacaagcacaccaactacaccatggagcacatccgtgtgggctgggagcagctgctcaccaccatcgccaggaccatcaatgaggtagagaaccagatcctgacccgggatgccaagggcatcagccaggagcagatgaatgagttccgggcctccttcaaccactttgaccgggatcactccggcacactgggtcccgaggagttcaaagcctgcctcatcagcttgggttatgatattggcaacgaccccca

SEQ ID NO: 21373 - DNA, 446 bp, Homo sapiens
  misc_feature (1)...(446): n = a,t,c or g
ggcagtcagtgacaggtgtaacctctgtggatgacagcaacagttactggaggatacgggggaagagtgccacagtgtgtgagaggggaacccccatcaagtgtggccagcccatccggctgacacatgtcaacactggccgaaacctccatagtcaccacttcacttcacctctttctggaaaccaggaagtgagtgcttttggtgaggaaggtgaaggtgattatctggatgactggacagtgctctgtaatggaccctactgggtgagagatggtgaggtgcggttcaaacactcttccactgaggtactgctgtctgtcacaggagaacaatatggtcgacctatcagtgggcaaaaagaggtgcatggcatggcccaccaagtcagaacactactggaaagccatggaagcatcttcatgaacccantgagttgttgaagg

SEQ ID NO: 21374 - DNA, 418 bp, Homo sapiens
gtcgacctatcagtgggcaaaaagaggtgcatggcatggcccagccaagtcagaacaactactggaaagccatggaaggcatcttcatgaagcccagtgagttgttgaaggcagaagcccaccatgcagagctgtgaatctagaggctctgagccactgttaacgcacaatgttcacagacatctgttgctgcctcaccttgggatccctgccacaagttccttgggcagtggccatgtcaccattgagatgaagatatacaacagaaaatagtggctgtgtttggaagcttcagccctgcacatttgaactagtcactctcccagacttgcgtgggtcagttctttctgagtagaggacttgctggtaaaggggcagatgctttttattagtactgataaaacaaactgagggaaac

SEQ ID NO: 21375 - DNA, 667 bp, Homo sapiens
  misc_feature (1)...(667): n = a,t,c or g
gggctcaggaaggcagctgtcactgagcccctggaacagagcgagagtatcgtagtgggcagcagtcagtgacaggtgtaacctctgtggatgacagcaacagttactggaggatacgggggaagagtgccacagtgtgtgagaggggaacccccatcaagtgtggccagcccatccggctgacacatgtcaacactggccgaaacctccatagtcaccacttcacttcacctctttctggaaaccagttgctctgtaaggtgatattgtgatcattttatagaggagaaaacaaaggctcaaaggatttacagaagaagggatcaagttgagattcaaggaagtgagtgcttttggtgaggaaggtgaaggtgattatctggatgactggacagtgctctgtaatggaccctactgggtgaaagatggtgaggtgcggttcaaacactcttccactgaggtactgcttctgtcacangagaacaatatggtcnacctatcaatggcaaaaanaggtcatgnatggccaaccaanttananaaataccnggaagccnntgaaggatctcangaaaccaantgnttttaagggaaacccccctcaaacntntaacccanggcncnngccatttnacccaaannttnaaaaattntngngcccncttgg

SEQ ID NO: 21376 - DNA, 508 bp, Homo sapiens
  misc_feature (1)...(508): n = a,t,c or g
ggcagggaagtcctccctggccagtgggctgctgcggctccaggaggcagctgagggtgggatctggatcnacggggtccccattgcccacgtggggctgcacacactgcgctccaggatcagcatcatcccccaggaccccatcctgttccctggctctctgcggatgaacctcnacctgctgcaggagcactcggacgaggctatctgggcagccctggagacggtgcagctcaaagccttggtggccagcctgcccggccagctgcantacaagtgtgctgaccgaggcgaggacctgagcgtgggccataaacagctcctgtgtctggcacgtgcccttctccggaagacccagatcctcatcctggacgaggctactgctgccgtggaccctggcacggagctgcagatgcaagccatgctcggganctggtttgcacantgcactgtgctgctcattgccaccgcctgcgctccgtgatggactgtgcccgggntctggtca

SEQ ID NO: 21377 - DNA, 419 bp, Homo sapiens
  misc_feature (1)...(419): n = a,t,c or g
ttgaanccttggantcaacagctatgacatgattacgaatttaatacgactcactatagggaatttggccctcgaggccaagaattcggcacgagggacgaggctatctgggcagccctggagacggtgcagctcaaagccttggtggccagcctgcccggccagctgcagtacaagtgtgctgaccgaggcgaggacctgagtacatacagggtttcaccgtgttggccaggatggtctcgatctcctgatctcgtgatccgcccacctcagcctcccaaagtgctgggattacagcgtgggccagaaacagctcctgtgtctggcacgtgcccttctccggaagacccagatcctcatcctggacgaggctactgctgccgnggaccctgcacgganctgnnnatgcnnnccntgct

SEQ ID NO: 21378 - DNA, 820 bp, Homo sapiens
acccttttggtttggaccaccagctatgacatgattacgaatttaatacgactcactatagggaatttggccctcgaggccaagaattcggcacgagggcggcaagatggcagtgcaaatatccaagaagaggaagtttgtcgctgatggcatcttcaaagctgaactgaatgagtttcttactcgggagctggctgaagatggctactctggagttgaggtgcgagttacaccaaccaggacagaaatcattatcttagccaccagaacacagaatgttcttggtgagaagggccggcggattcgggaactgactgctgtagttcagaagaggtttggctttccagagggcagtgtagagctttatgctgaaaaggtggccactagaggtctgtgtgccattgcccaggcagagtctctgcgttacaaactcctaggagggcttgctgtgcggagggcctgctatggtgtgctgcggttcatcatggagagtggggccaaaggctgcgaggttgtggtgtctgggaaactccgaggacagagggctaaatccatgaagtttgtggatggcctgatgatccacaggcggagaccctgttaactactacgttgacactgctgtgcgccacgtgttgctcagacagggtgtgctgggcatcaaggtgaagatcatgctgccctgggacccaactggtaaagattggccctaagaagcccctgcctgaccacgtgagcattgtggaacccaaaagatgagatactgcccacccacccccatctcagaaccagaaagggttgggaaccccagaacccccctgcc

SEQ ID NO: 21379 - DNA, 430 bp, Homo sapiens
gctgagcaaagcccacctcagtgctggcctcgtgggcttctctgtctctgctgccctccaggtgacccagacactgcagtgggttgttcgcaactggacagacctagagaacagcatcgtgtcagtggagcggatgcaggactatgcctggacgcccaaggaggctccctggaggctgcccacatgtgcagctcagcccccctggcctcagggcgggcagatcgagttccgggactttgggctaagataccgacctgagctcccgctggctgtgcagggcgtgtccttcaagatccacgcaggagagaaggtgggcatcgttggcaggaccggggcagggaagtcctccctggccagtgggctgctgcggctccaggaggcagctgagggtgggatctggatcgacggggtccccattgcccacgccgac

SEQ ID NO: 21380 - DNA, 1526 bp, Homo sapiens
  misc_feature (1)...(1526): n = a,t,c or g
caaaggatatcatgaagtttccagggcctttggaaaaccagagattgtctttcctgttggaaaaggcaatcactagggaagcacagatgtggaaagtgaatgtgcggaaaatgccttcaaatcagaatgtttctccatcccagagagatgaagtaattcaatggctggccaaactcaagtaccaattcaacctttatccagaaacatttgctctggctagcagtcttttggataggtttttagctaccgtaaaggctcatccaaaatacttgagttgtattgcaatcagctgttttttcctagctgccaagactgttgaggaagatgagagaattccagtactaaaggtattggcaagagacagtttctgtggatgttcctcatctgaaattttgagaatggagagaattattctggataagttgaattgggatcttcacacagccacaccattggattttcttcatattttccatgccattgcagtgtcaactaggcctcagttacttttcagtttgcccaaattgagcccatctcaacatttggcagtccttaccaagcaactacttcactgtatggcctgcaaccaacttctgcaattcagaggatccatgcttgctctggccatggttagtctggaaatggagaaactcattcctgattggctttctcttacaattgaactgcttcagaaagcacagatggatagctcccagttgatccattgtcgggagcttgtggcacatcacctttctactctgcagtcttccctgcctctgaattccgtttatgtctaccgtcccctcaagcacaccctggtgacctgtgacaaaggagtgttcagattacatccctcctctgtcccaggcccagacttctccaaggacaacagcaagccagaagtgccagtcagaggtacagcagccttttaccatcatctcccagctgccagtgggtgcaagcagacctctactaaacgcaaagtagaggaaatggaagtggatgacttctatgatggaatcaaacggctctataatgaagataatgtctcagaaaatgtgggttctgtgtgtggcactgatttatcaagacaagagggacatgcttcccttgccacctttgcagcctgnttctgcatgtagtttcaacaagtgctacctttgagtgtaaactaaggtagactactttgggaatgagaacatgcaaaatcaggaaaggctgtagaaggaaatataccttaacaggctgatttggagtgagccagaaaaaaaaaataaaactctcattatttgtgtggctaattataattcagcgttatttaagcacataaagaccaaaaaaaaaaaaanaaatnccaaaaaanccaantttttttaaacttaaaaaanttttttngaanaangnnantgnccntttttttnnnccaaanngaaccgaanttnncccggtaaaaanttcantaaaanttnnggnccngaaatctngtcccccntaannancnggatnaaatttcccgggggttttgg

SEQ ID NO: 21381 - DNA, 445 bp, Homo sapiens
  misc_feature (1)...(445): n = a,t,c or g
gnggnnngnnnnnnnngtgttttnnnntggttntattgcttgacatgattacgaatttaatacgactcactatagggaatttggccctcgaggccaagaattcggcacgagcgtttttgtgctgtgggcagcaccctcccccgcagcggggtagggaagaaaactatcctgcgggttttaatttatttcatccagtttgttctccgggtgtggcctcagccctcagaacaatccgattcacgtagggaaatgttaaggacttctgcagctatgcgcaatgtggcattggggggccgggcaggtcctgcccatgtgtcccctcactctgtcagccagccgccctgggctgtctgtcaccagctatctgtcatctctctggggccctgggcctcagttcaacctggtggcaccagatgcaacctcactatggtatgctggccagcac

SEQ ID NO: 21382 - DNA, 552 bp, Homo sapiens
  misc_feature (1)...(552): n = a,t,c or g
gagtgtgtggacagcgagcgcaggccccacttcccccagttctcctactcggccagcggcacggcctgaggcggcggtggactgcgctggacgatagcttggagggatggagaggcggcctcgtgccatgatctgtatttaatggtttttatttctcgggtgcatttgagagaagccacgctgtcctctcgagcccagatggaaagacgtttttgtgctgtgggcagcaccctcccccgcagcggggtagggaagaaaactatcctgcgggttttaatttatttcatccagtttgttctccgggtgtggcctcagccctcagaacaatccgattcacgtagggaaatgttaaggacttctgcagctatgcgcaatgtggcattggggggccgggcaggtcctgcccatgtgtcccctcactctgtcagccagccgccctgggctgtctgtcaccagctatctgtcatctctctggggccctgggcctcagttcaacctggtggcaccagatgcaacctnactatggtatgctggcacaccctctcctggggg

SEQ ID NO: 21383 - DNA, 857 bp, Homo sapiens
gaatcattaaggagcggaggcttttggagctgctaaaatgccggattacctcggtgccgatcagcggaagaccaaagaggatgagaaggacgacaagcccatccgagctctggatgagggggatattgccttgttgaaaacttatggtcacttctcaagaaaattaatgagctcactggtattaaagaatctgacactggcctggccccaccagcactctgggatttggctgcagataagcagacactccagagtgaacagcctttacaggttgccaggtgtacaaagataatcaatgctgattcggaggacccaaaatacattatcaacgtaaagcagtttgccaagtttgtggtggaccttagtgatcaggtggcacctactgacattgaagaagggatgagagtgggcgtggatagaaataaatatcaaattcacattccattgcctcctaagattgacccaacagttaccatgatgcaggtggaagagaaacctgatgtcacatacagtgatgttggtggctgtaaggaacagattgagaaactgcgagaagtagttgaaaccccattacttcatccagagaggtttgtgaaccttggcattgagcctcccaagggccgtgctgctctttggtccacccggtacaggcaagacactctgtgcgcgggcagttgctaatcggactgatgcgtgcttcattcgagttattggatctgagcttgtacagaaatacgtcggtgagggggctcgaatgggttcgtgaactctttgaaatggccagaacaaaaaaagcctgccttatcttctttgatgaaattgatgctattggaggggctcgttttgatgatggtgct

SEQ ID NO: 21384 - DNA, 402 bp, Homo sapiens
gaactggaagatggcgtccgccacccgtctcatccagcggctgcggaactgggcgtccgggcatgacctgcaggggaagctgcagctacgctaccaggagatctccaagcgaactcagcctcctcccaagctccctgtgggtcctagccacaagctctccaacaattactattgcactcgcgatggccgccgggaatctgtgcccccttccatcatcatgtcgtcgcagaaggcgctggtgtcaggcaagccagcagagagctctgctgtagctgccactgagaagaaggcggtgactccagctcctcccataaagaggtgggagctgtcctcggaccagccttacctgtgacactgcaccctcacggccacccgactactttgcctccttggatttcctcc

SEQ ID NO: 21385 - DNA, 497 bp, Homo sapiens
acaaatactaattcaattttaagtcttaagtcacttttttaatatatatgatcttctgctcttcccacttcctcccctttctactgctctcccattttcccttgctgggagtagccacatgctcttgccccccaacccttgtatatggggacagtggggtcagtgcagctaccctttctttccctcctgcggaacagcggacccagcaagagcatccacatcctcactttgttcggagtggtctttggtttgggcggtggggcagaccttgggaaggggcttaggaagggagaggcagctcttccttcagctggctctcatcaggctgcagccccctccccgctcccacctccctgctgggaaaccacagcattatcacagcattattgtgacagccacgaacccattgcccattgtaatgggtagagaaattttatcataaaagatgtgaagaatgtggacagaaaatgtcagcttttccttgtctggaacaaaac

SEQ ID NO: 21386 - DNA, 808 bp, Homo sapiens
  misc_feature (1)...(808): n = a,t,c or g
gccaagtaactcttatttggagagaagacgatctgcacttcgcattttggcattgacatttaattttagggtcctttatatagaagggagagtaggtaaactgattttttttttaacagggagggtttgacaatctttggcagacttggagcaaaagattgaggtgcatttcatgcctccttttgagagtcttgctctgtcgcccaggctgtagtgcagtggcgcaatcttggctgcaacctcagcctcccaagtagctgggattacaaacataagccaccacgcccagccctcatacctcttttaaaagtcgacctgttttgcagaaagtctgctgttttgtactaaaggctttggaatttggcatttagctaggaatgcacattctttcacctcattcatactttaagaaccacagaagtgactctgcttggccagaaggcacactgtgttggtggttatattaaaagtccttgagtattttncttttcatgatcttgctcactgcaacttccgcctcccaggttcaggcgattctcctgcctcagcctcccaagtagctgcgactacaggcgtgtagcgccacacctggctaatttttgtgtttttagtagagatgaggtttcaccatattggccaggctgttctcaactcctgacctcgtgatccgcccacctcagcctcctaaagtgctgggattacagctgtgagccaccctgcctggccacttttgtatgatttctaatgtatttgtaatttacctaacaaattgcctaatctgctatgttaatgtatttatgaattaaaa

SEQ ID NO: 21387 - DNA, 512 bp, Homo sapiens
ggcctctattgccatgtgcctggaattattatatgctcatcactttatgaagaataaaatttgtctttcctgccttaaagttacattcgttcttccgctcaaatcctgatctggtccattaaagagtgttcgcagacaaagtttctgaaagattagagaagaatcccccccaagattgccccaacactgaactacagacaaacactattttatttaaataaggagacagctttctaaaagtatacattctctaataaaaatagtttattattttgaatgatttaatggttttctacacaatttacatcacaacatgtaaattttagcagtaacatctgattctaacagcacatcatgctattcctttcatagagccttcagagattcaatgctaaacaaatttccttagttggcatcaaggcactgatcactttagaggcttttaagaaattatttaaagatgcaaatgcctctgagtgaagtgtactatcccatcactgaagcccacagga

SEQ ID NO: 21388 - DNA, 466 bp, Homo sapiens
  misc_feature (1)...(466): n = a,t,c or g
tttgaanacctttgagaaccgnttacgaatttaatacgactcactatagggaatttggccctcgaggccaagaattcggcacgagggaagttgtctccttgaccgaagcctgctgtgcggaaggggctgaccctgactgctatgacaccaggacctcagcactgtctgccaagtcctgtgaaagtaattctccattccccgttcacccaggcactgctgagtgctgcaccaaagagggcctggaacgaaagctctgcatggctgctctgaaacaccagccacaggaattccctacctacgtggaacccacaaatgatgaaatctgtgaggcgttcaggaaagatccaaaggaatatgctaatcaatttatgtgggaatattccactaattacggacaagctcctctgtcacttttagtcagttacaccaagagttatctttctatggtagggtcctgctgtacctc

SEQ ID NO: 21389 - DNA, 927 bp, Homo sapiens
gccagaacacaattttcccctcagaacagatagacagactgaagccactgaactctgccaggagtcaacatgagattccttttgctggatatgcagaaatgataggaaaaaaaccaatggtgaaatttcaagtttcaaaaaccaacctttcattaccaatcccaggcaacaaacatgtccctgagtgttctttaagaacatttgggatttatgtacaatttaatactggagttagaactttttccttattgaatgccaaccttatgatggatgtgaaaatctacggccaaatacttttgaaaacacctttctatattgcacagtgggcaaatggcttatgtgaggtaagacactagagggataaatttccagatcaacatggctatggtatttagtaatggcccagcttagagacttcagctactgatctcatcacttattagacaaattgctgctgaccttacgcctgtatattaagcctccgcaggatgccggacaatggtgaagaaactccagatatcaaggaattgggaaatcctggccaaaccaccccaagatgattacactgaaatgtagtattagtactgctgccagatctctttttaacatcatgtgcgtctcttgggatccagcaaaagtgttaagccacaatgcccttgtgccttttaatataccacagtgccagttaaactaatatttttgtttgttgcttttgggagttattttcattagtgatttcagcaaatctcatgataaaggacaaggtcaagaactccagagcactgagcagagaggctggtgatgaaaaggtgaaggcctgcgcactgaactgtaaggcagtgggcagtacagggtaactggaggcggggccagggcctcagcgctatggaagagtgtccactgaggctgcacatggcccaggagtgg

SEQ ID NO: 21390 - DNA, 1128 bp, Homo sapiens
gcacaaatcagcatcgtcatggtgtacttccagctgtgtgcagaggattaccgctggtggtggagaaatttcctagtctccgggggctctgcattctacgtcctggtttatgccatcttttatttcgttaacaagctggacatcgtggagttcatcccctctctcctctactttggctacacggccctcatggtcttgtccttctggctgctaacgggtaccatcggcttctatgcagcctacatgtttgttcgcaagatctatgctgctgtgaagatagactgattggagtggaccacggccaagcctgctccgtcctcggacaggaagccaccctgcgtgggggactgcaggcacgcaaaataaaataactcctgctcgtttggaatgtaactcctggcacagtgttcctggatcctggggctgcgtggggggcgggagggcctgtagataatcttgcgtttttcgtcatcttattccagttctgtgggggatgagtttttttgtgggttgctttttcttcagtgctaagaaagttccctccaacaggaactctctgacctgtttattcaggtgtatttctggtttggatttttttttccttctttgttttaacaaatggatccaggatggataaatccaccgagataagggttttggtcactgtctccacctcagttcctcagggctgttggccaccctatgactaactggaagaggacacgccacagcttcagtgaggtttccgagcctctccctgcccatcctcaccactgaggccacgagcaaagcacagctccagctcggacagcaccctcagtgccagccagcctctgccagacctctctttccctcttctccccagcctcctccagggctgcccaaggcagggtttccagccaggcctcggggtcatcttttcaccaggagcaaacccaagtcttagttgctacaagaaaatcccctggaagtactgggggccaggttccccagacagcaggaattgcccctgttcagagcagccggagtttgctggaccacaaggaagaagagaagagacttgcagtgaactgtttttgtgccaagaaaccctggacctggggccaagtatttcccaagccaagcatc

SEQ ID NO: 21391 - DNA, 423 bp, Homo sapiens
ggcagtacgcggggacccggctgcggtggctgcgggactgacgagaaactactaaagttcctggggagcaaagtagaatttcataagaacaaaatggatggagaggagaaaacctatggtggctgtgaaggacctgatgccatgtatgtcaaattgatatcatctgatggccatgaatttattgtaaaaagagaacatgcattaacatcaggcacgataaaagccatgttgagtggcccaggtcagtttgctgagaacgaaaccaatgaggtcaattttagagagataccttcacatgtgctatcgaaagtatgcatgtattttacgtacaaggttcgctacactaacagctccaccgagattcctgaattcccaattgcacctgaaattgcactggaactgctgatggctgcgaacttctta

SEQ ID NO: 21392 - DNA, 459 bp, Homo sapiens
  misc_feature (1)...(459): n = a,t,c or g
ggcagtacgcggggacccggctgcggtggctgcgggactgacgagaaactactaaagttcctggggagcaaagtagaatttcataagaacaaaatggatggagaggagaaaacctatggtggctgtgaaggacctgatgccatgtatgtcaaattgatatcatctgatggccatgaatttattgtaaaaagagaacatgcattaacatcaggcacgataaaagccatgttgagtggcccaggtcagtttgctgagaacgaaaccaatgaggtcaattttagagagataccttcacatgtgctatcgaaagtatgcatgtattttacgtacaaggttcgctacactaacagctccaccgagattcctgaattcccaattgcacctgaaattgcactggaactgctgatggctgcgaacttcttanattggtaaataaaataaattataataaactggtaa

SEQ ID NO: 21393 - DNA, 419 bp, Homo sapiens
ggcagtacgcggggacccggctgcggtggctgcgggactgacgagaaactactaaagttcctggggagcaaagtagaatttcataagaacaaaatggatggagaggagaaaacctatggtggctgtgaaggacctgatgccatgtatgtcaaattgatatcatctgatggccatgaatttattgtaaaaagagaacatgcattaacatcaggcacgataaaagccatgttgagtggcccaggtcagtttgctgagaacgaaaccaatgaggtcaattttagagagataccttcacatgtgctatcgaaagtatgcatgtattttacgtacaaggttcgctacactaacagctccaccgagattcctgaattcccaattgcacctgaaattgcactggaactgctgatggctgcgaactt

SEQ ID NO: 21394 - DNA, 311 bp, Homo sapiens
ggcagtacgcggggacccggctgcggtggctgcgggactgacgagtgagtctcgggctggggcggaaacggagctccgggaaactactaaagttcctggggaagcaaagtagaatttcataagaacaaaatggatggagaggagaaaacctatggtggctgtgaaggacctgatgccatgtatgtcaaattgatatcatctgatggccatgaatttattgtaaaaagagaacatgcattaacatcaggcacgataaaagccatgttgagtggcccaggtcagtttgctgagaacgaaaccaatgaggtcaa

SEQ ID NO: 21395 - DNA, 709 bp, Homo sapiens
gagcagaagttttcaagaagcatggagtgtacaaccccaacaaaatcttcggcgtgacgaccctggacatcgtcagagccaacacctttgttgcagagctgaagggtttggatccagctcgagtcaacgtccctgtcattggtggccatgctgggaagaccatcatccccctgatctctcagtgcacccccaaggtggactttccccaggaccagctgacagcactcactgggcggatccaggaggccggcacggaggtggtcaaggctaaagccggagcaggctctgccaccctctccatggcgtatgccggcgcccgctttgtcttctcccttgtggatgcaatgaatggaaaggaaggtgttgtggaatgttccttcgttaagtcacaggaaacggaatgtacctacttctccacaccgctgctgcttgggaaaaagggcatcgagaagaacctgggcatcggcaaagtctcctcttttgaggagaagatgatctcggatgccatccccgagctgaaggcctccatcaagaagggggaagatttcgtgaagaccctgaagtgagccgctgtgacgggtggccagtttccttaatttatgaaggcatcatgtcactgcaaagccgttgcagataaactttgtattttaatttgctttggtgatgattactgtattgacatcatcatgccttccaaattgtgggtggc

SEQ ID NO: 21396 - DNA, 752 bp, Homo sapiens
aattcggcacgagggtcggagaagtaggaacctcctgccgggctcgtggcggcttctgtccgctccgcggcgggaagcgccttccccacaggacatcaatgcaagcttgaataagaaaaacaaattcttcctcctaagccatggcatatcagttatacagaaatactactttgggaaacagtcttcaggagagcctagatgagctcatacagtctcaacagatcaccccccaacttgcccttcaagttctacttcagtttgataaggctataaatgcagcactggctcagagggtcaggaacagagtcaatttcaggggctctctaaatacgtacagattctgcgataatgtgtggacttttgtactgaatgatgttgaattcagagaggtgacagaacttattaaagtggataaagtgaaaattgtagcctgtgatggtaaaaatactggctccaatactacagaatgaatagaaaaaatatgacttttttacaccatcttctgttattcattgcttttgaagagaagcatagaagagactttttatttattctagaattgcagaaatgactacactgtgctataccagagaattccagtagaaagaaacttgtaactctgttagcctcttacattcacctttattatacagcatgaaaaaaccataacttccttttttaaggacaaaaagttgtttgccttccctaagaaccttcctttaataaaactccatttttaaaacccctgaaaa

SEQ ID NO: 21397 - DNA, 761 bp, Homo sapiens
attagattttcctagatacaaagattaacaggaaacaaaaaaggaaatggtattatggggataaggctctatttgtactgcaatagctctgtaaacttgattatattacctgtttaggtgataaatatgcgtaccattagaccaatggacatggaaaccatagaagccagtgtcatgaagacaaatcatcttgtaactgtggaaggaggctggccacagtttggagtaggagctgaaatctgtgccaggatcatggaaggtcctgcgttcaatttcctggatgctcctgctgttcgtgtcactggtgctgatgtccctatgccttatgcaaagattctagaggacaactctatacctcaggtcaaagacatcatatttgcaataaagaaaacattaaatatttagtttggacttgaatatcaagtcgttgaaatttatttgaaatacttgctggcactgcacctggatttgtactgcaagacctgactattcataacggaaaacgatttctaaagcaacagcaggtatttttgtacagggaagtttaaatgtgtttgtgtatggaaaactctccactctcctcccctagatgccatgcttccttttgtctgttacggttgccatgttctttgaataacaaattatataacattttatcctctctcaccacaaggacaaagtatggatgtggcagagtcctcatgaaagatgtatccaaacaagataacttatatgtataaaattaaagcatataatatacc

SEQ ID NO: 21398 - DNA, 519 bp, Homo sapiens
  misc_feature (1)...(519): n = a,t,c or g
gtggtnnnntatttgaanccnttttgaanaccgtttgactgattacgaatttaatacgactcactatagggaatttggccctcgaggccaagaattcggcacgagatctgtgaggcgttcaggaaagatccaaaggaatatgctaatcaatttatgtgggaatattccactaattacggacaagctcctctgtcacttttagtcagttacaccaagagttatctttctatggtagggtcctgctgtacctctgcaagcccaactgtatgctttttgaaagagagactccagcttaaacatttatcacttctcaccactctgtcaaatagagtctgctcacaatatgctgcttatggggagaagaaatcaaggctcagcaatctcataaagttagcccaaaaagtgcctactgctgatctggaggatgttttgccactagctgaagatttnctaacntcctctnnaaatgctgtgantctgcctctgatnanttgcntggccaaanancntgnctgaaca

SEQ ID NO: 21399 - DNA, 644 bp, Homo sapiens
tttgacatgttgacgaacctaatacgactcactatagggaatttggccctcgaggccaagaattcggcacgagattttatccaccacatttaccttctctttttccatgtccccctttccttaagtaaatgacattaccatcctccagcactgtcctcttcttctcctcccctctctcaactctccaacctatgaccgaatcctgcccattttttaggccaaaagtcttctgggatgcatccagccaccctgcaccccactgccatgccccggcccgtgccactacctccctctccaccccacaactgctgcctccgcctcttacacggcatcccatccttgccttctgccacctccctgtgcggtcaggtgccctttgaaaggagtttgagcaatgttcatcctcattgcctcctgttcgtgcccacgatcccctcccccaagatactctttgtggggaagaggggctggggcatggcaggctgggtgaccgactaccccagtcccagggaaggtggggccctgcccctaggatgctgcagcagagtgagcaagggggcccgaatcgaccataaagggtgtaggggccacctcctccccctgttctggtggggaggggtagccatgatttgcccaactggggg

SEQ ID NO: 21400 - DNA, 653 bp, Homo sapiens
aatgtggtgtttccagtttgatgttgctgggtggttgagtgagtgaattttcatgtggctgggtgggtttttgcctttttctcttgccctgttcctggtgccttctgatggggctggaatagttgaggtggatggttctaccctttctgccttctgtttgggacccagctggtgttctttggtttgctttcttcaggctctagggctgtgctatccaatacagtaaccacatgcggctgtttaaagttaagccaattaaaatcacataagattaaaaattccttcctcagttgcactaaccacgtttctagaggcgtcactgtatgtagttcatggctactgtactgacagcgagagcatgtccatctgttggacagcactattctagagaactaaactggcttaacgagtcacagcctcagctgtgctgggacgacccttgtctccctgggtaggaggggggggaatgggggagggctgatgagaccccagctggggcctgttgtctgggaccctccctctcctgagaggggaggcctggtggcttagcctgggcaggtcgtgtctcctcctgaccccagtggctgcggtgaggggaaccaccctcccttgctgcaccagtggccattagctcccgtcaccactgcaaccca

SEQ ID NO: 21401 - DNA, 1095 bp, Homo sapiens
ggatgctactggtcttatacagggagtgaagtcagtagaaattgagaaggacgctcagttaaaacaattccttacaccaaaaactgaacaattaaaaccagaacgtgtcacatctcaggtatctaatttgaagaaaaaagaaactacagcagattctcaaaccacaacatctaagtcattacagaatcagtctctgaaagaaaatcagaagaagccatttgtgggaagttgggttaaaggcttaataagcaggggtgcttcttttatgccactctgtgtttcagctcataatagaaacactataactgatttacaaccttcagttaaaggggtaaataattttggtggctttaaaactaaaggtataaaccagaaggccagccacgtatccaagaaagctcgtaaaagtgcaagtaagcctcctcccatcagtaagccaccagcaggcccttcatcgtctaatggcacagctgcccacccacatgctcatgctgcttcagaagttttggaaaagtctggaagcacctcatgtggagctcaactcaaccacagttcttatgggaatggtatttcttcagcaaaccatgaagacttggtggaaggtcagattcataaacttcgtctaaaacttcgtaaaaagctaaaggcagaaaagaagaaattagctgctcttatgtcttccccgcaaagcagaacagttcgaagtgaaaatctagaacaggtgccccaggatgggtctccaaatgattgtgaatcaatagaggacttgttaaatgagctaccatatccaattgatattgccaatgagtctgcatgcaccactgttcctggtgtttccctgtacagtagtcaaactcatgaagaaattttagcggaattattgtctcctacacctgtttcaacagagctgtcagaaaatggggaaggtgactttaggtatttgggaatgggagatagtcatatcccaccaccagtaccaagtgaattcaatgatgtttcccagaacacacatctgagacaggaccataattattgtagccccaccaagaaaaatccatgtgaagttcagccagactctctgacaaataatgcctg

SEQ ID NO: 21402 - DNA, 665 bp, Homo sapiens
ctagttaaggcggcacagggccgaggcgtagtgtgggtgactcctccgttccttgggtcccgtcgtctgtgatactgcagcgcagccatggcagaaccgcagcccccgtccggcggcctcacggacgaggccgccctcagttgctgctccgacgcggaccccagtaccaaggattttctattgcagcagaccatgctacgagtgaaggatcctaagaagtcactggatttttatactagagttcttggaatgacgctaatccaaaaatgtgattttcccattatgaagttttcactctacttcttggcttatgaggataaaaatgacatccctaaagaaaaagatgaaaaaatagcctgggcgctctccagaaaagctacacttgagctgacacacaattggggcactgaagatgatgcgacccagagttaccacaatggcaattcagaccctcgaggattcggtcatattggaattgctgttcctgatgtatacagtgcttgtaaaaggtttgaagaactgggagtcaaatttgtgaagaaacctgatgatggtaaaatgaaaggcctggcatttattcaagatcctgatggctactggattgaaattttgaatcctaacaaaatggcaaccttaatgtagtgctgtgagaattctcctttgag

SEQ ID NO: 21403 - DNA, 946 bp, Homo sapiens
  misc_feature (1)...(946): n = a,t,c or g
ccttacagctatgacatgattacgaatttaatacgactcactatagggaatttggccctcgaggccaagaattcggcacgaggggctcccgcctctgttcaggacactgggtccccttggagcctccccaggcttaatgattgtccagaaggcggctataaagggagcctgggaggctgggtggaggagggagcagaaaaaacccaactcagcagatctgggaactgtgagagcggcaagcaggaactgtggtcagaggctgtgcgtcttggctggtagggcctgctcttttctaccatggcagcccagggctatggctattatcgcactgtgatcttctcagccatgtttgggggctacagcctgtattacttcaatcgcaagaccttctcctttgtcatgccatcattggtggaagagatccctttggacaaggatgatttggggttcatcaccagcagccagtcggcagcttatgctatcagcaagtttgtcagtggggtgctgtctgaccagatgagtgctcgctggctcttctcttctgggctgctcctggttggcctggtcaacatattctttgcctggagctccacagtacctgtctttgctgccctctggttccttaatggcctggcccaggggctgggctggcccccatgtgggaaggtcctgncggaagtggtttgagccatctcagtttggcacttggtgggccatcctgtcaaccagcatgaacctggctggagggctgggccctatcctggcaaccatccttgcccagagctacagctggcgcagcacgctggccctatctggggcactgtgtgtggttgtctccttcctctgtctcctgctcatccacaatgaacctgctgatgttggactccgcaacctggaccccatgccctctgagggcaagaagggctccttgaaggaggagagcacc

SEQ ID NO: 21404 - DNA, 769 bp, Homo sapiens
tatgacctgattacgaatttaatacgactcactatagggaatttggccctcgaggccaagaattcggcacgagcatgcacaagcccccaactaaaagccttgtctggaaaatctgcttggtgccataacagattatctggtgagccaggtaggagcacaaggagtaatttccctccctgcaggggaggcttgtgagcctgcgagccggagggaggccccactgattcagcgctgccaccgcgactggcgagttttcctctagtctcgcgactggacactggtcagtagaacctggacctgctgtaaggctgaagaagaaaaagaaaccatccaagctggcactcggttttggggagttctcttcactgctcacgccggccctcttgtgtgacctgtactgttgtgctgtgtggggctgggagccaactctcttttcgtcgcctgacacctgtgcttgcaccctgcccctggtcctttaataagacaagcagacacaggggctacagtcatgggcaatgccccaggcatcttccaagactcacacctgggatgtatcatttctaaatggaaggaatccaaatcagatggtttaaagaaaaagaaactccagcctgggaaacataggaagactccacctctacaaaaaacaggaaaaatgagccgggtgtgggggtgccttcctggggtctcagctactcagaaggctaaagtgaggatcgcttaagtccaggaggttgaggctgcagtgagttgtggtaataccatagca

SEQ ID NO: 21405 - DNA, 440 bp, Homo sapiens
  misc_feature (1)...(440): n = a,t,c or g
ttganacccgntatgatntgattacgaatttaatacgactcactatagggaatttggccctcgaggccaagaattcggcacgagccaggcactgctgagtgctgcaccaaagagggcctggaacgaaagctctgcatggctgctctgaaacaccagccacagcaattccctacctacgtggaacccacaaatgatgaaatctgtgaggcgttcaggaaagatccaaaggaatatgctaatcaatttatgtgggaatattccactaattacggacaagctcctctgtcacttttagtcagttacaccaagagttatctttctatggtagggtcctgctgtacctctgcaagcccaactgtatgctttttgaaagagagactccagcttaaacatttatcacttctcaccactctgtcaaatagagtctgctcacaatatgc

SEQ ID NO: 21406 - DNA, 377 bp, Homo sapiens
gaaaatgcctgtctggggaggtggaaacaagtgtggggcctgtgggaggaccgtgtaccacgcagaagaggtgcagtgtgatggcaggagcttccaccgctgctgctttctctgcatggtttgcaggaaaaatttagatagcacaacagtggcaattcacgatgaagagatctactgcaaatcctgctacggaaagaagtatgggccaaaaggctacggttatggccagggcgctggcacgcttaacatggaccgtggcgagaggctgggcatcaaaccagagagtgttcagcctcacaggcctacaacaaatccaaacacttctaaatttgctcagaaatatggaggtgctgagaagtgttccagatgtggggatt

SEQ ID NO: 21407 - DNA, 664 bp, Homo sapiens
  misc_feature (1)...(664): n = a,t,c or g
gacaggtggggtgggagggatttgggttggtggattaacagatggaattgaggagagagtaggatgctgattttcctacccgtggcccaggtctgtgccttccccatgccaaggactctaggtcaaatgtcaataaatatgaacctcgagaaagttctgaaggccatgacacctgccttgcctccctcttccattctcttaggcacagtaatagcttatttgccctataagaaccttcccagagcagcagaggcccttctactccctcttgactgtctcagcctctgggattgcagcctttgtagtgtgcttccttgcttcctatcagagggtgctgatccagaggctcagtaaccccatcaacttggtggccctggtgtctcacacttgtatccttctgccctcgagacctggcacagcagtatcccttgaagaaatcctgaggctttgtaaagtgctccttgaccatgtttaataattcttccttcccctgcttgtctattttcttctcttcacggctcttcctataccttaggccagtctcaagcactcactggagacccttgggccttgggcgaccattgagtcctagctcccttggttgtgcccctgtaggaagtaggccttttctcctccggcctantangggaccttgggnaacatc

SEQ ID NO: 21408 - DNA, 946 bp, Homo sapiens
ctcactatagggaatttggccctcgaggccaagaattcggcacgagggcgtgtgtcactgtgctgggcctattttatttatagaactcatttaagctgtttttattttaatatgccctataaacatttttatattttttgaaattggttcttagtgttcacaacttccataagatactgctaatgcaccagtattaaaacacatcgacgtaagtagctcatttagctttttctgctgttcttggcccaagttctttccaaaaccaactcttaggcctgctctttactagggatcttatgtcgtattgctttacagccacaacacttggattcctgttgattaacttctccattctcttaagcacctttagaagatttagaagtttcctagttttaagtgtttcaccagcaagtattccatacctacttgatgttgctggtctggtgtcttatttcctaaagtgaagcatctttttttaaaaaagaatttgattgacaatatatccagtccaatataagtatgaaggattctctctcctgagattgtagcaggcagccaaacattttcaaatgatgcccaaggttttagctgtcttgtgtgcatccacagtctgcgaagaagacatgataaggacatcagggagccaacaagactcctaatagcctcactacattcatccagtgcctattctgcatgcctaagcttagagttcttttatatacctctacggccagcaaaatgctcaggtctgctcttggtagggtaaacataaagaagatacacaggccgggcatggtggctcacgcctgtaatcccagcactttgggaggctgaggcggatggatcacgaggtcaggcagtcgagaccatcctggccaacatggtgaaaccccgtctctactaaaaatacaaaagttagcccgggtgtggtgggaacgcccctgtt

SEQ ID NO: 21409 - DNA, 455 bp, Homo sapiens
  misc_feature (1)...(455): n = a,t,c or g
ntttganaccngctatgacatgattacgaatttaatancgactcactatagggaatttggccctcgaggccaagaattcggcacgagggagaagaaatcaaggctcagcaatctcataaagttagccaaaaagtgcctactgctgatctggaggatgttttgccactagctgaagatattactaacatcctctccaaatgctgtgagtctgcctctgaagattgcatggccaaagagctgcctgaacacacagtaaaactctgtgacaatttatccacaaagaattctaagtttgaagactgctgtcaagaaaaaacagccatgacgtttttgtgtgcacttacttcatgccagctgcccaactccccgagcttccagatgtagagttgcccacaaacaaagatgtgtgtgatccaggaaacaccaaagtcatggataagtatacatttgaacta

SEQ ID NO: 21410 - DNA, 822 bp, Homo sapiens
gcgccgcggagggtcaggtcgtttctgcgcgggctcccggcgctgctactgctgctgctcttcctcgggccctggcccgctgcgagccacggcggcaagtactcgcgggagaagaaccagcccaagccgtccccgaaacgcgagtccggagaggagttccgcatggagaagttgaaccagctgtgggagaaggcccagcgactgcatcttcctcccgtgaggctggccgagctccacgctgatctgaagatacaggagagggacgaactcgcctggaagaaactaaagcttgacggcttggacgaagatggggagaaggaagcgagactcatacgcaacctcaatgtcatcttggccaagtatggtctggacggaaagaaggacgctcggcaggtgaccagcaactccctcagtggcacccaggaagacgggctggatgaccccaggctggaaaagctgtggcacaaggcgaagacctctgggaaattctccggcgaagaactggacaagctctggcgggagttcctgcatcacaaagagaaagttcacgagtacaacgtcctgctggagaccctgagcaggaccgaagaaatccacgagaacgtcattagcccctcggacctgagcgacatcaagggcagcgtcctgcacagcaggcacacggagctgaaggagaagctgcgcagcatcaaccagggcctggaccgcctgcgcagggtcagccaccagggctacagcactgaggctgagttcgaggagcccagggtgattgacctgtgggacctggcgcagtccggcaaccttacggacaaggagctggag

SEQ ID NO: 21411 - DNA, 610 bp, Homo sapiens
  misc_feature (1)...(610): n = a,t,c or g
actcactataggnaatttggccctcgaggccaanaattcggcacnaggtgtctgcccgacaggganacggcagccagcttgcnccaggctggatacaaggggcgggtgacaggctggggcaacctgaagganacgtggacagccaacgttggtaaggggcancccantgtcctgcaggtggtgaacctgcccattgtggancggccggtctgcaaggactccacccggatccgcatcactgacaacatgttctgtgctggttacaancctgatgaagggaaacgaggggatgcctgtgaaggtgacantgggggaccctttgtcatgaanagcccctttaacaaccgctggtatcaaatgggcatcgtctcatggggtgaaggctgtgaccgggatgggaaatatggcttctacacacatgtgttccgcctgaaaaantggatacanaaggtcattgatcaatttggaaagtanggggcaactcatattctgggnccctggaaccaatcccgtgaaagaattaattttgngtttcnaaactatgggtcccaataaaagtacncncagcnaaaaaaaaaaacngnacnnnnnncccgngaannaaaaaatt

SEQ ID NO: 21412 - DNA, 860 bp, Homo sapiens
  misc_feature (1)...(860): n = a,t,c or g
ggaatcctacatcgacgggcgcattgtggagggctcggatgcagagatcggcatgtcaccttggcaggtgatgcttttccggaagagtccccaggagctgctgtgtggggccagcctcatcagtgaccgctgggtcctcaccgccgcccactgcctcctgtacccgccctgggacaagaacttcaccgagaatgaccttctggtgcgcattggcaagcactcccgcaccaggtacgagcgaaacattgaaaagatatccatgttggaaaagatctacatccaccccaggtacaactggcgggagaacctggaccgggacattgccctgatgaagctgaagaagcctgttgccttcagtgactacattcaccctgtgtgtctgcccgacagggagacggcagccagcttgctccaggctggatacaaggggcgggtgacaggctggggcaacctgaaggagacgtggacagccaacgttggtaaggggcagcccagtgtcctgcaggtggtgaacctgcccattgtggagcggccggtctgcaaggactccacccggatccgcatcactgacaacatgttctgtgctggttacaagcctgatgaagggaaacgaggggatgcctgtgaaggtgacagtgggggaccctttgtcatgaagagcccctttaacaaccgctggtatcaaatgggcatcgtctcatggggtgaaggctgtgaccgggatgggaaatatggcttctacacacatgtgttccgcctgaagaagtggatacagaaggtcattgatcagtttggaaataggggcactcanatctgggccctggaacaatcccgtnaanaattattttgtgttcaaaaca

SEQ ID NO: 21413 - DNA, 541 bp, Homo sapiens
  misc_feature (1)...(541): n = a,t,c or g
ggaaaggtgtgtggagaaagaacatcccttcgagctgtggcttagagctgtgacttggcaccacgtggttagtcactatcaagttagaagcctttgtgggaaatctggctttggtaggatctgggaaatttggacccctcatttgccccctggcatctctaaattccagagcccagctttgatggggcttacatccccagctgttaacctgtggggtgggccccagactgtggccaggtgcattgcgctaggggagacagatccacagcaggcagaatttgaggaggacttaaaatacctgctttgggaggccaaggcgggcagatcccctgaggtcgggagtttgagaccagcctgaccaacatggagaaaccctgtctctactaaaaatacaaaattagttgggtgcggtggcacatgcctgtaatcccagctacttgggaagctgaggcaggagaatcgcttgaacccgggangcngangttgtggtgaaccgagatcaagccactgcactccancctgggcaacaacagcaaattcc

SEQ ID NO: 21414 - DNA, 655 bp, Homo sapiens
gagacggtggagagtggagccatgaccaaggacctggcgggctgcattcacggcctcagcaatgtgaagctgaacgagcacttcctgaacaccacggacttcctcgacaccatcaagagcaacctggacagagccctgggcaggcagtagggggaggcgccacccatggctgcagtggaggggccagggctgagccggcgggtcctcctgagcgcggcagagggtgagcctcacagcccctctctggaggcctttctaagggatgtttttttataagccagatgtttttaaaagcatatgtgtgtttcccctcatggtgacgtgaggcaggagcagtgcgttttacctcagccagtcagtatgttttgcatactgtaatttatattgcccttggaacacatggtgccatatttagctactaaaaagctcttcacaaaattgtctgctgtgtttgtccctgaggggaggaggtagtgggaccctgaggcagaggccctgctagagctggcaggttcccctggggcagaccagagcacctcaggaaggggctgccacggcagggaagggaccaggcagccctgggagcccgcattccacaggggcccactgcggagttctcggacactcagggcacaggcctgtgggttccctggaa

SEQ ID NO: 21415 - DNA, 516 bp, Homo sapiens
ggacaatcggtaccagcccatggaacccaacccccgtgtccccctcagcagggtcttttttgcctcctggagggtcgtgctggaaggtggcattgaccccatcctccgggggcctcatggccacccctgccaagctgaatcgtcagaaccaaattgcagtggatgagatccgggagcgattgtttgagcaggtcatgaggattgggctggacctgcctgctctgaacatgcagcgcagcagggaccacggcctcccaggatacaatgcctggaggcgcttctgtgggctcccgcagcctgaaactgtgggccagctgggcacggtgctgaggaacctgaaattggcgaggaaactgatggagcagtatggcacgcccaacaacatcgacatctggatgggcggcgtgtccgagcctctgaagcgcaaaggccggcgtgggcccactcctcgcctgcatcatcggtacccagttcaggaagctccgggatggtgatcggttttggtgggagaacgag

SEQ ID NO: 21416 - DNA, 523 bp, Homo sapiens
gagtggggaagatggcggcggccgttccacagcgggcgtggaccgtggagcagctgcgcagtgagcagctgcccaagaagaacataaattattaggaaacattaaaaatgtggccaagacagctaacaaggaccacttggttacagcctataaccatctttttgaaactaagcgttttaagggtactgaaagtataagtaaagtgtctgagcaagtaaaaaatgtgaagcttaatgaagataaacccaaagaaaccaagtctgaagagaccctggatgagggtccaccaaaatatactaaatctgttctgaaaaagggagataaaaccaactttcccaaaaagggagatgttgttcactgctggtatacaggaacactacaagatgggactgtttttgatactaatattcaaacaagtgcaaagaagaagaaaaatgccaagcctttaagttttaaggtcggagtaggcaaagttatcagaggatgggatgaagctctcttgctatgagtaaaggagaaaagg

SEQ ID NO: 21417 - DNA, 538 bp, Homo sapiens
gtcgtttagtaattttttggtaaaaaatttatactcctttagtaattatcatttttaaaatgatcagaggatgcattttttaactgttttattttttgaaagctcattgtttaacttattatatatgtattcatttctacagaattataaggctgtctgcagagatttgaaaaatggcaacaaatgaaagtgtcagcatctttagttcagcatccttggctgtggaatatgtagattcacttttacctgagaatcctctgcaagaaccatttaaaaatgcttggaactatatgttgaataattatacaaagttccagattgcaacatggggatcccttatagttcatgaagccctttatttcttattctgtttacctggatttttatttcaatttataccttatatgaaaaaatacaaaattcaaaaggataagccagagacatgggaaaaccaatggaagtgtttcaaagttcttctctttaatcacttctgtatccagctgcctttgatttggggaacctattattttacagagta

SEQ ID NO: 21418 - DNA, 536 bp, Homo sapiens
  misc_feature (1)...(536): n = a,t,c or g
gttaagaaccactggcttgaaattctcactgcgagcacagcagtctgaagtcaacttggaacaattgagcttggtgggaagagaagtgtccaccatcactaaggctagagtaggcggccttcccctgacagtgccaagaaggccgggaacttcagattgggcagagcccaccacagcttggcaaagacactctagctagactgcctctctagattcctcctctctgggcagggcatctctgaaagaaaggcagcagcccccgtcagggacttacagatcaaactcccatctccctgggacagagcacctgggggaaggggtggctgtgggtgcagcttcagcagacttgaatgttcctgctgctggctctgaagagagcagaggtttctactgccttttgttcagctatgccctgcccccagaggtggagtctacagaggcaggcaggcctccctcgtgccgaattcttggcctcgagggccaaattccctatagtgagtcgtattaaattcgtaatcagtcatagcngtntcaaa

SEQ ID NO: 21419 - DNA, 471 bp, Homo sapiens
tcctaacagctatgacatgattacgaatttaatacgactcactatagggaatttggccctcgaggccaagaattcggcacgagaggaggcgccggaccggggggatcgtcagtatttaaacagatcacatcatgcgtgagtacaagctagtggtccttggttcaggaggcgttgggaagtctgctctgacagttcagtttgttcagggaatttttgttgaaaaatatgacccaacgatagaagattcctacagaaagcaagttgaagtcgattgccaacagtgtatgctcgaaatcctggatactgcagggacagagcaatttacagcaatgagggatttgtatatgaagaacggccaaggttttgcactagtatattctattacagctcagtccacgtttaacgacttacaggacctgagggaacagattttacgggttaaggacacggaagatgttccaatgattttgg

SEQ ID NO: 21420 - DNA, 885 bp, Homo sapiens
  misc_feature (1)...(885): n = a,t,c or g
aatttaatacgactcactatagggaatttggccctcgaggccaagaattcggcacgagctgccgccgccgctcccgctgctgtcgccgcgcagagccggagcaggagccacggccgagaggagggaggaggaggaggaggaggtggaggaggtggaggaggtggaggaggcgccggaccggggggatcgtcagtatttaaacagatcacatcatgcgtgagtataagctagtcgttcttggctcaggaggcgttggaaagtctgctttgactgtacaatttgttcaaggaatttttgtagaaaaatacgatcctacgatagaagattcttatagaaagcaagttgaagtagatgcacaacagtgtatgcttgaaatcttggatactgcaggaacggagcaatttacagcaatgagggatttatacatgaaaaatggacaaggatttgcattagtttattccatcacagcacagtccacatttaacgatttacaagacctgagagaacagattcttcgagttaaagacactgatgatgttccaatgattcttgttggtaataagtgtgacttggaagatgaaagagttgtagggaaggaacaaggtcaaaatctagcaagacaatggaacaactgtgcattcttagaatcttctgcaaaatcaaaaataaatgttaatgagatcttttatgacctagtgcggcaaattaacagaaaaactccagtgcctgggaaggctcgcaaaaagtcatcatgtcagctgctttaatatactaaatgcattgtagctctgagccaggtctgaagaactgttgcccaattcaacagtgccagcattccaactttgttaacctaccacatcttaatggcttttctgngggggaccc

SEQ ID NO: 21421 - DNA, 757 bp, Homo sapiens
aatgagatggtgcacgatgcacagttgaagtgaacttgcggggtttttcagtatctacgattcatagatctggaattcgcggccgcgtcgagcaactgtgttcactagcaacctcaaacagacaccatggtgcacctgactcctgaggagaagtctgccgttactgccctgtggggcaaggtgaacgtggatgaagttggtggtgaggccctgggcaggctgctggtggtctacccttggacccagaggttctttgagtcctttggggatctgtccactcctgatgctgttatgggcaaccctaaggtgaaggctcatggcaagaaagtgctcggtgcctttagtgatggcctggctcacctggacaacctcaagggcacctttgccacactgagtgagctgcactgtgacaagctgcacgtggatcctctggcccatcactttggcaaagaattcaccccaccagtgcaggctgcctatcagaaagtggtggctggtgtggctaatgccctggcaaaggttcctttgttccctaagtccaactactaaactgggggatattatgaagggccttgagcatctggattctgcctaataaaaaacatttattttcattgcaaaaaaacagaaatggagatatcaagtaagacagtctttggagaagtctgcatagagagggagaaggaatcctcatgagggggaggtagttaaaagagttttttggggttgacattatgatttcctttttttttttttt

SEQ ID NO: 21422 - DNA, 443 bp, Homo sapiens
tgattgattaccaatttaatacgactcactatagggaatttggccctcgaggccaagaattcggcacgagggattccactgagccaccctacagccagaagagatatgaggaaattgttaaggaagtcagcacttacattaagaaaattggctacaaccccgacacagtagcatttgtgccaatttctggttggaatggtgacaacatgctggagccaagtgctaacatgccttggttcaagggatggaaagtcacccgtaaggatggcaatgccagtggaaccacgctgcttgaggctctggactgcatcctaccaccaactcgtccaactgacaagcccttgcgcctgcctctccaggatgtctacaaaattggtggtattggtactgttcctgttggccgagtggagactggtgttctcaaacccggtatggtggtcacc

SEQ ID NO: 21423 - DNA, 554 bp, Homo sapiens
  misc_feature (1)...(554): n = a,t,c or g
ttnnnnnnnnnnnntttgannccttgaanccacagntatgacatgattacgaatttaatacgactcactatagggaatttggccctcgaggccaagaattcggcacgagcaaggattactggatagaattcaggctttcccctccagcccccaatcatagctcacaaaccttccttgctatttgttcttaagtaaaaaatcatttttcctcctccctccccaaaccccaaggaactctcactcttgctcaagctgttccgtccccttaccacccctgatacaactgccaggttaatttccagaattcttgcaagactcagttcagaagtcaccttctttcgtgaatgttttgattccctgaggctactttattttggtatggctgaaaaatcctagattttctaaacaaaacctgtttgaatcttggttctgatatggactaggagagagactgggtcaagtaagcttatctccctgaggctgtttcctcgctggtaagtgtgaatatcaatacctgcctttcataatcaccagggaataaagtggaataatgt

SEQ ID NO: 21424 - DNA, 480 bp, Homo sapiens
gctttatcagtccacaagtccttccaattatatttcccaagtatatctagaacttatccacttatatccccactgctactaccttagtttagggctatattctcttgaaaaaaagtgtccttacttcctgccaatccccaagtcatcttccagagtaaaatgcaaatcccatcaggccacttggatgaaaacccttcaaggattactggatagaattcaggctttcccctccagcccccaatcatagctcacaaaccttccttgctatttgttcttaagtaaaaaatcatttttcctcctccctccccaaaccccaaggaactctcactcttgctcaagctgttccgtccccttaccacccctgatacaactgccaggttaatttccagaattcttgcaagactcagttcagaagtcaccttctttcgtgaatgttttgattccctgaggctactttattttggtatggctgaaaaatcc

SEQ ID NO: 21425 - DNA, 767 bp, Homo sapiens
cactggatgatattaggagattagatagattcaaagagccacctgcatttggaccaatgtgtgacttgttatggtccgatccttctgaagattttggaaatgaaaaatcacaggaacattttagtcacaatacagttcgaggatgttcttatttttataactatccagcagtgtgtgaatttttgcaaaacaataatttgttatcgattattagagctcatgaagctcaagatgcaggctatagaatgtacagaaaaagtcaaactacagggttcccttcattaataacaattttttcggcacctaattacttagatgtctacaataataaagctgctgtattaaagtatgaaaataatgtgatgaatattcgacagtttaactgttctccacatccttactggttgcctaattttatggatgtcttcacgtggtctttaccgtttgttggagaaaaagtgacagaaatgttggtaaatgttctgagtatttgctctgatgatgaactaatgactgaaggtgaagaccagtttgatggttcagctgcagcccggaaagaaatcataagaaacaaaattcgagcaattggcaagatggcaagagtcttctctgttctcagggaggagagtgaaagtgtgctgacactcaagggcctgactcccacagggatgttgcctagtggagtgttagctggaggacggcagaccctgcaaagtggtaatgatgttatgcaacttgctgtgcctcagatggactggggcacacct

SEQ ID NO: 21426 - DNA, 674 bp, Homo sapiens
gattaatacatcaaaatttttgcatatcttattaatgtatcgaataattaggctaaatttttgcataacttattgatacatcaaaaggtcagaaatgtgaattccaggatgcctatgttctgttgagtgaaacagaaaatttctagtatccagtccattgtacctgctcttgaaattgccaatgctcaccgtaagcctttggtcataatcgctgaagatgttgatggagaagctctaagtacactcgtcttgaataggctaaaggttggtcttcaggttgtggcagtcaaggctccagggtttggtgacaatagaaagaaccagcttaaagatatggctattgctactggtggtgcagtgtttggagaagagggattgaccctgaatcttgaagacgttcagcctcatgacttaggaaaagttggagaggtcattgtgaccaaagacgatgccatgctcttaaaaggaaaaggtgacaaggctcaaattgaaaaacgtattcaagaaatcattgagcagttagatgtcacaactagtgaatatgaaaaggaaaaactgaatgaacggcttgcaaaactttcagatggagtggctgtgctgaaggttggtgggacaagtgatgttgaagtgaatgaaaagaaagacagagttacagatgcccttaatgctacaag

SEQ ID NO: 21427 - DNA, 483 bp, Homo sapiens
  misc_feature (1)...(483): n = a,t,c or g
aaacncctatganatgattacnaatttaatacgactcactatagggaatttggccctcgaggccaagaattcggcacgagggctcccagcgtgccagcggcagaacccgagtatcctaaaggcatccgggccgtgctgctggggcctcccggggccggtaaagggacccaggcacccagattggctgaaaacttctgtgtctgccatttagctactggggacatgctgagggccatggtggcttctggctcagagctaggaaaaaagctgaaggcaactatggatgctgggaaactggtgagtgatgaaatggtagtggagctcattgagaagaatttggagacccccttgtgcaaaaatggttttcttctggatggcttccctcggactgtgaggcaggcagaaatgctcgatgacctcatggagaagaggaaagagaagcttgattctgtgattgaattcagcatcccagactctctgctt

SEQ ID NO: 21428 - DNA, 481 bp, Homo sapiens
  misc_feature (1)...(481): n = a,t,c or g
tntgaaaccctttttnttgttaagtgatcccttgggntatcacatgattacgaatttaatacgactcactatagggaatttggccctcgaggccaagaattcggcacgagaattgtcggtgttaacaaaatggattccactgagccaccctacagccagaagagatatgaggaaattgttaaggaagtcagcacttacattaagaaaattggctacaaccccgacacagtagcatttgtgccaatttctggttggaatggtgacaacatgctggagccaagtgctaacatgccttggttcaagggatggaaagtcacccgtaaggatggcaatgccagtggaaccacgctgcttgaggctctggactgcatcctaccaccaactcgtccaactgacaagcccttgcgcctgcctctccaggatgtctacaaaattggtggtattggtactgttcctgttggccgagtggagactggtgttc

SEQ ID NO: 21429 - DNA, 423 bp, Homo sapiens
  misc_feature (1)...(423): n = a,t,c or g
tttggaccacccnttatgacatgattacgaatttaatacgactcactatagggaatttggccctcgaggccaagaattcggcacgagatccgggccgagctgctggggcctcccggggccggtaaagggacccaggcacccagattggctgaaaacttctgagtctgccatttagctactggggacatgctgagggccatggaggcttctggctcagagctaggaaaaaagctgaaggcaactatggatgctgggaaactggtgagtgatgaaatggtagtggagctcattgagaagaatttggagacccccttgtgcaaaaatggttttcttctggatggcttccctcggactgtgaggcaggcagaaatgctcgatgacctnatggagaanaggaaaganaagcttgattctgtgattgaa

SEQ ID NO: 21430 - DNA, 798 bp, Homo sapiens
  misc_feature (1)...(798): n = a,t,c or g
ctaatttaatacgactcactatagggaatttggccctcgaggccaagaattcggcacgagcagtgagagacttcggcggacatggctcccagcgtgccagcggcagaacccgagtatcctaaaggcatccgggccgtgctgctggggcctcccggggccggtaaagggacccaggcacccagattggctgaaaacttctgtgtctgccatttagctactggggacatgctgagggccatggtggcttctggctcagagctaggaaaaaagctgaaggcaactatggatgctgggaaactggtgagtgatgaaatggtagtggagctcattgagaagaatttggagacccccttgtgcaaaaatggttttcttctggatggcttccctcggactgtgaggcaggcagaaatgctcgatgacctcatggagaagaggaaagagaagcttgattctgtgattgaattcagcatcccagactctctgctgatccgaagaatcacaggaaggctgattcaccccaagagtggccgttcctaccacgaggagttcaaccctccaaaaagagcccatgaaagatgacatcaccggggaacccttgatccgtcgatcagatgataatgaaaaggccttgaaaatccgcctgcaagcctaccacactcaaaccaccccactcatagagtactacaggaaacgggggatccactccgccatcgatgcatcccagacccccgatgtcgtgttcgcaagcatcctagcagccttctccaaagccacatgtaagacttggtantttatcaa

SEQ ID NO: 21431 - DNA, 704 bp, Homo sapiens
cggcagccgcccccttctgcgcggtcacgccgagccagcgcctgggcctggaaccgggccgtagcccccccagtttcgcccaccacctccctaccatggacccccgcaaagtgaacgagcttcgggcctttgtgaaaatgtgtaagcaggatccgagcgttctgcacaccgaggaaatgcgcttcctgagggagtgggtggagagcatgggtggtaaagtaccacctgctactcagaaagctaaatcagaagaaaataccaaggaagaaaaacctgatagtaagaaggtggaggaagacttaaaggcagacgaaccatcaagtgaggaaagtgatctagaaattgataaagaaggtgtgattgaaccagacactgatgctcctcaagaaatgggagatgaaaatgcggagataacggaggagatgatggatcaggcaaatgataaaaaagtggctgctattgaagccctaaatgatggtgaactccagaaagccattgacttattcacagatgccatcaagctgaatcctcgcttggccattttgtatgccaagagggccagtgtcttcgtcaaattacagaagccaaatgctgccatccgagactgtgacagagccattgaaataaatcctgattcagctcagccttacaagtggcgggggaaagcacacagacttctagccactgggaagaagcagcccatg

SEQ ID NO: 21432 - DNA, 857 bp, Homo sapiens
ccggaatctgctaatcccagtcggtgccgcatccccagcccgccgccatggccgcctacaaactggtgctgatccggcacggcgagagcgcatggaacctggagaaccgcttcagcggctggtacgacgccgacctgagcccggcgggccacgaggaggcgaagcgcggcgggcaggcgctacgagatgctggctatgagtttgacatctgcttcacctcagtgcagaagagagcgatccggaccctctggacagtgctagatgccattgatcagatgtggctgccagtggtgaggacttggcgcctcaatgagcggcactatgggggtctaaccggtctcaataaagcagaaactgctgcaaagcatggtgaggcccaggtgaagatctggaggcgctcctatgatgtcccaccacctccgatggagcccgaccatcctttctacagcaacatcagtaaggatcgcaggtatgcagacctcacagaagatcagctaccctcctgtgagagtctgaaggatactattgccagagctctgcccttctggaatgaagaaatagttccccagatcaaggaggggaaacgtgtactgattgcagcccatggcaacagcctccggggcattgtcaagcatctggagggtctctctgaagaggctatcatggagctgaacctgccgactggtattcccattgtctatgaattggacaagaacttgaagcctatcaagcccatgcagtttctgggggggccaagaagtgaaggccggcggggaggatactgtccccaggagcaccctccctgccgtcttgtccctctgccctcccacctgcacatgtcacactgaccacatttg

SEQ ID NO: 21433 - DNA, 652 bp, Homo sapiens
tcgatcacctatgacatgattacgaatttaatacgactcactatagggaatttggccctcgaggccaagaattcggcacgagcgcacgcctcttccacccgaagctgatcatcgcaggaaccagctgctactcccgaaacctggaatatgcccggctacggaagattgcagatgagaacggggcgtatctcatggcggacatggctcacatcagcgggctggtggcggctggcgtggtgccctccccatttgaacactgccatgtggtgaccaccaccactcacaagaccctgcgaggctgccgatctggcatgatcttctacaggaaaggggttgctgtggcactgaagcaagctatgactctggaatttaaagtttatcaacaccaggtggtggccaactgcagggctctgtctgaggccctgacggagctgggctacaaaatagtcacaggtggtctgacaaccatttgatccttgtggatctccgttccaaaggcacagatggtggaagggctgagaaggtgctagaagcctgttctattgcctgcaacaagaacacctgtccaggtgacagaagcgctctgcggcccagtggactgcggctggggaccccagcactgacgtcccgtggacttttggaaaaagacttc

SEQ ID NO: 21434 - DNA, 404 bp, Homo sapiens
  misc_feature (1)...(404): n = a,t,c or g
gtaactactttataactaacatgtcctgcctattatctgtcagctgcaaggtactctggtgagtcaccacttcagggctttactccgtaacagatttgttggcatagctctggggtgggcagttttttgaaaatgggctcaaccagaaaagcccaagttcatgcagctgtggcagagttacagttctgtggtttcatgttagttaccttatagttactgtgtaattagtgccacttaatgtatgatatctaccccagactagatgtantattttttgtataattggatttcctaatactgtatcctcaaaagaaagtgtattggnnttttaatannagaaagngaaatttggatanacaggtcctatgnnacnatnncnntttnaantncccnnntntggccct

SEQ ID NO: 21435 - DNA, 505 bp, Homo sapiens
  misc_feature (1)...(505): n = a,t,c or g
ggtgnntttgaaantggaacccnttgactgattacgaatttaatacgactcactatagggaatttggccctcgaggccaagaattcggcacgaggggacatctcaggctgactgtgctgtcctgattgttgctgctggtgttggtgaatttgaagctggtatctccaagaatgggcagacccgagagcatgcccttctggcttacacactgggtgtgaaacaactaattgtcggtgttaacaaaatggattccactgagccaccctacagccagaagagatatgaggaaattgttaaggaagtcagcacttacattaagaaaattggctacaaccccgacacagtagcatttgtgccaatttctggttggaatggtgacaacatgctggagccaagtgctaacatgccttggttcaagggatggaaagtcacccgtaaggatggcaatgccagtggaaccacgctgcttgaggctctggactgnatnctaccaccaactcgtcca

SEQ ID NO: 21436 - DNA, 1076 bp, Homo sapiens
  misc_feature (1)...(1076): n = a,t,c or g
ttgacatgattacgaatttaatacgactcactatagggaatttggccctcgaggccaagaattcggcacgaggacaggcagaaattctcagaacaggttttcaaagtggcctcctcagacctggtcaacatgggcatcagtgtggttagctacactctgaaggacattcacgatgaccaggactatttgcactctttggggaaggctcgaacagctcaagtccaaaaagatgcacggattggagaagcagaggccaagagagatgctgggatccgggaagctaaagccaagcaggaaaaggtgtctgctcagtacctgagtgagatcgagatggccaaggcacagagagattacgaactgaagaaggccgcctatgacatcgaggtcaacacccgccgagcacaggctgacctggcctatcagcttcaggtggccaagactaagcagcagattgaggagcagcgggtgcaggtgcaggtggtggagcgggcccagcaggtggcagtgcaggagcaggagatcgcccggcgggagaaggagctggaggcccgggtgcggaagccagcggaagcggagcgctacaagctggagcgcctagccgaggcagagaagtcccaactaattatgcaggcggaggcagaagccgcgtctgtgcggatgcgtggggaagctgaggcctttgccataggggcccgagcccgagccgaggctgagcagatggccaagaaggcagaagccttccagctgtaccaagaggctgctcagctggacatgctgctagagaagctgccccaggtggcagaggagatcagtggtcccttgacttcagccaataagatcacactggtgtccagcggcagtgggaccatgggggcagccaaagtgactggggaagtactggacattctaactcgcctgccagagagtgtggaaagactcacaggcgtgagcatctcccaggtgaatcacaagcctttgagaacagcctgagccttcagccctcacagatgcccagcctcatagctgaagttgcctgaatgatcctcctgntgcatgnaacccactggcttcctgag

SEQ ID NO: 21437 - DNA, 583 bp, Homo sapiens
gctacgacatgattacgaatttaatacgactcactatagggaatttggccctcgaggccaagaattcggcacgaggaaggtgaacagtgtggcccgccatgttcttctccgcggcgctccgggcccgggcggctggcctcaccgcccactggggaagacatgtaaggaatttgcataagacagctatgcaaaatggagctggaggagctttatttgtgcacagagatactcctgagaataaccctgatactccatttgatttcacaccagaaaactataagaggatagaggcaattgttaaaaactatccagaaggccataaagcagcagctgttcttccagtcctggatttagcccaaaggcagaatgggtggttgcccatctctgctatgaacaaggttgcagaagttttacaagtacctccaatgagagtatatgaagtagcaactttttatacaatgtataatcgaaagccagttggaaagtatcacattcaggtctgcactactacaccctgcatgcttcgaaactctgacagcatactggaggccattcaaaaaaagcttggaataaaggttgggaa

SEQ ID NO: 21438 - DNA, 807 bp, Homo sapiens
gcggcacgagccctgatgaaaagatccctaccctaagggaagctgttgcagagtgcctaaaccataacctcacaatcttctttgatgtcaaaggccatgcacacaaggctactgaggctctaaagaaaatgtatatggaatttcctcaactgtataataatagtgtggtctgttctttcttgccagaagttatctacaagatgagacaaacagatcgggatgtaataacagcattaactcacagaccttggagcctaagccatacaggagatgggaaaccacgctatgatactttctggaaacattttatatttgttatgatggacattttgctcgattggagcatgcataatatcttgtggtacctgtgtggaatttcagctttcctcatgcaaaaggattttgtatccccggcctacttgaagaagtggtcagctaaaggaatccaggttgttggttggactgttaatacctttgatgaaaagagttactacgaatcccatcttggttccagctatatcactgacagcatggtagaagactgcgaacctcacttctagactttcacggtgggacgaaacgggttcagaaactgccaggggcctcatacagggatatcaaaataccctttgtgctagcccaggccctggggaatcaggtgactcacacaaatgcaatagttggtcactgcatttttacctgaaccaaagctaaacccggtgttgccaccatgcaccatggcatgccagagttcaacactgttgctcttgaaaatctgggtctgaaaaaacgcccaagagcccctgg

SEQ ID NO: 21439 - DNA, 421 bp, Homo sapiens
accagtcatgacatgattacgaatttaatacgactcactatagggaatttggccctcgaggccaagaattcggcacgagcccatgcggaaacttcgcatccgcaaactctgtctcaacatctgtgttggggagagtggagacagactgacgcgagcagccaaggtgttggagcagttcacagggcagacccctgtgttttccaaagctagatacactgtcagatcctttggcatccggagaaatgaaaagattgctgtccactgcacagttcgaggggccaaggcagaagaaatcttggagaagggtctaaaggtgcgggagtatgagttaagaaaaaacaacttctcagatactggaaactttggttttgggatccaggaacacatcgatctgggtatcaaatatgacccaagcattggt

SEQ ID NO: 21440 - DNA, 589 bp, Homo sapiens
ccaatttaatacgactcactatagggaatttggccctcgaggccaagaattcggcacgaggcaggatcaaggtgaaaaggagaaccccatgcgggaacttcgcatccgcaaactctgtctcaacatctgtgttggggagagtggagacagactgacgcgagcagccaaggtgttggagcagctcacagggcagacccctgtgttttccaaagctagatacactgtcagatcctttggcatccggagaaatgaaaagattgctgtccactgcacagttcgaggggccaaggcagaagaaatcttggagaagggtctaaaggtgcgggagtatgagttaagaaaaaacaacttctcagatactggaaactttggttttgggatccaggaacacatcgatctgggtatcaaatatgacccaagcattggtatctacggcctggacttctatgtggtgctgggtaggccaggtttcagcatcgcagacaagaagccatgcgctggttccagcagaagtatgatgggatcatccttcctggcaaataaattcccgtttctatccaaaagagcaataaaaagttttcagtgaaaa

SEQ ID NO: 21441 - DNA, 471 bp, Homo sapiens
  misc_feature (1)...(471): n = a,t,c or g
gtgtnnnncttgnacttccganaaccttatgactgattacgaatttaatacgactcactatagggaatttggccctcgaggccaagaattcggcacgagagcatgtactatatgactatcattgatgacgtaggacacagagacttcatcacaaacatgattacagggacatcacaggctgactgtactgtcctggattgttgctgctggtgttggtgaatttgaagctgttatctcccagaatgggcagacccgagagcatgcccttctggcttacacactgggtgtgaaacaactaattgttggtattaacaaaatggattccactgagccaccctacagccagaagagatacgaggaaatcattaaggaagtcagcacttacattaagaaaattggctacaaccctgacacagtagaatttgtgccaatttctagttggaatggtgacaacatgctggagccaagtgc

SEQ ID NO: 21442 - DNA, 1117 bp, Homo sapiens
  misc_feature (1)...(1117): n = a,t,c or g
gacacggtcttcagtgaagctgcagggcacttccaaaatggatgatatctggaaccttgaagtaaaagaaaattttgctggagaagccacactccaacgcatatattccctctgggagcacagtacgaaaaaccacttacagctagagggcctctttttcaccaacggagaacatacaagcaaagccaccctggaactctctccatggcaaatgtcagctcttgttcaggtccatgcaagtcagcccagttccttccatgatttccctgaccttggccaggaagtggccctgaatgctaacactaagaaccagaagatcagatggaaaaatgaagtccggattcattctgggctttccagagccaggtcgagctttccaatgaccaagaaaaggcacaccttgacattgcaggatccttagaaggacacntaaggttcctcaaaaatatcatcctaccagtgtatgacaagagcttatgggatttcctaaagctggatgtaaccaccagcattggtaggagacagcatnttngtgtttcaactgcctttgtgtacaccaaaaaccccaatggctattcattctccatccctgtaaaagttttggctgataaattcattattcctgggctgaaactaaatgatctaaattcagttcttgtcatgcctacgttccatgtcccatttacagatcttcaggttccatcgtgcaaacttgacttcagagaaatacaaatctataagaagctgagaacttcatcatttgccctcaacctaccaacactccccgaggtaaaattccctgaagttgatgtgttaacaaaatattctcaaccagaagactccttgattcccttttttgagataaccgtgcctgaatctcagttaactgtgtcccagttcacgcttccaaaaagtgtttcagatggcattgctgctttggatctaaatgcagtagccaacaagatcgcagactttgagttgcccaccatcatcgtgcctgagcagaccattgagattccctccattaagttctctgtacctgctggaattgtcattccttcctttcaagcactgactgcacgctttgaggtagactctcccgtgtataatgccactt

SEQ ID NO: 21443 - DNA, 639 bp, Homo sapiens
atcaagacggaggagatctctgaagtgaagatggatgcagaattccgacatgactcaggatatgaagttcatcatcaaaaattggtgttctttgcagaagatgtgggttcaaacaaaggtgcaatcattggactcatggtgggcggtgttgtcatagcgacagtgatcgtcatcaccttggtgatgctgaagaagaaacagtacacatccattcatcatggtgtggtggaggttgacgccgctgtcaccccagaggagcgccacctgtccaagatgcagcagaacggctacgaaaatccaacctacaagttctttgagcagatgcagaactagacccccgccacagcagcctctgaagttggacagcaaaaccattgcttcactacccatcggtgtccatttatagaataatgtgggaagaaacaaacccgttttatgatttactcattatcgccttttgacagctgtgctgtaacacaagtagatgcctgaacttgaattaatccacacatcagtaatgtattctatctctctttacattttggtctctatactacattattaatgggttttgtgtactggaaaagaatttagctgtatcaaactagtgcatgaatagattctctcctgattatttat

SEQ ID NO: 21444 - DNA, 744 bp, Homo sapiens
  misc_feature (1)...(744): n = a,t,c or g
aattcggcacgaggacgggtcctccaagagtttggggcgcggaccggagtaccttgcgtgcagttatgtcggcgtcggtagtgtctgtcatttcgcggttcttagaagagtacttgagctccactccgcagcgtctgaagttgctggacgcgtacctgctgtatatactgctgaccggggcgctgcagttcggttactgtctcctcgtggggaccttccccttcaactcttttctctcgggcttcatctcttgtgtggggagtttcatcctagcggtttgcctgagaatacagatcaacccacagaacaaagcggatttccaaggcatctccccagagcgagcctttgctgattttctctttgccagcaccatcctgcaccttgttgtcatgaactttgttggctaaatcattctcatttacttaattgaggagtaggagactaaaagaatgttcactctttcaatttcctggataagagttctggagatggcagcttgttggacacatggattttcttcagatttgcacttactgctagctctgctttttatgcaggagaaaagcccagagttcactgtgtgtcagaacaactttctaacaaacatttattaatccagcctctgcctttattaaagnaacctttgcttccaaattaaagactcatgccctcaaaaaaaaaaaaannnnnnnnnnnaaaaaaaaaggtttttttttagggccgaantttttnctttnggggggg

SEQ ID NO: 21445 - DNA, 365 bp, Homo sapiens
gcggcacgagcctgagctgggtctctgactcacttctgactttagttttttcaagggggaacatggcaaaggtgttcagtttcatccttgttaccaccgctctgataatgggcagggaaatttcggcgctcgaggactgtgcccaggagcagatgcggctcagagcccaggtgcgcctgcttgagacccgggtcaaacagcaacaggtcaagatcaagcagcttttgcaggagaatgaagtccagttccttgataaaggagatgagaatactgtcgttgatcttggaagcaagaggcagtatgcagattgttcagagattttcaatgatgggtataagctcagtggattttacaaaatcaaacct

SEQ ID NO: 21446 - DNA, 786 bp, Homo sapiens
gcagtctttgcacacaaattcttttgatgaagctttgggtttgccaactgtgaaaagtgctcgaattgccaggaacacacaaatcatcattcaagaagaatctgggattcccaaagtggctgatccttggggaggttcttacatgatggaatgtctcacaaatgatgtttatgatgctgctttaaagctcattaatgaaattgaagaaatgggtggaatggccaaagctgtagctgagggaatacctaaacttcgaattgaagaatgtgctgcccgaagacaagctagaatagattctggttctgaagtaattgttggagtaaataagtaccagttggaaaaagaagacgctgtagaagttctggcaattgataatacttcagtgcgaaacaggcagattgaaaaacttaagaagatcaaatccagcagggatcaagctttggctgaacgttgtcttgctgcactaaccgaatgtgctgctagcggagatggaaatatcctggctcttgcagtggatgcatctcgggcaagatgtacagtgggagaaatcacagatgccctgaaaaaggtatttggtgaacataaagcgaatgatcgaatggtgagtggagcatatcgccaggaatttggagaaagtaaagagataacatctgctatcaagagggttcataaattcatggaacgtgaaggtcgcagacctcgtcttcttgtagcaaaaatgggacaagatggccatgacagaggagcaaaagttattgctacaggatttgctgatcttggttttgg

SEQ ID NO: 21447 - DNA, 704 bp, Homo sapiens
aattcggcacgagggctgctgagatgggaaagggctccttcaagtatgcctgggtcttggataaactgaaagctgagcgtgaacgtggtatcaccattgatatctccttgtggaaatttgagaccagcaagtactatgtgactatcattgatgccccaggacacagagactttatcaaaaacatgattacagggacatctcaggctgactgtgctgtcctgattgttgctgctggtgttggtgaatttgaagctggtatctccaagaatgggcagacccgagagcatgcccttctggcttacacactgggtgtgaaacaactaattgtcggtgttaacaaaatggaggaagtcagcacttacattaagaaaattggctacaaccccgacacagtagcatttgtgccaatttctggttggaatggtgacaacatgctgggactgcatcctaccaccaactcgtccaactgacaagcccttgcgcctgcctctccaggatgtctacaaaattggtggtattggtactgttcctgttggccgagtggagactggtgttctcaaacccggtatggtggtcacctttgctccagtcaacgttacaacggaagtaaaatctgtcgaaatgcaccatgaagctttgagtgaagctcttcctggggacaatgtgggcttcaatgtcaaaaatgttttctgtcaaggatgttc

SEQ ID NO: 21448 - DNA, 484 bp, Homo sapiens
  misc_feature (1)...(484): n = a,t,c or g
ggccgcagccatgagtatgctcaggcttcagaagaggctcgcctctagtgtcctccgctgtggcaagaagaaggtctggttagaccccaatgagaccaatgaaatcgccaatgccaactcccgtcagcagatccggaagctcatcaaagatgggctgatcatccgcaagcctgtgacggtccattcccgggctcgatgccggaaaaacaccttggcccgccggaagggcaggcacatgggcataggtaagcggaagggtacagccaatgcccgaatgccagagaaggtcacatggatgaggagaatgaggattttgcgccggctgctcagaagataccgtgaatctaagaagatcgatcgccacatgtatcacagcctgtacctgaaggtgaaggggaatgtgttaaaaaacaagcagattctcatggaacacatccacaagctgaaggcanacaaggcccgcangaagctnctggctgatcag

SEQ ID NO: 21449 - DNA, 471 bp, Homo sapiens
ctgatgacctgattacgaatttaatacgactcactatagggaatttggccctcgaggccaagaattcggcacgagtttttgtatttttagtagagacagggtttctccatattggctaggctggtctcgaactcctaaccttgtgatctgcccaccctggcctcccaaagtgctgggattacaggcgtgagctaccatgcccggcctggagaagaccgtttttattctggacccaaaccctcaattttctgggctctgtgcagccctcttccctcccctgtcaagtcacttaccatgcaaaccacaggctctaagagtttgtccccagggacatccatccaagtcatctccatggctcctgggtcccctggtgagcatggagtcaggaggtcatcaatcatcatgctggggttggtgcgagaggggccacagacctgaaaccaaatggatctgactggggcagctgcccct

SEQ ID NO: 21450 - DNA, 599 bp, Homo sapiens
  misc_feature (1)...(599): n = a,t,c or g
gagggtcacggggggaatccagagtccagagtgagggctgctgctcacagtgcccggctgcctggggaatcagctagaagccaagctggacaaaccagatgtggtgaactggatgtgctaccgcaagacagaggacttcttcaccatctggctggatctcaacatgttcctaccccttggggtagactgctggatcgataacaccagggttgtctacaaccggagctctgggctcgtgtccaacgcccctggtgtccagatccgcgtccctggctttggcaagacctactctgtggagtacctggacagcagcaagctggcagggtacctgcacacactggtgcagaacctggtcaacaatggctacgtgcgggacgagactgtgcgcgccgccccctatgactggcggctggagcccggccagcaggaggagtactaccgcaagctcgcagggctggtggaagagatgcacgctgcctatgggaaacctgtcttcctcattggccacagcctcggctgtctacacttgctctatttcctgctgcgccagccccaggcctggaaggaccgctttattgatggcttcancctcntggggg

SEQ ID NO: 21451 - DNA, 441 bp, Homo sapiens
gaaaccttatgacatgattacgaatttaatacgactcactatagggaatttggccctcgaggccaagaattcggcacgagaaagggcttagaaaactggctcctcaagagtgaaaaatcaagttatcaaaagtgtaacagccattccactactagttctttctccattgaaatggaaaaggttggagatcaagagcttcctgatcaagatgagatggacctatcagattggctagtgactccccaggaatcccataagctgcggaagcctgagaatggcagtcgtgaaaccagtgagaagtttaagctcttattccagtcctataatgtgaatgattggcttgtcaagactgactcctgtaccaactgtcagggaaaccagcccaaaggtgtggagattgaaaacctgggcaatctgaagtgcctgaatgaccacttggag

SEQ ID NO: 21452 - DNA, 601 bp, Homo sapiens
gcgtgactgtcacccacagcaatgagaagcacgaccttcatgttacctcccagcagggcagcagtgaaccagttgtccaagacctggcccaggttgttgaagaggtcataggggttccacagtcttttcagaaactcatatttaagggaaaatctctgaaggaaatggaaacaccgttgtcagcacttggaatacaagatggttgccgggtcatgttaattgggaaaaagaacagtccacaggaagaggttgaactaaagaagttgaaacatttggagaagtctgtggagaagatagctgaccagctggaagagttgaataaagagcttactggaatccagcagggttttctgcccaaggatttgcaagctgaagctctctgcaaacttgataggagagtaaaagccacaatagagcagtttatgaagatcttggaggagattgacacactgatcctgccagaaaatttcaaagacagtagattgaaaaggaaaggcttggtaaaaaaggttcaggcattcctagccgagtgtgacacagtggagcagaacatctgccaggagactgagcggctgcagtctacaaactttgccctggccga

SEQ ID NO: 21453 - DNA, 402 bp, Homo sapiens
gcggcacgaggccacttacaggaagacacatctgtgtgacgtagagattccagggcaggggcctatgtgtgaaagcaactctaccatgcctgggcccagtcttgagtcacctgtcagcacaccagcaggcaagattggtctagctgtctgctatgacatgcggttccctgaactctctctggcattggctcaagctggagcagagatacttacctatccttcagcttttggatccattacaggcccagcccactgggaggtgttgctgcgggcccgtgctatcgaaacccagtgctatgtagtggcagcagcacagtgtggacgccaccatgagaagagagcaagttatggccacagcatggtggtagacccctggggaacagtggtggcccgctgctctga

SEQ ID NO: 21454 - DNA, 937 bp, Homo sapiens
cacgcgtccgaagcgagcacgtgcagcctgttggctccgccagtctttctgtcattgcttgttaagtctcagtggtgttgactgtgccttttgtaaacagtgttgaatggcattaactggaatgtggtagcctgactatttctttgacagtccaaaccaggttgcagagaaggtggcctccagaatcgccgagggcttcagcgacactgcgctcatcatggtagacaacaccaagtttacgatggactgcgtagcgcctacgatccacgtgtacgagcaccatgagaacagatggcggtgcagagacccacaccatgactactgtgaagactggccagaggcacagaggatctcagcctcgctcctggacagccggtcctacgagacgctcgtggatttcgataaccacctggatgacattcggaatgactggacaaacccagagatcaataaagctgtcctacacttgtgctaggcaggcaccgctgtgactgggctccgggcctttccactacgttgaagaagaaaacctatttttaaatgtaaataaaatatctggtagcctgtgtggaaagctgaccgttttaagaagtggcatgtgccttgaaagggggcagaatgttcagtcggtcgtgtttttaacacagagtctctagaagaggtgcagacatcccgtctgactgtccctgtggactctctcagttgtatgttgctataatcctccaaatcaaagctctttctgcttgtgcaagatgtcgacgcggccgcgaattccagatctatgaatcgtagatactgaaaaaccccgcaagttcacttcaactgtgcatcgtgcaccatctcaatttctttcatttatacatcgttttgccttcttttatgtaactatactcctctaagtttcaatcttggccatgtaacctctgatctatagaat

SEQ ID NO: 21455 - DNA, 433 bp, Homo sapiens
  misc_feature (1)...(433): n = a,t,c or g
gattgaaagcaaagcttgaagaacattttaaaaatcaagaattacgacaagttaaaagacaagatgaagactatgatgaacaggtcgaagagtcactacaagatgaggatgataatgatgtttatattctgaccaaagtgtcagatattttacactcaatattcagtagctacaaagaaaaggtgttaccatggtttgaacagctgcttccattaattgtcaacctcatttgtccacatagaccatggccagacagacaatggggattatgcatctttgatgatgtcatagaacactgtagtccagcctcatttaaatacgcagaatatttcttaagaccaatgctccaatatgtatgtgacaacagcccagaagtcaggcaagcagctgcatatggcctgggagtcatggcacagtaccgnggagaaaatta

SEQ ID NO: 21456 - DNA, 736 bp, Homo sapiens
agcgcgggagcagtgcttctgcggcaggcccctgagggagggagctgtcagccagggaaaaccgagaacaccatcaccatgacaaccagtcaccagcctcaggacagatacaaagctgtctggcttatcttcttcatgctgggtctgggaacgctgctcccgtggaattttttcatgacggccactcagtatttcacaaaccgcctggacatgtcccagaatgtgtccttggtcactgctgaactgagcaaggacgcccaggcgtcagccgcccctgcagcacccttgcctgagcggaactctctcagtgccatcttcaacaatgtcatgaccctatgtgccatgctgcccctgctgttattcacctacctcaactccttcctgtaccagtgcgtcccggagacggtgcgcattctgggcagcctgctggccatactgctgctctttgccctgacagcagcgctggtcaaggtggacatgagccccggacccttcttctccatcaccatggcctccgtctgcttcatcaactccttcagtgcagacctacaagggcagcctcttcgggcagctgggcaccatgccctccacctacagcaccctcttcctcagcggccagggcctggctgggatctttgctgcccttgccatgctcctgtccatggccagtggcgtggacgccgagacctctgcctggggtactttatcacgccctgtgtgggcatcctcatgtcat

SEQ ID NO: 21457 - DNA, 408 bp, Homo sapiens
  misc_feature (1)...(408): n = a,t,c or g
gatgtgatgtgcttgagacacagtagagacctaacacactgtaactgtcatccttgcctgcactctagaaagccactgctgtagctcactctggtggtataaccatctctccagcggcctcaggacatgcagtggctcagacatattttttcatggaaacctcatcaatggctaatagatgtaaagctatttcagctttttccaggtccttagttaatggttttatattctgtccttgttctttccaatttccaggtgcatgggatccagttattttttcttttctttttttcttttttttgatagggctgacaggaatcanaattgacacattcgcccatgaatttccctcttttcaggtctccatttctcctggtactgcaaaagcctanatttctctgatctccc

SEQ ID NO: 21458 - DNA, 384 bp, Homo sapiens
  misc_feature (1)...(384): n = a,t,c or g
aatgtacaaaataaaataaaaattttaaaaaccctattataattatattttacgtaaatctcatggtaaccacaaagcaaaaaactttagtaaatacacgaaagataaaaattaaggaataaagcctaccactagagaaaatcacctaatcacaaaggaagacaagaagagaggaagaaagcaacaaaggatctacaaaacaaccagtgaacaattaacaaaatggcagtagtctttacccatcaataattaatttgaatgtaaatgtcttaaattctccagtcaaaagacagagactggctgaatggataaaaagccaatacccaactataaactgnctacaagagattcgcttccctataagggacacaggtagactattag

SEQ ID NO: 21459 - DNA, 480 bp, Homo sapiens
ccgactctgaggctccctctttgctctaacagacagcagcgactttaggctggataatagtcaaattcttacctcgctctttcactgctagtaagatcagattgcgtttctttcagttactcttcaatcgccagtttcttgatctgcttctaaaagaagaagtagagaagataaatcctgtcttcaatacctggaaggaaaaacaaaataacctcaactccgttttgaaaaaaacattccaagaactttcatcagagattttacttagatgatttacacaatgaagaaagtacatgcactttgggcttctgtatgcctgctgcttaatcttgcccctgcccctcttaatgctgattctgaggaagatgaagaacacacaattatcacagatacggagttgccaccactgaaacttatgcattcattttgtgcattcaaggcggatgatggcccatgtaaagcaatcatgaaaagattttt

SEQ ID NO: 21460 - DNA, 462 bp, Homo sapiens
ctgagcgtgtggcagcagtgcggtcgtggtccctccctatgcagcctggtttctagcgtgacacgcccttgacttgaggaccatgaaccgcagccgccaggtgacgtgcgtggcctgggtccgctgcggcgtggccaaagagacaccagacaaggtagagctgagtaaagaagaagtaaaacgcctcattgctgaggcaaaggagaaattgcaagaagaaggtggtggcagtgatgaagaggagacaggcagtccttcagaagatggcatgcagagtgcacgcacccaggcacgcccaagagagcccctggaggatggtgacccagaggatgacaggacgcttgatgatgatgagctggctgagtacgacttagataaatatgatgaggaaggtgacccagatgctgagactcttggtgaatctctcttgggtcttacggtctacgggagtaatgatcaaga

SEQ ID NO: 21461 - DNA, 594 bp, Homo sapiens
gctgccacagctgctgcccacaccgcgctcagcgccttcactgccatccccgctgtccttgccgcccccgccatgggcctagagctgtttcttgacctggtgtcccagcccagccgcgccgtctacatcttcgccaagaagaatggcatccccttagagctgcgcaccgtggatttggtcaaagggcagcacaagagcaaggagttcttgcagatcaacagcctggggaaactgccgacgctcaaggatggtgatttcatcttgaccgaaagcttggccatcctgatttacctgagctgtaagtaccagacgccggaccactggtatccatctgacctgcaggctcgtgcccgtgttcatgagtacctgggctggcatgccgactgcatccgtggcacctttggtatacccctgtgggtccaggtgttggggccactcattggggtccaggtgcccgaggagaaggtggaacgcaacaggactgccatggaccaggccctgcaatggctggaggacaagttcctgggggacaggcccttcctcgctggccagcaggtgacactggctgatctcatggccctggaggagctgatg

SEQ ID NO: 21462 - DNA, 532 bp, Homo sapiens
  misc_feature (1)...(532): n = a,t,c or g
agcaaatgatctttttgagaatggaaacatgacccaggttcagactactctggtggctctagcaggtctggctaaaacaaaaggattccatacaaccattgacattggagttaagtatgcagaaaaacaaacaagacgttttgatgaaggaaaattaaaagctggccaaagtgtaattggtctgcagatgggaaccaacaaatgtgccagccaggcaggtatgacagcttacgggactaggaggcatctttatgatcccaaaatgcaaactgacaaaccttttgaccagaccacaattagtctgcagatgggcactaataaaggagccagccaggcagggatgttagcaccaggtaccagaagagacatctatgatcagaagctaacattacagccggtggacaactcgacaatttccctacagatgggtaccaacaaagttgcttcccagaaaggaatgagtgtgtatgggcttgggcggcaagtatatgatcccaaatactgngctgctcctacagaacctgtcattcac

SEQ ID NO: 21463 - DNA, 593 bp, Homo sapiens
atcaagaacaccaacgacgccaactcctgccaaataatcatcccccagaaccaggtcaacaggaagtcagacatctacgtgtgcatgatctcctatgcacacaacgtggcggcccagggcaagtacatagctattgccagcactactgtggagaccacggaccctgaaaaggaggtggagccggctctggagctgttggagcccattgaccagaagtttgtggctatcagtgacttgtatgagcccattgatgatggttgtgagagccaggtgttctgttcctgctcctacgatgccaccacacactttgagacaacctgcaacgacatcaaagacatctacaaacgcatggctggcacggcctttgactttgagaacatgaagcgcaaacagaacgacgtctttggagaagctgagcagtgattgtggccgcccccagcccctgctgccccagcctgtgtctgttctcctcgagggctccagcatcctctgcttcccccaccacgttcccatcacccacctcattgatccactgaccaaatccttaaccctagcgatggcttgggagatggggggttggatagcatcctctt

SEQ ID NO: 21464 - DNA, 455 bp, Homo sapiens
  misc_feature (1)...(455): n = a,t,c or g
nnnnnnnnnngnnnnnnnnntnngnnnnntntnnnaccgcttttacatgaactacgaatttaatacgactcactatagggaatttggccctcgaggccaagaattcggcacgagcagcgagagagaaggggccagggtataaaaagggcccacaagagaccagctccagcatcccaaggcccgactccccgcaccactcagggtcctgtggacagctcacctagcggcaatggctgcaggctcccggacgtccctgctcctggcttttgccctgctctgcctgccctggcttcaagaggctggtgccgtccaaaccgttcccttatccaggctttttaaagaggctatgctccaagcccatcgcgcacaccagctggccattgacacctaccaggagtttataagctcttggggaatggactctattccgacatcctccaacatggaggaaacgc

SEQ ID NO: 21465 - DNA, 396 bp, Homo sapiens
gaaaaggttaagaccctcgtgttctgctccggcaaacatttctactccctggtgaaacaaagagaatctctgggggccaagaagcatgactttgccatcatccgagtagaggaactctgccccttcccgttggattctttacagcaagagatgagcaaatacaaacatgttaaagatcatatttggagtcaggaggaacctcagaacatgggtccgtggtcgtttgtttctccaaggtttgaaaagcagctggcctgcaaggtaatcacacgttttctctggtagtgttttgtgttttgtgtgcatgttgtttttcttttctttctttctttctttcttttttttgaggcaggagaatcgcttgaatctgggaggcggaggttgcagtgagccagg

SEQ ID NO: 21466 - DNA, 880 bp, Homo sapiens
cagctatgacatgattacgaatttaatacgactcactatagggaatttggccctcgaggccaagaattcggcacgaggagagaactggccagggtataaaaagggcccacaagagaccggctctaggatcccaaggcccaactccccgaaccactcagggtcctgtggacagctcacctagtggcaatggctccaggctcccggacgtccctgctcctggcttttgccctgctctgcctgccctggcttcaagaggctggtgccgtccaaaccgttccgttatccaggctttttgaccacgctatgctccaagcccatcgcgcgcaccagctggccattgacacctaccaggagtttgaagaaacctatatcccaaaggaccagaagtattcattcctgcatgactcccagacctccttctgcttctcagactctattccgacaccctccaacatggaggaaacgcaacagaaatccaatctagagctgctccgcatctccctgctgctcatcgagtcgtggctggaaccccgtgcggttcctcaggagtatgttcgccaacaacctgggtgtatgacacctcggacagcgatgactatcacctcctaaaggacctagaggaaggcatccaaacgctgatggggaggctggaagacggcagccgccggactgggcagatcctcaagcagacctacagcaagtttgacacacaactcgcacaaaccatgacgccactgctcaagaaactaaggggctgctctactgcttcagggaaggaaatggacaaggtcgagacattcctggcgccatgggtgcagttgccgcctctgttggaagggcacctgttggcttctaaggtgcccgaagttagatccctgtt

SEQ ID NO: 21467 - DNA, 581 bp, Homo sapiens
  misc_feature (1)...(581): n = a,t,c or g
tattgccttttaatacnantcactatagggaatttggncctcgaggccaagaattcggnacnaggtctcactganccttagtcgtcggnaggtcccangcncgaantttctcggcctggaggagggggtcgcgcnaattgccanatgcaggcggggagggcccatcctctattcctatttccgaagctcctgctcatgganagttcnaattgctctggccttgaaaggcatcnactacnanacggtgcccatcaatcncataaaggatgggggccaanagttttctaaggacttccaggcactgaatcctatgaaccaggtgccaaccctgaanattgatggaatcaccattcaccagtcactggccatcattgagtatcnanaggagacgcntcccactccgcgacttctgcctcaggacccaangaanagggccagcgtgcntatnatttctgacctcatcgctggtggatccagcccctgcataacctgtctgtcctgaagcaattggganaaggacatncagctnacctgggcccagaacnccacanttgtggctttaagncctggagcaaatccta

SEQ ID NO: 21468 - DNA, 823 bp, Homo sapiens
  misc_feature (1)...(823): n = a,t,c or g
aattcggcacgaggacacgggcctgattcgtcgagtctcactgagccttagtcgtcggcaggtcccaggcgcgaagtttctcggcctggaggagggggtcgcgcgaagtgccagatgcaggcggggaagcccatcctctattcctatttccgaagctcctgctcatggagagttcgaattgctctggccttgaaaggcatcgactacgagacggtgcccatcaatctcataaaggatgggggccaacagttttctaaggacttccaggcactgaatcctatgaagcaggtgccaaccctgaagattgatggaatcaccattcaccagtcactggccatcattgagtatctagaggagacgcgtcccactccgcgacttctgcctcaggacccaaagaanagggccancgtgcgtatgatttctgacctcatcgctggtggcatccagcccctgcagaacctgtctgtcctgaaacaagtggaagaggagatgcagctgacctgggcccaaaacgccatcacttgtggctttaacgccctggagcagatcctacagagcacagcggacatatactgtgtaggagacgaggtgaccatggctgatctgtgcttggtgcctcaggtggcaaatgctgaaagatttaaggtggatctcaccccctaccctaccatcagctccatcaacaagaggctgctggtcttggaggcctttcaggtgtctcacccctgccggcagccatatacacccactgagctgagggcctagctcccaaatcctgcccgttggcacagggccacaggagcaaaaactgggtgggctgaaa

SEQ ID NO: 21469 - DNA, 749 bp, Homo sapiens
  misc_feature (1)...(749): n = a,t,c or g
cccacgcgtccgctgcgttctgtagtggccgctgcttgggcccgtggcggattgtaagctgctggttttgcggctgggaagagcggcgagagggttcggcatttttcgtcgggatccccgcaaggatgagtgctgccagagagtctcacccgcatggggtgaagcgttcagcctccccagacgacgatctgggatctagcaattgggaggcagcagacttgggtaatgaagagagaaaacaaaagttcttgagacttatgggtgcaggaaagaaagaacatactggtcgtcttgttataggagatcacaaatcaacatctcacttccgaaccggggaagaagacaagaaaattaatgaagaactggagtctcaatatcagcaaagtatggacagtaaattatcaggaagatatcggcgacattgtggacttggcttcagtgaggtagaagaccatgatggagaaggtgatgtggctggagatgatgatgatgacgatgatgattcacctgatcctgaaagtccagatgattctgaaagcgattcagagtcagagaaagaagaatctgctgaagaactccaagctgctgagcaccctgatgaagtggaggatcccaaaaacaaaaaagatgcaaaaagcaattataaaatgatgtttgttaaatccagtggttcataactcccaaacgcttagtctttgtattaaaagtaagccttattgntacaatgcacagtggaggactgcttataa

SEQ ID NO: 21470 - DNA, 1169 bp, Homo sapiens
gcaaggagaaatggtttggaactcaatatagtatagaagatattgaaaactcttgggctgaactgtggaatagtaatttcgaattaaatccagatcttcatcttccagctgaaaacaagtacatagccacggactttacgttgaaggctttcgattgcccggaaacagaatacccagttaaaattgtgaatactccacaaggttgcctgtggtataagaaagacaacaaattcaaaatccccaaagcatatatacgtttccatctaatttcaccgttgatacagaaatctgcagcagatgtggtcctctttgatatctttgtcaatatcttacgcataaccttgcggacccaggttatgaagcagatgtggcacagctggagcttcgtcaaagaattcaaatcccagctctttgtggagggcctggtacaagggaatgtcacaagcacagaatctatggatttcctgaaatatgttgttgacaaactaaacttcaagcctctggagcaggagatgcctgtgcagttccaggtggtagagctgcccagtggccaccatctatgcaaagtgaaagctctgaacaagggtgatgccaactctgaagtcactgtgtactaccagtcaggtaccaggagtctaagagaatatacgcttatggagctgcttgtgatgcacatggaagaaccttgttttgacttccttcgaaccaagcagacccttgggtaccatgtctaccctacctgtaggaacacatccgggattctaggattttctgtcactgtggggactcaggcaaccaaatacaattctgaagttgttgataagaagatagaagagtttctttctagctttgaggagaagattgagaacctcactgaagaggcattcaacacccaggtcacagctctcatcaagctgaaggagtgtgaggatacccaccttggggaggaggtggataggaactggaatgaagtggttacacagcagtacctctttgaccgccttgcccacgaggtaacatggttttcagagtaagacagctcaaactggtcaaggttcctgattctacaggcatcacaggtctgtgcacaccagcattgtgtggaagagaaactcgaaacactagtcctggcctgattactcgctcacttcctgagttttcagactggc

SEQ ID NO: 21471 - DNA, 476 bp, Homo sapiens
  misc_feature (1)...(476): n = a,t,c or g
tccccntttnacaactgaaactctttggaacatccntacgaatttaatacgactcactatagggaatttggccctcgaggccaagaattcggcacgaggtgtggagatgtcaagctagttcacactctgaggctcagaatatgtaggacatgcacaattgtgcagtcctttgggattggaagtgaaacagtctgtgatcccctaccttctagggaactaggacctaggaagaggtaaagattatcaggtatgcaaagcgccccaattcttctgctgccatgggggattttaccccaactccagggttcgaggccaatctgagaatggcttaggattgcaatgtcaaggtattatatcagccccttgcttgaggcttgaggtcataatatccctctaggacttacctgttcccccagatcttgccttgggaccacatttgctgctacttttcctgctgctctatcctatacattgaa

SEQ ID NO: 21472 - DNA, 563 bp, Homo sapiens
acgaatttaatacgactcactatagggaatttggccctcgaggccaagaattcggcacgagcggaatggcctctccacaccagggatccttagcacccaaccggtctgcctttaattttacccaggaaggactcacattggggcgaatgaaccaagtttcgccatgctggatgatgaaatggattcccatcccaaagtctgagatggattgcatatacagtgtgcagtcccagagcctcctaaaattctagccatttgtcacacaaccacagcaagaaacgtgttctatatctagagtgtgcccatctgtgtttagtacacatgcatgcatacacacccatacaaacatctgtgtgagggcagttctggagatgagcagagagagaccggaataaactcaatcttttctttcccaagctcctagccaacactatccttgggagaaagaaatttgcagaaactgctaagaccaagtgtggagatgtcaagctagttcacactctgaggctcagaatatgtaggacatgcacaattgtgcagtcctttgggattggaagtgaaac

SEQ ID NO: 21473 - DNA, 684 bp, Homo sapiens
gagaagagagcccactaattcaaggactcttactgtaggagcaactgctggttctatcacattgaaacggctggtttgtgtgctcttggtgtgctcctctgcagtggcacagttgcataaagatcctaccctggatcaccactggcatctctggaagaaaacctatggcaaacaatacagggaaaagaatgaagaagcagtacgacgtctcatctgggaaaagaatctaaagtttgtgatgcttcacaacctggagcattcaatgggaatgcactcatacgatctgggcatgaaccacctgggagacatgaccagtgaagaagtgatgtctttgatgagttccctgagagttcccagccagtggcagagaaatatcacatataagtcaaaccctaatcggatattgcctgattctgtggactggagagagaaagggtgtgttactgaagtgaaatatcaaggttcttgtggtgcttgctgggctttcagtgctgtgggggccctggaagcacagctgaagctgaaaacaggaaagctggtgtctctcagtgcccagaacctggtggattgctcaactgaaaaatatggaaacaaaggctgcaatggtggcttcatgacaacggctttcagtacatcattgataacaagggcatcgactcagacgcttcctatccctacaaagcc

SEQ ID NO: 21474 - DNA, 487 bp, Homo sapiens
aaattgagatggtgcacgatgcacagtgaagtgacttgcggggtttttcagtatctacgattcatagatctggaattcgcggccgcgtcgacggactccaaggcctttccacttggtgatcagcactgagcacagaggactcaccatggagtttgggctgagctgggttttccttgttgctattttagaaggtgtccagtgtgaggtgcagctggtggagtctgggggaggcttggtccagcctggggggtccctgagactctcctgtgcagcctctggattcaccttcaatgattatgccatgcactgggtccgccaggctccagggaaggggctggagtgggtctcatccattagtggtggtggtggtagcacatactacgcagactccgtgaagggccgattcaccatctccagagacaattccaagagcaccctgtatctgcaaatgaacagcctgagagccgacgacacggccatgtattac

SEQ ID NO: 21475 - DNA, 669 bp, Homo sapiens
  misc_feature (1)...(669): n = a,t,c or g
acgaggtgtcaacaaggagcctgttgccgagcctgacatcatggccacaaatggcgtggtccatgtcatcaccaatgttctgcagcctccagccaacagacctcaggaaagaggggatgaacttgcagactctgcgcttgagatcttcaaacaagcatcagcgttttccagggcttcccagaggtctgtgcgactagcccctgtctatcaaaagttattagagaggatgaagcattagcttgaagcactacaggaggaatgcaccacggcagctctccgccaatttctctcagatttccacagagactgtttgaatgttttcaaaaccaagtatcacactttaatgtacatgggccgcaccataatgagatgtgagccttgtgcatgtgggggaggagggagagagatgtactttttaaatcatgttccccctaaacatggctgttaacccactgcatgcagaaacttggatgtcactgcctgacattcacttccagagaggacctatcccaaatgtggaattgactgcctatgccaagtccctggaaaaggagcttcagtattgtggggctcataaaacatgaatcaagcaatccaagcctcaagggaaatccngggaaaattttgggnancccctggaaaaccggnaaatggancattanancttgg

SEQ ID NO: 21476 - DNA, 759 bp, Homo sapiens
gcgcctttcagcctcacctgcagctgcgcctccttgcacctgcgcctgtgctttttctcccagcactgcggacgcgactcgagggtgacgctcgctccgctcgtcccgctcgtcatggcctacccgggatacggaggagggtttggaaattttagcattcaggtgccaggaatgcagatgggacagccagtgccagaaacaggcccagctatactcctcgatggatactctgggccagcatattcagacacttattcctcagctggtgactccgtgtatacttacttcagtgctgttgctggacaggatggtgaagtggatgctgaagaacttcagagatgtttgacacagtctggaattaatggaacttactctcccttcagtttggaaacctgcagaattatgattgccatgttggatagagatcacacaggaaaaatgggatttaatgcattcaaagagctatgggcagctcttaatgcctggaaggaaaacttcatgactgttgatcaagatggaagtggcacagtagaacatcatgagttgcgtcaagccattggtcttatgggttataggttgagtcctcaaacattaactactattgttaaacgttatagcaagaatggcagaattttctttgatgattatgttgcttgctgtgtgaagcttcgagcattgacagatttctttaggaaaagagaccacttgcaacaagggtctgcgaatttcatatatgacgattttttgcagggcactatg

SEQ ID NO: 21477 - DNA, 466 bp, Homo sapiens
accgctatgacatgattacgaatttaatacgactcactatagggaatttggccctcgaggccaagaattcggcacgagagatcacccaagtcctgcacttcaccaaggatgtcaaggccgctgctaatcagatgcgcaacttcctggttcgagcctcctgccgccttcgcttggaacctgggaaagaatatttgatcatgggtctagatggggccacctatgacctcgagggacacccccagtacctgctggactcgaatagctggatcgaggagatgccctctgaacgcctgtgccggagcacccgccagcgggcagcctgtgcccagctcaacgacttcctccaggagtatggcactcaggggtgccaggtgtgagggctgccctcccacctccgctgggaggaacctgaacctgggaaccatgaagctggaagcactgctgtgtccgctttcatgaacacagc

SEQ ID NO: 21478 - DNA, 742 bp, Homo sapiens
  misc_feature (1)...(742): n = a,t,c or g
gggagaaagttgctttctgcaccaatagctgaggcgttcagggttgtccagggacgctaccctcacgtgtctggttccgagtgctgcgttcggctgtgctgggaagttgcgtagacagtggcctcgagaccctgcctgcctgaggaggcctcggttggatgcgaaggagctgcagcatccaggggacaagatgccaactggcaagcagctagctgacattggctataagaccttctctacctccatgatgcttctcactgtgtatggggnttgtctgtnanaanccagatgcctgtgctctccgtttccacctgccatcctcccgagccctgctgactgcccctttgccccctgcagcccccagtacctgctggactcgaatagctggatcgaggagatgccctctgaacgcctgtgccggagcacccgccagcgggcagcctgtgcccagctcaacgacttcctccaggagtatggcactcaggggtgccaggtgtgagggctgccctcccacctccgctgggaggaacctgaacctgggaaccatgaagctggaagcactgctgtgtccgctttcatgaacacagcctgggaccagggcatattaaaggcttttggcagcaaagtgtcagtgttggcagtgaagtgtcagtgtgtgttgctagggctgagagcagtgcccctgcccgatgcagttctgggcaggccaggttgacataaccttagactctctgagccctga

SEQ ID NO: 21479 - DNA, 668 bp, Homo sapiens
cttggaccttgtggttgagttggagaaactaaatctggttgccccagatcaactggatttattagaaaaatgcctaaagaacatccacagaatagacctgaagacaaaaatccagaagtacaagcagtctgttcaaggagcagggacaagttacaggaatgttctccaagcagcaatccaaaagagtctcaaggatccttcaaataacttcaggctccataatgggagaagtaaagaacaaagacttaaggaacagcttggcgctcaacaagaaccagtgaagaaatccattcaggaatcagaagcttttttgcctcagagcatacctgaagagagatacaagatgaagagcaagcccctaggaatctgcctgataatcgattgcattggcaatgagacagagcttcttcgagacaccttcacttccctgggctatgaagtccagaaattcttgcatctcagtatgcatggtatatcccagattcttggccaatttgcctgtatgcccgagcaccgagactacgacagctttgtgtgtgtcctggtgagccgaggaggctcccagagtgtgtatggtgtggatcacactcactcagggctccccctgcatcacatcaggaggatgttcatgggagattcatgcccttatctagcagggaagccaaaga

SEQ ID NO: 21480 - DNA, 564 bp, Homo sapiens
gctgctggttgcccatttttatggttatttcttgatgatatgctaaacaaggagtggatttttcatgcctcctctttttagaccatatagggtaacttcttgatgttgccgtggcatttgtaaactgtcatggtgctgtttgggagggtagcagtgaggacgaccagaggtcactctcgttgccatcttggttttagtgggttttggctggcttctttactgccaactgttttatcagcaaggtctttatgacctgtgtcttgtaccgaccgcctatcttatcctgtggctaatgccttggctgtctgggaatgcagcccagcaggtctcagcctcattttacccatcccctactcaagatggagttgctctggttcagatgcctctgacaattagatggggctaaggttgactcctgggtggcaggcctgagaacagggtggatgacagtgccatcttccaggctggctgatcctggaagaggaccaggcttcggggagagcttgagttcatttctggtcagtaagcttgtactgcctcaagactccaaagggaaaagcaacc

SEQ ID NO: 21481 - DNA, 412 bp, Homo sapiens
ggcggtcgccgtgagaactttgcaggaacagctggaaaaggccaaagagagtcttaagaacgtggatgagaacattcgcaagctcaccgggcgggatccgaatgacgtgaggcccatccaagccagattgctggccctttctggtcctggtggaggtagaggacgtggtagtttattactgaggcgtggattctcagatagtggaggaggacccccagccaaacagagagaccttgaaggggcagtcagtaggctgggcggggagcgtcggaccagaagagaatcacgccaggaaagcgacccggaggatgatgatgttaaaaagccagcattgcagtcttcagttgtagctacctccaaagagcgcacacgtagagaccttatccaggatcaaaatatggatgaaaaggga

SEQ ID NO: 21482 - DNA, 475 bp, Homo sapiens
  misc_feature (1)...(475): n = a,t,c or g
ngggttgntctntgacctcactagaactntttgacatgatcacgaatttaatacgactcactatagggaatttggccctcgaggccaagaattcggcacgaggctgtctctgatggtgtcatcaaggtgttcaacgacatgaaggtgcgtaagtcttcaacgccagaggaggtgaagaagcgcaagaaggcggtgctcttctgcctgagtgaggacaagaagaacatcatcctggaggagggcaaggagatcctggtgggcgatgtgggccagactgtcgacgatccctacgccacctttgtcaagatgctgccagataaggactgccgctatgccctctatgatgcaacctatgagaccaaggagagcaagaaggaggatctggtgtttatcttctgggcccccgagtctgcgccccttaagagcaaaatgatttatgccagctccaaggacgccatcaagaagaagctgacag

SEQ ID NO: 21483 - DNA, 617 bp, Homo sapiens
gatggtgtttttaagggaattaggcagaacagatttctagattgggtaggccactgcattctcttttgtttgcaaattggtcaacaaaatttgcaaagtgatttcaggagagagcagctttgaggaatgtggaaaatcataattgccgtctggaccattgattgattgtgaccagtagcagaagggtgcctgttacatagagaggctccttctgtccaaatgaatttctgtatactcttctataaataaaagggaggaatatattctgctggaagcccatgaaccatcgctgaggttctgatacaacatagagttttttccaaggagtgaatgtggtttaattactggactctcttagcacaggaaggtggaaacaaaatgccaggcctctgctctgaagagcaaaactgctgtcgctgcagtatctgataccagacatccacatatccacaagaagtgcctcttaggtctgtgacagagagtgtgtctccattcctcagttcccagaaaggggagaggtttggcctaaaaagcatgtagatgggggagaaatgggtggggggagaggaacagccattaacacagtatcatgtttaacaagtatagccttgatttca

SEQ ID NO: 21484 - DNA, 500 bp, Homo sapiens
gctgcagtgagccgagatcataccagtgcactccagcctagattacaggcgtgagccaccgcgcctggcctgtttattctcttaagagagaaaatgaggggattaatggactgtagttctggacaaggtggaaaactcttaaagtggaagtactggggcaagtgctctgacagggtaggatggtgcagtcagtcccttcacccagaaatcagtagaatgttagcagttcagactcaaaccttgtgaaaaacaggtggtggaaaggaaatccctcacagcaactggcaccataatcaagacagaatttttgcagaataaatggagttacctgctttcagccccaggtcgtagctattgtctgccctgctgatatgtgataataatttgtgatcctgttgtcttaaaatggggtcactcatctccagtagaattaagtccacagtgaagttgtccccccatccccagagataaacatatatgaatgaactcacgtgataaca

SEQ ID NO: 21485 - DNA, 420 bp, Homo sapiens
  misc_feature (1)...(420): n = a,t,c or g
ntttgnnntnttnnanccgctatgacatgattacgaatttaatacgactcactatagggaatttggccctcgaggccaagaattcggcacgagcgtttccggaaacatggcctccggtgtggctgtctctgatggtgtcatcaaggtgttcaacgacatgaaggtgcgtaagtcttcaacgccagaggaggtgaagaagcgcaagaaggcggtgctcttctgcctgagtgaggacaagaagaacatcatcctggaggagggcaaggagatcctggtgggcgatgtgggccagactgtcgacgatccctacgccacctttgtcaagatgctgccagataaggactgccgctatgccctctatgatgcaacctatgagaccaaggagagcaagaaggaggatctggtgtttatcttctgggc

SEQ ID NO: 21486 - DNA, 581 bp, Homo sapiens
ggaaaaaacttcggagacaaacaaggagggaagcacagaaggagctacaagaaaaagtcaggctgggcctgatgcctcctccagaacccaaagtgagaatttctaatttgatgcgagtattaggaacagaagctgttcaagaccccacgaaggtagaagcccacgtcagagctcagatggcaaaaagacagaaagcgcatgaagaggccaacgctgcccgaaaactcacagcagaacagagaaaggtcaagaaaattaaaaagcttaaagaagacatttcacagggggtacacatatctgtatatagagttcgaaatttgagcaacccagccaagaagttcaagattgaagccaatgctgggcaactgtacctgacaggggtggtggtactgcacaaggatgtcaacgtggtagtagtggaagggggccccaaggcccagaagaaatttaagcgtcttatgctgcatcggataaagtgggatgaacagacatctaacacaaagggagatgatgatgaggagtctgatgaggaagctgtgaagaaaaccacaaatgtgtactagtctgggagggtacagccc

SEQ ID NO: 21487 - DNA, 711 bp, Homo sapiens
  misc_feature (1)...(711): n = a,t,c or g
gtcctaagccggatttggtcttcaaagataaacctgttaacagttggttggcccattccagcaaggaggtttcttgcaggtctaggagacagtacccttggtgaagactctacgcagctctagaggctccaaaggtaggtagagaggtgcggcggccccaggccccattctcccccaggttctcctccagttgcacccagcgcgccgcctccatccatctcagctcctggttcttttcgtccatcaccagctcctgcagctccacatagaccttgtgggtacccgggtgtgatgtggtgtggtagtctgtggctgttgcctcggtgtcgtgagctgccggctcctccatctgggactcggggatgtctgggtcttcatattcctcctgctccagattctcctccatcatgtcttcataatcatcctgcagctcctccatggcgtggtcctgagtgtccagttgtctacggtgatctgagcccccagcataacccgcaccgcgggtccctgctcacgagcctcagggtcccttggtgaagtcctgcagccgctggtgccctcgtcgacgcggccgcgaattccagatctatgaatcgtagatactgaaaaaccccgcaagttcacttcaactgagcatcgtgcaccatctcaatttctttcatttatacatcgttctgncttcttttatgtaactatactcctctaagtttc

SEQ ID NO: 21488 - DNA, 505 bp, Homo sapiens
  misc_feature (1)...(505): n = a,t,c or g
ttgnanatngttatgacatgattacgaatttaatacgactcactatagggaatttggccctcgaggccaagaattcggcacgaggcaaatggaccagaagatctcaatcgggcttgtattgctgaaaagttaggtggatccttaattgtagcctttgaaggatgccctgtgtagattattcagtgccacaaattgaaagcttccatgtttaatgttatcctcttgctatataaataaagcaaatatatttaggccagggtctcactgagggggagctgtcttgcatcttttagagtaaactattctataaacatatgcaaacagccctaaataaatctaaagtctaaagttttattgatgtgaaattaaattcttattggccaaatgcctgntttgatganttgatttattaaganttttggtaagctcangatttttaaattacccaggtcacnaacagtnaagggcnttntnaaagagaattattacatnnttattaaccccc

SEQ ID NO: 21489 - DNA, 880 bp, Homo sapiens
  misc_feature (1)...(880): n = a,t,c or g
gcacacaggagagaaaccggataaatgtaccctttgtggggaaaacgttctctcatagatccaatttaatcaggcaccagagaatccacacaggagaaaaaccctatacctgtcatgagtgcggagacagcttctctcacagctccaatcggattcgccacctgagaacgcatacgggagagagaccctataaatgttctgaatgtggagaaagcttctctcggagttcccgtcttatgagtcatcagagaactcacacaggttagtaacagtggggtttctctttgccccaggtgaggtggcatattcagaggagcctgttggcaagagctggtattccctgcccagccgaccaaatgacctctgcattcttcaggtaatgggggctcattgtgagggaggtgcagaggcagcagaggattggcataaaactgaaaaggagttctgtctgcatgagaaaggatggcaagtctctgaggtgacctcagggtggaattctctgttaagtccaccctgccccagggtgctcctaccctcttggtctttttaaagccaaggtgcgatttgggcacctgactgtccagtttaccttaacaagtttgggaatccatgtgatgtttttgatacttcttcctcatttgggacattcagtaggagccatttgggcttccggggcccctgagaccaaagaagaggggccaagtaccctgggaaatcagctgaaggtcaacaaaagactggttgtgagttgcagctgtcccgaaggccccagttgggaagccatgggcagtccagatcaagccaccacgtgccctacgatggcctacaggaatgcccattgcagatacncatgtaaatatnacctcanaccaaaaggacc

SEQ ID NO: 21490 - DNA, 463 bp, Homo sapiens
tttgaaatccgttatgacatgattacgaatttaatacgactcactatagggaatttggccctcgaggccaagaattcggcacgaggtctccgtctctggagttgtaggcgagaggtgatcatgtccggtcgcgggaaacagggcggcaaagtgcgagcaaaggccaaatcccgctcctcccgcgcgggcctgcagttcccggtgggccgagtgcaccgcctgctccgtaaaggcaactacgcagagcgggttggggcaggcgcgccggtgtacctggcggcggtgttagagtacctgaccgccgagatcctggagctggccggcaacgcggctcgcgacaacaagaagactcgcatcatcccgcgccacttgcagctggccatccgcaacgacgaggagctcaacaaactgctgggccgggtgaccattgctcagggcggcgttcttcctaacatccaggccg

SEQ ID NO: 21491 - DNA, 481 bp, Homo sapiens
aaagctatgacatgattgcgaacttaatacgactcactatagggaatttggccctcgaggccaagaattcggcacgaggtctatttcctagtgggggcttaatgaggccctgggaggggagtgtctctcaaagacacccagctggcttctgtggcccctacccaaccctttccctctcctttgatccctgggtctccacctgtatccttctgtctccacgtccaccatcatggcgccctcagtaacaacaatagtaagagcagcaatcactgtatcagtcacagttccaaccgtttcatgtatattggctccttgaacacccatcacaaccctagtaacccatttcatacacaacttgcaggcagctgaaccagaagtgaacagaggccactgtgctccaggggcagtgctctgaacccccagactctaacatctcctccctcgagcagacagatcgcagtggacccttcacaacatgggt

SEQ ID NO: 21492 - DNA, 418 bp, Homo sapiens
  misc_feature (1)...(418): n = a,t,c or g
gaactggaagaattgaaatttagcatcacagttcttgaccagaatataattacagctacccctaatgtgagggtagggacagcgatgtgtgttatatccccagcatctagcagtgtcacagaagagacaaagacatttttctggtatgcatgagtataagaatggtttgcctaaataagactgtcctcatggctctgtgactgtgcctcttgtcaggtgtatgagtttagagtcaaagaatctagcatcatagctccagctcccgctgaggatgtggatactcctccaaggaaaaagaagaggaaacaccggttgtgggctgcacactgcagaaagatacagctgaaaaaggacggctcctctaaccatgtttacaactatcaaccctgtgatcattcacggnagccttgtgacagtt

SEQ ID NO: 21493 - DNA, 576 bp, Homo sapiens
  misc_feature (1)...(576): n = a,t,c or g
gcaagcaatacctgcaactgaggattcttcccggggagaccgcagcccatcggcatggctcaagagtttgtgaactgcaaaatccagcctgggaaggtggttgtgttcatcaagcccacctgcccgtactgcaggagggcccaagagatcctcagtcaattgcccatcaaacaagggcttctggaatttgtcgatatcacagccaccaaccacactaacgagattcaagattatttgcaacagctcacgggagcaagaacggtgcctcgagtctttattggtaaagattgtataggcggatgcagtgatctagtctctttgcaacagagtggggaactgctgacgcggctaaagcagattggagctctgcagtaaccacagatctcataggaaatgttcaacaattctgtgaaaggtcacaggacccaattggagaaatcatatgaaaagcatagttggtcttggtgtcatatggatcagaggcacaagtgcagaggctgtggtcatgcgggacactctgttatttaagatggtatccagattatcctgaacactgtgttttagtttagntagact

SEQ ID NO: 21494 - DNA, 428 bp, Homo sapiens
  misc_feature (1)...(428): n = a,t,c or g
actatagggaatttggccctcgaggccaagaattcggcacgagcatccttccctctctcacggaaatcgatactgtggtcttcattttcaccctggatgacaacctcacggaggtgcagactatagtggagcaggtgaaagagaagaccaaccacatccaggccctggcacacagcaccgtgggtcagaccttgccgatccctctgaagaagctctttccctccatcatcagcatcacatggccactgcttttctttgaatatgaagggaacttcatccagaagttccagcgtgagctaagcaccaaatgggtgctgaatacagtgagtacaggtgctcatgtgcttcttggtaagatcctacaaaaccacatgttggaccttcggattaacaactccaagctcttctggcgggcgctgncatctgga

SEQ ID NO: 21495 - DNA, 1026 bp, Homo sapiens
ttgactgattacgaatttaatacgactcactatagggaatttggccctcgaggccaagaattcggcacgagggccgggagaggccgcgttcagtcgggtcccggcagcggctgcagcgctctcgtcttctgcggctctcggtgccctctccttttcgtttccggaaacatggcctccggtgtggctgtctctgatggtgtcatcaaggtgttcaacgacatgaaggtgcgtaagtcttcaacgccagaggaggtgaagaagcgcaagaaggcggtgctcttctgcctgagtgaggacaagaagaacatcatcctggaggagggcaaggagatcctggtgggcgatgtgggccagactgtcgacgatccctacgccacctttgtcaagatgctgccagataaggactgccgctatgccctctatgatgcaacctatgagaccaaggagagcaagaaggaggatctggtgtttatcttctgggcccccgagtctgcgccccttaagagcaaaatgatttatgccagctccaaggacgccatcaagaagaagctgacagggatcaagcatgaattgcaagcaaactgctacgaggaggtcaaggaccgctgcaccctggcagagaagctggggggcagtgccgtcatctccctggagggcaagcctttgtgagccccttctggccccctgcctggagcatctggcagccccacacctgcccttgggggttgcaggctgcccccttcctgccagaccggaggggctggggggatcccagcagggggagggcaatcccttcaccccagttgccaaacagaccccccaccccctggattttccttctccctccatcccttgacggttctggccttcccaaactgcttttgatcttttgattcctcttgggctgaagcagaccaagttccccccaggcaccccagttgtgggggagcctgtattttttttaacaacatccccattcccacctgggcttccccttccatgctgccactttaaccgcatagtgac

SEQ ID NO: 21496 - DNA, 794 bp, Homo sapiens
  misc_feature (1)...(794): n = a,t,c or g
tttgatgacatgattacgaatttaatacgactcactatagggaatttggccctcgaggccaagaattcggcacgagggcacttcagtcaaattcttcttccttagaaccccaactcagtccttgatcccttctcagctcccacccctgtgcttaactatggcctcccacaagggctactcctcactctacgccccacttgccacttttcctcccagtcccattttctccccctgaagcctagaaccttcctttcctatatagccaatcactcctctctccttggtcttaaacttcccagatttccgagatgtccgtggctttctcattggtgatcacagtgacatgtttaaccagaaggctgagctcaccaaccagggtccccagttcaccttctcccaggaggacttcctgacttccatccttccctctctcacggaaatcgatactgtggtcttcattttcaccctggatgacaacctcacggaggtgcagactatagtggagcaggtgaaagagaagaccaaccacatccaggccctggcacacagcaccgtgggtcagaccttgccgatccctctgaagaagctctttccctccatcatcagcatcacatggccactgcttttctttgaatatgaagggaacttcatccagaagttccagcgtgagctaagcaccaaatgggtgctgaatacagtgagtacaggtgctcatgtgcttcttggtaagatcctacaaaaccacatgttggaccttcggattagcanctccaagctcttctggcggggcgctg

SEQ ID NO: 21497 - DNA, 472 bp, Homo sapiens
gctatgacatgattacgaatttaatacgactcactatagggaatttggccctcgaggccaagaattcggcacgagcggcacgagcggctctactgccacctcttccagctccaccgccggcgcagcagggaaaggcaaaggcaaaggcggctcgggagattcagccgtgaagcaagtgcagatagatggccttgtggtattaaagataatcaaacattatcaagaagaaggacaaggaactgaagttgttcaaggagtgcttttgggtctggttgtagaagatcggcttgaaattaccaactgctttcctttccctcagcacacagaggatgatgctgactttgatgaagtccaatatcagatggaaatgatgcggagccttcgccatgtaaacattgatcatcttcacgtgggctggtatcagtccacatactatggctcattcgttacccgggcactcctggactctcag

SEQ ID NO: 21498 - DNA, 473 bp, Homo sapiens
ccttgtctgactgtgctcatggccaggcaggggggacagtgtatgcaagagtaatgtggagtttgtgctaactctagccagcttaattagtgactggataaattgcacaactctcacattcttctgttttttcctccgtggaaatagtactcatgctggggaatgagtgacattgaatctctgctcttttttcccctcttttctaggattactacagcatcccatttcccacacccactactccgctgactgggagggatggtagcctggccagcaacccttattctggtgacctcacaaagttcggccgtggggatgcctcctccccagccccggccacaaccttggcccaaccccaacagaaccagacgcagactcaccataccacgcagcagacattcctgaacccggcgctgcctcctggctacagttacaccagcctgccatactatacaggggtcccggcctcccac

SEQ ID NO: 21499 - DNA, 707 bp, Homo sapiens
gaactgaaggagctggaggtggccgagggcggcaaggcagagctggagcgcctgcaggccgaggcacagcagctgcgcaaggaggagcggagctgggagcagaagctggaggagatgcgcaagaaggagaagagcatgccctggaacgtggacacgctcagcaaagacggcttcagcaagagcatggtaaataccaagcccgagaagacggaggaggactcagaggaggtgagggagcagaaacacaagaccttcgtggaaaaatacgagaaacagatcaagcactttggcatgcttcgccgctgggatgacagccaaaagtacctgtcagacaacgtccacctggtgtgcgaggagacagccaattacctggtcatttggtgcattgacctagaggtggaggagaaatgtgcactcatggagcaggtggcccaccagacaatcgtcatgcaatttatcctggagctggccaagagcctaaaggtggacccccgggcctgcttccggcagttcttcactaagattaagacagccgatcgccagtacatggagggcttcaacgacgagctggaagccttcaaggagcgtgtgcggggccgtgccaagctgcgcatcgagaaggccatgaaggagtacgaggaggaggagcgcaagaagcggctcggccccggcggcctggaccccgtcgaggtctacgagtccctcct

SEQ ID NO: 21500 - DNA, 576 bp, Homo sapiens
  misc_feature (1)...(576): n = a,t,c or g
agctatgacatgattacgaatttaatacgactcactatagggaatttggccctcgaggccaagaattcggcacgagatagaccaataatgagttccaaaattgaatcattaataaaaatcctaccaaccacaaagagcccaggaccagatgaattcacagtcaaattctatcagatatataaaaaataacttgtaccatttctactgaaactgtttcaaaaaattgaggagggaatcctctgtgactcattttatgaggccagcatcatcctgataccaaaacctagcaaggacacaatgagaaaagtaaattacagtccaatatccctgatgaacatagatgcaaaaatcctcaacaaaatactagcaaaccaaattcaacagcacatcaaaaagataattcgtcacgatcaagtaggcttcatccctggtcacattgacagaattaaaagcaaaaaccatatgatcatcccactagacaaagaaaaagcttttgataaaatttagcacccttttatgattaaaaaaaaaagtaacaaactaggagtanaagggaactgcctntcatggatcaaa

SEQ ID NO: 21501 - DNA, 374 bp, Homo sapiens
ggtaggagcagggggcagtgttgatggtgactctgcttggattatcttctagggatggaggattgccagctccattgaatggaaggactggtgatgcgcagccactcttgcatgtgcccgggcaaaagacagtgtgttggtggcaaatgcctaatgtgtctatggctgaccatgggccatctctgccattcaagacatcagctcctggcagagttgtattggtttgatagagctttagtcttcggagtcgcacagacctgagttcaaatccttctctgccatttactgtaatcccagcactttgggaggctgaggcaggtggatcacgaggtcaggagatcaagaccatcctggctaacacggtgaaactcccg

SEQ ID NO: 21502 - DNA, 785 bp, Homo sapiens
cggacgcgtgggcggaattatggcggcggtggatatccgagacaatctgctgggaatttcttgggttgacagctcttggatccctattttgaacagtggtagtgtcctggattacttttcagaaagaagtaatcctttttatgacagaacatgtaataatgaagtggtcaaaatgcagaggctaacattagaacacttgaatcagatggttggaatcgagtacatccttttgcatgctcaagagcccattcttttcatcattcggaagcaacagcggcagtcccctgcccaagttatcccactagctgattactatatcattgctggagtgatctatcaggcaccagacttgggatcagttataaactctagagtgcttactgcagtgcatggtattcagtcagcttttgatgaagctatgtcatactgtcgatatcatccttccaaagggtattggtggcacttcaaagatcatgaagagcaagataaagtcagacctaaagccaaaaggaaagaagaaccaagctctatttttcagagacaacgtgtggatgctttacttttagacctcagacaaaaatttccacccaaatttgtgcagctaaagcctggagaaaagcctgttccagtggatcaaacaaagaaagaggcagaacctataccagaaactgtaaaacctgaggagaaggagaccacaaagaatgtacaacagacagtgagtgctaaaggcccccctgaaaaacggatgagacttcagtgagtctggacaaaagagaacctgggaa

SEQ ID NO: 21503 - DNA, 454 bp, Homo sapiens
ccctttgaaaacccgttatgacatgattacgaatttaatacgactcactatagggaatttggccctcgaggccaagaattcggcacgagatcaccgtgacatgcagggcttccagcttctatccccggaatatcatactgacctggcgtcaggatggggtatctttgagccacgacacccagcagtggggggatgtcctgcctgatgggaatggaacctaccagacctgggtggccaccaggatttgccgaggagaggagcagaggttcacctgctacatggaacacagcgggaatcacagcactcaccctgtgccctctgggaaagtgctggtgcttcagagtcattggattattattttctatgtccgttgttgtaagaagaaaacatcagctgcagagggtccagagctcgtgaacctgcaggtcctggatcaacacccagttgggacgag

SEQ ID NO: 21504 - DNA, 555 bp, Homo sapiens
accagctatgacatgattacgaatttaatacgactcactatagggaatttggccctcgaggccaagaattcggcacgagcaaggacagagacgctggctaggccgccctccccactgttaccaacatgaagctgctcgcagcaactgtgctactcctcaccatctgcagccttgaaggagctttggttcggagacaggcaaaggagccatgtgtggagagcctggtttctcagtacttccagaccgtgactgactatggcaaggacctgatggagaaggtcaagagcccagagcttcaggccgaggccaagtcttactttgaaaagtcaaaggagcagctgacacccctgatcaagaaggctggaacggaactggttaacttcttgagctatttcgtggaacttggaacacagcctgccacccagtggaagtgtccagaccattgtcttccaaccccagctggcctctagaacacccactggccagtcctagagctcctgtccctacccactctttgctacaataaatgctgaatgaatccaaaaaaaaaaaaaa

SEQ ID NO: 21505 - DNA, 518 bp, Homo sapiens
aacagctatgacatgattacgaatttaataacgactcactatagggaatttggccctcgaggccaagaattcggcacgagggaagcgtttttggggtcgcggtccggactttgggcggggggtccggccccaggacagttttaccgcattccgtccactcccgattccttcatggatccggcgtctgcactttacagaggtccaatcacgcggacccagaaccccatggtgaccgggacctcagtcctcggcgttaagttcgagggcggagtggtgattgccgcagacatgctgggatcctacggctccttggctcgtttccgcaacatctctcgcattatgcgagtcaacaacagtaccatgctgggtgcctctggcgactacgctgatttccagtatttgaagcaagttctcggccagatggtgtaagtcatccagagaacaggagagtggttcccaagtagagaggggagtcccctgttttttattcccttcgatgggatggggggacttgttgc

SEQ ID NO: 21506 - DNA, 627 bp, Homo sapiens
gtcacgctctcgctcggtctttctgccgccatcttggttccgcgttccctgcacaaaatgcccggcgaagccacagaaaccgtccctgctacagagcaggagttgccgcagccccaggctgagacagggtctggaacagaatctgacagtgatgaatcagtaccagagcttgaagaacaggattccacccaggcaaccacacaacaagcccagctggcggcagcagctgaaattgatgaagaaccagtcagtaaagcaaaacagagtcggagtgaaaagaaggcacggaaggctatgtccaaactgggtcttcggcaggttacaggagttactagagtcactatccggaaatctaagaatatcctctttgtcatcacaaaaccagatgtctacaagagccctgcttcagatacttacatagtttttggggaagccaagatcgaagatttatcccagcaagcacaactagcagctgctgagaaattcaaagttcaaggtgaagctgtctcaaacattcaagaaaacacacagactccaactgtacaagaggagagtgaagaggaagaggtcgatgaaacaggtgtagaagttaaggacatagaattggtcatgtcacaagcaaatgtg

SEQ ID NO: 21507 - DNA, 578 bp, Homo sapiens
ggagatttccaaaatgagggagctcctggctagaaaagacagcgaaacaggagaaaatattagacaggcagcatcctctcttcagcaggcatcattgaagctgttcgaaatggcatacaaaaagatggcatctgagcgagaaggctctggaagttctggcactggggaacaaaaggaagatcaaaaggaggaaaaacagtaataatagcagaaattttgaagccagaaggacaacatatgaagcttaggagtgaagagacttcctgagcagaaatgggcgaacttcagtctttttactgtgtttttgcagtattctatatataatttccttaatttgtaaatttagtgaccattagctagtgatcatttaatggacagtgattctaacagtataaagttcacaatattctatgtccctagcctgtcatttttcagctgcatgtaaaaggaggtaggatgaattgatcattataaagatttaactgttttatgctgaagtgaccatattttcaaggggtgaaaccatctcgcacacagcaatgaaggtagtcatccatagacttgaaatgagaccacat

SEQ ID NO: 21508 - DNA, 523 bp, Homo sapiens
  misc_feature (1)...(523): n = a,t,c or g
gggagtaaagacctgctgtactgactggggccagttcttccttatccaggagaaaggacagtcagcccttgtaggcgggactgtccaactacgggaaccctcnccatggcctgttgctgttcatgatggctggcatganagtgtccatgtacctcttccgggtaacagtgaccagtgactcccccaagctctggatcctggtattgngaactgtanttggtttcncctcctaagggcccanatgccctgtttggagtcntanncaacnagantgccccccccaaattntgtnggncntctcncaccccnntgtganacacagggnaaantgnggggcgttttcgggnggnngcncntntcnacnanatngacanacantacntttggnacanacctntcgggggggcaaatgtgntttgtgcggncacaggggngnnttcttcnccaaanaacatcgcacaaanntgggccnnttcaanangggttnttgaannnnctcangntccggncancatccncgggg

SEQ ID NO: 21509 - DNA, 810 bp, Homo sapiens
  misc_feature (1)...(810): n = a,t,c or g
gtgctgatgttggactccgcaacctggaccccatgccctctgagggcaagaagggctccttgaaggaggagagcaccctgcaggagctgctgctgtccccttacctgtgggtgctctccactggttaccttgtggtgtttggagtaaagacctgctgtactgactggggccagttcttccttatccaggagaaaggacagtcagcccttgtaggtagctcctacatgantgccctggaagttgggggccttgtaggcagcatcgcagctggctacctgtcagaccgggccatggcaaaggcgggactgtccaactacgggaaccctcgccatggcctgttgctgttcatgatggctggcatgacagtgtccatgtacctcttccgggtaacagtgaccagtgactcccccaagctctggatcctggtattgggagctgtatttggtttctcctcgtatggccccattgccctgtttggagtcatagccaacgagagtgcccctcccaacttgtgtggcacctcccacgccattgtgggactcatggccaatgtgggcggctttctggctgggctgcccttcagcaccattgccaagcactacagttggagcacagccttctgggtggctgaagtgatttgtgcggccagcacagctgccttcttcctcctacgaaacatccgcaccaagatgggccgagtgtccaagaaggctgagtgaagagagtccaggttccggagcaccatcccacggtggccttccccctgcacgctctgcggggagaaaaggaggggcctgcctggctagccct

SEQ ID NO: 21510 - DNA, 577 bp, Homo sapiens
gcagctggtaactgatctgtcactcaggccaaacactatcctcagtgctttaaagatgttgattcaccaaatcctcacagttgacccagagaggtgtgtaattagggtcccagtctcaacacagagaaactgaggcacagagaggtgaagttacttgtcaagggtcgttgggcagagtacgattggtgagaaaagagagcataggacacgtgggcaagtgctggccccatagggtggggatggagcctttgtgatcactctactcgtctctaatccctcctttcctgcagcgagggtgggtcctgggccccaacaactactacagttttgccagccagcagcagaagccggaagacaccaccattccctccacagaactggccaaacaggtcatcgagtatgcccggcagcttggagatgatcgtctgagccccccgggcactgggtggggcagggcacgagttatttaaaacagttacactgcagggtttcgcccaataaaggtggactgacattccctcttcaggcccttgctccccagttgggacggcagagagacaagttcttatatctgaaa

SEQ ID NO: 21511 - DNA, 873 bp, Homo sapiens
  misc_feature (1)...(873): n = a,t,c or g
ccgcagcttcttggcttaggtacttctactcacagcggccgattccgaggccaactccagcaatggcttttgcaaatctgcggaaagtgctcatcagtgacagcctggacccttgctgccggaagatcttgcaagatggagggctgcaggtggtggaaaagcagaaccttagcaaagaggagctgatagcggagctgcaggactgtgaaggccttattgttcgctctgccaccaaggtgaccgctgatgtcatcaacgcatctgagaaactccaggtggtgggcagggctggcacaggtgtggacaatgtggatctggaggccgcaacaaggaagggcttcttggttatgaacacccccaatgggaacagcctcagtgccgcagaactcacttgtggaatgatcatgtgcctggccaggcagattccccaggcgacggcttcgatgaagacggcaaatgggagcggaagaagttcatgggaacagagctgaatggaaagaccctgggaattcttggcctgggcaggattgggagagagctagctacccggatgcagtcctttgggatgaagactatagggtatgaccccatcatttccccagaggtctcggcctcctttggtgttcaacagctgcccctggaggagatctggcctctctgtgatttcatcactgtgcacactcctctcctgccctccacgacaggcttgctgaatgacaacacctttgcccagtgcaagaagggggtgcgtgtggtgaactgtgcccgtggagggatcgcggacgaaggcgccctgctccgggccctgcagtctggcaatttggccgggctcactggactgtttacggaaanccncaacggaaccgggccttg

SEQ ID NO: 21512 - DNA, 619 bp, Homo sapiens
gctgctccaggaccccataatacaagcgcataatgttgatcttgggcctgttccactgttaacataacttttttctgcttctgtcctctataactgtatactgcctctgtcagtataggaaatcaacaactcttagtactgcgtggactaacacatcaggttgaaggtgcgaacccaccatggtgctgtctcctgccgacaagaccaacgtcaaggccgcctggggtaaggtcggcgcgcacgctggcgagtatggtgcggaggccctggagaggatgttcctgtccttccccaccaccaagacctacttcccgcacttcgacctgagccacggctctgcccaggttaagggccacggcaagaaggtggccgacgcgctgaccaacgccgtggcgcacgtggacgacatgcccaacgcgctgtccgccctgagcgacctgcacgcgcacaagcttcgggtggacccggtcaacttcaagctcctaagccactgcctgctggtgaccctggccgccacctccccgccgagttcacccctgcggtgcacgcctcctggacaagttcctggcttctgtgagcaccgtgctgactccaaataccggtaagctggagcctcggg

SEQ ID NO: 21513 - DNA, 595 bp, Homo sapiens
  misc_feature (1)...(595): n = a,t,c or g
gggaaagatgcagccactcctgcttctgctggcctttctcctacccactggggctgaggcaggggagatcatcggaggccgggagagcaggccccactcccgcccctacatggcgtatcttcagatccagagtccagcaggtcagagcagatgtggagggttcctggtgcgagaagactttgtgctgacagcagctcattgctggggaagcaatataaatgtcaccctgggcgcccacaatatccagagacgggaaaacacccagcaacacatcactgcgcgcagagccatccgccaccctcaatataatcagcggaccatccagaatgacatcatgttattgcagctgagcagaagagtcagacggaatcgaaacgtgaacccagtggctctgcctagagcccaggagggactgagacccgggacgctgtgcactgtggccggctggggcagggtcagcatgaggaggggaacagatacactccgagaggtgcagctgagagtgcagagggataggcagtgcctccgcatcttcggttcctacgacccccgaaggcagatttgtgtgggggaccggcggnancggaaggctgct

SEQ ID NO: 21514 - DNA, 293 bp, Homo sapiens
aaaaaaacaaacgcaaggcgtaaaaaaacttcacagtgcgtgctccatttcctttcacccaggacgtactcaataaacgcttgttaaagagttttattttggtactgggttaaaaatacacccgtctggggcatgtataagtctgtgtgttaagcaagcctgacaatcagttgaaattgttccatgtttgacttcatcagttgtccataaacaaccaagttcttgtggctctgttggttcttatggtggttaatgggcctggaaacaacttggctgctactgccattaatgat

SEQ ID NO: 21515 - DNA, 429 bp, Homo sapiens
  misc_feature (1)...(429): n = a,t,c or g
gctggttgcactagttgttgtaagtgtagcaggcttacttgttattgaagccgctggtttagctgcagtactatttgttgtactagttgttgaagctgtagactgtgtataagcagggaatgtaggctttgggggttctgtagttgttgcaggggtactatttaagggtttgaaatctgtaccaacaggtccttggacagctgcctgagcctgtccagcactggggaaaagaggcttagtaactggaggctgtggggcaggtacagttgctgttggtgcaagtggtctattaagaatacctggcgctgaaacaccctgtgncttagtcattgggaggaattccaggacgtggaacaagttgggggcatacctgggtggcattccaggcatcaaangtggtatccctggtccaagtggcatcattccacc

SEQ ID NO: 21516 - DNA, 624 bp, Homo sapiens
cctccaattggtccaactggtggattaccgatgggggcctgtcctggccgaggaagattacgttgatacttaggtaactgtgcccttctctcttccagggatatatcctcatctggatggatcaacttactggttgcactagttgttgtaagtgtagcaggcttacttgttattgaagccgctggtttagctgcagtactatttgttgtactagttgttgaagctgtagactgtgtataagcagggaatgtaggctttgggggttctgtagttgttgcaggggtactatttaagggtttgaaatctgtaccaacaggtccttggacagctgcctgagcttgtgctgtgctaggaaacagagctttagaagatgcagacagactttctgaattggatgaagctgtacttgagcttgtgacaggtgtccccatctgtccagcactggggaaaagaggcttagtaactggaggctgtggggcaggtacagttgctgttggtgcaggtggtctattaagaatacctggcgctgaaacagcctgtgcttgagtcattggaggaattccaggacgtggaacaggtgggggcatacctggtggcattccaggcatcagaggtggtattccc

SEQ ID NO: 21517 - DNA, 373 bp, Homo sapiens
gcttccggccagcgcagccattttggcttcctgaccttgggctacggctgaccgttttttgtggtgtactccgtgccatcatgtccgtcctgacgccgctgctgctgcggggcttgacaggctcggcccggcggctcccagtgccgcgcgccaagatccattcgttgccgccggaggggaagcttgggatcatggaattggccgttgggcttacctcctgcttcgtgaccttcctcctgccagcgggctggatcctgtcacacctggagacctacaggaggccagagtgaaggggtcctggtcatgttactgcatttgtggccggcctcccctggatcatgtcattcaattccagtcacctcttctgcaatca

SEQ ID NO: 21518 - DNA, 438 bp, Homo sapiens
  misc_feature (1)...(438): n = a,t,c or g
ttgganaccgtttgacatgattacgaatttaatacgactcactatagggaatttggccctcgaggccaagaattcggcacgagcgacaatgaggagggtttcttcagtgcccgtggtcatcgaccccttgacaagaagagagatgaggctcccagcctgaggcctgccccaccgcccatcagtggaggtggctatcgggctcgtccagccaaagcagctgccactcaaaagaaagtagaaagaaaagcccctgatgctggaggctgtcttcacgctgacccagacctgggggtgttgtgtcctacaggatgtcagttgcaagaggctttgctacaacaggaaaggccaatcagaaatagtgttgatgagttaaataacaatgtggaagctgtttcccagacctcctcttcttcctttcagtacatgtatttgctgaaa

SEQ ID NO: 21519 - DNA, 866 bp, Homo sapiens
  misc_feature (1)...(866): n = a,t,c or g
taaagacagtctcagcagccagggattctggctgaaggaaatgatccgccaccctgagggtggtgatggtagtttctacccatacctcagcctcaggcgagtggcttatagcctccattcatggtgcactttatttatggtactaagataaagactgtcaatccattgatttatctcctcctgtcccccatctaaaatacccatgctgcttttctgagtgttgatgggggttaccagcttgatccactgttgctcttagaaggcccagaaagtctttgggcattgccaagaaatcccggattatgtggaaaaccctcactttctcttcacggctgtaccagaaaatccctaagacagatcttgccgtggactagcaatacctgcaagtgctgccaatgggaactcaatttattcctgggaacctaacgaggagagcccaggcctaggcaggaggcctggaaccctcttggctaaggtgctgttcctgttcctgcaaggtctccagaacccctttggaaatggtgaaggaaccagcccaatagaagtacagagccagctgacaagtccttgtaaagctcactcctcagtccttggcacagccatgttttgtcttctctcttggtatttcttctctcccaactttagccattttgccttggaatcatgattacaattttttcctttgcagatgccttcctgggggatactcctccccaccctaaagggtcgcctgcaacttaggcggattgggtctctctgctgnggcgttctctcttgagagaccctctgaattttagcacaaagtgccttctgtttcacagctgccaccacctttagaggaatttcgtcagaaaaatgtggaggct

SEQ ID NO: 21520 - DNA, 886 bp, Homo sapiens
accccaacgtccatcaccccaccccctattctgagcgccgatgacctcctgggctcacctaccctgcccgatggcaccaataacccttttgccttctccagccaggagctggcaagcctctttgcccctagcatggggctgcccgggggtggctccccgaccaccttcctcttccggcccatgtccgagtcccctcacatgtttgactctccccccagccctcaggattctctctcggaccaggagggctacctgagcagctccagcagcagccacagtggctcagactccccgaccttggacaactcaagacgcctgcccatcttcagcagactttccatctcagatgactaagccagggtagggagggacctcctgcctactccagcccctaccctgcacccacatcccataccctcttctccctacccatcccattccccacaggccctacattaacaaggttaagctcaacccctttcccccagcacctcagaatgtgccctccctctccccctcataaccccacctaacataaggacaagtcaatttgtcagtagcttcttctggcttgaaaccccctccctggattttatagcccacttaccatgcataacagacaagtcccatattttgtcagtagatgcctttttttttccggcttaagccttaagtgccaaatcacaagagaaaaagcagtaacagtttacagaagcaacttagtgccttgtaatctaactttgtcactgtgactacattacctcttcagcgccagagggcacccgtgggcctcccggagcctctgcccatggcggggtggagacccggaaccagcagccccctccactggcgacacaactgcaccttccctcatttcagtctcccg

SEQ ID NO: 21521 - DNA, 451 bp, Homo sapiens
gccgccgaggagcaaggcgtgctccctgatgacctgtccggcgtcatccggaggctctgggctgaccatggtgtgcaggcctgctttggccgctcaagggaataccagctcaacgactcagctgcctactacctgaacgacctggagcgtattgcacagagtgactacatccccacacagcaagatgttctcagaactagagtgaaaactacaggaattgttgaaacccattttactttcaaagatcttcattttaaaatgtttgatgtgggaggtcagagatctgagcggaagaagtggattcattgcttcgaaggagtgacggcgatcatcttctgtgtagcactgagtgactacgacctggttctagctgaagatgaagaaatgaaccgaatgcatgaaagcatgaaattgtttgacagcatatgtaacaacaagtggtttacagatc

SEQ ID NO: 21522 - DNA, 734 bp, Homo sapiens
gtctaccggaagtttgatctgggccaggatgtcatcgatttcactggccatgccctggcgctctaccgcactgatgactacctggaccagccctgccttgagaccgtcaaccgcatcaagttgtacagtgagtccctggcccggtatggcaagagcccatatttatacccgctctacggcttgggcgagctgccccagggttttgcaagattgagtgccatctatggggggacatatatgctgaacaaacctgtggatgacatcatcatggagaacggcaaggtggtgggcgtgaagtctgagggagaggtggcccgctgcaagcagctgatctgtgaccccagctacatcccggaccgtgtgcggaaggctggccaggttatccgcatcatctgtatccttagccaccccatcaagaacaccaacgacgccaactcctgccaaataatcatcccccagaaccaggtcaacaggaagtcagacatctacgtgtgcatgatctcctatgcacacaacgtggcggcccagggcaagtacatagctattgccagcactactgtggagaccacggaccctgaaaaggaggtggagccggctctggagctgttggagcccattgaccagaagtttgtggctatcagtgacttgtatgagcccattgatgatggttgtgagagccaggtgttctgttcctgctcctacgatgccaccacacactttgagacaacctgcaa

SEQ ID NO: 21523 - DNA, 441 bp, Homo sapiens
  misc_feature (1)...(441): n = a,t,c or g
ttgannatttgagaccttttgacatgattacgaatttaatacgactcactatagggaatttggccctcgaggccaagaattcggcacgagcagctgcccaggggacggcagctacagcagcctctgcgtcctggtccgccagcacctcccgcttctccgtggtgacttggcgccgcttcctcacatctgtgctccgtgccctcttccctgcctcttccctcgcccacctgcctgcccccatactcccccagcggagagcatgatccgtgcccttgcttctgactttcgcctctgggacaagtaagtcaatgtgggcagttcagtcgtctgggttttttccccttttctgttcatttcatctggctccccccaccacctccccaccccaccccccaccccctgcttcccctcactggccangtcgatcaagtggcttttcct

SEQ ID NO: 21524 - DNA, 786 bp, Homo sapiens
ggggactgacagtgggcaacactcacatcccactggctgctgttctgaaaccatctgattggctttctgaggtttggctgggtggggactgctcatttggccactctgcagattggacttgcccgcgttcctgaagcgctctcgagctgttctgtaaatacctggtgctaacatcccatgccgctccctcctcacgatgcacccaccgccctgagggcccgtcctaggaatggatgtggggatggtcgctttgtaatgtgctggttctctttttttttctttcccctctatggcccttaagactttcattttgttcagaaccatgctgggctagctaaagggtggggagagggaagatgggccccaccacgctctcaagagaacgcacctgcaataaaacagtcttgtcggccagctgcccaggggacggcagctacagcagcctctgcgtcctggtccgccagcacctcccgcttctccgtggtgacttggcgccgcttcctcacatctgtgctccgtgccctcttccctgcctcttccctcgcccacctgcctgcccccatactcccccagcggagagcatgatccgtgcccttgcttctgactttcgcctctgggacaagtaagtcaatgtgggcagttcagtcgtctgggttttttccccttttctgttcatttcatattgtccccccaccacctccccaccccaccccccaccccctgcttcccctactgcccaggtcgatcaagtggcttttcctgggacctgccactttgaaaatctct

SEQ ID NO: 21525 - DNA, 794 bp, Homo sapiens
  misc_feature (1)...(794): n = a,t,c or g
gtgcatcgcaccgtgctgtaaatgtggcagacgcagcctgcggccaggctttttatttaatgtaaatagtttttgtttccaatgaggcagtttctggtactcctatgcaatattactcagctttttttattgtaaaaagaaaaatcaactcactgttcagtgctgagaggggatgtaggcccatgggcacctggcctccaggagtcgctgtgttgggagagccggccacgcccttggctttagagctgtgttgaaatccattttggtggttggtttttaacccaaactcagtgcattttttaaaatagttaagaatccaagtcgagaacacttgaacacacagaagggagaccccgcctagcatagatttgcagttacggcctggatgccagtcgccagcccagctgttcccctcgggaacatgaggtggtggtggcgcagcagactgcgatcaattctgcatggtcacagtagagatccccgcaactcgcttgtccttgggtcaccctgcattccatagccatgtgcttgtccctgtgctcccacggttcccaggggccaggctgggagcccacagccaccccactatgccgcaggccgccctacccaccttcaggcagcctatgggacgcagggccccatctgtccctcggtcgccgtgtggccagagtgggtccgtcgtccccaacactcgtgctcgctcagacactttggcaggatgtctggggcctcaccagcaggagcgcgtgcaagccgggcaggcggtcacctanaccacaggcctttggagcacc

SEQ ID NO: 21526 - DNA, 484 bp, Homo sapiens
  misc_feature (1)...(484): n = a,t,c or g
gcgctacatgtgccttccagagggactactatgtgtccacagctgtttgcagaagcaccgtgaaggtatctgcccagcaggtgcagggcgtgcatgctcgctgcagctggtcctcctccacgtctgagtcttacagcagcgaagagatgatttttggggacatgttgggatctcataaatggagaaacaattatctatttggtctcatttcagacgagtccataagtgaacaattttatgatcggtcacttgggatcatgagaagggtattgcctcctggaaacagaaggtacccaaaccaccggcacagagcaagaataaatactgactttgagtaacggccttgaggtgtccctcgcccttttggtttgttcaaggagctgctgctttgcatagctgctctagtgtctggtatcatcggatctgggtttgaataattcccaagaatcctgggncctngccttcnaaactggaatgtgaaccc

SEQ ID NO: 21527 - DNA, 679 bp, Homo sapiens
  misc_feature (1)...(679): n = a,t,c or g
aaaaccgctatgacatgattacgaatttaatacgactcactatagggaatttggccctcgaggccaagaattcggcacgaggatggtttcttggagcttccacaaacttaaaaccatgaaacatctattattgctactattgtgtgtttttctagttaagtcccaaggtgtcaacgacaatgaggagggtttcttcagtgcccgtggtcatcgaccccttgacaagaagagagaagaggctcccagcctgaggcctgccccaccgcccatcagtggaggtggctatcgggctcgtccagccaaagcagctgccactcaaaagaaagtagaaagaaaagcccctgatgctggaggctgtcttcacgctgacccagacctgggggtgttgtgtcctacaggatgtcagttgcaagaggctttgctacaacaggaaaggccaatcagaaatagtgttgatgagttaaataacaatgtggaagctgtttcccagacctcctcttcttcctttcagtacatgtatttgctgaaagacctgtggcaaaagaagcagaagcnngtaaaagataatgaaaatgtntncatgactacncctcaganctggaaaanncccattatatacggatgncacgtgaanaaaanttccannaaaccttcggttcctngtnanaccnggnaaacc

SEQ ID NO: 21528 - DNA, 586 bp, Homo sapiens
ggaggctcggcgctcaggaagcatggcactctggcgggcataccatcggtccctggccgctcacccgtggaaagtacaggtcctgacagctgggtccctgatgggcctgggtgacattatctcacagcagctggtggagaggcggggtctgcaggaacaccagagaggccggactctgaccatggtgtccctgggctgtggctttgtgggccctgtggtaggaggctggtacaaggttttggatcggttcatccctggcaccaccaaagtggatgcactgaagaagatgttgttggatcaggggggctttgccccgtgttttctaggctgctttctcccactggtaggggcacttaatggactgtcagcccaggacaactgggccaaactacagcgggctgctgtgcagttagccaacttctacctggtcccccttcattacaggttggccgttgtccaatgtgttgctgttatctggaactcctacctgtcctggaaggcacatcggctctaagcctgcctcactccatcgtttccaccttgcagtgatgcagcttgaccctggaacggtcagacaacctcctca

SEQ ID NO: 21529 - DNA, 550 bp, Homo sapiens
ggagacacatatagatactgagacctgtgtgtacagtaggaccatgcactcacacccatctggagagggagcccccggtataccaagggagccagttgtgttcagacacacacatcacagcttgactcactaactgaggcctttccatagctccacagcttcccacctcctccccaccaaaccggggttctagagttaaggatgggggagggtattatactgcctcagtctgactcctcaacccagcagcaatttgaggggatgagggggaagaggagctgccttttggaggcccccttcacctgcagctatgatgcccttccccttctcccctgtcctcaccatatgccttatccccattctactcccctgctatgcaagtgcccctgtggcttgtccccaaccccctcagcaacaaagctcagctggggaacgagagtaatttgaagaatgcttgaagtcagcgtcttccattccagaaagacccccattcttcctttgggggtatgatgtggaagctggtttcagcccaggacccaccactgaagga

SEQ ID NO: 21530 - DNA, 426 bp, Homo sapiens
  misc_feature (1)...(426): n = a,t,c or g
gcaatctgtcgacgatgctgcgattgtgataaaaaacacaaaagagcctccattgtccctgaccatccacctgacatcccctgttgtcagagaagaaatggagaaagtattagctggagaaacgctatcagtcaacgaccccccggacgttctggacaggcagaaatgcctgaacgccttggcgtctcttcgacacgccaaatggtttcaggccagagccaacgggctgaagtcttgtgtcattgtgatccgggtcttgagggacctgtgcactcgcgtgcccacctggggtcccctccgaggctggcctctcgagctcctgtgtgagaaatccattggcacggncaacaagaccgatgggtgcttgccaaggccttgggatcagtgctggagtgcctggcgtcgggcatcgggatgccaaaggtt

SEQ ID NO: 21531 - DNA, 989 bp, Homo sapiens
  misc_feature (1)...(989): n = a,t,c or g
ggagaggaaagagaaaaggcaaagaagaaggaaaaagggcttgagtgttcagactggaagccagaagcaggcctttctccaccaaggaaaaaacgagaagaccccaaaaccaggagagactctgtggactccaagtcttctgcctcctcctctccaaaaagaccatcggtggaaagatcaaacagcagcaaatcaaaagcggagagccccaaaacacctagcagccccttgacccccacgtttgcctcttccatgtgtctcctggccccctgctatctcacaggggactctgtccgggacaagtgtgtggagatgctgtcagcagccctgaaggcggacgatgattacaaggactatggagtcaactgtgacaagatggcatcagaaatcgaagatcatatctaccaagagctcaagagcacggacatgaagtaccggaaccgcgtgcgcagccgcataagcaacctcaaggaccccaggaaccccggcctgcggcggaacgtgctcagtggggccatctccgcagggcttatagccaagatgacggcagaggaaatggccagtgatgaactgagggagttgaggaatgccatgacccaggaggccatccgtgagcaccagatggccaagactggcggcaccaccactgacctcttccagtgcagcaaatgcaagaagaagaactgcacctataaccaggtgcagacacgcagtgctgatgagcccatgactacctttgtcttatgcaatgaatgtggcaatcgctggaagttctgctgatggaacagccagccatgaacaaggtgaggganagaaagaggaagcgctgaattatctgaactggagaagcaataaaaattaaagtgaaggaaaatactgaactctgtctgagtgggatgtatganttananggaanattctcttgcaaattaataatcggtcattagaaacaattggntaatgggggganctaattggngaatgtgctg

SEQ ID NO: 21532 - DNA, 587 bp, Homo sapiens
  misc_feature (1)...(587): n = a,t,c or g
catgatcttcacagggaacccggtttctgaggttaagaacctggtatgaggtagttgcggtaccccctcatagtaatcattcctcttcctatcggtaatcttcggctacggcgacacccgggccccccggaataaccctccctcctatcgcggaacgggaagtcgttgttcccgcagtttgtggtctcgatcattgaagcactcgactcggcgcttgcgaggggatatgcacgattctagaaatatagtcggatatagagtccggcggaagaagctgttcccgactcctatcacacaccgggcgacgcctagcacggaaaactaagggaccaagatcgccaaactagttagagccggcgcctaagcccatagacacgagccacccaaagtaagcagaacaagggaaagtcgcctcgctaatcgcaaccgcctaaagacgcggcccctaccctactcactctaacctccacaactacggcacagaacgcaaacggccctcctctctcntcgtctccggcggaaaanttcgttccgaccaaaacatcangttncacgtacacaacaccccctcggaaaaaaaaaaaaaa

SEQ ID NO: 21533 - DNA, 493 bp, Homo sapiens
  misc_feature (1)...(493): n = a,t,c or g
atttgatncccattagctatgacatgattacgaatttaatacgactcactatagggaatttggccctcgaggccaagaattcggcacgaggactacatcaatcaaaaccttccttggggatacaaacacaccttgaaccagattgatgaagtaaaggtgtggcctcagcagccctccggagagctgtttgagattgaaatagacaccctggaaaccacctgccatgtgctggaccccacccctgtggcaagatgcagcgtgaggcagctgaaggagcatgctgtcgaagganactgtgatttccagctgttgaaactagatggcaagttttccgtggtatacgcaaaatgtgattccagtccagactcagccgaggacgtgcgcaaggtgtgccaagactgccccctgctggccccgctgaacgacaccagggtggtgcacgccgcgaaagctgcctggccggcttcacgctcaaacaacggttccaattttc

SEQ ID NO: 21534 - DNA, 422 bp, Homo sapiens
ggcaacgcggaggaaacgggagtgaacggagagcgtagtgaccatcatgagcctcctcaacaagcccaagagtgagatgaccccagaggagctgcagaagcgagaggaggaggaatttaacaccggtccactctctgtgctcacacagtcagtcaagaacaatacccaagtgctcatcaactgccgcaacaataagaaactcctgggccgcgtgaaggccttcgataggcactgcaacatggtgctggagaacgtgaaggagatgtggactgaggtacccaagagtggcaagggcaagaagaagtccaagccagtcaacaaagaccgctacatctccaagatgttcctgcgcggggactcagtcatcgtggtcctgcggaacccgctcatcgccggcaagtaggggcccgcctgtctgttga

SEQ ID NO: 21535 - DNA, 482 bp, Homo sapiens
  misc_feature (1)...(482): n = a,t,c or g
ggtnnntttgaatcgttgcatgattacgaatttaatacgactcactatagggaatttggccctcgaggccaagaattcggcacgagctataacaccacctacctgaatgtccagcgggaaaatgggaccatctccagatacgtgggaggccaagagcatttcgctcacttgctgatcctcagggacaccaagacctacatgcttgcttttgacgtgaacgatgagaagaactgggggctgtctgtctatgctgacaagccanagacgaccaaggagcaactgggagagttctacgaagctctcgactgcttgcgcattcccaagtcagatgtcgtgtacaccgattggaaaaaggataagtgtgagccactggagaagcagcacgagaaggagaggaaacaggaggagggggaatcctagcaggacacagccttggatcaggacagagacttgggggccatcctgcccttcaacccgacatg

SEQ ID NO: 21536 - DNA, 515 bp, Homo sapiens
  misc_feature (1)...(515): n = a,t,c or g
tcttnatccccttctttganccccttcagctatgacatgattacgaatttaatacgactcactatagggaatttggccctcgaggccaagaattcggcacgagacgatctttctcagacagtaccagacccgacaggaccagtgcatctataacaccacctacctgaatgtccagcgggaaaatgggaccatctccagatacgtgggaggccaagagcatttcgctcacttgctgatcctcagggacaccaagacctacatgcttgcttttgacgtgaacgatgagaagaactgggggctgtctgtctatgctgacaagccagagacgaccaaggagcaactgggagagttctacgaagctctcgactgcttgcgcattcccaagtcacatgtcgtgtacaccgattggaaaaaggataagtgtgagccactggacaancagcacgagaagganaggaaacaggaggagggggaatcctacangacacagccttggatcaggacagagacttggg

SEQ ID NO: 21537 - DNA, 560 bp, Homo sapiens
  misc_feature (1)...(560): n = a,t,c or g
cagctatgacatgattacgaatttaatacgactcactatagggaatttggccctcgaggccaagaattcggcacgagctgggttcttacagtcctgagcctcctacctctgctggaagcccagatcccattgtgtgccaacctagtaccggtgcccatcaccaacgccaccctggaccggatcactggcaagtggttttatatcgcatcggcctttcgaaacgaggagtacaataagtcggttcaggagatccaagcaaccttcttttactttacccccaacaagacagaggacacgatctttctcagagagtaccagacccgccagaaccagtgcttctataactccagttacctgatgtccagcgggagaatgggaccgtctccagatacgagggaggccgagaacatgttgctcacctgctgttccttagggacaccaagacccntngggttggttcctaccctggacgatgagaagaactggnggtgctttctatgctgacaagccnnagacgaccaaggagcaactgggagagtttacaaactntcnactgttgt

SEQ ID NO: 21538 - DNA, 496 bp, Homo sapiens
cgaatttaatacgactcactatagggaatttggccctcgaggccaagaattcggcacgaggcctcctggtctcagtatggcgctgtcctgggttcttacagtcctgagcctcctacctctgctggaagcccagatcccattgtgtgccaacctagtaccggtgcccatcaccaacgccaccctggaccagatcactggcaagtggttttatatcgcatcggcctttcgaaacgaggagtacaataagtcggttcaggagatccaagcaaccttcttttacttcacccccaacaagacagaggacacgatctttctcagagagtaccagacccgacaggaccagtgcatctataacaccacctacctgaatgtccagcgggaaaatgggaccatctccagatacgtgggaggccaagagcatttcgctcacttgctgatcctcagggacaccaagacctacatgcttgcttttgacgtgaacgatgagaagaactgg

SEQ ID NO: 21539 - DNA, 455 bp, Homo sapiens
  misc_feature (1)...(455): n = a,t,c or g
ttngataacagctatgacatgattacgaatttaatacgactcactatagggaatttggccctcgaggccaagaattcggcacgagcccaaatgatggtcctcctcctgacgttgtaaatcaggaccccaacaataacttacaggtatggagcctcccacgaagcccaggcgagcttgacgtgatatgccaggctctccaatcctcaacctttagattgccagcttgcggtttaccattttattgggctaaatatttcatgatttgttcacatttcttcttagagcagcagctatttttaaaacgtcgaatgtgccatcacattctatcacatatttttgacgtggcaatttgcattttggcttaagtaaataacatttttttaaacccactattttgagcgttcagtggnctgtaacagngngttatccatnngaactgggatgaagngngtacc

SEQ ID NO: 21540 - DNA, 555 bp, Homo sapiens
gacctgtggtctctgcacctgctccagcccctattcacaaccagtttccagctgaaaaccagcctgccaatcagaatgctgctcctcaagtggttgttaatcctggagccaatcaaaatttgcggatgaatgcacaaggtggccctattgtggaagaagatgatgaaataaatcgagattggttggattggacctattcagcagctacattttctgtttttctcagtatcctctacttctactcctccctgagcagattcctcatggtcatgggggccaccgttgttatgtacctgcatcacgttgggtggtttccatttagaccgaggccggttcagaacttcccaaatgatggtcctcctcctgacgttgtaaatcaggaccccaacaataacttacaggaaggcactgatcctgaaactgaagaccccaaccacctccctccagacagggatgtactagatggcgagcagaccagcccctcctttatgagcacagcatggcttgtcttcaagactttctttgcctctcttcttccagaaggccccccaccat

SEQ ID NO: 21541 - DNA, 529 bp, Homo sapiens
  misc_feature (1)...(529): n = a,t,c or g
gnaggtnnnattntnatttganaccttggaacacattacgaatttaatacgactcactatagggaatttggccctcgaggccaagaattcggcacgaggaagtccctcgtcctgctcctttgtcttgctcagctctggggctgccactcagccccacatggcccagggctgatttatagacaaccgaactgcgatgatccagaaactgaggaagcagctctggtggctatagactacatcaatcaaaaccttccttggggatacaaacacaccttgaaccagattgatgaagtaaaggtgtggcctcagcagccctccggagagctgtttgagattgaaatagacaccctgtaaaccacctgccatgtgctggaccccacccctgtggcaagatgcagcgtgaggcagctgacggagcatgctgtcgaaggagactgtgatttccagctgttgaaactagatggcaagttttccgtggtatacgcaaaatgtgattcagtccagactcnccgangacctgcgcaagggg

SEQ ID NO: 21542 - DNA, 480 bp, Homo sapiens
gcatgtgcttccacccctggtcggatgtaacgctgccactcatgtcggtccctgagatccgggctgttgttgatgcatgggcctcagtcacagaggagctgggtgcccagtacccttgggtgcagatctttgaaaacaaaggtgccatgatgggctgttctaacccccacccccactgccaggtatgggccagcagtttcctgccagatattgcccagcgtgaggagcgatctcagcaggcctataagagtcagcatggagagcccctgctaatggagtacagccgccaggagctactcaggaaggaacgtctggtcctaaccagtgagcactggttagtactggtccccttctgggcaacatggccctaccagacactgctgctgccccgtcggcatgtgcggcggctacctgagctgacccctgctgagcgtgatggtcagtctcccaagtaggatcctggggctaggcactggatgg

SEQ ID NO: 21543 - DNA, 467 bp, Homo sapiens
  misc_feature (1)...(467): n = a,t,c or g
naacagctttggacacgattacgaatttaatacgactcactatagggaatttggccctcgaggccaagaattcggcacgagaatatgatgacatcaagaaggtggtgaagcaggcgtcggagggccccctcaagggcatcctgggctacactgagcaccaggtggtctcctctgacttcaacagcgacacccactcctccacctttgacgctggggctggcattgccctcaacgaccactttgtcaagctcatttcctggtatgacaacgaatttggctacagcaacagggtggtggacctcatggcccacatggcctccaaggagtaagacccctggaccaccagccccagcaagagcacaagaggaagagagagaccctcactgctggggagtccctgccacactcagtcccccaccacactgaatctcccctcctcacagttgccatgtagaccccttgaagag

SEQ ID NO: 21544 - DNA, 887 bp, Homo sapiens
gaaggactcatgaccacagtccatgccatcactgccacccagaagactgtggatggcccctccgggaaactgtggcgtgatggccgcggggctctccagaacatcatccctgcctctactggcgctgccaaggctgtgggcaaggtcatccctgagctgaacgggaagctcactggcatggccttccgtgtccccactgccaacgtgtcagtggtggacctgacctgccgtctagaaaaacctgccaaatatgatgacatcaagaaggtggtgaagcaggcgtcggagggccccctcaagggcatcctgggctacactgagcaccaggtggtctcctctgacttcaacagcgacacccactcctccacctttgacgctggggctggcattgccctcaacgaccactttgtcaagctcatttcctggtatgacaacgaatttggctacagcaacagggtggtggacctcatggcccacatggcctccaaggagtaagacccctggaccaccagccccagcaagagcacaagaggaagagagagaccctcactgctggggagtccctgccacactcagtcccccaccacactgaatctcccctcctcacagttgccatgtagaccccttgaagaggggaggggcctagggagccgcaccttgtcatgtaccaccagcctcagcctcccaaagtgctcatattacaggcgtgagccgtcacacccggccagaaaacttcttttaacatcttatgtaatcatcaaaaaagaaggcaccaaaacctagaccatattgatgaaagattttgtgtgtgtgtaggaaaatgtaaaaatagggttaaaattgtatgtatacctacagttcttcacagagatgtccccagtttaata

SEQ ID NO: 21545 - DNA, 505 bp, Homo sapiens
  misc_feature (1)...(505): n = a,t,c or g
actgctatgacatgattacgaatttaataccgactcactatagggaatttggccctcgaggccaagaattcggcacgaggcccacatttatgccacccgcctcatccaaatgagacccttcctggagaaccgggcccagcagcactggggcagtggagtgggagtgaagaagctgtgtgaactgcagcctgaggagaagtgctgtgtggtgggcactctgttcaaggccatgccgctgcagccctccatcctgcgggaggtcagcgaggagcacaacctgctcccccagcctcctcggagtaaatacatacacccagatgacgagctggtcttggaagatgaactgcagcgtatcaaactaaaaggcaccattgacgtgtcaaagctggttacggggactgtcctggctgtgtttggctccgtgagaaacgacgggaaagtttctggngggaggactattgntttgntgacccttgntccccaaaagccngnacccccanttgac

SEQ ID NO: 21546 - DNA, 521 bp, Homo sapiens
  misc_feature (1)...(521): n = a,t,c or g
gggangatgaactgcagcgtatnaaactaaaaggcaccattgacgtgtnaaagctggttacggggactgtcntggctgtgtttggctccgtgagagacgacgggaagtttntggtggaggactattgctttgctgaccttgctccccanaancccgcacccccacttgacacagataggtttgtgctactggngtccggcctgggcctgggtggcggtggaggcgagagcctgctgggcacccatntgctggtggatgtggtgacggtgcagcnaggggacnannggtagcantgcaatagnctcccacgtttcccgggttntcttngntggcaacntcntttnccacagcacccacannatnggattttatcaataaggccnantacctcaccnntaaancccagntngacaatgcggaggctgtntatatgctgannnanaatccnttctgnannttnaacgcnttagtnccnttgnantgattccangncgannttncttccacnaattcncncttcg

SEQ ID NO: 21547 - DNA, 492 bp, Homo sapiens
aatacgactcactatagggaatttggccctcgaggccaagaattcggcacgagggtgcagtgagacaccaggagagctgctgctttgggggatggacaggggcagcaggaatgcctttgtgttttcgcagtgaacctccttggcctgggcgaagctgtgtggaccaagcaagtcaggagtgtggccatgttttctgagcaggctgcccagagggcccacactctactgtccccaccatcagccaacaatgccacctttgcccgggtgccagtggcaacctacaccaactcctcacaacccttccggctaggagagcgcagctttagccggcagtatgcccacatttatgccacccgcctcatccaaatgagacccttcctggagaaccgggcccagcagcactggggcagtggagtgggagtgaagaagctgtgtgaactgcagcctgaggagaagtgctgtgtggtgggcactctgttcaaggccatgccg

SEQ ID NO: 21548 - DNA, 730 bp, Homo sapiens
tgacatgattacgaatttaatacgactcactatagggaatttggccctcgaggccaagaattcggcacgagcagcagagcacctgggttggtcccgaagcctccaaccacctgcacgcctgccagggcctctctggggcagccatgaagtccctcgtcctgctcctttgtcttgctcagctctggggctgccactcagccccacatggcccagggctgatttatagacaaccgaactgcgatgatccagaaactgaggaagcagctctggtggctatagactacatcaatcaaaaccttccttggggatacaaacacaccttgaaccagattgatgaagtaaaggtgtggcctcagcagccctccggagagctgtttgagattgaaatagacaccctggaaaccacctgccatgtgctggaccccacccctgtggcaagatgcagcgtggttgaaactagatggcaagttttccgtggtatacgcaaaatgtgattccagtccagactcagccgaggacgtgcgcaaggtgtgccaagactgccccctgctggccccgctgaacgacaccagggtggtgcacgccgcgaaagctgccctggccgccttcaacgctcaagaacaacggctccaattttcagctggaggaaatttcccgggctcagcttgtgcccctcccaccttctacctatgtggagtttacagtgtctggcactgactgtgttgctaaa

SEQ ID NO: 21549 - DNA, 515 bp, Homo sapiens
gggtggcagcgtcttactcagaaactgtgacctgtgaggatgcccaaaagacctgccctgcagtgattgcctgtagctctccaggcatcaacggcttcccaggcaaagatgggcgtgatggcaccaagggagaaaagggggaaccaggccaagggctcagaggcttacagggcccccctggaaagttggggcctccaggaaatccagggccttctgggtcaccaggaccaaagggccaaaaaggagaccctggaaaaagtccggatggtgatagtagcctggctgcctcagaaagaaaagctctgcaaacagaaatggcacgtatcaaaaagtggctgaccttctctctgggcaaacaagttgggaacaagttcttcctgaccaatggtgaaataatgacctttgaaaaagtgaaggccttgtgtgtcaagttccaggcctctgtggccacccccaggaatgctgcagagaatggagccattcagaatctcatcaaggaggaagccttcctgggc

SEQ ID NO: 21550 - DNA, 508 bp, Homo sapiens
  misc_feature (1)...(508): n = a,t,c or g
aacngnttgacatgattacgaatttaatacgactcactatagggaatttggccctcgaggccaagaattcggcacgagggaagaacatgaaagggtgactcataattcccagcagcagtgccagttcatgtgctgggattctgaccacaagtctaacaatcaggtcagggagtcagatttctgttggatttagaaaagcatctatgtgtttatgaaagaaacccactggatttttaatagttctgcagctcttggaggctctacatctaccctttctccccagccaagagcatggctatgggagaaggaaggcaggcagcaggcaggtaagtgtgacttcctcacttcccctaccttctcatcttaaagccatagagtggttgctgggtaacccactcctacatatattggttcataaagcctagtgagccactgaaattcttactgatctgtaaaatttcaaacacactagtaacacagacagccatggtgtagatgacttgagccc

SEQ ID NO: 21551 - DNA, 657 bp, Homo sapiens
  misc_feature (1)...(657): n = a,t,c or g
aaccgttatgacatgattacgaatttaatacgactcactatagggaatttggccctcgaggccaagaattcggcacgaggccttgtctggtatccttatgcagaatgaactgaaataatcatcaatctgaaaagctactcttaaacagagacttgcttcaacaccaggaagaacatgaaagggtgactcataattcccagcagcagtgccagttcatgtgctgggattctgaccacaagtctaacaatcaggtcagggagtcagatttctgttggatttagaaaagcatctatgtgtttatgaaagaaacccactggatttttaatagttctgcagctcttggaggctctacatctaccctttctccccagccaagagcatggctatgggagaaggaaggcaggcagcaggcaggtaagtgtgacttcctcacttcccctaccttctcatcttaaagccatagagtggttgctgggtaacccactcctacatatattggttcanaaagcctagtgagccactgaaattcttactgatctgtaaatttcaaacacactgtancacagacagccatggtgtaatgacttgngcacacatagtatatttctgctccaatgggctgttgaanataacaatggatgggaaaattggngtgaa

SEQ ID NO: 21552 - DNA, 499 bp, Homo sapiens
  misc_feature (1)...(499): n = a,t,c or g
tnnnnctntgaanncaacngctatgacatgattacgaatttaatacgactcactatagggaatttggccctcgaggccaagaattcggcacgagacggctgagtgcaagccccaagtgactcgcggggatgtgttcactatgccggaggatgagtacacggtctatgacgatggcgaggagaaaaacaatgccactgtccatgaacaggtggggggcccctccctgacctctgacctccaggcccagtccaaagggaatcctgagcagacacctgttctgaaacctgaggaagaggcccctgcgcctgaggtgggcgcctctaagcctgaggggatagactcaaggcctgagacccttcatccagggagacctcagcccccagcagaggaggagctgtgcagtgggaagcccttcgacgccttcaccgacctcaagaacggttccctctttgccttccgagggcagtactgctatgaactggacgaaaaggcagtgagg

SEQ ID NO: 21553 - DNA, 413 bp, Homo sapiens
aacagctatgacatgattacgaatttaatacgactcactatagggaatttggccctcgaggccaagaattcggcacgagcgcactcttcaggaaccaccagtcttcttaccaaacacgacttaatgctctccgagaggtacaacccgtagaacttcctaactgtaatttagttaaaggaatcgaaactggctctgaagacttggagatactgcctaatggactggctttcattagctctggattaaagtatcctggaataaagagcttcaaccccaacagtcctggaaaaatacttctgatggacctgaatgaagaagatccaacagtgttggaattggggatcactggaagtaaatttgatgtatcttcatttaaccctcatgggattagcacattcacagatgaagataat

SEQ ID NO: 21554 - DNA, 906 bp, Homo sapiens
gtagtgctatataaagtgtggtcagaggcccctatagaatgtattgtttgaaagcgtaccgatatatttgtgcttttatttctggtaagtcattttaaccgaatgttcattcatatacctttataaaaagtacctgtatcaaaggaactttaacacctagcaatcagtattattggaccaaatttggtgtttgttttcaccttgacgctcttcttttcattatttctactgctacaagaatgctgtaaagtgtcttctaaaatgatgtagcctgacaagacatttttttcagtgtataaaactaggtagtattgtgcactgatttgaccattgtgaaatcctttctcagtgtaactgcatttctaataaaaatttattgagtgaaacaatctttgtacaatgactagtcatgcatcatcagtaattttacaagttcttgtagtaggtagggggtactactagggatatctgtggcatgattatgcattccgtagtattatttaattaatttggggttcattttgcttccttttctttatgcttagattatcttactggttcaacatttttctgatatatgcagtattacagatattcagcaaaagtattaatgggcttctttaaattctatattatagtatttcagttccgtgtcttaacagtttgtgataatttctaaaactgtcttttcaacttatgtaatgatgttgacacttttggcttttatttctggtattagagtttgtattttcacagagtgctttgtagcaggcattacaattaatctgttttgtacataaatgtgccaacagcttgatggtggcgtttttgaaatgtagaacagagtgcttgcaaaatgtaataaatacacttgtgtactttgtgtacttataaaaaaaaaaaaaa

SEQ ID NO: 21555 - DNA, 555 bp, Homo sapiens
gcaacaaggaccagatcgccaaggatgtgaagcagttctatgaccaggccctacagcaggccgtggtggatgatgacgccaacaacgccaaggctgtggtgaagaccttccacgagacgcttgactgctgtggctccagcacactgactgctttgaccacctcagtgctcaagaacaatttgtgtccctcgggcagcaacatcatcagcaacctcttcaaggaggactgccaccagaagatcgatgacctcttctctgggaagctgtacctcatcggcattgctgccatcgtggtcgccgtgatcatgatcttcgagatgatcctgagcatggtgctgtgctgtggcatccggaacagctccgtgtactgaggccccgcagctctggccacagggacctctgcagtgccccctaagtgacccggacacttccgagggggccatcaccgcctgtgtatataacgtttccggtattactctgctacacgtagcctttttacttttggggttttgtttttgttctgaactttcctgttaccttttcagggctgacgtc

SEQ ID NO: 21556 - DNA, 435 bp, Homo sapiens
tgatccactgaccaaatccttaaccctagcgatggcttgggagatggggggttggatagcatcctctttcttggcccttccttatcctaggaaaagagggttcctctccttgtgtgtgtctcttccccccacccctaattcttctgctctgtttgggaagacgtggaggaaaaggtgacttctgcccccaccgctcttacccccactgtagtggcctttggagatgcccccacctcccccccaccaactctcgcgtgttggagagaaggggccctcccagcacaaagttgcattcctcccccctaatttattctaatttattaactttgacccaccctttctgagcctgcagccttcccgtgtggcctgagggctgtcgagtgagctgccccagcccctcccagcccttgcccagcctgggggagtggggaaggg

SEQ ID NO: 21557 - DNA, 840 bp, Homo sapiens
gcctcaagctcgaatgtgacaagttggccagtgagaagtcagagatgcagcgtcactatgtgatgtactacgagatgtcctacggcttgaacatcgagatgcacaaacaggctgagatcgtcaaaaggctgaacgggatttgtgcccaggtcctgccctacctctcccaagagcaccagcagcaggtcttgggagccattgagagggccaagcaggtcaccgctcccgagctgaactctatcatccgacagcagctccaagcccaccagctgtcccagctgcaggccctggccctgcccttgaccccactacccgtggggctgcagccgccttcgctgccggcggtcagcgcaggcaccggcctcctctcgctgtccgcgctgggttcccaggcccacctctccaaggaagacaagaacgggcacgatggtgacacccaccaggaggatgatggcgagaagtcggattagcagggggccgggacggggaggttgggaggggggacagaggggagacagaggcacggagagaaaggaatgtttagcacaagacacagcggagctcgggattggctaaactcccatagtatttatggtggccgccggcgggggccccagcccagcttgcaggccacctctagctttcttcctaccccattcccggcttccctcctcctcccctgcagcctggttaggtggatacctgccctgacatgtgaggcaagctaaggcctggagggtcagatgggagaccaggtcccaagggagcaagacctcgcgaagcgcagcagccccggcccttcccccgttttgaacatgtgtaaccgacagtctgcctggg

SEQ ID NO: 21558 - DNA, 431 bp, Homo sapiens
atacgactcactatagggaatttggccctcgaggccaagaattcggcacgaggggctcggcgtggtctccttgcatcttcagggccagcaatggcccgttgagtctttctcactttgcatttttctgaaactgacccttctgtctccctctttcacatttaaaggacccttgtgaatacatcagacccacaggaagatccaggataatctccttaatctcaaaaccagctgagagaaaccttaagcccatctccaaccttaattcccactagccacacaacctaacatgtttacaggttccaagtggaagtcgacatcttgggtgggagtgcatttttctacctaccactgttacttcacacctgttttgagcacccacttctagtatgaggttttgtaagagattttgaggataaactttctgatgtggc

SEQ ID NO: 21559 - DNA, 490 bp, Homo sapiens
aacagctatgacatgattacgaatttaatacgactcactatagggaatttggccctcgaggccaagaattcggcacgagcgagatgtctggggcatcgagggccccatcgatgccgccttcacccgcatcaactgtcaggggaagacctacctcttcaagggtagtcagtactggcgctttgaggatggtgtcctggaccctgattacccccgaaatatctctgacggcttcgatggcatcccggacaacgtggatgcagccttggccctccctgcccatagctacagtggccgggagcgggtctacttcttcaaggggaaacagtactgggagtaccagttccagcaccagcccagtcaggaggagtgtgaaggcagctccctgtcggctgtgtttgaacactttgcatgatgcagcgggacagctgggaggacatcttcgagcttctcttctggggcagaacctctgctggtaccagacagcccagtt

SEQ ID NO: 21560 - DNA, 670 bp, Homo sapiens
  misc_feature (1)...(670): n = a,t,c or g
atcgtttccatgattacgaatttaatacgactcactatagggaatttggccctcgaggccaagaattcggcacgagaaaaaaatacagaagcaggaaaaccaattataagttcaagtgagggatgatggttgcttgaaccaaagggttgcatgtagtaagaaattgtgatttaagatatattttaaagttataagtagcaggatattctgatggagtttgactttggttttgggcccagggagtttcagatgcctttgagaaatgaatgaagtagagagaaaataaaagaaaaaccagccaggcacagtggctcacgcctgtaatcccagcgctttgggaggctaaggcaggcagatcacttgagaccagcttgggcaacatggcaaagccccatctctacaaaaaaacacaagaattagctgggcattgtggcgcacacctgtattcccatctactcaggaagctgagatggaagaattaattgagcccacgagttcaaggctgcagtgagtcgtgattgtgccactgcactccagccggggtgacagaagagaccttgtctcgaaaaggaatctgaaaacaatggaaccatgccttcataattctagaaagttattttcaactgataaatctatatcncccaataatcanggtgaaggtaaatatact

SEQ ID NO: 21561 - DNA, 838 bp, Homo sapiens
ctacaggcttggattcttcaaacgctccctcccatatggcaccgccatggaaaaagctcagctcaagcctccagccacctctgatgcctgagtcctcccaatttcagactcccattcctgaagaaccagtccccccaccctcattctactgaaaaggaggggtctgggtacttcttgaaggtgctgacggccagggagaagctcctctccccagcccagagacatacttgaagggccagagccaggggggtgaggagctggggatccctcccccccatgcactgtgaaggacccttgtttacacataccctcttcatggatgggggaactcagatccagggacagaggccccagcctccctgaagcctttgcattttggagagtttcctgaaacaacttggaaagataactaggaaatccattcacaggtctttgggccagacatgccacaaggacttcctgtccagctccaacctgcaaagatctgtcctcagccttgccagagatccaaaagaagcccccagctaagaacctggaacttggggagttaagacctggcagctctggacagatgccacacaaggatagatgctggcccagggcccagagcccagctccaaggggaatcagaactcaaatggggccagatccagcctggggtctggagttgatctggaacccagactcagacattggcacctaatccaggcagatccaggactatatttgggcctgctccagacctgatcctggaggcccagttcaccctgatttaggagaagccaggaatttcccaggaccctgaaggggccatgatggcaacagatctggaacctca

SEQ ID NO: 21562 - DNA, 546 bp, Homo sapiens
ggacaacttggggtatagaacaggctatgcttacaggcatcctctcattcgagagaagcctaggcacaagagtgatgtggaaatcccagcaactgtgactgctttttcctttgaagacgatacagtgccactctctcctctcaaatacatggcacagaggcaacagcgtgaaaaaacaagatggctgaactcaccaaatacttacatgaaagtgaatgtgcctgaggagtctcggaacggagaaaccagtccccgaaccaaaatcacgtggatgaaagcagaagactcatctaaagttagtggtggaacacctatcaaaattgaagatccaaatcagtttgttcctttaaacacaaacccgaatgaggtactagaaaagagaaataagattcgggaacaaaatcgatatgacttgaaaacagcaggaccacaatctcagttgcttgctggaattgttgtggataagccaccttctactatgcaatttgaagatgatgatcatggcccaccagctcctcctaacccatttagtcatctcacagaagg

SEQ ID NO: 21563 - DNA, 343 bp, Homo sapiens
cttgatagctctgaattatacacttacatgtggctaaaatgataaacattatgttatatgtattttaccacaataaaaaaaatgtggaagaaaaagtgggggcaatactacacatagttaaaaagaaaaaagaaatgaaaaaatccaaaagtgccagcagctgccatttgagaaaagaaatctttgggtgggctcttctttcttttaactacttttctctattttccaagttttctttcagttactctttggacagaaaaaaatacatttaatgttttgaacacttttttggttttgataggtacatggttcaccagtccacattttccctttatagacagaa

SEQ ID NO: 21564 - DNA, 528 bp, Homo sapiens
gcaaaggcagttttatatgaaagattagaagcctggaataatcaggctttttaaatgatgtaattcccactgtaatagcatagggattttggaagcagctgctggtggcttgggacatcagtggggccaagggttctctgtccctggttcaactgtgatttggctttcccgtgtctttcctggtgatgccttgtttggggttctgtgggtttgggtgggaagagggccatctgcctgaatgtaacctgctagctctccgaaggccctgcgggcctggcttgtgtgagcgtgtggacagtggtggccgcgctgtgcctgctcgtgttgcctacatgtccctggctgttgaggcgctgcttcagcctgcacccctcccttgtctcatagatgctccttttgaccttttcaaataaatatggatggcgagctcctaggcctctggcttcctggtagagggcggcatgccgaagggtctgctgggtgtggattggatgctggggtgtgggggttggaagctgtctgtggccc

SEQ ID NO: 21565 - DNA, 474 bp, Homo sapiens
  misc_feature (1)...(474): n = a,t,c or g
aancctattgaatccanagcttgactgattacgaatttaatacgactcactatagggaatttggccctcgaggccaagaattcggcacgaggacacctgttctgaaacctgaggaagaggcccctgcgcctgaggtgggcgcctctaagcctgaggggatagactcaaggcctgagacccttcatccagggagacctcagcccccagcagaggaggagctgtgcagtgggaagcccttcgacgccttcaccgacctcaagaacggttccctctttgccttccgagggcagtactgctatgaactggacgaaaaggcagtgaggcctgggtaccccaagctcatccgagatgtctggggcatcgagggccccatcgatgccgcttacccgcatcaactgtcaggggaagacctacctcttcaagggtagtcagtactggcgctttgaagatggtgtcctggaccctgattaccct

SEQ ID NO: 21566 - DNA, 497 bp, Homo sapiens
tacgaatttaatacgactcactatagggaatttggccctcgaggccaagaattcggcacgaggcagcgccaagcggagcctgcggggagagctgaagcagcgtctgcgggcgatgagtgccgaggagcggctacgccagtcccgcgtactgagccagaaggtgattgcccacagtgagtatcaaaagtccaaaagaatttccatctttctgagcatgcaagatgaaattgagacagaagagatcatcaaggacattttccaacgaggcaaaatctgcttcatccctcggtaccggttccagagcaatcacatggatatggtgagaatagaatcaccagaggaaatttctttacttcccaaaacatcctggaatatccctcagcctggtgagggtgatgttcgggaggaggccttgtccacagggggacttgatctcatcttcatgccaggccttgggtttgacaaacatggcaaccgactggggaggggcaagggct

SEQ ID NO: 21567 - DNA, 490 bp, Homo sapiens
  misc_feature (1)...(490): n = a,t,c or g
aaacncttatgacatgattacgaatttaatacgactcactatagggaatttggccctcgaggccaagaattcggcacgagcgctttgaggatggtgtcctggaccctgattacccccgaaatatctgtgacggcttcgatggcatcccggacaacgtggatgcagccttggccctccctgcccatagctacagtggccgggagcgggtctacttcttcaaggggaaacagtactgggagtaccagtttcagcaccatcccagtcaggaggagtgtgaaggcagctccctgtcggctgtgtttgaacactttgccatgatgcagcgggacagctgggaggacatcttcgagcttctcttctggggcagaacctctgctggtaccagacagccccagttcattagccgggactggcacgntgtgccanggcangtgnacncagccatggntggccgcatntacatcttaagcatggcaccccncccctactt

SEQ ID NO: 21568 - DNA, 496 bp, Homo sapiens
cccacgcgtccggtggaattctgggtgttaggcccgccattcgcttgactcacgccttcgccgtagcatctttcgcagcggaccgaagagaagaaaagtaggccagagccgaactctcttcctgccaagatgtctattggtgtgccgattaaagtactgcatgaggccgagggccacattgtgacatgtgagacgaacaccggtgaggtatatcgggggaagctcattgaagcagaggacaacatgaactgccagatgtccaacatcacagtcacatacagagatggccgagtggcacagctggagcaggtatacatccgtggcagcaaaatccgctttctgattttgcctgacatgctgaagaacgcacccatgttaaagagcatgaaaaataaaaaccaaggctcaggggctggcccgaggaaaagctgccattctcaaggcccaagtggccgcaagaggaagaggacgtggaatgggacgtggaaacatcttt

SEQ ID NO: 21569 - DNA, 823 bp, Homo sapiens
aacttaactccttgtgcatggcctggcttgtggatcatgtatatgccatccgcgaggcagccaccagcaacctgaagaagctagtggaaaagtttgggaaggagtgggcccatgccacaatcatccccaaggtcttggccatgtccggagaccccaactacctgcaccgcatgactacgctcttctgcatcaatgtgctgtctgaggtctgtgggcaggacatcaccaccaagcacatgctacccacggttctgcgcatggctggggacccggttgccaatgtccgcttcaatgtggccaagtctctgcagaagatagggcccatcctggacaacagcaccttgcagagtgaagtcaagcccatcctagagaagctgacccaggaccaggatgtggacgtcaaatactttgcccaggaggctctgactgttctgtctctcgcctgatgctggaagaggagcaaacactggcctctggtgtccaccctccaacccccacaagtccctctttggggagacactggggggcctttggctgtcactccctgtgcatggtctgaccccaggccccttcccccagcacggttcctcctctccccagcctggggaagatgtctcactgtccacctcccaacgggctaggggagcacggggttggacaggacagtgaccttgggaggaaggggctactccgcccacgtcagggagagatgtgagcatcccgggtcactggatcctgctgctgtaatgggaacccctcccccatttacttctccacctcccgtcctccccatcattggtttttttttgtgtgtcaactgtgc

SEQ ID NO: 21570 - DNA, 379 bp, Homo sapiens
ggtctttatttgtaattggttaaagaattagaacaatgcgagaagcttgtctggagatgccctttttaaaatcgtttctggccgggcgcagtggctcacgcctgtaatccaacaatttttgggaggctgaggcgggtggattacttgaggttaggagttcgagactagcctgcccaacgtggcgaaaccctgtctctactaaaaatacaaaattagccgggcgtggtggcgtgcgcctgtgatcacagctacttaggaggctgaggcaggagaattacttgaacctgggaggcggaattgcgccacgacactccagtctaggcaacagaatgagactcttgtctcaaaaataagtaaatacgtaggtccataaaagcaa

SEQ ID NO: 21571 - DNA, 471 bp, Homo sapiens
ctgaggcgagtgaagtggactctgagggctaccgctaccgccactgctgcggcaggggccgtggagggcagagggccgcggaggccgcagttgcaaacatggctcagagcagagacggcggaaacccgttcgccgagcccagcgagcttgacaacccctttcaggacccagctgtgatccagcaccgacccagccggcagtatgccacgcttgacgtctacaacccttttgagacccgggagccaccaccagcctatgagcctccagcccctgccccattgcctccaccctcagctccctccttgcagccctcgagaaagctcagccccacagaacctaagaactatggctcatacagcactcaggcctcagctgcagcagccacagctgagctgctgaagaaacaggaggagctcaaccggaaggcagaggagttggaccgaagggagcgagagctgcagcatgctgcct

SEQ ID NO: 21572 - DNA, 693 bp, Homo sapiens
  misc_feature (1)...(693): n = a,t,c or g
gaacagttctgccactgggtctttgtttggatttagttttaatgcacctttgaaaagtaacaatagtgaaactagttcagtagcccagagtggatctgaaagcaaagtggaacctaaaaaatgtgaactgtcaaagaactctgatatcgaacagtcttcagatagcaaagtcaaaaatctctctgcttcctttccaacggaagaatcttcaatcaactacacatttaaaacaccagaaaagggtaggtactttgttgttaaagttaagcacaatttttctttcttttaatgtttancttgatgcanactctttgngggatactaatgttgggatataaatgatgctttgtgaacacccccaaaatatttgagcaattttttttctcccttaataagttcacggtgaggtttcaaagagcaagagaacttagtttaagacatttcagtaactggaagatacttttatcatgctagggcagagcaaaagaactcggtacggtatacggactcatgcttgaatcatgcacattaacgtgagtctttttttaaagtgttcattttcatttgttcagtttcttttgtcactcagaaaacatgatattgaggctgggcacggtggctcactcctagaatgccagcactttgggaggttgaggtgggcagatcacttgagctcaagagttcgagaccagc

SEQ ID NO: 21573 - DNA, 726 bp, Homo sapiens
gcaacaatcacattaattctggagtaaggttaatatataaaatgtatatgcttgaaatacataaattttcatttaaactgattttaaatggttttggtttctgattgactttgtaatgataatgtcttctatttaaaattcaacatggggatatatgatgtaaatggtaatgtccatttgaatattttcatataagtatatattattctatgtgtgttttttagaggtaccaatcttgggaaaaagaagcaacacatttgtcatataccaggatgtggtaaagtctatgggaagacctcacatctgagagctcatctgcgttggcattctggagaacgcccttttgtttgtaactggatgtactgtggtaaaagatttactcgaagtgatgaattacagaggcacagaagaacacatacaggtgagaagaaatttgtttgtccagaatgttcaaaacgctttatgagaagtgaccaccttgccaaacatattaaaacacaccagaataaaaaaggtattcactctagcagtacagtgctggcatctgtggaagctgcgcgagatgatactttgattactgcaggaggaacaacgcttatccttgcaaatattcaacaaggttctgtttcagggataggaactgttaatacttccgccaccagcaatcaagatatccttaccaacactgaaatacctttacagcttgtcacagtttctggaaatgag

SEQ ID NO: 21574 - DNA, 431 bp, Homo sapiens
  misc_feature (1)...(431): n = a,t,c or g
ttggacactttgacatgattacgaatttaatacgactcactatagggaatttggccctcgaggccaagaattcggcacgagctggccctgctggcatgggttgctctggctgaccaagagtcatgcaagggccgctgcactgagggcttcaacgtggacaagaagtgccagtgtgacgagctctgctcttactaccagagctgctgcacagactatacggctgagtgcaagccccaagtgactcgcggggatgtgttcactatgccggaggatgagtacacggtctatgacgatggcgaggagaaaaacaatgccactgtccatgaacaggtggggggcccctccctgacctctgacctccaggcccagtccnnnnnnaatcctgagcagacacctgttctgaaacctgaggaagaggcccctgcgcctga

SEQ ID NO: 21575 - DNA, 544 bp, Homo sapiens
  misc_feature (1)...(544): n = a,t,c or g
gaacagtgattgctgaccactcgctgagcgccagccacatggagaccaccatgaaacttctgaagaccagggtgcagtcccgcctggccctccacaaacagtttgcatccctagaacatggcattgtgccagttaccagtgattgccagtacctcttccctgccaaggttgtctctcgcctggtgaaatgggtgacaattgcccatgaggattacatggagctgcacttcaccaaagacattgtggatgcgggactggctggggacaccaatctctactacatggcgctcatcgaaaggggcacagccaaactgcaggccgctgtggtgttgaaccctggctactcctccatcccacctgttttccagctctgtttgaactggaaaggggagaaaaccaacagcaacgatgacaacattcgggccatggagggcgaagtcaatgtgtgctacaagggagctgtgtggccttggccaccancagctgttgaccaaccactgcancggntgggngnctgnnngatgntacctganacnnnagccat

SEQ ID NO: 21576 - DNA, 917 bp, Homo sapiens
  misc_feature (1)...(917): n = a,t,c or g
tttggaaacccctatgacatgattacgaatttaatacgactcactatagggaatttggccctcgaggccaagaattcggcacgaggagaagaaggcagcaggggccacttcaagcttccctgcttcctaagcttaggttgtcagaagcctttttagagatacatttttagaaaaagaaaaatagtgtggtaacagtttactacttgcttcttttttttttgtttgtttaaagaattttatagtaatattactatagctttatgtctagcttaccaaataaggggtgaagtgtgccccaaaaaacgctgttactgtaaaaacgtgtctaacccccaatttccactcattggatncaangagtgatcaagcactcgaggctctgtcggcttcactgggcacccggcaagcagaacctgagctcgacctccgctcaattaaggaagtcgatgaggcaaaagctaaagaagaaaaactagagaagtgtggtgaggatgatgaaacaatcccatctgagtacagattaaaaccagccacggataaagatggaaaaccactattgccagagcctgaagaaaaacccaagcctcggagtgaatcagaactcattgatgaactttcagaagattttgaccggtctgaatgtaaagagaaaccatctaagccaactgaaaagacagaagaatctaaggccgctgctccagctcctgtgtcggaggctgtgtgtcggacctccatgtgtagtatacagtcagcaccccctgagccggctaccttgaagggcacagtgccagatgatgctgtagaagccttggctgatagcctggggaaaaaggaagcagatccagaagatggaaaacctgtgatggataaagtcaaggagaaggccaaagaagaagaccgtgaaaagcttggtgaaa

SEQ ID NO: 21577 - DNA, 635 bp, Homo sapiens
gcaaatatggacaacagtagtagactggatacaccccgaccttaaacgtatagtaattgaatacgtggatagaattattttccatgaaaactacaatgcaggcacttaccaaaatgacatcgctttgattgaaatgaaaaaagacggaaacaaaaaagattgtgagctgcctcgttccatccctgcctgtgtcccctggtctccttacctattccaacctaatgatacatgcatcgtttctggctggggacgagaaaaagataacgaaagagtcttttcacttcagtggggtgaagttaaactaataagcaactgctctaagttttacggaaatcgtttctatgaaaaagaaatggaatgtgcaggtacatatgatggttccatcgatgcctgtaaaggggactctggaggccccttagtctgtatggatgccaacaatgtgacttatgtctggggtgttgtgagttggggggaaaactgtggaaaaccagagttcccaggtgtttacaccaaagtggccaattattttgactggattagctaccatgtaggaaggccttttatttctcagtacaatgtataaaattgtgatctctctcttcattctattctttttctctcaagagttccattta

SEQ ID NO: 21578 - DNA, 654 bp, Homo sapiens
gatcaaattgctacatagtccaaacaaaaaagaaggctttttcaaaaaacattaaattcacatgcagtctcagagactatttagacaaagttcaagttaggagcttttaggatgtgggagtaaaactttaatgggaggggagggctggctgctggaagaaggaagaagccagactggttagacagtactcttaactcctagcccagcctagcgtgccctgcccctctggccactgctgcagacacctgccttaacacacacacctctaggactccacagttttgccttaaaggaccttcccaagtctccctttccctgtctggcttctcccttaagaagagagagatacttgtagaattgggtggggggaatgagcatgaactgtccttccatttgggatatgttacattagagtgagagagagaataaggagcctttcttatggaagaaatgggagaagagagacagggttcttttcagcagagtctagtagtttctctgtaaggcaaaataatctaaaaagactaacctgcccacccactccttatattgctgtgagattgcccctatcttgtgctcttctgtctgcagtgtgcacggccttgttctaacccggaataaaggtgattgattgtattgcaaaaaaaaaaaaaa

SEQ ID NO: 21579 - DNA, 258 bp, Homo sapiens
gctcttgactcttagaagtgcccgagatggggctaacctttattaaacagatcgcatattatgatcttgctgcagccacagtgcagctccacattaactctacagaccaaaccatttgtatctggcatcacttactaacacacgacatgcggcttttctgcatcaactgctatgacagttaagaatgtcagtatacaagaaggaatagaaaactgatactgttttaaataatctgtaatttcaatttttttttttttt

SEQ ID NO: 21580 - DNA, 380 bp, Homo sapiens
ctccagaaaggctgcaggctctcacccagggacacctatagtgacaggagtggaagcatgctcccctgactctgaaatcacccgaactgaagtttccatcaataaatcatgactgatcttgtagcggatgattcttcaagagacccttcaaacttgggtagagtttacagctctgactttacactcggctttggagactttctttaaattatgtttttattaagattattttattatgcggaaaggtatttgggaaacttgtcacttgcatgtcccatcacgtgtactggctcctctgtggtgtctgcctgttgcgtgacactctccttgcagttcttgagttgcggcagaacatcgcgatgggaaccgatggtgggtgg

SEQ ID NO: 21581 - DNA, 677 bp, Homo sapiens
ggcaaatcaaaaccacaatgagataccatctcataccagttagaatagcgatcattaaaaagtcaggaaacaacagatactggagaggatgtggagaaataggaacacttacactgttggtgggagtgtaaattagttcaaccattgtggaagacagtgtggcaattcctcaaggatctagaactagaactagaacccagtgatcccattactgggtatatacccaaaggattataaatcattctactataaagacagatgcacatgtatgtttattgcggcactattcacaatagcaaagacttggaaccaacccagatgtccatcaatgatagactggattaagaaaatgtggcacatatacaccatggaatactatgcagccataaaaaaggatgagttcatgtcctttgtagggacatggatgaagctggaaaccatcattctcagcaaactatcacaaggacaaaaaaccaaacactgcatgttctcactcataggtgggaattgaacaatgagaacacatggagacaggaaggggaacatcacacaccacggcctgttgtggagtgcggaagccagaagagagtggggcccaatattcaacattcttaaagaaaagaattttcaacccagaatttcatatccagccaaactaagcttcataagtgaaggag

SEQ ID NO: 21582 - DNA, 1128 bp, Homo sapiens
  misc_feature (1)...(1128): n = a,t,c or g
ttttttttttttttgacattcagccaatctgcctattctttgtaagggcaagagatacatattcccaagctcaacacataattacgctcaagctcaacacataatctcactcaagacaacttctttttgaaaatgaagtaaaagacagtgggctcacctatggagccctacacactagttaggagcaagggtttgatggtcacttggcaagttggatatctttaaaagacactgcgaagtggaaaaatggggacgagctctgctcttactaccagagctgctgcacagactatacggctgagtgcaagccccaagtgactcgcggggatgtgttcactatgccggaggatgagtacacggtctatgacgatggcgaggagaaaaacaatgccactgtccatgaacaggtggggggcccctccctgacctctgacctccaggcccagtccaaagggaatcctgagcagacacctgttctgaaacctgaggaagaggcccctgcgcctgaggtgggcgcctctaagcctgaggggatagactcaaggcctgagacccttcatccagggagacctcagcccccagcagaggaggagctgtgcagtgggaagcccttcgacgccttcaccgacctcaagaacggttccctctttgccttccgagggcagtactgctatgaactggacgaaaaggcagtgaggcctgggtaccccaagctcatccgagatgtctggggcatcgagggccccatcgatgccgccttcacccgcatcaactgtcaggggaagacctacctcttcaagggtagtcagtactggcgctttgaggatggtgtcctggaccctgattacccccgaaatatctctgacggcttcgatggcatcccggacaacgtggatgcagccttggccctccctgcccatagctacagtggccgggagcgggtctacttcttcaaggggaaacagtactgggagtaccagttccagcaccagcccagtcaggaggagtgtgaaggcagctccctgtcggctgtgtttgaacactttgccatgatgcagcgggacagctgggaggacatcttcgagcttctcttctggggcaaaacctntgntggtaccaaacagcccc

SEQ ID NO: 21583 - DNA, 885 bp, Homo sapiens
ggccaaggacattctggaccagaaaattaatgaagtttcttcttctgatgataaggatgccttctatgtggcagacctgggagacattctaaagaaacatctgaggtggttaaaagctctccctcgtgtcacccccttttatgcagtcaaatgtaatgatagcaaagccatcgtgaagacccttgctgctaccgggacaggatttgactgtgctagcaagactgaaatacagttggtgcagagtctgggggtgcctccagagaggattatctatgcaaatccttgtaaacaagtatctcaaattaagtatgctgctaataatggagtccagatgatgacttttgatagtgaagttgagttgatgaaagttgccagagcacatcccaaagcaaagttggttttgcggattgccactgatgattccaaagcagtctgtcgtctcagtgtgaaattcggtgccacgctcagaaccagcaggctccttttggaacgggcgaaagagctaaatatcgatgttgttggtgtcagcttccatgtaggaagcggctgtaccgatcctgagaccttcgtgcaggcaatctctgatgcccgctgtgtttttgacatgggggctgaggttggtttcagcatgtatctgcttgatattggcggtggctttcctggatctgaggatgtgaaacttaaatttgaagagatcaccgcgtaatcaacccagcgttggacaaatactttccgtcagactctggagtgagaatcatagctgagcccggcagatactatgttgcatcagctttcacgcttgcagttaatatcattgccaagaaaattgtattaaaggaacagacgggctctgatggtatgtataaaggacgaatcacttcatgt

SEQ ID NO: 21584 - DNA, 730 bp, Homo sapiens
gcaccatcaacatcgccctgaaccgagtcggggtggattacgagggcgggggctgtcggttcctgcgctacaactgttccatccgagccccaaggaagggctggaccctcatgcaccctggacgactcacgcattaccatgaggggctccccaccaccaggggcacccgctacatcgcagtctccttcgtcgatccctaattggccaggcctgaccctcttggacctttcttctttgccgacaaccactgcccagcagcctctgggacctcggggtcccagggaacccagtccagcctcctggctgttgacttcccattgctcttggagccaccaatcaaagagattcaaagagattcctgcaggccagaggcggaacacacctttatggctggggctctccgtggtgttctggacccagcccctggagacaccattcacttttactgctttgtagtgactcgtgctctccaacctgtcttcctgaaaaaccaaggcccccttcccccacctcttccatggggtgagacttgagcagaacaggggcttccccaagttgcccagaaagactgtctgggtgagaagccatggccagagcttctcccaggcacaggtgttgcaccagggacttctgcttcaagttttggggtaaagacacctggatcagactccaagggctgccctgagtctgggacttctgcctccatggctgggcatgagagcaaaccgta

SEQ ID NO: 21585 - DNA, 395 bp, Homo sapiens
cttccacatcgtgggctacttctccaaggagaaagaatcaacggaagactacaatgtggcctgcatcctaaccctgcctccctaccagcgccggggctacggcaagctgctgatcgagttcagctatgaactctccaaagtggaagggaaaacagggacccctgagaagcccctctcagaccttggcctcctatcctatcgaagctactggtcccagaccatcctggagatcctgatggggctgaagtcggagagcggggagaggccacagatcaccatcaatgagattagtgaaatcaccagcatcaagaaggaggatgtcatctccactctgcagtacctcaatctcatcaactactacaagggccagtacatcctcacactgtcagaggaca

SEQ ID NO: 21586 - DNA, 640 bp, Homo sapiens
ggatgggttcagcaggtggtcagcccacagaggactgcactctgcatcccacacacctgtctcccctgcctgcctccctaccttgtagtagttgatgagattgaggtactgcagagtggagatgacatcctccttcttgatgctggtgatttcactaatctcactgtgggagagcacaggtcaggttccctgaggacctttatctgtccccaggagccctgagagagaaagcccaggaacagacaagccatgccatgtacccccaggtagacagcgccaggctcacttgatggtgatctgtggcctctccccgctctccgacttcagccccatcaggatctccaggatggtctgggaccagtagcttcgataggataggaggccaaggtctgagaggggcttctcaggggtccctgttttcccttccactttggagagttcatagctcactgaactcgatcagcagcttgccgtagccccggcgctggtagggaggcagggttaggatgcaggccacattgtagtcttccgttgattctttctccttggagaagtagcccacgatgtggaagcccttacagtcatactctgtcatgacgtagaagaggaaagggtctgtgtcatagtacagtgtcttatc

SEQ ID NO: 21587 - DNA, 1127 bp, Homo sapiens
gcagctatgacatgattacgaatttaatacgactcactatagggaatttggccctcgaggccaagaattcggcacgagcggcttgcaagcaggacctgctggcctacctgcaacgcatcgccctctactgccaccagctgaacatctgcagcaaggtcaaggccgaggtgcagaatctcggcggggagcttgttgtctctggggtggacagcgccatgtccctgatccaggcagccaagaacttgatgaatgctgtggtgcagacagtgaaggcatcctacgtcgcctctaccaaataccaaaagtcacagggtatggcttccctcaaccttcctgctgtgtcatggaagatgaaggcaccagagaaaaagccattggtgaagagagagaaacaggatgagacacagaccaagattaaacgggcatctcagaagaagcacgtgaacccggtgcaggccctcagcgagttcaaagctatggacagcatctaagtctgcccaggccggccgcccccacccctcggggctcctgaatatcagtcactgttcgtcactcaaatgaatttgctaaatacaacactgatactagattccacagggaaatgggcagactgaaccagtccaggtggtgaattttccaagaacatagtttaagttgattaaaaatgcttttagaatgcaggagcctacttctagctgtattttttgtatgcttaaataaaaataaaaattcataaccaaagagaatcccacattagcttgttagtaatgctctgaccaagccgagatgcccattctcttagtgatggcggcgttagggtttgagagaagggaatttggctcaacttcagttgagagggtgcagtccagacagcttgactgcttttaaatgaccaaagatgacctgtggtaagcaacctgggcatcttaggaagcagtccctggagaaggcatgttcccagaaaggtctctggagggacaaactcactcagtaaaacataatgtatcatgaagaaaactgattctctatgacatgaaatgaaaattttaatgcattgttataattactaatgtacgctgctgcaggacattaataaagttgcttttttaggctaaaaaaaaaaaaaa

SEQ ID NO: 21588 - DNA, 454 bp, Homo sapiens
  misc_feature (1)...(454): n = a,t,c or g
ggaaacttcccgtcccatatcctgcctcagcccgccaaggtagccatcccatgaacacactgtgtcctggtgctctctgccactggaagggcagagtagccagggtgtggccctgccatcttcccagcagggccactcccggcactccatgcttagtcactgcctgcagaggtctgtgctgaggccttatcattcattcttagctcttaattgttcattttgagctgaaatgctgcattttaattttaaccaaaacatgtctcctatcctggtttttgtagccttcctccacatcctttctaaacaagattttaaagacatgtaggtgtttgttcatctgtaactctaaaagatcctttttaaattcagtcctaanaaagaggagtgcttgcccctaagagtgtttaatggcaaggcagccctgntgaaggacacttctgctaaggganaatgg

SEQ ID NO: 21589 - DNA, 442 bp, Homo sapiens
  misc_feature (1)...(442): n = a,t,c or g
tgntttgataccgttatgacatgattacgaatttaatacgactcactatagggaatttggccctcgaggccaagaattcggcacgaggaagatgtccttgatgtgcagctggcattccttcgacttctctccagccgagcttcccagaacatcacatatcactgcaaaaatagcattgcatacatggatcaggccagtggaaatgtaaagaaggccctgaagctgatggggtcaaatgaaggtgaattcaaggctgaaggaaatagcaaattcacctacacagttctggaggatggttgcacgaaacacactggggaatggagcaaaacagtctttgaatatcgaacacgcaaggctgtgagactacctattgtagatattgcaccctatgacattggtggtcctgatcaagaatttggtgtggacgttggccctgtttgct

SEQ ID NO: 21590 - DNA, 694 bp, Homo sapiens
  misc_feature (1)...(694): n = a,t,c or g
gccctctaccatctgtaaacaactgggtgccttccccgaccacaccccaatgccttcccagcttggaagccaaggcagctgatgaagggagctcaggagagccgtcttcagctgggctggggttggggctgctgtgaggaaaacctgccattgtggccctggagagtcaccagcagctcttgggaaggacttgctgggaggctgagagaggctttgggcacagcctgctgtcttttccatttcctaaagtttacttcattgtcttgaggcttccaggttttgtttttgtttttgccaaagtagaaaaggcaggtggtgggcggctggcagggagtgcgggtccccgcccctcttcagtcctgccctcccctcctcagtcctgcccaccccgtgcagcccatgctgaggctgctgtggtgtcgtgggtgttacgtgcaggaacgtggagaccctgacgtggcttactgngttgggtttcttttcaaaacttggaanccccanggagggctangttggnagggcctaacggggtcctcagcctcccaaaataacctgggttanagacgncttntgtcatcggggtaacancttgggangggnaaactntgaaancatggccaggtgggctgctaatctgtcccttgcactaggaaagggccatcacctntctaaatntgtgnaataacaaaggtcc

SEQ ID NO: 21591 - DNA, 825 bp, Homo sapiens
gtcagcacagcgtttcaaaaagtgaagccactttataaatatttggagattttgcaggaaaatctggatccccaggtaaggatagcagatggttttcagttatctccagtccacgttcacaaaatgtgaaggtgtggagacacttacaaagctgcctcacttctcactgtaaacattagctctttccactgcctacctggaccccagtctaggaattaaatctgcacctaaccaaggtcccttgtaagaaatgtccattcaagcagtcattctctgggtatataatatgattttgactaccttatctggtgttaagatttgaagttggccttttattggactaaagggaaaactcctttaagggtctcagttagcccaagtttcttttgcttatatgttaatagttttaccctctgcattggagagaggagtgctttactccaagaagctttcctcatggttaccgttctctccatcatgccagccttctcaacctttgcagaaattactagagaggatttgaatgtgggacacaaaggtcccatttgcagttagaaaatttgtgtccacaaggacaagaacaaagtatgagctttaaaactccataggaaacttgttaatcaacaaagaagtgttaatgctgcaagtaatctcttttttaaaactttttgaagctacttattttcagccaaataggaatattagagagggactggtagtgagaatatcagctctgtttggatggtggaaggtctcattttattgagatttttaagatacatgcaaaggtttggaaatagaacctctaggcaccctcctcagtgg

SEQ ID NO: 21592 - DNA, 391 bp, Homo sapiens
  misc_feature (1)...(391): n = a,t,c or g
gcagacaaattgttgaagaggatagaagtcttaggatttggaacagtcaactgtggagagtgtggactgagcttcagcaagatgacaaacctgctcagtcaccagcggatacactcaggggagaagccctacgtgtgtggggtatgtgagaagggcttcagcctaaanaagagcctcgccagacaccagaaggcacactcgggggagaagccaattgtgtgcagggagtgtggacgaggctttaaccggaagtcaacgctaatcatacacgaacggacacacacaggagagaagccttatgtatgcacagaatgtgggccgtcactttactggaaatcaaacctcaaaacacaccagaggacacactcaggggaaaagccttacgtgtgcc

SEQ ID NO: 21593 - DNA, 1429 bp, Homo sapiens
ctcactatagggaatttggccctcgaggccaagaattcggcacgagccgagatggatctcctggtggcaagggtgatcgtggtgaaaatggctctcctggtgcccctggcgctcctggtcatccaggcccacctggtcctgtcggtccagctggaaagagtggtgacagaggagaaagtggccctgctggccctgctggtgctcccggtcctgctggttcccgaggtgctcctggtcctcaaggcccacgtggtgacaaaggtgaaacaggtgaacgtggagctgctggcatcaaaggacatcgaggattccctggtaatccaggtgccccaggttctccaggccctgctggtcagcagggtgcaatcggcagtccaggacctgcaggccccagaggacctgttggacccagtggacctcctggcaaagatggaaccagtggacatccaggtcccattggaccaccagggcctcgaggtaacagaggtgaaagaggatctgagggctccccaggccacccagggcaaccaggccctcctggacctcctggtgcccctggtccttgctgtggtggtgttggagccgctgccattgctgggattggaggtgaaaaagctggcggttttgccccgtattatggagatgaaccaatggatttcaaaatcaacaccgatgagattatgacttcactcaagtctgttaatggacaaatagaaagcctcattagtcctgatggttctcgtaaaaaccccgctagaaactgcagagacctgaaattctgccatcctgaactcaagagtggagaatactgggttgaccctaaccaaggatgcaaattggatgctatcaaggtattctgtaatatggaaactggggaaacatgcataagtgccaatcctttgaatgttccacggaaacactggtggacagattctagtgctgagaagaaacacgtttggtttggagagtccatggatggtggttttcagtttagctacggcaatcctgaacttcctgaagatgtccttgatgtgcagctggcattccttcgacttctctccagccgagcttcccagaacatcacatatcactgcaaaaatagcattgcatacatggatcaggccagtggaaatgtaaagaaggccctgaagctgatggggtcaaatgaaggtgaattcaaggctgaaggaaatagcaaattcacctacacagttctggaggatggttgcacgaaacacactggggaatggagcaaaacagtctttgaatatcgaacacgcaaggctgtgagactacctattgtagatattgcaccctatgacattggtggtcctgatcaagaatttggtgtggacgttggccctgtttgctttttataaaccaaactctatctgaaatcccaacaaaaaaaatttaactccatatgtgt

SEQ ID NO: 21594 - DNA, 753 bp, Homo sapiens
gatttcgtgtctcggcgatgtttcctagagtctcgacgttcctacctcttcgccccctttcccgccaccctttgtcctctggaagcccggagacatcagcggctgcgattatgctactcactgttcggcacggaacagtcaggtaccgcagttcagcgctgttggcccggacaaaaaataacatccaaagatattttggcactaacagtgtgatctgtagcaagaaagataagcagtctgttcgaactgaggagacttccaaggagacttcagagagccaagacagtgaaaaggaaaatacgaaaaaagacttgttaggcattattaagggcatgaaagttgaattaagcacagtaaatgtacgaacaacaaagccacccaacagaagtccacttaaaagctacaactggcccgcctcaaagagctacagagcatgctccaaagaagagaaatgagcccgtgagtcctgagttggtggcagctgcatctgctgctctgttttgacaagcaaacaagccagaactgctcaggcagctccgtagcatgaggaagagtcaggggcacagagagatggagagagacctagttagagagcgaaccatgtgctggatttagccagtcctgcatttttctatacttcaaatcaaaacgggccatgcttcacatctacccatgatgaataggggtactttgattaagaataaatagagctgactgaattctgaacaagaaaaacatattcaaggggaagag

SEQ ID NO: 21595 - DNA, 401 bp, Homo sapiens
caaggccatgtacttcacccaggcactccaggccgggaccgtgtgggtaaacacctacaacatcgtcacctgccacacgccatttggagggtttaaggaatctggaaacgggagggagctgggtgaggatgggcttaaggcctacacagaggtaaagacggtcaccatcaaggttcctcagaagaactcgtaagagcagctgtcagggaggcccagtcacagtccagcaattccacaaccaccttgacgaatgcttgccaagctgttttaaagccaagaacaccctttctttgttccaaattaactcttagaagaaaccccacaaataaagcaattcaatcaaggctgttctatttaaatcagagatggggaccaggctcagagttctacctatctaaccc

SEQ ID NO: 21596 - DNA, 407 bp, Homo sapiens
ggcagatcctgaagttcaagaccatagaggaggttgttgggagagccaacaattccacgtacgggctggccgcagctgtcttcacaaaggatttggacaaggccaattacctgtcccaggccctccaggcgggcactgtgtgggtcaactgctatgatgtgtttggagcccagtcaccctttggtggctacaagatgtcggggagtggccgggagttgggcgagtacgggctgcaggcatacactgaagtgaaaactgtcacagtcaaagtgcctcagaagaactcataagaatcatgcaagcttcctccctcagccattgatggaaagttcagcaagatcagcaacaaaaccaagaaaaatgatccttgcgtgctgaatatctgaaaagagaaatttttcctacaa

SEQ ID NO: 21597 - DNA, 887 bp, Homo sapiens
agtttaactacaggtaaccttcaaagggaccattgtacattatgaacaatagatagagatgacatcttgatgactcttgaaatatggaaattttgtctgaagatcagtggccatattactgtaggccctggttcatgttttcatcaatctaaggtgcaatttctaaatttgtaagagtaggtttaaaaaaaaaagtgcttcttatctttgttaacattgtacttttccttgatgttcttaaaaggtatttccctcagattactcatgtttatgttgtgagcatgtagaaacagtaatgctaatgcatggctagttgcctttttaagattgtgacaccaggcttaccttttaaagtttagtatacagagacaattttaatggaaataactactgtagactattgaagaatgatctctttgtgatttaagaagtggctggattggaacttttaatatgctaatgtggaaaattaattacctttatgaaggtggtttattacaaataagcacactaacccctcggaagttgttttacctactttaaaagttttaatggattgcacctctgtaaactattcctaaaatgtgtatgatatatttgaaaaggcttccattaatataatagctttgcttgcagccttccaatctatgttggtttacctgtagtgttttataaagtgtggtcagaggcccctatagaatgtattgtttgaaagtgtagtgatatatttgtgtttttatttcaagtaagtcattttaaccgaatgttcattcatattcatttataaaaagtacctgtatcaaaggaattttaacaaagagcaatcagtattattggaccaaatttggtgtttgttttcaccttgacgctcttcttttcattatttc

SEQ ID NO: 21598 - DNA, 466 bp, Homo sapiens
  misc_feature (1)...(466): n = a,t,c or g
gnnnttnnnancnnttgactgattacgaatttaatacgactcctatagggaatttggccctcgaggccaagaattcggcacgaggggaagtggtcactgaatctgaagggaaaaaggagatgaatgtctttgatggagtcatggtttgcactggccatcacaccaatgctcatctacctctggaaagcttccctggaattgagaagttcaaagggcagtacttccacagtcgagactataagaacccagagggattcactggaaagagagtcattataattggcattgggaattctggaggggatctggctgtagagattagccaaacagccaagcaggttcatcaggcatgaaaacctttggttcctncgcggcttctgagcggcacgtgaacggcttcctgcagctgccatggcgcttcaagttcccaaggctccggcttcgcccagatgctcaaggagggagc

SEQ ID NO: 21599 - DNA, 467 bp, Homo sapiens
  misc_feature (1)...(467): n = a,t,c or g
gnggnnttnnnttnnnnntttgaaantccgtatgacntgattacgaatttaatacgactcactatagggaatttggccctcgaggccaagaattcggcacgagtcaggatgtatgccaaagaatttgaccttctaaagtatattcgatttaagaccactgtgtgcagtgtgaagaagcagcctgattttgccacttcaggccaatgggaagtggtcactgaatctgaagggaaaaaggagatgaatgtctttgatggagtcatggtttgcactggccatcacaccaatgctcatctacctctggaaagcttccctggaattgagaagttcaaagggcagtacttccacagtcgagactataagaacccagagggattcactggaaagagagtcattataattggcattgggaattctggaggggatctggctgtagagattaccaaacagccaagcagggttttctc

SEQ ID NO: 21600 - DNA, 614 bp, Homo sapiens
  misc_feature (1)...(614): n = a,t,c or g
gnnnnnnnntttgannncctttnnttggnaanagctatgacatgattacgaaatttaatacgactcactatagggaatttggccctcgaggccaagaattcggcacgaggggggagattgtcaccaccatcccaaccataggcttcaatgtagaaacagtggaatataagaacatctgtttcacagtctgggacgtgggaggccaggacaagattcggcctctgtggcggcactacttccagaacactcagggcctcatctttgtggtggacagtaatgaccgggagcgggtccaagaatctgctgatgaactccagaagatgctgcaggaggacgagctgcgggatgcagtgctgctggtatttgccaacaagcaggacatgcccaacgccatgcccgtgagcgagctgactgacaagctggggctacagcacttacgcagcccgacgtggtatgtccaggccacctgtgccacccaaggcacaangctgtacgatggtctggacctgctgtcccacgagctgtcaaagcgctaaccagccaggggcaggcccctgatgccccgaagcttctgcgtgcatccccggatgaccagactnccggactccttaagc

SEQ ID NO: 21601 - DNA, 453 bp, Homo sapiens
tatgactgattacgaatttaatacgactcactatagggaatttggccctcgaggccaagaattcggcacgaggggccagtatttacaaatcagtgatcatcaatacttctaaagagatgatgtgcttcagtgactatccaatcccagatcattatcccaacttcatgcataatgcccaggtcctggagtatttcaggatgtatgccaaagaatttgaccttctaaagtatattcgatttaagaccactgtgtgcagtgtgaagaagcagcctgattttgccacttcaggccaatgggaagtggtcactgaatctgaagggaaaaaggagatgaatgtctttgatggagtcatggtttgcactggccatcacaccaatgctcatctacctctggaaagcttccctggaattgagaagttcaaagggcagtacttccacagtcgagactataaga

SEQ ID NO: 21602 - DNA, 976 bp, Homo sapiens
  misc_feature (1)...(976): n = a,t,c or g
gcacaataatccctttgatcacgttaatctaaatctagatgtctttgtctaattttttttgaatagcagttataaatgtaaaggactcaaagtttaagtaaaaagtgatactccaccttgtgtttcaaagaatttagttccacctcttcataccagtttaacacttaatatatttcattggattttagacagggcaaaaggaagaacaggggcctctggaggcccttggttatttaaatcttggattatttgtgatagtaatcacaaatttttggctaatttttaacctgaggttttgttttttttttaaaggaaatgcagcctagtcttgagaacataattttatataatcaattactaaatgttaaactattaccacacagcccataaaacagcatttgcgtttattgagagagaggatgtgccatcatgattaatgaaaactatcttttgagtttgaaaagaaattaatttgcagtgtttggattgtatatatggggctaaaaataaattaatttactttataaaccttatctgtncattatacgatgngatgaaatttgctttttatccaaatattttgaatcttgtaaatatggctaattataggaatgcctataatacatcttagattccttatatctaataagagttcaaagagttatgagttgaagtcttgaatgcaggaaactatctgatagtgttctaaaatttggttacttgggtttggatacccttagtgggatgatgtaaatagaggctagctacctaggcttgtctatagcaaccataatgttgatgtaagtaatgcggttactgaatcataagaaaatgccatctctttttagttgaaggaaaactctggaagtaggtgccattggtcattctgcagtgcactgcaaccattgtttcccctagtgccctcttttccctagggcattgctctcctattccacgccttaacacagctttatac

SEQ ID NO: 21603 - DNA, 521 bp, Homo sapiens
  misc_feature (1)...(521): n = a,t,c or g
gcaggcagcagttcagaactttaagcaggatcttcagaaagctttcagtctccaaagtaggaacagctcagcagtaagtgtcttgtatacaggccagtggcagcagttcattgtcatggcccctttctgatttgtcttccttgggatcactttctagcatccgcacttccactaatagccaagtagacaagctgaccctgtcagggagtgacagcgtcatccttggtgatacaactaccagtggtgccagtgatgaagaagatggacagcctcggcgggctgtggacaacgagaaagagggagtgcagtatagctactccttattccacctcatgctctgcttggcttccttgtacatcatgatgaccctgaccagctggtacagccctgatgcaaagtttcagagcatgaccagcaagtggccagctgtgtgggtcaagatcagctccagctgggtctgcctcctgctttacgtctggacccttgtggctccacttgtctcacagtcnggactcaactga

SEQ ID NO: 21604 - DNA, 648 bp, Homo sapiens
  misc_feature (1)...(648): n = a,t,c or g
gtgataaaggacccaatgcaggtaatcctgtttttggactcacgtaatgtagaatgcaaagtttagtgattatttaatctgggcctaagctagtgagagtatggaacaatggcccataaggactcctaagcgccgaagccaaggagcctcctcccttcctggttcaccccgcccaagggacctgcccccattcctgtggccctggggcccagcttccaatagtgtcagaagcaacttgtggctttgccttggttgtgagatgggtacattccaaaggagcagcctgggggagggggcaggctcagccagcccttggaggctcagagcagctggcccaggctccagctcgcctccagtggaagcccgagcgccctcagaaacgaccctggccaatgtcaacgcagagccgaggcggtgttgtcacggctaatgtgaaatctcttcccgtggcgcccatcctctgactctgcagtgccagcttggacagattgaggtctctgtggctttggtgaccctgcttaaacattccaccgtgtcccagctctgctctaagatgctccaattgggccctcacctgactncagggtatgggnaggaaggagcatnctcaagggcaagggggttttccataaaaagttagggtcctgg

SEQ ID NO: 21605 - DNA, 441 bp, Homo sapiens
cccagggactgtcggaggtgtggactctgcctgcctacctggtctgggaagatgttctaccatatctccctagagcacgaaatcctgctgcacccgcgctacttcggccccaacttgctcaacacggtgaagcagaagctcttcaccgaggtggaggggacctgcacagggaagtatggctttgtaattgctgtcaccaccattgacaatattggtgctggtgtgatccagccaggccgaggctttgtcctttatccagttaagtacaaggccattgttttccggccatttaaaggggaggtcgtggatgctgttgtcactcaggtcaacaaggttggactcttcacagaaattgggcccatgtcttgcttcatctctcgacattccatcccttcagagatggagtttgatcctaactccaacccaccatgttacaagaca

SEQ ID NO: 21606 - DNA, 668 bp, Homo sapiens
gcgctggagtcccatgcagggtatgtcccagtgtcacatccacctggcttttcctttccttgcctgccttagttctggagtgtttgaaatcgccgaagcttcgggagttagaaccgggacaaaaatcatcatccacctgaaatccgactgcaaggagttttccagcgaggcccgggtgcgagatgtggtaacgaagtacagcaacttcgtcagcttccccttgtacttgaatggaaggcggatgaacaccttgcaggccatctggatgatggaccccaaggatgtccgtgagtggcaacatgaggagttctaccgctacgtcgcgcaggctcacgacaagccccgctacaccctgcactataagacggacgcaccgctcaacatccgcagcatcttctacgtgcccgacatgaaaccgtccatgtttgatgtgagccgggagctgggctccagcgttgcactgtacagccgcaaagtcctcatccagaccaaggccacggacatcctgcccaagtggctgcgcttcatccgaggtgtggtggacagtgaggacattcccctgaacctcagccgggagctgctgcaggagagcgcactcatcaggaaactccgggacgttttacagcagaggctgatcaaattcttcattgaccagagtaaaaaagatg

SEQ ID NO: 21607 - DNA, 598 bp, Homo sapiens
  misc_feature (1)...(598): n = a,t,c or g
gagnnnntttggacancttgttggataccannttaatacgactactatagggaatttggccctcgaggccaagaattcggcacgagagaacactcagggcctcatctttgtggtggacagtaatgaccgggagcgggtccaagaatctgctgatgaactccagaagatgctgcaggaggacgagctgcgggatgcagtgctgctggtatttgccaacaagcaggacatgcccaacgccatgcccgtgagcgagctgactgacaagctggggctacagcacttacgcagccgcacgtggtatgtccaggccacctgtgccacccaaggcacaggtctgtacgatggtctggactggctgtcccacgagctgtcaaagcgctaaccagccaggggcaggcccctgatgcccggaagctcctgcgtgcatccccgggatgaccagactcccggactcctcagcagtgcctttcctccacttttctccccatagccacaggcctctggtctgctctgctgcatgntctctctgtgttggacctggaccttgtttntgggcacaaaagggtccactntctgctgctggacctatggaagggct

SEQ ID NO: 21608 - DNA, 784 bp, Homo sapiens
acttcctcgcctgcctggccagcttctgtgtggaaaccaacaatggcgcaggctttgggctttctatcctctgggtcctccttttcactccctgctcctttgtctgctggtaccgccccatgtataaggctttccggagtgacagttcattcaatttcttcgttttcttcttcattttcttcgtccagaatgtgctctttgtcctccaggccattggtatcccaggttggggattcagtggctggatctctgctctggtggtgccgaagggcaacacagcagtatccgtgctcatgctgctggtcgccctgctcttcactggcattgctgtgctaggaattgtcatgctgaaacggatccactccttataccgccgcacaggtgccagctttcagaaggcccagcaagaatttgctgctggtgtcttctccaaccctgcggtgcgaaccgcagctgccaatgcagccgctggggctgctgaaaatgccttccgggccccgtgacccctgactgggatgccctggccctgctacttgagggagctgacttagctcccgtccctaaggtctctgggacttggagagacatcactaactgatggctcctccgtagtgctcccaatcctatggccatgactgctgaacctgacaggcgtgtggggagttcactgtgacctagtccccccatcaggccacactgctgccacctctcacacgccccaacccagcttccctctgctgtgccacggctgttgcttcggttatttaaataaaaagaaagtgga

SEQ ID NO: 21609 - DNA, 402 bp, Homo sapiens
cgccagttggccgggcacggggctgctgtaaggccgaggttgcggcggaagcggagaccatgttccgagcggcggctccggggcagctccggcgggcggtggcacaagatctctgtaaagtagcaggcatagcaaaagttctggtggctcagcatgatgtgtacaaaggcctacttccagaggaactgacaccattgattttggcaactcagaagcagttcaattacacacacatctgtgctggagcatctgccttcggaaagaaccttttgcccagagtagcagccaaacttgaggttgccccgatttctgacatcattgcaatcaagtcacctgacacatttgtgagaactatttatgcaggaaatgctctatgtacagtgaagtgtgatgagaaagtga

SEQ ID NO: 21610 - DNA, 286 bp, Homo sapiens
  misc_feature (1)...(286): n = a,t,c or g
gcggagaccatgttccgagcggcggctccggggcagctccggcgggcggcctcattgctacgatttcagagtaccctggtaatagctgagcatgcaaatgattccctagcacccattactttaaataccattactgcagccacacgccttggaggtgaagtgtcctgcttagtagctggaaccaaatgtgacaaggtggcacaagatctctgtaaagtannaagttctggcggntcancatgangtntcaaaggcctacttcnanagnactgacaccatngtttgg

SEQ ID NO: 21611 - DNA, 932 bp, Homo sapiens
gagaccatgttccgagcggcggctccggggcagctccggcgggcggcctcattgctacgatttcagagtaccctggtaatagctgagcatgcaaatgattccctagcacccattactgcagccacacgccttggaggtgaagtgtcctgcttagtagctggaaccaaatgtgacaaggtggcacaagatctctgtaaagtagcaggcatagcaaaagttctggtggctcagcatgatgtgtacaaaggcctacttccagaggaactgacaccattgattttggcaactcagaagcagttcaattacacacacatctgtgctggagcatctgccttcggaaagaaccttttgcccagagtagcagccaaacttgaggttgccccgatttctgacatcattgcaatcaagtcacctgacacatttgtgagaactatttatgcaggaaatgctctatgtacagtgaagtgtgatgagaaagtgaaagtgttttctgtccgtggaacatcctttgatgctgcagcaacaagtggcggtagtgccagttcagaaaaggcatcaagtacttcaccagtggaaatatcagagtggcttgaccagaaattaacaaaaagtgatcgaccagagctaacaggtgccaaagtggtggtatctggtggtcgaggcttgaagagtggagagaactttaagttgttatatgacttggcagatcaactacatgctgcagttggtgcttcccgtgctgctgttgatgctggctttgttcccaatgacatgcaagttggacagacgggaaaaatagtagcaccagaactttatattgctgttggaatatctggagccatccaacatttagctgggatgaaagacagcaagacaattgtggcaattaataaagacccagaagctccaattttccaagtggcagattatgg

SEQ ID NO: 21612 - DNA, 508 bp, Homo sapiens
  misc_feature (1)...(508): n = a,t,c or g
ctcagagatcctaacactggctgggaacctctgactcagagcatgtctttaaagagtccacatctggccaggcgcggtggcacatgcctgtaatcccagcactttgggaggccgaggcgggtggatcacgaggtcaggagtttgagatcagccaggccaacctggtgaaaccccgtctctactaaaaatacaaaaaattagctgggcgtggtggcaggcgcctgtaatcccagctacttgggaggctgaggcaggagaatcacttgaacccgggaggcggaggttgcagtgagccgagatcatgccactgcactccatccggccgggcgcggtggctcactcctgtaatcccaacgctttgggaggccgaggcgggcggatcacgaggtcaggagatggagaccatcctggntaacacggtgaaaccccgtctntactaaaactacaaaaaaattagccgggcgtggtagcgggcgcctgtagtcctagctactccggacgctgaggc

SEQ ID NO: 21613 - DNA, 706 bp, Homo sapiens
gagacttcagtggtttttcgagctatagggcatcaggtggtgggaacagcaggaaaaggcattccagtctgccccactgggtctggcagccctcccgggatgggcccacatccacctccagtccctggccaggggtgagaggcagaccagcagatggacttgatccctctgtgtctttttgcttctggctggtagataatgtcaacctgcagtcttgattcccagaccctgtacactcctccttttctgttgtgtgatcagtttgtgctttattctgtatttgtctcccatgtcttgctcttctcctggagaattctgtcttctctttggccatctcaaattgagaacctaaactattcctgcagaactgcctggttggcgtccacaagcaatacctctcgttccagcaggaccaagggagccagcctccagtgagtgactccagcaagtgcagccacctctcccttgatggtctgggagcctggcctcagcaaggggccttcctgacctctggctccagtgaagctgaatgtcctcactttgtgggtcacactctttacatttctgtaaggcaatcttggcacacgtggggcttaccagtggcccaggtaattttttgtttcatggactatggactctttcaaagggatctgatccttttgaattttgcacagccctagatacaatcccttttgataaaaggggg

SEQ ID NO: 21614 - DNA, 889 bp, Homo sapiens
  misc_feature (1)...(889): n = a,t,c or g
tatgacatgattacgaatttaatacgactcactatagggaatttggccctcgaggccaagaattcggcacgagggcggatctggaggagcagttgtctgatgaagagaaggtgcgtatagcagcaaaattcatcattcatgcccctcctggagaatttaatgaggttttcaatgatgttcggttactgcttaataatgacaatcttctcagggaaggagcagcccatgcatttgcacagtataacttggaccagtttactccagtaaaaattgaaggttatgaagatcaggtattgataacagaacatggcgacttgggaaatggaaagtttttggatccaaagaacagaatctgttttaaatttgatcacttaaggaaggaggcaactgatccaagaccctgtgaagtagaaaatgcagttgaatcatggagaacttcagtagaaactgctctgagagcttacgtaaaagaacattacccgaatggagtctgnctgtgtatggcaaaaaaatagatggacagcaaaccattattgcatgcatagaaagccatcagttccaagcaaaaaatttttggtaagttaaaattttggatattggggagttttggcattgttttaagtctttgtagttcttgctttagtgatttgggctacaccttgtttgtttatgattaagaacaatttagagatggtataaaattttagccttttgatataaggaaggtaaatttgctcaacagcctaatcactaaaggtagtggtaaatctgttgacattcagtggaaagagtatgggactagcaaacagcatcctgagggagcatgtgtgcctgcgagaacaccagttggcaatccatatgctcattctgtgaaggggctgttcctgaa

SEQ ID NO: 21615 - DNA, 541 bp, Homo sapiens
  misc_feature (1)...(541): n = a,t,c or g
aacngtttggacatcattacgaatttaatacgactcctatagggaatttggccctcgaggccaagaattcggcacgagcaaagtcagagtggtggtcatggtcctggaggtggcaagaaggatgacnaggacaagaaaaagaaatatgaacctcctgtaccaactagagtggggaaaaagaagaagaaaacaaagggaccagatgctgccagcaaactgccactggtgacacctcacactcagtgccggttaaaattactgaagttagagagaattaaagactatcttctcatggaggaagaattcattagaaatcaggaacaaatgaaaccattagaagaaaagcaagaggaggaaagatcanaagtggatgatctgagggggaccccgatgtcagtaggaaccttggaagagatcattgatgacaatcatgcctcgtgtctacatctgtgggctcagaacactacgtcagcattctttctttgtagacaaggatctgctggaacctggcttgtcggtcctgtcaccacaaggtgcatgc

SEQ ID NO: 21616 - DNA, 411 bp, Homo sapiens
  misc_feature (1)...(411): n = a,t,c or g
ttgagnncttgnatgncatgattacgaatttaatacgactcactatagggaatttggccctcgaggccaagaattcggcacgaggccagtgtccttccacctgtccacaagcatggggaacatcttcgccaacctcttcaagggcctttttggcaaaaaaagaaatgcgcatcctcatggtgggcctggatgctgcagggaagaccacgatcctctacaagcttaagctgggtgagatcgtgaccaccattcccaccataggcttcaacgtggaaaccgtggagtacaagaacatcagcttcactgtgtgggacgtgggtggccaggacaagatccggcccctgtggcgccactacttccagaacacacaaggcctgatcttcgtggtggacagcaatgacagagagcgtg

SEQ ID NO: 21617 - DNA, 527 bp, Homo sapiens
ggactactggccctcgaggccaagaattcggcacgagcttccggcagcggcagcgtcacgtggccaaggcaagatgggtcaaagtcagagtggtggtcatggtcctggaggtggcaagaaggatgacaaggacaagaaaaagaaatatgaacctcctgtaccaactagagtggggaaaaagaagaagaaaacaaagggaccagatgctgccagcaaactgccactggtgacacctcacactcagtgccggttaaaattactgaagttagagagaattaaagactatcttctcatggaggaagaattcattagaaatcaggaacaaatgaaaccattagaagaaaagcaagaggaggaaagatcaaaagtggatgatctgagggggaccccgatgtcagtaggaaccttggaagagattattgatgacaatcatgccatcgtgtctacatctgtgggctcagaacactacgtcagcattctttcatttgtagacaaggatctgctggaacctgctgctcggtcctgct

SEQ ID NO: 21618 - DNA, 679 bp, Homo sapiens
accttcagcgcctcggctccagcgccatggcgccctccaggaagttcttcgttgggggaaactggaagatgaacgggcggaagcagagtctgggggagctcatcggcactctgaacgcggccaaggtgccggccgacaccgaggtggtttgtgctccccctactgcctatatcgacttcgcccggcagaagctagatcccaagattgctgtggctgcgcagaactgctacaaagtgactaatggggcttttactggggagatcagccctggcatgatcaaagactgcggagccacgtgggtggtcctggggcactcagagagaaggcatgtctttggggagtcagatgagctgattgggcagaaagtggcccatgctctggcagagggactcggagtaatcgcctgcattggggagaagctagatgaaagggaagctggcatcactgagaaggttgttttcgagcagacaaaggtcatcgcagataacgtgaaggactggagcaaggtcgtcctggcctatgagcctgtgtgggccattggtactggcaagactgcaacaccccaacaggcccaggaagtacacgagaagctccgaggatggctgaagtccaacgtctctgatgcggaggctcagagcacccgtatcatttatggaggctctgtgactggggcaacctg

SEQ ID NO: 21619 - DNA, 473 bp, Homo sapiens
gggagatcaaggacttcaaggatttctacctttccatagcagatcattatgtagaagttctggaatgcaaaatacagtgtgaagagaacctcaccccagttataggaggctatccggttgagaaatttgtggctaccatgtatcattacttgcagtttgcctattataagttgaacgacctgaagaatgcagccccctgtgcagtcagctatctgctctttgatcagaatgacaaggtcatgcagcagaacctggtgtattaccagtaccacagggacacgtggggcctctcagatgagcacttccagcccagacctgaagcagttcagttctttaatgtgaccacactccagaaggagctgtatgactttgctaaggaaaatataatggatgatgatgagggagaagttgtggaatatgtggatgacctcttggaactggaggagaccagctagcccacagcaaccaaagag

SEQ ID NO: 21620 - DNA, 848 bp, Homo sapiens
  misc_feature (1)...(848): n = a,t,c or g
gtagttctgcttcccttcggaggaaaatttcaggctgaaggtttagcgggtgccgcctctaaagagagcaatcactacacttatggctgggattttgcgcttagtagttcaatggcccccaggcagactacagaccgtgacaaaaggtgtggagtctcttatttgtacagattggattcgtcacaaattcaccagatcaagaattccagaaaaagtgtttcaggcctcacctgaagatcatgaaaaatacggtggggatccacagaaccctcataaactgcatattgttaccagaataaaaagtacaagaagacgtccatattgggaaaaagatataataaagatgcttggattagaaaaagcacatacccctcaagttcacaagaatatcccttcagtgaatgcaaaattgaaagtagttaagcatttgataagaatcaagcccttgaagttgccacaaggacttccaacagaggagaacatgtctaacacgtgcctcaaaagcaccggggagttagtagtgcagtggcatctgaaacctgtggagcagaaagcacatgagtcctaatgccccagcagcttccgattggaaaatgcaaattgtttttatttaaagatggtgagaaagtgttttcattaaaatatgttttcaaaaccattttcaggccgggcacggtggctcacctgtaatcccagcactttgggaggccanggcggcanatcacctgaggtcaggagttcgagaccatctgaccancatgganaaacccccgtntntactgaaaatacngaattaccaggcttggnggacatgcctgaacccgntgttcgnaggntgagcnngaaat

SEQ ID NO: 21621 - DNA, 337 bp, Homo sapiens
ctgggctgcgcttgggtccgtcgctgcttcggtgtccctgtcgggcttcccagcagcggcctagcgggaaaagtaaaagatgtctgaatatattcgggtaaccgaagatgagaacgatgagcccattgaaataccatcggaagacgatgggacggtgctgctctccacggttacagcccagtttccaggggcgtgtgggcttcgctacaggaatccagtgtctcagtgtatgagaggtgtccggctggtagaaggaattctgcatgccccagatgctggctggggaaatctggtgtatgttgtcaactatccaaaagacggtgtttcaccatcttgg

SEQ ID NO: 21622 - DNA, 487 bp, Homo sapiens
  misc_feature (1)...(487): n = a,t,c or g
caacanctatgacatgattacgaatttaataccgactcactatagggaatttggccctcgaggccaagaattcggcacgaggctttctccaaacaggatttgcctcctccacgctccctacacacctgagatgtaaactggcagtcagtgttcactcaggacctaggattagaaaatggcagagttggtgctggatccaccttgcacttctatcaagccctgttctttttcctccagcctgaagtcttcggcaaatagctcagagggacatggtcttgcctctcagtgcttattttagtgggaaaaacagctaataccaggggtacaaacattggctcccaaggaactggatcacccaacagccagccagccacatttccctgtgtctggctagagccaccattagactcagacagaatgcttcaggaatcgttgcaccccttcaactggagcaggacggaaggttgctgtacttgggagggaatgg

SEQ ID NO: 21623 - DNA, 276 bp, Homo sapiens
gaatgcttcaggaatcgttgtcaccccttcaactggagcaggacggaaggttgtctgtacttgggagggagtggggagtggtgggaagggagttgcttgtcacacgaatcaggaaactgctctccctcagctgggctggggtctccagggacctgagctacatgcaggttgtgagctggaaaagaaagttctagactgtggcccagaatagggctggggcagctcccagagaatgaatagtgctgtttcctattggactgataaaaaaaaaaaaaa

SEQ ID NO: 21624 - DNA, 464 bp, Homo sapiens
cgctatgacatgattacgaatttaatacgactcactatagggaatttggccctcgaggccaagaattcggcacgagggggctcagcgtggcccatggtgcctgtcactcagcattcccatgcctgatgtttaccaagtgctgtgttggacactggctttctccaaacaggatttgcctcctccacgctccctacacacctgagatgtaaactggcagtcagtgttcactcaggacctaggattagaaaatggcagagttggtgctggatccaccttgcacttctatcaagccctgttctttttcctccagcctgaagtcttcggcaaatagctcagagggacatggtcttgcctctcagtgcttattttagtgggaaaaacagctaataccaggggtacaaacattggctcccaaggaactggatcacccaacagccagccagccacatttccctgtgtctggc

SEQ ID NO: 21625 - DNA, 631 bp, Homo sapiens
accgctatgacatgattacgaatttaatacgactcactatagggaatttggccctcgaggccaagaattcggcacgagcctactcagactaaggagctggaagagaaggtggcagagctgcacaaaacccacaggggcttatcgccagcacaagctgattcccagttcttagaaaatgcaaagaggctttccatgtatggtgttgacctacatcatgccaaggactcagaaggtgtggacatcaagctgggcgtgtgtgctaatggacttctcatttacaaagacagactgcgaatcaatcgttttgcttggccgaaaatcttaaaaatttcctataaacgcagtaacttctacattaaagtcagaccggcagagctggaacagtttgagagtaccattggattcaaactgccaaaccaccgggcagcgaaaagactatggaaagtgtgcgtggagcatcatactttctacaggcttgtttctccagagcagccaccaaaagccaagttcctgaccttggggtccaaatttcgctatagtggccgcacccaagcacagacccgccaggccagcaccctcatagataggccagcaccacactttgagcgcacttctagtaaacgggctccag

SEQ ID NO: 21626 - DNA, 670 bp, Homo sapiens
ccaacagctatgacatgattacgaatttaatacgactcactatagggaatttggccctcgaggccaagaattcggcacgaggaaaattcctgatcaggacttctatgcatctgtgctggatgtcctgacaccagatgatgttcggattctggttgagatggaagatgagttttctcgccgtggtcagtttgaacgaatttttccttctcatatctcctctcgctatctccgcttttttgagcagccacgatatttcaacattctcaccacccaatgggaacagaaataccatggcaacaagcttaaaggagtagatctgctccggagttggtgctacaaagggttccacatgggagttgtctctgattctgctccagtgtggtctctcccgacatcacttctgactatctcaaaggatgacgtgatactcaatgccttcagcaaatcagagactagcaagctgggaaaacaaagctcctgtgaggttagcctactactctctgaagacgggaccacgcccaaatccaagaagactcaagctggcctttccccttatccccagaaacccagttcctcaaaggacagtgaggacaccagcaaagagcccagcctttctacccagacgttacctgtgatcaagtgctctgggcagacttcaagactttctgct

SEQ ID NO: 21627 - DNA, 531 bp, Homo sapiens
ttttgtgcacaagaacaaatcaggaaatccgagaaattgtcagatgttatcagtcagaatttggacgagaccttgaaaaggacattaggtcagatacatcaggacattttgaacgtttacttgtgtccatgtgccagggaaatcgtgatgagaaccagagtataaaccaccaaatggctcaggaagatgctcagcgtctctatcaagctggtgaggggagactagggaccgatgaatcttgctttaacatgatccttgccacaagaagctttcctcagctgagagctaccatggaggcttattctaggatggctaatcgagacttgttaagcagtgtgagccgtgagttttccggatatgtagaaagtggtttgaagaccatcttgcagtgtgccctgaaccgccctgccttctttgctgagaggctctactatgctatgaaaggtgctggcacagatgactccaccctggtccggattgtggtcactcgaagtgagattgaccttgtacaaataaaacagatgttcgctc

SEQ ID NO: 21628 - DNA, 989 bp, Homo sapiens
gtggactggaaggggcggaggtaaccagaagcggctagtggcggctgcctgcgtccccaaccccctccgcgcagcgctcgcgacacgcgtgccaggagtgggagcgagcggcggggccagctgcgttctgagcctgggcgcagctgccatctgctctgggaagcaccagggtgtccccgccgccctcagctcgaagtcagccaccatggaggcgcaggcacaaggtttgttggagactgaaccgttgcaaggaacagacgaagatgcagtagccagtgctgacttctctagcatgctctctgaggaggaaaaggaagagttaaaagcagagttagttcagctagaagacgaaattacaacactacgacaagttttgtcagcgaaagaaaggcatctagttgagataaaacaaaaactcggcatgaacctgatgaatgaattaaaacagaacttcagcaaaagctggcatgacatgcagactaccactgcctacaagaaaacacatgaaaccctgagtcacgcagggcaaaaggcaactgcagctttcagcaacgttggaacggccatcagcaagaagttcggagacatgaggaattctcctactttcaaatcatttgaggagagggttgagacaactgtcacaagcctcaagacgaaagtaggcggtacgaaccctaatggaggcagttttgaggaggtcctcagctccacggcccatgccagtgcccagagcttggcaggaggctcccggcggaccaaggaagaggaactgcagtgctaagtccagccagcgtgcagctgcatccagaaaccggccactacccagcccatctctgcctgtgcttatccagataagaagaccaaaaatcccgctgggaaaaacccaggccttgacattgttattccaatggcccctccagaaagtttaatgaatttccatttgttttttgttgtttgatgaaaggaccctttgaacattccccttttcc

SEQ ID NO: 21629 - DNA, 536 bp, Homo sapiens
ggtgcaccagaccaggaggtgagaatacttctcctgggcttggataatgctggcaagaccactcttctgaagcagcttgcatctgaagacatcagccacatcacacctacacagggtttcaacatcaaaagtgtacaatcacaaggttttaaactgaatgtatgggacattggtggacagaggaaaatcagaccatactggaagaattattttgaaaataccgatattcttatatatgtaatcgacagtgcagacagaaaaagatttgaagagacgggtcaggaactagcggaattactggaggaagaaaaactaagttgtgtgccagtgctcatctttgctaataagcaggatttgctcacagcagcccctgcctctgaaattgcagaaggactgaacctgcataccatccgcgaccgagtctggcagatccagtcttgctcagctctcacaggagagggcgttcaggatggcatgaactgggtctgcaaaaatgtcaatgcaaagaagaaataaaatctagacgaatggagatg

SEQ ID NO: 21630 - DNA, 748 bp, Homo sapiens
  misc_feature (1)...(748): n = a,t,c or g
ggcagactgctttcagccagcagtcaaaagggcgaaattacaagagtccattgaatatgaagacttggggaaaaataattctgtaaaaacgattgcactaaacctcaagaagtcagataggtattatcatggtccaactccaatccagtcactacagtatgcaacaagtcaggacattattaattcttttcaaagtattagacaagaaatggaagcttatacacccaagttaactcaggttctctcaagtagtgctgccagtagtaccatcacagcactgtcacctggaggggcacttatgcagggaggaacacagcaagccataaaccagatggtgccaaatgatattcaatctgaattgaaacacttatatgtagctgttggagaacttctacgacatttctggtcctgctttcctgttaatacgccattcctagaagaaaaggtagtgaaaatgaaaagtaatttggaacgattccaagttacgaagctctgtccattccaagaaaagattcggagacagtatttaagcacaaatttggtaagtcacatagaatagatgctccagacagcctacaacaagctccacacatggcagtcacggcgtctgatgaagaaaacgtgaggtggccatgatgcttacaggttttgtgagattgagagaactatgacctgcagcaactctggaaacctggcctgacagacaagcagatgacctcncangagtgatttnaaanacttggncccc

SEQ ID NO: 21631 - DNA, 554 bp, Homo sapiens
ggggaggcggaggttgtggtgagccaagatcgcgccattgcactccagcctgggcaacaagagtaaaactccatctcagagaaaaaaaatttggtgaaggaatgaacacgtgagtgagtgaggaagggaaagtcccatgactcgatgatttaaaaaagaaaagtgctgagtggacggagtaatcagagtcagagtgggctgggatgggtcagcggaggctcttgcgagccttgagctttgagctgagattttcaggaagccatctctcccttccccttgcttcccccactgcacagctgaagagctttgatcagttcacctgcaacctgctgtatgtgagctggaggaaggacctcactgagcaccttcaccgcctctacttccggggccgtgcgtactacaccctcaacgtgctgcgggatgacatcgataacccgtaggcgccccaactcagtcctttctacactctgtgtggcctttccttctggctaaccctggagactgctggtggcagacaccaaggagacactgcagtctttcaaatgctgctgcca

SEQ ID NO: 21632 - DNA, 428 bp, Homo sapiens
ggatcaacacaccgatgctatatgttccgttaattacaattctagtgccaatatgtacgtaactggaagcaaggacggctgcatcaaattatgggatggtgtttcaaatcgatgcatcacaacttttgagaaagcacatgacggtgctgaagtttgttctgccattttttccaaaaattctaaatacattctctcaagtggaaaagactctgtagctaaactttgggaaatatcaacgggacgaacactggtcagatacacgggcgcgggtttaagtggacgccaggtgcaccggacacaggctgtgtttaaccacaccgaggactatgtgttgctgcccgacgagaggacgatcagtctttgctgctgggactcgaggacagccgagcggagaaacctgctgtcgttggggcacaacaatattggcc

SEQ ID NO: 21633 - DNA, 633 bp, Homo sapiens
gtatgtgacaacagcccagaagtcaggcaagcagctgcatatggcctgggagtcatggcacagtacggtggagataattatcgccctttttgtacagaagcacttcccctgctggtaagagttattcagtctgcggattctaagaccaaagaaaatgtcaatgctacagagaactgcatctcagcagtagggaaaatcatgaagttcaagcctgactgtgtaaacgttgaagaggtccttccacactggttgtcttggcttccactacatgaagataaagaagaagctgttcagactttcaattatctgtgtgacctgattgaaagtaatcatccaattgttcttggcccaaacaataccaatctgcccaaaatatttagtataattgcggaaggagaaatgcacgaggcaattaaacatgaagatccttgtgccaaacgtctggccaatgtcgttcgccaagtacagacttctggaggactgtggactgagtgcatagcacagctcaatcctgagcagcagggccgccattcaggagctcctgaactctgcgtgaagggccttaatgtcacccaccagaaaactaactccaaataaacgcttaccctttcctttagggtctttggtttggtt

SEQ ID NO: 21634 - DNA, 708 bp, Homo sapiens
gttcctaaaggccgcggagtcggcggtgttgtaggtagcggtaccttgagtggcaacagaattcgattaaattacaatgggaaacatttttgaaaagctctttaaaagtctacttgggaaaaaaaagatgcggattcttatattgagtttggatacagctggaaaaaccaccatcttgtataaattgaagctgggggagactgtgcctgccgtccctacagtaggtttctgtgtggagactggagaatataaaaataacaccttcgctgtctgggatgttggcagccacttcaaaatcagacctctgtggcagcattttttccagaacacaaaaggtgccagaagcccaggaagcacacatcaaggctcccttgccagcggggtgctgccaataaaatgtagtcacgtggaatttggaatgtggaaaggaggtagaagtcatcctttcctcccctgtagcagcaggcgtgcaggctctggtggtcagctggactccatactcccccaccagtcaccagcctggggaccgtggggctgcaaggacctcagcagcggtgtcccaagtttcctgacttcttccatcctctggaaatcagctgtggtaaagtagcctgaaagccagtggtacaacccccgccccaccaagagctcctgagccccctgcccccagagcaataaagtcagctggctttctcacctaaaaaaaaa

SEQ ID NO: 21635 - DNA, 584 bp, Homo sapiens
  misc_feature (1)...(584): n = a,t,c or g
gnnnnttnnnnnnntnnnntttgganancttttatgacacngattacgaatttaatacgactcactatagggaatttggccctcgaggccaagaattcggcacgaggacttctggtaccagcctcgacacaatgtcatgatcagcactgagtgggcagctcccaatgtcttacgagatggcttcaaccccgctgatgtggaggctggactgtacgggagccacttatatgtatgggactggcagcgccatgagattgtgcagaccctgtctctaaaagatgggcttattcccttggagatccgcttcctgcacaacccagacgctgcccaaggctttgtgggctgcgcactcagctccaccatccagcgcttctacaagaacgagggaggtacatggtcaagtggagaaggtgatccaggtgccccccaagaaagtgaagggctgctgctgcccgaaatgccagcctgatcaccgacatcctgctttcctggacgaccgnttccttattcagcaactgctgcatggggacctgagcagtatgacatctctgaccccagagacccgcttacaggacagtnttctt

SEQ ID NO: 21636 - DNA, 1032 bp, Homo sapiens
  misc_feature (1)...(1032): n = a,t,c or g
attacgaatttaatacgactcactatagggaatttggccctcgaggccaagaattcggcacgaggtaccagtcggcagcatggctacgaaatgtgggaattgtggacccggctactccacccctctggaggccatgaaaggtcattgagcccaaggacatccatgccaagtgcgaactggcctttctccacaccagccactgcctggccagcggggaagtgatgatcagctccctgggagacgtcaagggcaatggcaaagggggttttgtgctgctggatggggagacgttcgaggtgaaggggacatgggagagacctgggggtgctgcaccgttgggctatgacttctggtaccagcctcgacacaatgtcatgatcagcactgagtgggcagctcccaatgtcttacgagatggcttcaaccccgctgatgtggaggctggactgtacgggagccacttatatgtatgggactggcagcgccatgagattgtgcagaccctgtctctaaaagatgggcttattcccttggagatccgcttcctgcacaacccagacgctgcccaaggctttgtgggctgcgcactcagctccaccatccagcgcttctacaagaacgagggaggtacatggtcagtggagaaggtgatccaggtgccccccaagaaagtgaagggctggctgctgcccgaaatgccaggcctgatcaccgacatcctgctctccctggacgaccgcttcctctacttcagcaactggctgcatggggacctgaggcagtatgacatctctgacccacagagaccccgcctcacaggacagctcttcctcggaggcagcattgttaagggaggccctgtgcaagtgctgggaggacnaggaactaaatcccagccagagcccctaatggtcaagggaaaacggtggtggaggcctcaaatgatccanctcaacctggatgggnaacgcctcnacatcacaantcnctntaaatgcctgggacancaattttaccctgatctcatcagga

SEQ ID NO: 21637 - DNA, 342 bp, Homo sapiens
ctcgttttggcattgcagctaaatatcagttggatcccactgcttccatttctgcaaaagtcaacaactctagcttaattggagtaggctatactcagactctgaggcctggtgtgaagcttacactctctgctctggtagatgggaagagcattaatgctggaggccacaaggttgggctcgccctggagttggaggcttaatccagctgaaagaaacctttgggaatggatatcagaagatttggccttaatatatttccattgtgaccagcagcaggctttttttcccccaagaagatgatcaaaacaaaggatgatctcaacaagagctgtattttaa

SEQ ID NO: 21638 - DNA, 537 bp, Homo sapiens
gaaaaatgctaaaatcaagacagggtacaagcgggagcgcattaacctgggctgcgacatggatttcgacattgctgggccttccatccggggtgctctggtgctaggttacgagggctggctggccggctaccagatgaattttgagactgcaaaatcccgagtgacccagagcaactttgcagttggctacaagactgatgaattccagcttcacactaatgtgaatgacgggacagagtttgtcggctccatttaccagaaagtgaacaagaagttggagaccgctgtcaatcttgcctggacagcaggaaacagtaacacgcgcttcggaatagcagccaagtatcagattgaccctgacgcctgcttctcggctaaagtgaacaactccagcctgataggtttaggatacactcagactctaaagccaggtattaaactgacactgtcagctcttctggatggcaagaacgtcaatgctggtggccacaagcttggtctaggactggaatttcaagcataaatgaatactgt

SEQ ID NO: 21639 - DNA, 437 bp, Homo sapiens
agctattacatgattacgaatttaatacgactcactatagggaatttggccctcgaggccaagaattcggcacgagggggtgaaccgatgcactggcacctagacatgtacaacaggaaccgtgtggatacatcccccacacctgtttcttgcatgtcatgtgtatgcagctcttcggtttcctggctttcatgatattcatgtgctgggtgggggacgtgtaccctgtctaccagcctgtgggaccaaagcagtatccttacaataatctgtacctggaacgaggcggtgatccctccaaagaaccagagcgggtggttcactatgagatctgaggaggcttcgtgggcttttgggtcctctaactaggactccctcattcctagaaatttaaccttaatgaaatccctaataaaactcagtgctgtgttaaaaaa

SEQ ID NO: 21640 - DNA, 768 bp, Homo sapiens
ccaacagctatgacatgattacgaatttaatacgactcactatagggaatttggccctcgaggccaagaattcggcacgagcgtgaagaaggtgaagatggcggtggccagggccggggtcttgggagtccagtggctgcaaagggcatcccggaacgtgatgccgctgggcgcacggacagcctcccacatgaccaaggacatgttcccggggccctatcctaggaccccagaagaacgggccgccgccgccaagaagtataatatgcgtgtggaagactacgaaccttacccggatgatggcatggggtatggcgactacccgaagctccctgaccgctcacagcatgagagagatccatggtatagctgggaccagccgggcctgaggttgaactggggtgaaccgatgcactggcacctagacatgtacaacaggaaccgtgtggatacatcccccacacctgtttcttggcatgtcatgtgtatgcagctcttcggtttcctggctttcatgatattcatgtgctgggtgggggacgtgtaccctgtctaccagcctgtgggaccaaagcagtatccttacaataatctgtacctggaacgaggcggtgatccctccaaagaaccagagcgggtggttcactatgagatctgaggaggcttcgtgggcttttgggtcctctaactaggactccctcattcctagaaatttaaccttaatgaaatccctaataaaactcagtgctgtgttaaaaaaaaaaaaaa

SEQ ID NO: 21641 - DNA, 547 bp, Homo sapiens
  misc_feature (1)...(547): n = a,t,c or g
agggaacccggtttctgaggtaagaacctggtatgagtccgagcgcacgttatagggctagacaatataccaaatacccagccatatcggaccatctccttaaagtcgattcttcgtcaacgcctaagaggcaatcgtaacttggaaagaaacaacactatcgtagaaagaacgcgatctcaaaaacaaattaggattctttcgcgacccgttccgttcgtagacgattaagccgatctccgcgtcgctaagtttcggggccgtcaaggaaagtcgtcctagggaagccgggggccagccgtttgtctctaataggaacgttcttctcatcccgctagagacgtcgaataaacactaaatctcgcggtaagctacgtcggttcttcaagaacaattcgcgagctagagccgacgtataccaaccccgcccaaccaaccccccaagggatcgncttaaaggctaaccncnaaaagnannnccctggggggtccagggntttanacaaacggttgcctcgcgggggctaataacctaatttttccctcg

SEQ ID NO: 21642 - DNA, 918 bp, Homo sapiens
ccttatgacatgattacgaatttaatacgactcactatagggaatttggccctcgaggccaagaattcggcacgagcctggctcggagcagcagcctctgaggtgtccctggccagtgtccttccacctgtccacaagcatggggaacatcttcgccaacctcttcaagggcctttttggcaaaaaaagaaatgcgcatcctcatggtgggcctggatgctgcagggaagaccacgatcctctacaagcttaagctgggtgagatcgtgaccaccattcccaccataggcttcaacgtggaaaccgtggagtacaagaacatcagcttcactgtgtgggacgtgggtggccaggacaagattcggcctctgtggcggcactacttccagaacactcagggcctcatctttgtggtggacagtaatgaccgggagcgggtccaagaatctgctgatgaactccagaagatgctgcaggaggacgagctccgggatgctgtcctcctggtgttcgccaacaagcaggacatgcccaacgccatgaatgcggccgagatcacagacaagctggggctacagcacttacgcagccgcacgtggtacattcaggccacctgtgccacccaaggcacaggtctgtacgatggtctggactggctgtcccacgagctgtcaaagcgctaaccagccaggggcaggcccctgatgcccggaagctcctgcgtgcatccccgggatgaccagactcccggactcctcaggcagtgccctttcctcccacttttcctcccccatagccacaggcctctgctcctgctcctgcctgcatgttctctctgttgttggagcctggagccttgctctctgggcacagaggggtccactctcctgcctgctgggacctatggaaggggcttcc

SEQ ID NO: 21643 - DNA, 538 bp, Homo sapiens
ggattttcatgaaaatctgccactcagggtctgggatgaaggcttgtcagcacttccagtttagaacgcaatgtttctagagacatattggctgtttgttttgatgataaaaggagaataagaaaaggcatcactttcctggatccaggataatttttaaaccaatcaaatgaaaaaaacaaacaaacaaaaaaggaaatgtcatgtgaggttaaaccagtttgcattcccctaatgtggaaaaagtaagaggactactcagcactgtttgaagattgcctcttctacagcttctgagaattgtgttatttcacttgccaagtgaagggaccccctccccaacatgccccaccccacccctaagtacggtcccttgtcaccaggcaaccaggaaactgctacttgtggacctcaccagagaccaggagggtttggttagctcacaggacttcccccaccccagaagattagcatcccatactaagactcatactcatctcaactaggctcatactcaattgatggttattagacaatt

SEQ ID NO: 21644 - DNA, 566 bp, Homo sapiens
agcagactcaaacatctgaggtgtatgatggtcccaaaaatgtaagatctgatatttctgatcaagaggaagatgaagaaagtgaaggatgtccagtgtctattaatttgtctaaagctgaaactcaggctttaactaattatggaagtggagaagatgaaaatgaggatgaagaaatggaagaatttgaagaaggccctgtggatgtccagacttccctccaggctaacactgaagctactgaagaaaatgaacatgatgaacaggtcctacaacgtgactttaaaaagacagcagaaagcaaaaatgtcccattggaacgagaagccactagtaaaaatgaccaaaataactgtcctgtgaaaccctgttacctcaatatcttggaagatgagcaacctttaaatagtgctgcccataaggagtcacctcctactgttgattcaactcaacagcctaaccctttgccgttacgtttacctgaaatggaacccttagtgcctagagtcaaagaagttaaatctgctcaggaaactcctgaaagctctctggctggaagtcctgat

SEQ ID NO: 21645 - DNA, 987 bp, Homo sapiens
  misc_feature (1)...(987): n = a,t,c or g
gattacgaatttaatacgactcactatagggaatttggccctcgaggccaagaattcggcacgagatttattttttctttccttttaggatttggatctctccaatcttttttatgattaattgttcagtgtttatgcattattgcaaagtgataatgaaaatgctcaaactcagggtcctgcaggcactgtgggggaggcagtggggacgtgaggggattacagatccagtagaagccccccgacccccatctgcttccaccccatctnctttccaaaacaccaccgatngccacaccgaagagttctcccatttgctggttcccggacaaaaaagctgctgatcccttgagcacactgcagtgaagctcccagctgacatgtcctgtccatgtaaacagaacttcctccatgtctgccatcatggatgttctcgcagaagcaaatgggcacttttgccatcagcttatttaaaatattgggggaagaggacaactcaagaaacgtattcttctctcccatgagcatctcctctgccctggccatggtcttcatgggggcaaagggaagcactgcagcccagatgtcccaggcactttgtttatacaaagacggagatattcaccgaggtttccagtcacttctcagtgaagttaacagaactggcactcagtacttgcttagaactgccaacagactctttggagaaaagacgtgtgatttccttccagactttaaagaatactgccaaaaattctaccaagcagagatggaggagcttgactttatcagcgccgtagagaagtccagaaaacacataaacacctgggtagctgaaaaagacagaaggtaaaattgcggagttgctctctccgggctcagtggatccattgacaaggctggttctggtgaatgctgtctatttcagaggaaactgggatgaacagtttgacaaggagaacaccgaggagagactgtttaaagtct

SEQ ID NO: 21646 - DNA, 388 bp, Homo sapiens
gtgctatgaaggtgacagcgtgaggtgacccatctggcccgccgcgatgctggcaacacgggggctgctcggctggtcgcttcccgcgcggacagcacccaagaaaacctcatttggctcgctgaaggatgaagaccggattttcaccaacctgtacggccgccatgactggaggctgaaaggttccctgagtcgaggtgactggtacaagacaaaggagatcctgctgaaggggcccgactggatcctgggcgagatcaagacatcgggtttgaggggccgtggaggcgctggcttccccactggcctcaagtggagcttcatgaataagccctcagatggcaggcccaagtatctggtggtgaacgcagacgagggggagccgggc

SEQ ID NO: 21647 - DNA, 529 bp, Homo sapiens
cagtgctatgaaggtgacagcgtgaggtgacccatctggcccgccgcgatgctggcaacacggcggctgctcggctggtcgcttcccgcgcgggtatctgtgcgtttcagcggcgacacgacagcacccaagaaaacctcatttggctcgctgaaggatgaagaccggattttcaccaacctgtacggccgccatgactggaggctgaaaggttccctgagtcgaggtgactggtacaagacaaaggagatcctgctgaaggggcccgactggatcctgggcgagatcaagacatcgggtttgaggggccgtggaggcgctggcttccccactggcctcaagtggagcttcatgaataagccctcagatggcaggcccaagtatctggtggtgaacgcagacgagggggagccgggcaccctgcaaggaccgggagatcttacgccatgatcctacaagctgttggaagcttgctgtggggggccggccatgggcgcccgcgctgctatattacatccaagggaatcta

SEQ ID NO: 21648 - DNA, 699 bp, Homo sapiens
gggaggaggccaagcacaacctggagaagcagatcgccaccctccatgcccaggtggccgacatgaaaaagaagatggaggacagtgtggggtgcctggaaactgctgaggaggtgaagaggaagctccagaaggacctgggcctccacctctgtgcagggcacagaaggctggggtggggggaagagtggattcctccccaccctgtcccaggcagcgccactgtccgctgtctccctcctgattctaaaatgtctcaagtgcaatgccccctcccctcctttaccgaggacagcctgcctctgccacagcaaggctgtcggggtcaagctggaaaggccagcagccttccagtggcttctcccaacactcttggggaccaaatatatttaatggttaagggacttgtcccaagtctgacagccagagcgttagaggggccagcggccctcccaggcgatcttgtgtctactctaggactgggcccgagggtggtttacctgcaccgttgactcagtatagtttaaaaatctgccacctgcacaggtatttttgaaagcaaaataaggttttcttttttcccctttcttgtaataaatgataaaattccgagtctttctcactgcctttgtttagaagagagtagctcgtcctcactggtctacactggttgccgaatttacttgtattcctaactgt

SEQ ID NO: 21649 - DNA, 463 bp, Homo sapiens
  misc_feature (1)...(463): n = a,t,c or g
gngntnnnnnnnnnnnntttgaaccctttgacatgantacgaatttaatacgactcactatagggaatttggccctcgaggccaagaattcggcacgagctgtttctgtttatgaatattattcttttagaatagaataagtacatgctgctgtaataaaattgcctttaatcacttaacaagcctaaccttgactcaaacagtgaatgcctatagaaataataaatgaaaaaaactagtatttttatatcataaaacaatgtcatttatagcttatcattcatgtattgtccagcagacattaaaagccctgtggataattaagttatcttcatacctgcaaaatggtggaggctattttcattaaaactgtcagaatttgcttactataattatgatacagtccaaagaatgcagtcactttttatcatgttaactaattggtctcttttgaagatctatg

SEQ ID NO: 21650 - DNA, 776 bp, Homo sapiens
cagctatgacatgattacgaatttaatacgactcactatagggaatttggccctcgaggccaagaattcggcacgagaccagggcggcgcgtggtctacgccgagtgacagagacgctcaggctgtgttctcaggatgaccgagtgggagacagcagcaccagcggtggcagagaccccagacatcaagctctttgggaagtggagcaccgatgatgtgcagatcaatgacatttccctgcaggattacattgcagtgaaggagaagtatgccaagtacctgcctcacagtgcagggcggtatgccgccaaacgcttccgcaaagctcagtgtcccattgtgggagcgcctcactaactccatgatgatgcacggccgcaacaacggcaagaagctcatgactgtgcgcatcgtcaagcatgccttcgagatcatacaccctgctcacaggcgagaaccctctgcaggtcctggtgaaacgccatcatcaacagtggtccccgggaggactccacacgcattgggcgcgccgtgtgaaccaggccatctggctgctgtgcacaggcgctcgtgaggctgccttccggaacattaagaccattgctgagtgcctggcagatgagctcatcaatgctgccaagggctcctcgaactcctatgccattaagaagaaggacgagctggagcgtgtggccaagtccaaccgctgattttcccagctgctgcccaataaacctgtctgccctttggggcagtcccagcaaaaaaaaaaaaaa

SEQ ID NO: 21651 - DNA, 614 bp, Homo sapiens
ttttggaaaccgtttgactgattacgaatttaatacgactcactatagggaatttggccctcgaggccaagaattcggcacgaggtgagttcttagtattttatatcagcaaaataattcaattttgcaggttgcaaacaaatataaaacctgtttctgtttatgaatattattcttttagaatagaataagtacatgctgctgtaataaaattgcctttaatcacttaacaagcctaaccttgactcaaacagtgaatgcctatagaaataataaatgaaaaaaactagtatttttatatcataaaacaatgtcatttatagcttatcattcatgtattgtccagcagacattaaaagccctgtggataattaagttatcttcatacctgcaaaatggtggaggctattttcattaaaactgtcagaatttgcttactataattatgatacagtccaaagaatgcagtcactttttatcatgttaactaattggtctcttttgaagatctatggttgactaattaaacaataattcaagtagagtgtcccagaaaaaaaccacttgggctccctgtttggagtctggctggctctgagcattgccaatggccc

SEQ ID NO: 21652 - DNA, 555 bp, Homo sapiens
  misc_feature (1)...(555): n = a,t,c or g
agctgagattaaaagttaagttactcattagaaattataaatttatgagataaaaattgtgtgtaatagaaatagggcttgcgtcttccagagactctccatctcctgcatttatggcgtaatatgggaagccccaaggaaccagctattttgaatccctataactgtatttttctctttttatacttttcaggcccttaccccagagcaagtgtcattctgtgccacacatatgcagcaatatatggacccacggggtcgaagccatctctctggctatgactacgttggcttcaccaattcctactttggcaactaataagcagctcctcgtggatcgtagaaaatcttagtgtcgtgggaaatttactggggggcaaagagtacaggcaaatgtggaagataaagatggcctcgtgtgtgtgtgtgtgtgtgtgtgtgtgtgtgtgtgtgtgtgtgcgtgtgtgtgtgtgcatattacatttagtggngggcctaaaaantctcaggggtgggagtanangggtananantgggggagtggnngcattttgt

SEQ ID NO: 21653 - DNA, 1163 bp, Homo sapiens
ccctacccatgattacgaatttaatacgactcactatagggaatttggccctcgaggccaagaattcggcacgagcccggcagccttgctcagttcagcatagcggagcggatccgatcggatcggagcggatcggagcacaccggagcaggctcatcgagaaggcgtctgcgagaccatggagaacggatacacctatgaagattataagaacactgcagaatggcttctgtctcacactaagcaccgacctcaagttgcaataatctggggttctgggattaggaggtctgactgataaattaactcaggcccagatctttgactacggtgaaatccccaactttccccgaagtacagtgccaggtcatgctggccgactggtgtttgggttcctgaatggcagggcctgtgtgatgatgcagggcaggttccacatgtatgaagggtacccactctggaaggtgacattcccagtgagggttttccaccttctgggtgtggacaccctggtagtcaccaatgcagcaggagggctgaaccccaagtttgaggttggagatatcatgctgatccgtgaccatatcaacctacctggtttcagtggtcagaaccctctcagagggcccaatgatgaaaggtatgtatgttactccgttttttttaggtgggtaggatttaaagacttctctaggagctgtgggagaatttttaaaattccgtttatgtgagataattcaacctgtgtcctaggtttggagatcgtttccctgccatgtctgatgcctacgaccggactatgaggcagagggctctcagtacctggaaacaaatgggggagcaacgtgagctacaggaaggcacctatgtgatggtggcaggccccagctttgagactgtggcagaatgtcgtgtgctgcagaagctgggagcagacgctgttggcatgagtacagtaccagaagttatcgttgcacggcactgtggacttcgagtctttggcttctcactcatcactaacaaggtcatcatggattatgaaagcctggagaaggccaaccatgaagaagtcttagcagctggcaaacaagctgcacagaaattggaacagtttgtctccattcttatggccagcattccactccctgacaaagccagttgac

SEQ ID NO: 21654 - DNA, 536 bp, Homo sapiens
gacagatcctggagtagaccccagatctttaaacttatggtttatttcctttaatataagctgtccctcttggtttcatgttgctaaaacaacacctgagactgggtaatttataaagaagagaaatttatttcttacagttctggaggcttggcagtctgataccatggtgccggcatctggtgagggcctccttgctgtatcatctcatggcaggacctggaagggcaagagagagtgagggagagagagaaagagactgaactcacagcctcaagcccttttataattggcattaatccgttcatgagggtggagccctcatgacctaaatacctctcattaggcttcacctcccagcactgttgtattggagattaagtttccaacacatgcttttttgggggacatgttcaaaccacagctctagttacatacccacttccactcttgggtatatgcccaagagtatgtccatacaaaaatgtatacgtgaatgttcatagcagcgttattcagaccaaaaaaaaaaaaaa

SEQ ID NO: 21655 - DNA, 459 bp, Homo sapiens
  misc_feature (1)...(459): n = a,t,c or g
ttgattcgggatgctgtatataactatctattcgatgatgaagataccccaccaaacccaaaaaaagagatctctcgaggatccgaattccagatctatgaatcgtagatactgaaaaaccccgcaagttcacttcaactgtgcatcgtgcaccatctcaatttctttcatttatacatcgttttgccttcttttatgtaactatactcctctaagtttcaatcttggccatgtaacctctgatctatagaattttttaaatgactagaattaatgcccatcttttttttggacctaaattcttcatgaaaatatattacgagggcttattcagaagctttggacttcttcgccagaggtttgaggtttgtnngntcttnngngattatatggtngtttangagacgcnnncnngtnnngggagttttgngntngcgatccnntggtgncgntagtgtg

SEQ ID NO: 21656 - DNA, 221 bp, Homo sapiens
  misc_feature (1)...(221): n = a,t,c or g
ttgnnnaccccttggagnaccagctatgacatgattacgaatttaatacgactcactatagggaatttggccctcgaggccaagaattcggcacgagttaggacacctttggaataactatgaaagaaaactattctgagcaacccttttcacctgtcttattttggcttttgtaagtttgtttcttgactaataataaatggtaagttttctgnnnnnnn

SEQ ID NO: 21657 - DNA, 541 bp, Homo sapiens
ggtgtgcaccaagtgtgggaaagctttcagccacagctcaaacctcaccctccactacagaacacacttggtggaccggccctatgactgtaagtgtggaaaagcttttgggcagagctcagaccttcttaaacatcagagaatgcacacagaagaggcgccatatcagtgcaaagattgtggcaaggctttcagcgggaaaggcagcctcattcgtcactatcggatccacactggggagaagccttatcagtgtaacgaatgtgggaagagcttcagtcagcatgcgggcctcagctcccaccagagactccacaccggagagaagccatataagtgtaaggagtgtgggaaagccttcaaccacagctccaacttcaataaacaccacagaatccacactggggaaaagccctatggatgttccgtctgtgggaaacgcttcaatcagagtgcaaccctcattaaacaccagagaattcacactggggaaaagccttacaaatgtctttgaatgtggggaaaagatttagacaaagtc

SEQ ID NO: 21658 - DNA, 960 bp, Homo sapiens
gaatcctcctgccatcgccgccatcctggcttcgggggcgccggcctccaggcccccgggaggagaactcctagggctactaaatcctcgctggagggggtggcttcttatgcgggaggacgtggcggagggcctgactttgggagccggggtgatctgtgaaaatggttcgctattcacttgacccggagaaccccacgaaatcatgcaaatcaagaggttccaatcttcgtgttcactttaagaacactcgtgaaactgctcaggccatcaagggtatgcatatacgaaaagccacgaagtatctgaaagatgtcactttacagaaacagtgtgtaccattccgacgttacaatggtggagttggcaggtgtgcgcaggccaagcaatggggctggacacaaggtcggtggcccaaaaagagtgctgaatttttgctgcacatgcttaaaaacgcagagagtaatgctgaacttaagggtttagatgtagattctctggtcattgagcatatccaagtgaacaaagcacctaagatgcgccgcccggacctacagagctcatggtcggattaacccatacatgagctctccctgccacattgagatgatccttacggaaaaggaacagattgttcctaaaccagaagaggaggttgcccagaagaaaaaggtaaataagtagttgctcggttttgtttgtgatagtagaaagatttgtggttgctgtgatgactatcttaggacacctttggaataactatgaaagaaaactattctgagcaacccttttcacctgtcttattttggcttttgtaagtttgtttcttgactaataataaatggtaagttttctgtaatcccagcactttgggaggctgaggtgggtggatcacaaggtcaggagatcgagaccatcctggctaacacagtgaaaccccgctctactaaaaatgcaaaa

SEQ ID NO: 21659 - DNA, 397 bp, Homo sapiens
ggagtcgttgctgttgctgtttgtgagcctgtggcgcggcttctgtgggccggaaccttaaagatagccgcaatggctgaaaatggtgataatgaaaagatggctgccctggaggccaaaatctgtcatcaaattgagtattattttggcgacttcaatttgccacgggacaagtttctaaaggaacagataaaactggatgaaggctgggtacctttggagataatgataaaattcaacaggttgaaccgtctaacaacagactttaatgtaattgtggaagcattgagcaaatccaaggcagaactcatggaaatcagtgaagataaaactaaaatcagaaggtctccaagcaaacccctacctgaagtgactgatgagtataaaaatgatgtaa

SEQ ID NO: 21660 - DNA, 429 bp, Homo sapiens
  misc_feature (1)...(429): n = a,t,c or g
ggtgnnnnnctttganactctatgactgattacgaatttaatacgactcactatagggaatttggccctcgaggccaagaattcggcacgagtggaattacactggggttcttttgccttttttagcagaacatccgtccgtccatctgcatctctgtcccatgactcaggggcgcccactctgcttcgattctcctcctgtggaagaaaccattttgagcatgacttttcttgatgtctgaagcgttattttgggtactttttagggaggaatgcctttcgcaataatgtatccattccctgattgagggtgggtgggtggacccaggctccctttgcacacagagcagctacttctaagccatatcgactgttttgcagaggatttgtgtgtgctgcctcaggaggggagggctggtaggagggggg

SEQ ID NO: 21661 - DNA, 635 bp, Homo sapiens
acaccgctatgacatgattacgaatttaatacgactcactatagggaatttggccctcgaggccaagaattcggcacgaggccagcaatagttcataataaaaatctgttagctctcaaagctaattttttactaaagtttttatacagcctcaaattgttttattaaaaaaaagatttaaaatggtgatgcttacagcagtttgtacgagctcttaagtgttgattccatggaactgacggctttgcttgttttgattcttttccccctacttttcctaatggtttaaattctggaattacactggggttcttttgccttttttagcagaacatccgtccgtccatctgcatctctgtcccatgactcaggggcgcccactctgcttcgattctcctcctgtggaagaaaccattttgagcatgacttttcttgatgtctgaagcgttattttgggtactttttagggaggaatgcctttcgcaataatgtatccattccctgattgagggtgggtgggtggacccaggctccctttgcacacagagcagctacttctaagccatatcgactgttttgcagaggatttgtgtgtgctgcctcaggaggggagggctggtaggagggggggagag

SEQ ID NO: 21662 - DNA, 484 bp, Homo sapiens
  misc_feature (1)...(484): n = a,t,c or g
nnnnnttgaantcngcttnactgattacgaatttaatacgactcactatagggaatttggccctcgaggccaagaattcggcacgaggcctgctagtggcccagggcagggctgatagccaggcccagctgctgctgtccacggtggtgggcgtgttcacagccccaggcctgcacctgaagcagccgtttgtgcagggcctggctctctatacccctgtggtcctcccacgctctctggacttcacagaactggatgttgctgctgagaagattgacaggttcatgcaggctgtgacaggatggaagactggctgctccctgacggaagccagtgtggacagcaccctggctttcaacacctacgtccacttccaaggtaagatgaanggctnctcnctgctgccnagccncaggagtnctgnnggacnnaannnctnaanancttnttaacatcctttcnggcanggtccccntttacactc

SEQ ID NO: 21663 - DNA, 356 bp, Homo sapiens
ggggctcggcgtgggagtctgtagagggaagaaggcctgggaaaccaggaggacggtgagatccccagggaagcaataaagtgagagggaagctgaggaagtcctagaaacaggaagtcttctgaggtccagggagatcacaagatcagtgcttagaaggccagacgcagtggctcacgcctgtaatccctgcaatttgggaggccaagccaggaggattacttcagggtaggagttcgagaccagcttggacaacataatgagaccctgtctctaaaaaaaattaaaaatcagctgggtgtgggggtgtgcgcctgtgctgtgggtccagctactcgggaggctgatgcagaaga

SEQ ID NO: 21664 - DNA, 446 bp, Homo sapiens
  misc_feature (1)...(446): n = a,t,c or g
ttganaacncttgacatgattacgaatttaatacgactcactatagggaatttggccctcgaggccaagaattcggcacgagattttttcctacttaggattttccactctatctttgtggttcatgaggactttgcctcttctcctgcctcattccctgactttctctagttagatgtcagtcctaaataggttttcctcacttcaggcctcacccctcaccttgtttttttgggggctccagggaccaatctggggctggaaatgttaggaggttgccttggtgctgccccagatctgtccagcagggggcagtaagtgatcttggtagtatccctggctgctaagcccttggcaggggtggtcctttctacattcccattcacttaacagctcttttgggattgggtgngttcattccatttctgcccactccctctcctctc

SEQ ID NO: 21665 - DNA, 657 bp, Homo sapiens
accgttatgacatgattacgaatttaatacgactcactatagggaatttggccctcgaggccaagaattcggcacgaggccccacagatgcttccctccatactttttatttgctctgtttcctcagatttattttgtcttgccccattgcctctccttccttgaactctttccttttcaatctcaactcattcactgctgttgctcatttgcccttttccatgtattttttcctacttaggattttccactctatctttgtggttcatgaggactttgcctcttctcctgcctcattccctgactttctctagttagatgtcagtcctaaataggttttcctcacttcaggcctcacccctcaccttgtttttttgggggctccagggaccaatctggggctggaaatgttaggaggttgccttggtgctgccccagatctgtccagcagggggcagtaagtgatcttggtagtatccctggctgctaagcccttggcaggggtggtcctttctacattcccattcacttaacagctcttttgggattggtgtttcattccatttctgcccactccctctcctctcctctctggtaggtttaattttatgctttccctgattccagctttctgcttcctgaggactcccgctcccc

SEQ ID NO: 21666 - DNA, 699 bp, Homo sapiens
gggaagactaccaggctgcggaggagactgcttttgttgttgatgaagtgagcaacattgtaaaagaggctatagaaagcgcaattggtggtaacgcttatcaacacagcaaagtgaaccagtggaccacaaatgtagtagaacaaactttaagccaactcaccaagctgggaaaaccatttaaatacatcgtgacctgtgtaattatgcagaagaatggagctggattacacacagcaagttcctgcttctgggacagctctactgacgggagctgcactgtgcgatgggagaataagaccatgtactgcatcgtcagtgccttcggactgtctatttgacctgcagtccagcctatggcctttctccttttgtctctagttcatcctctaaccaccagccatgaattcagtgaactcttttctcattctctttgttttgtggcactttcacgatgtagaggaaaaaaccaaatgaccgcactgtgatgtgaatggcaccgaagtcagatgagtatccctgtaggtcacctgcagcctgcgttgccacttgtcttaactctgaatatttcatttcaaaggtgctaaaatctgaaatctgctagtgtgaaacttgctctactctctgaaatgattcaaatacactaattttccatactttatacttttgttagaataaattattcaaatctaaaaaaaa

SEQ ID NO: 21667 - DNA, 409 bp, Homo sapiens
  misc_feature (1)...(409): n = a,t,c or g
accancttgacatgattacgaatttaatacgactcactatagggaatttggccctcgaggccaagaattcggcacgaggcgtggtccatggggccaccgtcctctccccaacggctgtctttggcaccctggcctctctctatctgggagccttggaccacacagctgacaggctacaggcaatcctgggtgttccttggaaggacaagaactgcacctcccggctggatgcgcacaaggtcctgtctgccctgcaggctgtacagggcctgctagtggcccagggcagggctgatagccaggcccagctgctgctgtccacggtggtgggcgtgttcacagccccaggcctgcacctgaacagccgtttgtgcanggcctgctctctatacccctgtggtcctccacg

SEQ ID NO: 21668 - DNA, 618 bp, Homo sapiens
tacgactcactatagggaatttggccctcgaggccaagaattcggcacgagtttctcaagtatatgattatactaaattaatattcatatgttgcaggaagttggtgaaccatctaaagaagagaaggctgtggccaagtatcttcgattcaactgtccaacaaagtccaccaatatgatgggtcaccgggttgattattttattgcttcaaaagcagtggactgtcttttggattcaaagtgggcaaaggccaagaaaggagaggaagctttatttacaaccagggagtctgtggttgactactgcaacaggcttttaaagaagcagttttttcaccgagccctaaaagtaatgaaaatgaaatatgataaagacataaagaaagaaaaagataaaggaaaagctgaaagtggaaaagaagaagataaaaagagcaagaaagaaaatataaaggatgagaagacaaaaaaagaaaaagagaaaaaaaaagatggtgaaaaggaagaatccaaaaaggaggaaactccaggaactcctaaaaagaaggaaactaagaaaaaattcaaacttgagccacatgatgatcaggtttttctggatggaaatgaggtgtatgt

SEQ ID NO: 21669 - DNA, 491 bp, Homo sapiens
  misc_feature (1)...(491): n = a,t,c or g
caggacaagttctctcaagctgccaaagtcgcagaacttgaaaagcgcctgacagagctggagacagctgtacgttgtgatcaggatgctcagaatcccctttctgcaggtctacagggagcctgtctcatggagactgtagagctgttgcaagcaaaggtgagcgccctagaccttgcagttttggatcaagtggaggctcggctacagagtgtcctgggaaaggtgaacgagattgccaagcataaagcctctgtagaagatgcagatacacaaagcaaggtgcaccagctatatgaaactatacagcgctggagccccattgcctccaccctccctgagctggtgcagagacttgtcaccatcaagcagctgcacgagcaagccatgcagtttggtcagctcctgacacacttggataccacccagcagatgattgctaattccttgaaggacaataccaccctnttgacccaggtgcagacaaccat

SEQ ID NO: 21670 - DNA, 368 bp, Homo sapiens
attaaagctgtggtctttccatgtggagactgatagaaaataattttgtcccaagtcttatttgctgactttttctgtcatgagtgagattgttgaacaaactgaatatatgggctatagcaagtagctttacagtacagatcttacaattaagttttgcttttgttaaagtgtgtaccattttttctgtttggagtaagacaaaaattgttttgacataggttccctagggtacacttgctctagcatactttaaaggccactgttgcaaagtctacattttatgctgaatctgcattctgtcaggcacccgtagaaagacctcagtacatgctttgcactctcctttgctccctttttccaatttt

SEQ ID NO: 21671 - DNA, 471 bp, Homo sapiens
gaagaagtcggaggcccctgactactacgaggtcatccgcttccccattgacctgaagaccatgactgagcggctgcgaagccgctactacgtgacccggaagctctttgtggccgacctgcagcgggtcatcgccaactgtcgcgagtacaaccccccggacagcgagtactgccgctgtgccagcgccctggagaagttcttctacttcaagctcaaggagggaggcctcattgacaagtaggcccatctttgggccgcagccctgacctggaatgtctccacctcggattctgatctgatccttagggggtgccctggccccacggacccgactcagcttgagacactccagccaagggtcctccggacccgatcctgcagctctttctggaccttcaggcacccccaagcgtgcagctctgtcccagccttactggtgtgagaggctcctgggttggggcccacccc

SEQ ID NO: 21672 - DNA, 488 bp, Homo sapiens
  misc_feature (1)...(488): n = a,t,c or g
tatgacacgattacgaatttaatacgactcactatagggaatttggccctcgaggccaagaattcggcacgagactatattgagttttccaatgcattaacatggtatttctgctcttgtatttagttttctttccttctctctcaattttctattatataatattttttctatttcaaagtcttatatatgtttcattttttcctttgtttttttttatggtattataaatagtgtagtttaaatttcttttctttttttttttnganacnaggnctanctntngnccccanatnggagngtganggcgnnatcncggttnactgcancctntgcctccngggttcaagcgattctacngcctnagcctcccgagtanctggnattacaggggccngccacctngcccagctaaattttttggtattttnagtaaaaacggggtttnatcangtngnccaggctggnctngacctcccnacctcagg

SEQ ID NO: 21673 - DNA, 446 bp, Homo sapiens
ggatttgacacactcaccatttaatcatttccagcaaaatatatgtttggctgaaattatgtcaaatggatgtaatatagggtttgtttgctgcttttgatggctacgttttggagagagcaatcttgctgtgaaacagtgtggatgtaaattttataaggctgactcttactaaccaccatttcccctgtggtttgttatcagtacaattctttgttgcttaatctagagctatgcacaccaaattgctgagatgtttagtagctgataaagaaaccttttaaaaaaataatataaatgaatgaaatataaactgtgagataaatatcattatagcatgtaatattaaattcctcctgtctcctctgtcagtttgtgaagtgattgacattttgtagctagtttaaaattattaaaaattatagactccagaaaaaaaaaaaaaa

SEQ ID NO: 21674 - DNA, 1425 bp, Homo sapiens
gctatgacatgattacgaatttaatacgactcactatagggaatttggccctcgaggccaagaattcggcacgaggttctgggtactacagcagaagggtatgcggaagcgagcaccccagtctgagatggctcctgccggtgtgagcctgagggccaccatcctctgcctcctggcctgggctggcctggctgcaggtgaccgggtgtacatacaccccttccacctcgtcatccacaatgagagtacctgtgagcagctggcaaaggccaatgccgggaagcccaaagaccccaccttcatacctgctccaattcaggccaagacatcccctgtggatgaaaaggccctacaggaccagctggtgctagtcgctgcaaaacttgacaccgaagacaagttgagggccgcaatggtcgggatgctggccaacttcttgggcttccgtatatatggcatgcacagtgagctatggggcgtggtccatggggccaccgtcctctccccaacggctgtctttggcaccctggcctctctctatctgccttggaaggacaagaactgcacctcccggctggatgcgcacaaggtcctgtctgccctgcaggctgtacagggcctgctagtggcccagggcagggctgatagccaggcccagctgctgctgtccacggtggtgggcgtgttcacagccccaggcctgcacctgaagcagccgtttgtgcagggcctggctctctatacccctgtggtcctcccacgctctctggacttcacagaactggatgttgctgctgagaagattgacaggttcatgcaggctgtgacaggatggaagactggctgctccctgacgggagccagtgtggacagcaccctggctttcaacacctacgtccacttccaagggaagatgaagggcttctccctgctggccgagccccaggagttctgggtggacaacagcacctcagtgtctgttcccatgctctctggcatgggcaccttccagcactggagtgacatccaggacaacttctcggtgactcaagtgcccttcactgagagcgcctgcctgctgctgatccagcctcactatgcctctgacctggacaaggtggagggtctcactttccagcaaaactccctcaactggatgaagaaactgtctccccggaccatccacctgaccatgccccaactggtgctgcaaggatcttatgacctgcaggacctgctcgcccaggctgagctgcccgccattctgcacaccgagctgaacctgcaaaaattgagcaatgaccgcatcagggtgggggaggtgctgaacagcattttttttgagcttgaagcggatgagagagagcccacagagtctacccaacagcttaacaagcctgaggtcttggaggtgaccctgaaccg

SEQ ID NO: 21675 - DNA, 1163 bp, Homo sapiens
gcacaattcttcacatttataccgaaaatctaaaaagccatgtattgtaattatttttaagttactctggtgactttccagcttaaaatttggaggcaagttttcattaaaaggctatcaagtaccagtatccttacatgttgataaactgttacatacttccacaatttgcagttaaatagcatatatactgcatactcaaattttcagtctttcacagcacattaacaaaattattaggaaaacaggactaccacaaccaaagatttatagagtgcatacaattctgacagggagagccatgatcaaggagtggttttctttaggaagcaattctgctaaaaaacaacatggtaatagaagtaatttaaaatgttcaagacattaaatgcaggactgactccatattgccatttaatatgctttgtattataggatataaaaactaaccccccatctgtggaatgttaagctgacacccgagacagtcagagcctcccataattcaatatcccacactattttctggttgtaccaaaaaataaacaaccagcaaatgatttcacctcttaaaaaaaaagcatttacacttaaaaaatgggatgaggtgggattccctccttcttaaaaatgtttctagagctactaaaaagcttgcatttacaaaatagttgataaaatatattcctctggattgtactagaagggagacagggaccactgataagacatggtatatggttattaatcagacttggcttctttctctcctgcttcatcagaggctggactctcctcagtcttcgtttccccgttttccgcaggtaagtcttctttagtttcttggttagccacttcggcctgttttccctttgctccccttttcccttttgtttgcacttttttgtctgaagatttatcctgaaaaaaagcaccatgccgtacggtcaggttgactatcctgctacagttaatcccttcatatcatataatgaggaactaaaaggatcagttttgaatttatcactttcatttaggtgtttgaagaatctgaaaagcacaggtattaatatgaccatactaacttgatacattaagttcaaaatttaagccatgttaaagaaacataaaaatacttttagataccatccatcaatactgag

SEQ ID NO: 21676 - DNA, 432 bp, Homo sapiens
  misc_feature (1)...(432): n = a,t,c or g
ctcgttggggactaaggcgtcggttggcgcgcaacgggttctaggctgcaggcagctcgaggacccgcggccccgccccggctcggcctggcagatagcagaggcagcaggccgtgccgggggggcatgttgctgtaaccagtggcccaggggatgttacggtggacagtgcacctggagggcgggccccgcagggtgaaccatgctgcagtggctgtcgggcatcgggtatactccttcgggggttactgctctggtgaagactatgagacactgcgtcagatagatgtgcacattttcaatgcagtgtccttgcgttggacaaagctgcccccggtgaagtctgccatccgtgggcaagctcctgtggtaccctacatgcgctatggacactcaaccgtcctcatcgacnacacaatcctcctttggggc

SEQ ID NO: 21677 - DNA, 693 bp, Homo sapiens
  misc_feature (1)...(693): n = a,t,c or g
gttataacgatggagaggtagatgacgaggaagatgaagaagagcttggtgaagaagaaaggggtcagaagcgaaaacgagaacctgaagatgagggagaagatgatgactaagtggaataacctattttgaaaaattcctattgtgatttgactgtttttacccatatcccctctcccccccccctccaatcctgccccctgaaacttatttttttctgattgtaacgttgctgtgggaacgagaggggaagagtgtactgggggttgcggggggagggatggcgggtgggggtggaataaaatactatttttactgccactctttatttttttcccctactttttctttgtgtccggtttttgtccctgtaaatgcgatagctaagtacacactaagtgagcatttgttcctgactctcaaagaggatggtttggagttctcttacgtttcctggtatttcccaagtctcttgggttggttggaaggctgtggctggtctcagtttggttactcaatgcccaggaggggctgagcaccagccatatcttttgctttggttcacatgatgatacctgcttttctcaggcctgctagaggcatccaacgccctggtttgtaaatagcaacctaaagggcgtantttggcactggtnnggggacatccccatctctcatcccttttccccttca

SEQ ID NO: 21678 - DNA, 611 bp, Homo sapiens
agagtcacaagatgatcgacttgtccgggaatccggtgcttcggatctactacacctcgaggcctgctctgttcaccttgtgtgctgggaatgagctcttctactgcctcctctacctgttccatttctctgagggacctttagttggctctgtgggactgttccggatgggcctctgggtcactgcccccatcgccttgctgaagtcgctcatcagcgtcatccacctgatcacggccgcccgcaacatggctgccctggacgcagcagaccgcgccaagaagaagtgacgctggagccccgggtcctggctgcccacctgccctgggagtcttgctgtgccacacagctccccaccccctgctaggaggtcccagtctcacgccttcctcatgtgttgttctacctgctgggatgggggtcagcctctctttggtgacgtcacgttctctgggatcctgaggacccgggcctcaaatcagggaggatacgcgggaggccccctccatccaggcggtgctcctggggtgccgggaccgggcagtgtcacaccctgcctgctcagtcctggggtccgagatgctagggacgcttgagtgagggaggtggtg

SEQ ID NO: 21679 - DNA, 600 bp, Homo sapiens
caaaataaaggcaaaatacttttctagataaacaacagtggaaagtatttatcaccaatctgcattataagaaatatgaaaggaatttcttcaggcagaaagaaaatattaccaaaaggaaatctggatcaccatgaaagaatgaaagcactggaaatgacaatatgtgggcaaatagaaaaaccttttctcatttaaaaagtatctttaaaacattcctactctataatccagccattccactgctaagtatttacccaagaaaaatgaaaacatatatccacacaaatacttgtacgtgaatgttcgtcgacgcggccgcgaattccagatctatgaatcgtagatactgaaaaaccccgcaagttcacttcaactgtgcatcgtgcaccatctcaatttctttcatttatacatcgttttgccttcttttatgtaactatactcctctaagtttcaatcttggccatgtaacctctgatctatagaattttttaaatgactagaattaatgcccatcttttttttggacctaaattcttcatgaaaatatattacgagggcttattcagaagctttggacttcttttcccccaaagg

SEQ ID NO: 21680 - DNA, 529 bp, Homo sapiens
  misc_feature (1)...(529): n = a,t,c or g
ttnnnntnnnnnnntttgaancccctaattgntaccacatgattacgaatttaatacgactcactatagggaatttggccctcgaggccaagaattcggcacgaggatcgaccttcagaagatgcccttggggaagctgggcaaaaggcagatccaggccgcatactccatcctcagtgaggtccagcaggcggtgtctcagggcagcagcgactctcagatcctggatctctcaaatcgcttttacaccctgatcccccacgactttgggatgaagaagcctccgctcctgaacaatgcagacagtgtgcaggccaaggtggaaatgcttgacaacctgctggacatcgaggtggcctacagtctgctcaggggagggtctgatgatagcagcaaggatcccatcgatgtcaactatgagaagctcaaaactgacattaaggtggttgacagagattctgaagaagccgagatcatcaggaagtatgttaagaacactcatgcaaccacacacaatgcgtatgacttg

SEQ ID NO: 21681 - DNA, 453 bp, Homo sapiens
ttgacatgattacgaatttaatacgactcactatagggaatttggccctcgaggccaagaattcggcacgaggcagacagtgtgcaggccaaggtggaaatgcttgacaacctgctggacatcgaggtggcctacagtctgctcaggggagggtctgatgatagcagcaaggatcccatcgatgtcaactatgagaagctcaaaactgacattaaggtggttgacagagattctgaagaagccgagatcatcaggaagtatgttaagaacactcatgcaaccacacacaatgcgtatgacttggaagtcatcgatatctttaagatagagcgtgaaggcgaatgccagcgttacaagccctttaagcagcttcataaccgaagattgctgtggcacgggtccaggaccaccaactttgctgggatcctgtcccagggtcttcggatagccccc

SEQ ID NO: 21682 - DNA, 464 bp, Homo sapiens
  misc_feature (1)...(464): n = a,t,c or g
agagtntttgaaacctttgacatnattacgaatttaatacgactcactatagggaatttggccctcgaggccaagaattcggcacgaggcactccaaaaatttcacgaagtatcccaaaaagttctaccccctggagattgactatggccaggatgaagaggcagtgaagaagctgacagtaaatcctggcaccaagtccaagctccccaagccagttcaggacctcatcaagatgatctttgatgtggaaagtatgaagaaagccatggtggagtatgagatcgaccttcagaagatgcccttggggaagctgagcaaaaggcagatccaggccgcatactccatcctcannngaggtccagcaggcggngtctcagggctcagcgactctcagatnctggatctctcaaatngnttttacaccctgatcccncacgactttgnnatgaanatcctngntcct

SEQ ID NO: 21683 - DNA, 797 bp, Homo sapiens
  misc_feature (1)...(797): n = a,t,c or g
aagcctccgctcctgaacaatgcagacagtgtgcaggccaaggtggaaatgcttgacaacctgctggacatcgaggtggcctacagtctgctcaggggagggtctgatgatagcagcaaggatcccatcgatgtcaactatganaagctcaaaactgacattaaggtggttgacagagattctgaanaagccgagatcatcaggaagtatgttaagaacactcatgcaaccacacacaatgcgtatgacttggaagtcatcgatatctttaagatanagcgtgaaggcnaatgccagcgttacaagccctttaagcagcttcataaccgaagattgctgtggcacgggtccaggaccaccaactttgctgggatcctgtcccagggtcttcggatagccccgcctgaagcgcccgtgacaggctacatgtttggtaaagggatctatttcgctgacatggtctccaagagtgccaactactgccatacgtctcagggagacccaataggcttaatcctgttgggagaagttgcccttggaaacatgtatgaactgaagcacgcttcacatatcaccaagttacccaagggcaagcacagtgtcaaaggtttgggcaaaactacccctgatccttcagctaacattagtctggatggggtaaacgttcctcttgggaccgggatttcatcnggggtgaatgacaactctctactatatacgagtacattncnaagganattgctcaaggaaatcctgaagntctgctnnaacngnaattcaantttangaccccctgt

SEQ ID NO: 21684 - DNA, 1189 bp, Homo sapiens
gtgggactaatgatggagactatgtttttctaactggagaagacagttaccttaacttacaaaaattgtggaatggaatgggaaaacgtcacttgactggtggataacagacaagtgcaatatgattaatggaacagatggagattcttttcacccactaataaccaaagatgaggtcctttatgtcttcccatctgacttttgcaggtcagtgtatattactttcagtgactatgagagtgtacagggactgcctgcctttcggtataaagttcctgcagaaatattagccaatacgtcagacaatgccggcttctgtatacctgagggaaactgcctgggctcaggagttctgaatgtcagcatctgcaagaatggtgcacccatcattatgtctttcccacacttttaccaagcagatgagaggtttgtttctgccatagaaggcatgcacccaaatcaggaagaccatgagacatttgtggacattaatcctttgactggaataatcctaaaagcagccaagaggttccaaatcaacatttatgtcaaaaaattagatgactttgttgaaacgggagacattagaaccatggttttcccagtgatgtacctcaatgagagtgttcacattgataaagagacggcgagtcgactgaagtctatgattaacactactttgatcatcaccaacataccctacatcatcatggcgctgggtgtgttctttggtttggtttttacctggcttgcatgcaaaggacagggatccatggatgagggaacagcggatgaaagagcacccctcattcgaacctaaacattgcctttgcttggtgaagaaactgtgtgagctgtcctgacctggacgatgacgtggggaaaccctccacctccttgcaggcttgttgcctgttgaaagaaggaaaaagacacggcgctggcaagtgataggaacattctggccagaggttaaagagcaggctgacatggctggccattaagctttataaaatcatgtgggctctgaaattgttcttttatgtgtctagcaagtatttaataaacccttgtatagtaattttgttgttgttgggtgctggtagctccagaattttgtgaccactattgtggggtaaaatgtctctgcatcacttgttaatgctactggtctaacttcattcagtat

SEQ ID NO: 21685 - DNA, 624 bp, Homo sapiens
gctcacgttcacacctggtggcaggcttcactgtagggacggacattgcagttacaccacgattccttcctcttcactggctcgaggtaaacccttttcaaggaaaaacaactctaggatttcttttttctgtgtacgtagaccagtcccatcagtgtataatctctctctcacacgcctctctccaatagacagcttgtatttgcagtatttcatatttataaatatgcgtttatttaaaaggagaacaaaagcttgactctgattcacagttttgtatgtagctggtttgacgtagtcttttgtattttccctgccgaagtgaattgttggagaatgtaaaccgcctccacgtggcggcagacttcctaaggccccagctcgctggcctcgcgctgggcggctgggaattccacctgagaacaagtcccgcaaaccggggacggaaggacatttgacttttatttttgtatttaattgacatgaatgtaaaggggacagctcagggttgttttggagcctgttgactttgtatctctgcctgtgattttcttttctaaatgaaactccatgtagcaaccaggacgaagttgagaaggaaaacgccaaatgctttggttatta

SEQ ID NO: 21686 - DNA, 329 bp, Homo sapiens
gctggaagaattaagtaccactgaggtggcaatgcacacttcaacctcttcttcagtcacaaagagttacatctcatcacagacaaatggagaaacgggacaacttgtccatcgtttcactgtaccagtattcgccgactgataaaggcatgaggatgtggcctgcatgctgcctgatcttgcctagaaccggctgcacctgctgttctcttgtttatgcaaactggctgcacctgctattcctttgcttatgcccctacccctggctatcctaattccctgttctcctgcctcactattactgtattctctacttctaaataaaaata

SEQ ID NO: 21687 - DNA, 478 bp, Homo sapiens
  misc_feature (1)...(478): n = a,t,c or g
tnnnnnnnnnnattganncantgctatgacatgattacgaatttaatacgactcactatagggaatttggccctcgaggccaagaattcggcacgagatttgacttctatttgtgtgaaatggcctttccccgggtcaagccagcacctgatgaaacttccttcagtgaggccttgctgaagaggaatcaggacctggctcccaattctgctgaacaggcatctatcctttctctggtgacaaaaataaacaatgtgattgataatctgattgtggctccagggacatttgaagtgcaaattgaagaagttcgacaggtgggatcctataaaaaggggacaatgactacaggacacaatgtggctgaccctgtggtgatactcaagattctgccaacgttggaagctgttgctgcctggggaacaaagtcnnggaaagcctannacacaggatncttctgaagnnntaaccatgctga

SEQ ID NO: 21688 - DNA, 589 bp, Homo sapiens
gcggcacgagcggttggtgcggcctccattgttcgtgttttaaggcgccatgaggggtgacagaggccgtggtcgtggtgggcgctttggttccagaggaggcccaggaggagggttcaggccctttgtaccacatatcccatttgacttctatttgtgtgaaatggcctttccccgggtcaagccagcacctgatgaaacttccttcagtgaggccttgctgaagaggaatcaggacctggctcccaattctgctgaacaggcatctatcctttctctggtgacaaaaataaacaatgtgattgataatctgattgtggctccagggacatttgaagtgcaaattgaagaagttcgacaggtgggatcctataaaaaggggacaatgactacaggacacaatgtggctgacctggtggtgatactcaagattctgccaacgttggaagctgttgctgccctggggaacaaagtcgtggaaagcctaagagcacaggatccttctgaagttttaaccatgctgaccaacgaaactggctttgaaatcagttcttctgatgctacagtgaagattctcattacaacagtg

SEQ ID NO: 21689 - DNA, 815 bp, Homo sapiens
ctgctttagaggaagaaagtcgacagagacaatctcgcatggagaaaggagaaccgtacatgagcattcagcctgctgaagatccagatgattatgatgatggcttttcaatgaagcatacagccaccgcccgtttccagagaaaccaccgcctcatcagtgaaattcttagtgagagtgtggtgccagacgttcggtcagttgtcacaacagctagaatgcaggtcctcaaacggcaggtccagtccttaatggttcatcagcgaaaactagaagctgaacttcttcaaatagaggaacgacaccaggagaagaagaggaaattcctggaaagcacagattcatttaacaatgaacttaaaaggttgtgcggtctgaaagtagaagtggatatggagaaaattgcagctgagattgcacaggcagaggaacaggcccgcaaaaggcaggaggaaagggagaaggaggccgcagagcaagctgagcgcagtcagagcagcatcgttcctgaggaagaacaagcagctaacaaaggcgaggagaagaaagacgacgagaacattccgatggagacagaggagacacaccttgaagaaacaacagagagccaacagaatggtgaagaaggcacgtctactcctgaggacaaggagagtgggcaggagggggtcgacagtatggcagaggaaggaaccagtgatagtaacactggctcggagagcaacagtgcaacagtggaggagccaccaacagatcccataccagaagatgagaaaaaagaataagttgttgccttgttttgtgtgttctaaata

SEQ ID NO: 21690 - DNA, 437 bp, Homo sapiens
  misc_feature (1)...(437): n = a,t,c or g
gactaacttcaggaaccagctcatgatctcaggatgtatggaaaaataatctttgtattactattgtcaggagaaacgggacaacttgtccatcgtttcactgtaccagctcctgtagtgataatactcattattttgtgtgtgatggctggtattattggaacgatcctcttaatttcttacagtattcgccgactgataaaggcatgaggatgtggcctgcatgctgcctgatcttgcctagaaccggctgcacctgctgttctcttgtttatgcnaactggctgcacctgctattcctttgcttatgcccctacccctggctatnctaattcctgtntnctgnctnctattactgnatnntctacttntanntnnnnntnnncnnntcnnccgnnnnnnnnnnnnnnnnnnnnnnnnnnnnnnnnnnnntttcg

SEQ ID NO: 21691 - DNA, 501 bp, Homo sapiens
gatcttttgccagaaatgagggcatactggcctgacgtaattcactcgtttcccaatcgcagccgcttctggaagcatgagtgggaaaagcatgggacctgcgccgcccaggtggatgcgctcaactcccagaagaagtactttggcagaagcctggaactctatagggagctggacctcaacagtgtgcttctaaaattggggataaaaccatccatcaattactaccaagttgcagattttaaagatgcccttgccagagtatatggagtgatacccaaaatccagtgccttccaccaagccaggatgaggaagtacagacaattggtcagatagaactgtgcctcactaagcaagaccagcagctgcaaaactgcaccgagccgggggagcagccgtcccccaagcaggaagtctggctggcaaatggggccgccgagagccggggtctgagagtctgtgaagatggccagtcttctatccccactaaaaaagaccaa

SEQ ID NO: 21692 - DNA, 826 bp, Homo sapiens
gagaaaatgctagtggtaaacctatagcagctgtgatgaatacctggaccaaacaaatgggatttcccctcatttatgtggaagctgaacaggtagaagatgacagattattgaggttgtcccaaaagaagttctgtgctggtgggtcatatgttggtgaagattgtccccagtggatggtccctatcacaatctctactagtgaagaccccaaccaggccaaactaaaaattctaatggacaagccagagatgaatgtggttttgaaaaatgtcaaaccagaccaatgggtgaagttaaacttaggaacagttgggttttatcggacccagtacagctctgccatgctggaaagtttattaccaggcattcgtgacctttctctgccccctgtggatcgacttggattacagaatgacctcttctccttggctcgagctggaatcattagcactgtagaggttctaaaagtcatggaggcttttgtgaatgagcccaattatactgtatggagcgacctgagctgtaacctggggattctctcaactctcttgtcccacacagacttctatgaggaaatccaggagtttgtgaaagatgtcttttcacctataggggagagactgggctgggaccccaaacctggagaaggtcatctcgatgcactcctgaggggcttggttctgggaaaactaggaaaagcaggacataaggcaacgttagaagaagcccgtcgtcggtttaaggaccacgtggaaggaaaacagattctctccgctgatctgaggagtcctgtctatctgactgttttgaagcatggggatgg

SEQ ID NO: 21693 - DNA, 633 bp, Homo sapiens
gatcgagggctggttcgttctctactacgaagacctgcttggagaccaagccttcttatctcaactctggaaagagtatgccaagggagacagccgatacatcctgggtgacaacttcacagtgtgcatggaaaccatcacagcttgcctgtggggaccactcagcctgtgggtggtgatcgcctttctccgccagcatcccctccgcttcattctacagcttgtggtctctgtgggccagatctatggggatgtgctctacttcctgacagagcaccgcgacggattccagcacggagagctgggccaccctctctacttctggttttactttgtcttcatgaatgccctgtggctggtgctgcctggagtccttgtgcttgatgctgtgaagcacctcactcatgcccagagcacgctggatgccaaggccacaaaagccaagagcaagaagaactgaggagtggtggaccaggctcgaacactggccgaggaggagctctctgcctgccagaagagtctagtcctgctcccacagtttggagggacaaagctaattgatctgtcacactcaggctcatgggcaggcacaagaaggggaataaaggggctgtgtgaaggcactgctgggag

SEQ ID NO: 21694 - DNA, 974 bp, Homo sapiens
gctgagctgaagctgatgctggggtcagacccctacagagaaccagtgcttccttcgtcagcagcgcctccccagacccacgaggatactcacactgcacgcctgaggctctcctaagctccttctttcattctgccattcctccctcccttccttttttaaatgatttttattacggtgtggtcacttatttagatggacattgcttttcaaataacttaaaataacacgttatgtgccatgtggctactttagtaatattgccaagaagagcacagtttttacactagtggcatctcagtgaaattaaccaaagatgaagctttggctttgctggtgagatcagagccctcctgagcaggcagcgccactccagggttcagacagggctgcacaggcggcagagatacagggtctgagggctgagacgccatggggccgctgctgcttatgtggttggattgtttacaagcctcattattaaaactgaaggcattttttttttctgctgcctttcccaaagtggttaggtttggaaaagagatgatgatggtaatattttatttgtcctttttaagccatttccccaaatgggactagcatgcttgttttcagtataccgtggcctgcctcatgatggtttggagatactgtctgtggatgtgaggtggggacttcattcattgtcctatttctatctccactttgtgcctggagagctttcaggggaggtggaggaggagggtctgccaagctactgcaacatctgtcacccactatacccagttacttgggggaggacagacactgtggtgtcattaaagttgtttgaaccaaagtggcggctgcatctttgtcccgatgctagccgtgccggtctcccatcatccgctcgccctcctttcccctgggctgcgcccacttgtcttcctggatatttgggggtgactcgccatgcttggcaccctctgctt

SEQ ID NO: 21695 - DNA, 739 bp, Homo sapiens
  misc_feature (1)...(739): n = a,t,c or g
gagctcgtgtaacggcggcggtgtcggcagctgctgtagcgaagagagtttggcgcgatgtctcacaccattttgctggtacagcctaccaagaggccagaaggcagaacttatgctgactacgaatctgtgaatgaatgcatggaaggtgtttgtaaaatgtatgaagaacatctgaaaagaatgaatcccaacagtccctctatcacatatgacatcagtcagttgtttgatttcatcgatgatctggcagacctcagctgcctggtttaccgagctgatacccagacataccagccttataacaaagactggattaaagagaagatctacgtgctccttcgtcggcaggcccaacaggctgggaaataattgtgttggaagcactgggggggttggggtgggcttggaacacaggtgtgtacagcgtgctgtagtggaagttttgtatcatantaatcctgtttccactttgttatactctagccaagattgactgtattagattaaatgtgaggatcttgttcaatcgggaaacccccgttacctcccctttnnctttcnctttcctttttttttnnacntaancttttttttnaanaatttaaanggaattttncccccccttaantttnggtccantccntccnntttcnttttntttntannttccctnntaccctcccnaaaaggggggggggtgaaancnnttnnccnttcccaaaaaantttggnaaaa

SEQ ID NO: 21696 - DNA, 723 bp, Homo sapiens
cttatatttagaggttccctttaattgggcaaatgcaaaaaaaaaattctgctagagaaacacagtgacttctatgtgtccagttgaaaaagatggaattttatgcagttctgtttctcttctgagtttaactgaactcagaggaataaaccctcctagagctgttcacactggtatttagagcaaaattaaaaactgaattctcacctttatcagtcatcgaatacagtaagaaattaagatgatcattccaacaacaacaagcatcacctcaaaaataacacgagccatcgcccaccaattaatgagtgttatcccatttgtctgtgatgagatgtaactctttgtgactgaagaagaggttgaagtgtgcattgccacctcagtggtacttaatgctgatatgctcacaatttctttgctcatctcttggagacattcaaatgaggggaatggcacccaagtgcagtggagtggaggtggaagggcttcttctcagaggcagccaacttggcccctcagctgaatgctcaaagtttcctgacaatagtaatacaaagattatttttccatacatcctgagatcatgtcgacgcggccgcgaattccagatctatgaatcgtagatactgaaaaaccccgcaagttcacttcaactgtgcatcgtgcaccatcttaatttctttcatttatacatcgttttgccttcttttatgtaactat

SEQ ID NO: 21697 - DNA, 386 bp, Homo sapiens
gcagctgtgatacttgtagatttatatttagcaaaatgttagcatgtatgacaagacaatgagagtaattgcttgacaacaacctatgcaccaggtatttaacattaactttggaaacaaaaatgtacaattaagtaaagtcaacatatgcaaaatactgtacattgtgaacagaagtttaattcatagtaatttcactctctgcattgacttatgagataattaatgattaaactattaatgataaaaataatgcatttgtattgttcataatatcatgtgcacttcaagaaaatggaatgctactcttttgtggtttacgtgtattattttcaatatcttaataccctaataaagagtccataaaaatccaaaaaaaaaaaaaa

SEQ ID NO: 21698 - DNA, 998 bp, Homo sapiens
  misc_feature (1)...(998): n = a,t,c or g
gacagaacgtgccaactctatgggcctgtttttgcagaaaacaaacatcatccgtgactatctggaagaccagcaaggaggaagagagttctggcctcaagaggtttggagcaggtatgttaagaagttaggggattttgctaagccggagaatattgacttggccgtgcagtgcctgaatgaacttataaccaatgcactgcaccacatcccagatgtcatcacctacctttcgagactcagaaaccagagtgtgtttaacttctgtgctattccacaggtgatggccattgccactttggctgcctgttataataaccagcaggtgttcaaaggggcagtgaagattcggaaagggcaagcagtgaccctgatgatggatgccaccaatatgccagctgtcaaagccatcatatatcagtatatggaagagatttatcatagaatccccgactcagacccatcttctagcaaaacaaggcatatcatctccaccatccggacgcagaatcttcccaactgtcagctgattcccgaagccactactcccccatctacctgtcgtttgncatgctttnggttgccctgactggcagtacctgaccactctctcccaggtaacagaagactatgttnagactggngaaacacttgatcccaaatttgtccatagctgaagtccaccataaagtggatttactttttttctttaaggatggatgttgtgttctctttatttttttcctactactttaatccctaaaagaacgctgtgtggctgggacctttaggaaagtgaaatgcaggtgagaagaacctaaacatgaaaggaaagggtgcctcatcccagcaacctgtccttgtgggtgatgatcactgtgctgcttgtggctcatggcagagcattcagtgccacggtttaggtgaagtcgctgcatatgtgactgtcatgagatcctacttagtatgatcctggctagaatgataattaaaagtat

SEQ ID NO: 21699 - DNA, 688 bp, Homo sapiens
  misc_feature (1)...(688): n = a,t,c or g
attcggcacgagctctatgaccacgcacatgtaaagccccttctgcaaaagagacctaaaccagatgagaagtattattcatccagcatatggggaccaacatgtgatggcctcgatcggattgttgagcgctgtgacctgcctgaaatgcatgtgggtgattggatgctctttgaaaacatgggcgcttacactgttgctgctgcctctacgttcaatggcttccagaggccgacgatctactatgtgatgtcagggcctgcgtggcaactcatgcagcaattccagaaccccgacttcccacccgaagtagaggaacaggatgccagcaccctgcctgtgtcttgtgcctgggagagtgggatgaaacgccacagagcagcctgtgcttcggctagtattaatgtgtagatagcactctggtagctgttaactgcaagtttagcttgaattaagggatttggggggaccatgtaacttaattactgctagttttgaaatgtctttgtaagagtagggtcgccatgatgcanccatatggaanactangatatgggtcacacttatctgtgttcctanggaaactatttnaatattgntttaaaagggttttaatnnncctncaaaaacctanncanaattncccncactgctaaaaancatttttaccttgtnaatgcaaatgggc

SEQ ID NO: 21700 - DNA, 431 bp, Homo sapiens
  misc_feature (1)...(431): n = a,t,c or g
tttgcnacccgctatgacatgantacgaatttaatacgactcactatagggaatttggccctcgaggccaagaattcggcacgaggaagattcaatatactaagatcttcataaacaatgaatggcatgattcagtgagtggcaagaaatttcctgtctttaatcctgcaactgaggaggagctctgccaggtagaagaaggagataaggaggatgttgacaaggcagtgaaggccgcaagacaggcttttcagattggatctccgtggcgtactatggatgcttccgagagggggcgactattatacaagttggctgatttaatcgaaagagatcgtctgctgctggcgacaatggagtcaatgaatggtggaaaactctattccaatgcatatctgaatgatttagcaggctgcatcaaaacattgcgc

SEQ ID NO: 21701 - DNA, 402 bp, Homo sapiens
gcagaaatgtcatcctcaggcacgccagacttacctgtcctactcaccgatttgaagattcaatatactaagatcttcataaacaatgaatggcatgattcagtgagtggcaagaaatttcctgtctttaatcctgcaactgaggaggagctctgccaggtagaagaaggagataaggaggatgttgacaaggcagtgaaggccgcaagacaggcttttcagattggatccccgtggcgtactatggatgcttccgagagggggcgactattatacaagttggctgatttaatcgaaagagatcgtctgctgctggcgacaatggagtcaatgaatggtggaaaactctattccaatgcatatctgaatgatttagcaggctgcatcaaaacattgcgctct

SEQ ID NO: 21702 - DNA, 443 bp, Homo sapiens
aatacgactcactatagggaatttggccctcgaggccaagaattcggcacgagagccactgcactccagcctgggcaacagagcaagactccgtctcaaaaaataaaaaataaaaaaagaaaggtgagctctgtaatagtgtagctggctggtgaaaatagtgtagctggctggtacagctcagcagaggaagggtctggggggacatgctcccccatccctgccagtctcatatctgccatacctgctgcgagaggaattgattggaggactggtttgggtggaaattgcccagccgggctgggcatggtggcccacgcgtgtaatcccagcactttgagaggctgaggcgggcagatcacttgaggtcaggcgttcgagattagcctggccaacagggcgaaaccctgtctctactaaaaatacaaaaattagctgggtgt

SEQ ID NO: 21703 - DNA, 499 bp, Homo sapiens
  misc_feature (1)...(499): n = a,t,c or g
ngnggnntaggtggtnnntctgaatccttncntaaaactctttnacatgacacgaatttaatacgactcactatagggaatnnggccctcgaggccaagaattcggcacgagtttttttttgagacggagtcttgctctgttgcccaggctgaagggcagtggcatgatctcggctcactgcaagctctgcctcccgggttcacaccattctcctgcctcagcctcctgagtagctgggactacgggcgcccgctaccacaccaggctaattttttgtagttttagtagagatggggtttcactgtgttttccaggatggtctcaatctcctgacctcgtgatccgcccaccttggcctcccaaagtgctgggattacaggcttgagccactgtgttatttacaagttttcaacatgatgggttggtttccactagcatctttcaaataatcttttttttttttaaattttnaaagnatnatnannacctcanaaaggg

SEQ ID NO: 21704 - DNA, 621 bp, Homo sapiens
gcatagttgtgttaagcttgcgtagaattgcaggtctctgtacgggccagtttctctgccttcttccaggatcaggggttagggtgcaagaagccatttagggcagcaaaacaagtgacatgaagggagggtccctgtgtgtgtgtgtgctgatgtttcctgggtgccctggctccttgcagcagggctgggcctgcgagacccaaggctcactgcagcgcgctcctgacccctccctgcaggggctacgttagcagcccagcacatagcttgcctaatggctttcactttctcttttgttttaaatgactcataggtccctgacatttagttgattattttctgctacagacctggtacactctgattttagataaagtaagcctaggtgttgtcagcaggcaggctggggaggccagtgttgtgggcttcctgctgggactgagaaggctcacgaagggcatccgcaatgttggtttcactgagagctgcctcctggtctcttcaacactgtagttctctcatttccaaaccatcagctgcttttaaaataagatctctttgtagccatcctgttaaatttgtaaacaatctaattaaatggcatcagcactttaaccc

SEQ ID NO: 21705 - DNA, 619 bp, Homo sapiens
  misc_feature (1)...(619): n = a,t,c or g
ggagagggccaccgcccagcaatagacggtgtctcagcctgccgagccgcagtttccgtggtgtgagtgagtccgggcccgtgtcccctctcccgccgccgccatgggctgcacgttgagcgccgaagacaaggcggcagtggagcgaagcaagatgatcgaccgcaacttacgggaggacggagagaaggcggcgcgggaggtgaagttgctgctgttgggtgctggggagtcagggaagagcaccatcgtcaagcagatgaagatcatccacgaggatggctactccgaggaggaatgccggcagtaccgggcggttgtctacagcaacaccatccagtccatcatggccattgtcaaagccatgggcaacctgcagatcgactttgccgacccctccagagcggacgacgccaggcagctatttgcactgtcctgcaccgccgaggagcaaggcgtgctccctgatgacctgtccggcgtcatccggaggctctgggctgaccatggtgtgcaagnctgctttgggcgctcaaagggataccagctcaaacnttcnactngtttactactgaacnaacctggancgtattgcacaaantggctacatccccacaca

SEQ ID NO: 21706 - DNA, 737 bp, Homo sapiens
  misc_feature (1)...(737): n = a,t,c or g
gtccaggtgccccaagatgatgatgcccgcacggacgccgtggacagcgtagttcgggatatccagaacactcagtgcctgctcaacgtggaacacctgagtgccggctgcccccatgtcaccctgcagtttgcagattccaagggcgatgtggggctgggcttggtgaaggaagggctggtcatggtggaggtgcgcaaggagaaacagttccagaaagtgatcacagaatacctgaatgcccaagagtcagccaagagcgccaggctgaacctgtggcgctatggagactttcgagctgatgatgcagacgaatttggctacagccgctaaggaggggatcgggtttggcccccagccccgctcacgccagtccctcttcctctgccgggagggtgttttcaactccaaaccccagagaggggttgtagattgggtccagctttgcttcagtgtgtggaaatgtctcgtggggtggcatcggggctgcggggtggggaccccaaggctttctggggcagacccttgtcctctgggatgatgggcactgctatccacagtctctgccagttggttttatttggaggtttgtgggctttttttaaaaaaaaaaaagtcctcaaatcaggaagaaacatcaaagactatgtccaatggagggagtaatcctaaaaccaaggtggccccaactggaactgctctatccaaaatggccnccgtccaaatctcgtcaaatt

SEQ ID NO: 21707 - DNA, 661 bp, Homo sapiens
agctgcaccactagaaagatggcggagcaagagcaaagaaaaatccctttggttccagaaaatctcctgaaaaagaggaaggcttatcaagccctcaaagccacccaggcaaagcaggcacttttggcaaagaaggagcagaagaaaggaaaagggctcaggtttaagcgactggaatcattcctacatgattcctggcggcagaaacgtgacaaggtgcgtctcagacgactagaagtgaaacctcatgccttggaattgccagataaacattccttggcctttgttgtacgcatcgaaaggattgacggcgtgagtttactggtgcagagaaccattgcaagacttcgcctaaagaaaatttttagtggtgtctttgtaaaagtcaccccccagaatctaaaaatgctgcgtatagtggaaccttatgtgacctggggatttccaaatctgaagtctgtccgagaactcattttgaaacgtggacaagccaaggtcaagaataagaccatccctctgacagacaatacagtgattgaggagcacctggggaagtttggcgtcatttgcttggaagacctcattcatgaaattgccttcccagggaagcatttccaggagatctcatggttcttgtgccctttccacctctcagtggccg

SEQ ID NO: 21708 - DNA, 553 bp, Homo sapiens
  misc_feature (1)...(553): n = a,t,c or g
tntntngtnnattctnnaancccttttnatgaccactaatttaatacgactcactatagggaatttggccctcgaggccaagaattcggcacgagccaactctgggttggccccaaatccaactaatgccaccaccaaggtggctggtggtgccctgcagtcaacagccagtctcttcgtggtctcactctctcttctgcatctctactcttaagagactcaggccaagaaacgtcttctaaatttccccatcttctaaacccaatccaaatggcgtctggaagtccaatgtggcaaggaaaaacaggtcttcatcgaatctactaattccacaccttttattgacacagaaaatgttgagaatcccaaatttgattgatttgaagaacatgtgagaggtttgactagatgatggatgccaatattaaatctgctggagtttcatgtacaagatgaaggagaggcaacatccaaaatagttaagacatgatttccttgaatgtggcttgagaaatatggacacttaatactaccttgaaaataagaatagaaa

SEQ ID NO: 21709 - DNA, 476 bp, Homo sapiens
caagcacccagcatcctgctagacgcgccgcgcaccgacggaggggacatgggcagagcaatggtggccaggctcgggctggggctgctgctgctggcactgctcctacccacgcagatttattccagtgaaacaacaactggaacttcaagtaactcctcccagagtacttccaactctgggttggccccaaatccaactaatgccaccaccaaggcggctggtggtgccctgcagtcaacagccagtctcttcgtggtctcactctctcttctgcatctctactcttaagagactcaggccaagaaacgtcttctaaatttccccatcttctaaacccaatccaaatggcgtctggaagtccaatgtggcaaggaaaaacaggtcttcatcgaatctactaattccacaccttttattgacacagaaaatgttgagaatcccaaatttgattgatttgaagaacatgtgagagg

SEQ ID NO: 21710 - DNA, 567 bp, Homo sapiens
gcagcgacgcaagatggcagccaccacgggctcgggagtaaaagtccctcgcaatttccgactgttggaagaacttgaagaaggacaaaaaggagtaggcgacggtacagttagctggggccttgaagatgatgaagatatgacacttacaaggtggacaggcatgattattgggccaccaaggacaaattatgaaaacagaatatatagcctgaaagtagaatgtggacctaaatacccagaagctcctccgtcagttagatttgtaacaaaaattaatatgaatggagtaaatagttctaatggagtggtggacccaagagccatatcagtgctagcaaaatggcagaattcatatagcatcaaagttgtcctgcaagagcttcggcgcctaatgatgtctaaagaaaatatgaaactccctcagccgcccgaaggacagtgttacagcaattaatcaaaaagaaaaaccacaggcccttccccttccccccaattcgatttaatcagtcttcattttccacagtagtaaattttctagatacgtcttgtagtcctcaaagtacc

SEQ ID NO: 21711 - DNA, 538 bp, Homo sapiens
accttttgactgattacgaatttaatacgactcactatagggaatttggccctcgaggccaagaattcggcacgagccagcaggagacagtgaactggtctgcgacaagcagggcagatgcagcagtttcttctgcagggtcccagttgtggtggtggctgccctttcaagaagctgggtcccacgggccagcaggggctctcaggcagagcctgaatgtgctttcgtcttctcttccagatctaaccatgagctaccctggctatcccccgcccccaggtggctacccaccagctgcaccaggtggtggtccctggggaggtgctgcctaccctcctccgcccagcatgccccccatcgggctggataacgtggccacctatgcggggcagttcaaccaggactatctctcgggaatggcggcaacatgtctgggacatttggaggagccaacatgcccaacctgtaccctggggcccctggggctggctacccaccagtgcccctgcggctttgggcagccccctctgccacacct

SEQ ID NO: 21712 - DNA, 388 bp, Homo sapiens
  misc_feature (1)...(388): n = a,t,c or g
gtaaacagataatcactatttatctgtttatctatttatcattatttatgtttttcagtcagttgcacaatcttttttttttgaaanggagtctnacactgtcgcccaggctgnagtgcagnggngccatntnggntnantgcaagctntgcctcctgagtagctggnactacaggancctgccaccacncccggntaatttttngaatttttagtaaaaacggggtttcaccatgttanccaggatggtctnaatctnttgaacttgngatccgcccgcctnggcctcccaaagngcttggattacaggcgtgagccaccgngcccggcctgcacagccttttaaaaggtatncgattcattaccactcgatagacataaatgattg

SEQ ID NO: 21713 - DNA, 434 bp, Homo sapiens
  misc_feature (1)...(434): n = a,t,c or g
cgcccgcaggtccggtccngaattcccgggcggacgcgtggggaaagtcaaattcactgcaggaaggagcgtgtcagaagagatcagatcaccttattaatacagaatctgaagcagtcaatttaagtaaagtcaaagtcttcacaaaatcagctcatggtgggctgcaaaggggcaacaagaaaatcccagagtcatctaatgtaggaggatcaagaaaaaagacatgtccattctataagaaaatacctggaaccggctttacagttgatgcctttcagtatggcgtggttgaaggttgcacagcctattttctcacacattttcattctgatcattatgctggattgtctaaacacttcacatttccagtttattgtagtgagataactggcaatttgttgaagaacaagcttcatgtgcaagaacaatat

SEQ ID NO: 21714 - DNA, 1114 bp, Homo sapiens
gccttcactgatacgaatttaatacgactcactatagggaatttggccctcgaggccaagaattcggcacgagtcttaacatacttgcagctaaaactaaatattgctgcttggggacctccttctagccttaaatttcagctcatcaccttcacctgccttggtcatggctctgctattctccttgatccttgccatttgcaccagacctggattcctagcgtctccatctggagtgcggctggtggggggcctccaccgctgtgaagggcgggtggaggtggaacagaaaggccagtggggcaccgtgtgtgatgacggctgggacattaaggacgtggctgtgttgtgccgggagctgggctgtggagctgccagcggaacccctagtggtattttgtatgagccaccagcagaaaaagagcaaaaggtcctcatccaatcagtcagttgcacaggaacagaagatacattggctcagtgtgagcaagaagaagtttatgattgttcacatgatgaagatgctggggcatcgtgtgagaacccagagagctctttctccccagtcccagagggtgtcaggctggctgacggccctgggcattgcaagggacgcgtggaagtgaagcaccagaaccagtggtataccgtgtgccagacaggctggagcctccgggccgcaaaggtggtgtgccggcagctgggatgtgggagggctgtactgactcaaaaacgctgcaacaagcatgcctatggccgaaaacccatctggctgagccagatgtcatgctcaggacgagaagcaacccttcaggattgcccttctgggccttgggggaagaacacctgcaaccatgatgaagacacgtgggtcgaatgtgaaggtaatgcctgtgcgtccaaagactaggtttattcatggatttaattatgtggaatctcattcaaacagtatttacaaagagctactaacgcaccaaaggaccattgcaaacttatttaactgggcagataattaattcctttgtttttcaaatggagataataatacccaactttgtatctgaaaatgcttttaatattaagcactatattaacatgaactctcattatt

SEQ ID NO: 21715 - DNA, 609 bp, Homo sapiens
cgcgccatggtgaaggtgacgttcaactccgctctggcccagaaggaggccaagaaggacgagcccaagagcggcgaggaggcgctcatcatcccccccgacgccgtcgcggtggactgcaaggacccagatgatgtggtaccagttggccaaagaagagcctggtgttggtgcatgtgctttggactagcatttatgcttgcaggtgttattctaggaggagcatacttgtacaaatattttgcacttcaaccagatgacgtgtactactgtggaataaagtacatcaaagatgatgtcatcttaaatgagccctctgcagatgccccagctgctctctaccagacaattgaagaaaatattaaaatctttgaagaagaagaagttgaatttatcagtgtgcctgtcccagagtttgcagatagtgatcctgccaacattgttcatgactttaacaagaaacttacagcctatttagatcttaacctggataagtgctatgtgatccctctgaacacttccattgttatgccacccagaaacctactggagttacttattaacatcaaggctggaacctatttgctcagtcctatctgattcatgaag

SEQ ID NO: 21716 - DNA, 1258 bp, Homo sapiens
agagaagccctacaaatgtgaagaatgtggcaaagcctttaggcagtcctatgtgaagaatgtggcaaagcttttaacaagtcctcacaccttactagacataagagagttcatactggagaaaaaccctaccagtgtgaaaaatgtggcaaagcttctaaccaatcctcaaaccttactgaacataagaatattcatactgaagagaaaccatacaaatgtgaagaatgtgggaaagcctttaaccagttctcaaaccttactacacataaaagaattcatactggagagaaaccctacaaatgtgaagaatgtggcaaagcctttccttatagttcacaccttactacacataagataattcacactggagagaaaccctacaaatgtgaagaatgtggcaaagcttttagccaatcctcaacctgtgaagaatgtggcaaagctttcaatcagagctcaaatcttactcagcataagataattcatactggagagaaaccctacaaatgtgaagaatgtgataagagcttcagtcaggccatagattttcgggtacatcagagaatccacactggagaaaggccttatgagtgtaaggaatgtgggaaagccttcagtcagtcctctggtcttcaatcccatcagagaattcacactggagaaaggccatacgagtgcagcgaatgtgggaaatccttcagatggaactctaacctcgtcatacatcagagaattcacactggagagaaaccgtacgattgcactcactgtggaaaagccttcagccaaagctatcagttagttgcacataaaagaactcacactggagaaaagccctatgaatgtaacgagtgtggaaaggccttcagttactccaattcgtttcagttacatgaacgaactcacactggagagaaaccctatgaatgcaagcaatgtgggaaagccttcagttcttccagttcctttcgaaatcatgaaagaaggcatgcggatgagagactgtcagcataaggaatgtgggaaaacctaaaggtgtccctgttctctctgaagacatgaaaactcactggggagaaaccctatgaatgtaaaaatgtggaagcaactttgtatctcaggtcttaatgaacacatatgaattcacagtggagaagaccctgcatcagggaatgtggaaatgactttgctgaattctcaagccttaccaaacacatcagaaatctcactggagagaaaccgtatgaatgtagag

SEQ ID NO: 21717 - DNA, 520 bp, Homo sapiens
  misc_feature (1)...(520): n = a,t,c or g
tgtngnncctacngaanctcgttctacgacannattacgaatttaatacgactcactatagggaatttggccctcgaggccaagaattcggcacgagcaggaggctgaggcaggagaatcgcttaaacgcgggaggcggaggttgcagtgagctgagatcatgccactgcactccagcctgggcgacagagcaagactccgtgtcaaaaaaaaaatgaataaagacacagagagtactttcagtatctgcaaagtctaagtgaatctaaatatttattctctatctttactatgaacaagacttttataaagttgttttcagttactcatttttctccctggcacatcccgccacaaagaaaaaagaaattacacgcaggaaagcattcggtgataactttttcatgatggtagatttcagggtgtatgtctgcactattcatttatcttgggtcaggtctacacaggacantacctaaaagaattggagggngaatcctccagngggcctgaaaaaaac

SEQ ID NO: 21718 - DNA, 728 bp, Homo sapiens
gcctcagagcaagagatgaccttatcacagacctactaaatgaagcaaaacagagactcagcaaggtggtaaaagatacaaccaggtaccaagtgctgctggatggactggttctccagggtttgtaccagttgctggagccccgaatgattgttcgttgcaggaaacaagatttccctctggtaaaggctgcagtgcagaaggcaattcctatgtacaaaattgccaccaaaaacgatgttgatgtccaaattgaccaggagtcctacctgcctgaagacatagctggtggagttgagatctataatggagatcgtaaaataaaggtttccaacaccctggaaagccggctggatctcatagcccagcagatgatgccagaagtccggggagccttgtttggtgcaaatgccaacaggaagtttttggactaagccttcaggaggtggagctcgtcgtcagctctcctgctgtgatgtggaagcttctgatatttgaagaaacacgaatgtctctgtagcttcctcttcactgccccagtattgctctgtatttatcagcgatgcccctctgtcactcatgccttgcctaattgtttcacaatggtggaaggcttcatgtaatatgatcaggacccacctccagttcttctgaaagtgtgacagtgtccagccggttctgcagcactaggggagggggcagatggtggttgcatgggcttcctgggt

SEQ ID NO: 21719 - DNA, 415 bp, Homo sapiens
  misc_feature (1)...(415): n = a,t,c or g
gggttaggaggagctaggctgccatcgggccggtgcagatacggggttgctcttttgctcataagaggggcttcgctggcagtctgaacggcaagcttgagcaacgcggtaaaaatattgcttcggtgggtgacgcggtacagctgcccaagggcgttcgtaacgggaatgccgaagcgtgggaaaaagggagcggtggcggaagacggggatgagctcaggacagagccagaggccaagaanagtaagacggccgcaaagaaaaatgacaaagaggcagcaggagagggcccagccctgtatgaggaccccccagatcagaaaacctcacccagtggcaaacctgccacactcaagatctgctcttggaatgtggatgggcttcgagcctggattaanaanaaaggattagatt

SEQ ID NO: 21720 - DNA, 745 bp, Homo sapiens
cccacgcgtccgaggagctaggctgccatcgggccggtgcagatacggggttgctcttttgctcataagaggggcttcgctggcagtctgaacggcaagcttgagtcaggacccttaattaagatcctcaattggctggagggcagatctcgcgagtagggcaacgcggtaaaaatattgcttcggtgggtgacgcggtacagctgcccaagggcgttcgtaacgggaatgccgaagcgtgggaaaaagggagcggtggcggaagacggggatgagctcaggacagagccagaggccaagaagagtaagacggccgcaaagaaaaatgacaaagaggcagcaggagagggcccagccctgtatgaggaccccccagatcagaaaacctcacccagtggcaaacctgccacactcaagatctgctcttggaatgtggatgggcttcgagcctggattaagaagaaaggattagattgggtaaaggaagaagccccagatatactgtgccttcaagagaccaaatgttcagagaacaaactaccagctgaacttcaggagctgcctggactctctcatcaatactggtcagctccttcggacaaggaagggtacagtggccgtgggcctgctttcccgccagtgcccactcaaagtttcttacggcataggcgaggagggagcatgatcaggaaggccgggtgattgtggctgaatttgactcgtttgtgctggtaacagcatatgt

SEQ ID NO: 21721 - DNA, 654 bp, Homo sapiens
  misc_feature (1)...(654): n = a,t,c or g
gcggcggtgaacggggcggcaggcttctcgagctccgggcccgcggcaacctcgggcgctgttctgcaggccgcgaccggcatgtacgagcaactcaagggcgagtggaaccgtaaaagccccaatcttagcaagtgcggggaagagctgggtcgactcaagctagttcttctggagctcaacttcttgccaaccacagggaccaagctgaccaaacagcagctaattctggcccgtgacatactggagagcgctacatggcccagctcaaatgctactactttgattacaaggagcagctccccgagtcagcctatatgcaccagctcttgggcctcaacctcctcttcctgctgtcccaaaaccgggtggctgagttccacacggagttggagcggctgcctgccaaggacatacagaccaatgtctacatcaagcacccagtgtccctggagcaatacctgatggagggcagctacaacaaagtgttcctggccaagggtaacatccccgccgagagctacaccttcttcattgacatcctgctcgacactatcagggatgagatcgctgggtgcatcgagaaggcctacgagaaaatccttttcctgaggccacccggatcctcttcttnaacacacccaaaaagatgac

SEQ ID NO: 21722 - DNA, 469 bp, Homo sapiens
  misc_feature (1)...(469): n = a,t,c or g
tttgaancctatcagctatgacatgattacgaatttaatacgactcactatagggaatttggccctcgaggccaagaattcggcacgagaggccgtgaagtactacaccctagaggagattcagaagcacaaccacagcaagagcacctggctgatcctgcaccacaaggtgtacgatttgaccaaatttctggaagagcatcctggtggggaagaagttttaagggaacaagctggaggtgacgctactgagaactttgaggatgtcgggcactctacagatgccagggaaatgtccaaaacattcatcattggggagctccatccagatgacagaccaaagttaaacaagcctccgttggtggaccaactgggtgatccctgcatctctgcagtggccgtcgccttgatgtatcgcctatacatggcagaggactgaacacctcctcagaagtcagcgcaggaagag

SEQ ID NO: 21723 - DNA, 699 bp, Homo sapiens
gcgcggcgaaccgagatggcagagcagtcggacgaggccgtgaagtactacaccctagaggagattcagaagcacaaccacagcaagagcacctggctgatcctgcaccacaaggtgtacgatttgaccaaatttctggaagagcatcctggtggggaagaagttttaagggaacaagctggaggtgacgctactgagaactttgaggatgtcgggcactctacagatgccagggaaatgtccaaaacattcatcattggggagctccatccagatgacagaccaaagttaaacaagcctccggaaactcttatcactactattgattctagttccagttggtggaccaactgggtgatccctgccatctctgcagtggccgtcgccttgatgtatcgcctatacatggcagaggactgaacacctcctcagaagtcagcgcaggaagagcctgctttggacacgggagaaaagaagccattgctaactacttcaactgacagaaaccttcacttgaaaacaatgattttaatatatctctttctttttcttccgacattagaaacaaaacaaaaagaactgtcctttctgcgctcaaatttttcgagtgtgcctttttattcatctactttatttgatgtttccttaatgtgtaatttacttattataagcatgatcttttaaaaataaaaaaaaaaa

SEQ ID NO: 21724 - DNA, 418 bp, Homo sapiens
ctcatggatgaggcccgccgggatcgtggctgcacgccactgcaagaccaacatcgtcacagcttccgtggacgccattaattttcatgacaagatcagaaaaggctgcgtcatcaccatctcgggacgcatgaccttcacgagcaataagtccatggagatcgaggtgttggtggacgccgaccctgttgtggacagctctcagaagcgctaccgggccgccagtgccttcttcacctacgtgtcgctgagccaggaaggcaggtcgctgcctgtgccccagctggtgcccgagaccggggacgagaagaagcgctttgaggaaggcaaagggcggtacctgcagatgaaggcgaagcgacagggccacgcggagcctcagccctagactccctcctcctgcactggtgcctcgagt

SEQ ID NO: 21725 - DNA, 366 bp, Homo sapiens
cccacgcgttcgctagttctagatcgcgagcggccgctctagaggatccctcgaggggcccaagcttacgcgtgcatgcgacgtcatagctctctccctatagtgagtcgtattataagctaggcactggccgtcgttttacaacgtcgtgactgggagatctgctagcttgggatctttgtgaaggaaccttacttctgtggtgtgacataattggacaaactacctacagagatttaaagctctaaggtaaatataaaatttttaagtgtataatgtgttaaactagctgcatatgcctgctgcttgagagttttgcttactgagtatgatttatgaaaatattatacacaggagcttaggatt

SEQ ID NO: 21726 - DNA, 441 bp, Homo sapiens
  misc_feature (1)...(441): n = a,t,c or g
ggnnaacagctatgacatgattacgaatttaatacgactcactatagggaatttggccctcgaggccaagaattcggcacgagtttttttttagtagagatggggttttgccatgttggccaggatggtctcgatcccccgaccttgtgatccatccaccttggcctcccaaagtgttgggattacaggtgtgagccaccgtgcctggcctgaaggtcatttttataaagatctctccatgtcttagatttgattcttcctttgaatatttttctcattgacatttgaaagcacctgaccttatataaaatgaacaattttcataactccataaaaggagaattatggcatcatctactatttctttctcttgtctcataaatctaaaccatcaacctgcttatttttgtatactgtcacactgtgtattccctgcattga

SEQ ID NO: 21727 - DNA, 493 bp, Homo sapiens
gcgcagctgactttgtcttctccgcacgactgttacagaggtctccagagccttctctctcctgtgcaaaatggcaactcttaaggaaaaactcattgcaccagttgcggaagaagaggcaacagttccaaacaataagatcactgtagtgggtgttggacaagttggtatggcgtgtgctatcagcattctgggaaagtctctggctgatgaacttgctcttgtggatgttttggaagataagcttaaaggagaaatgatggatctgcagcatgggagcttatttcttcagacacctaaaattgtggcagataaagattattctgtgaccgccaattctaagattgtagtggtaactgcaggagtccgtcagcaagagggagaaagccgtcttaatttggtccagcgtaacgtgaacatctttaaattcatcattcctaatgttgtaaaatacagcccgaactgcaagttgcttattgtttcaaatccagag

SEQ ID NO: 21728 - DNA, 335 bp, Homo sapiens
tcttcggataaattctgccattttcatttcacttcctgaaagtcagggttggcttgtgaaaagttgttaaacaacatgctaaatgtgaaatgttaaccctctaaactttccctgttcagagcatcagatgaggacttcattgggttttatagtggctgatttttggtagtccattgaagaagagagtttgaaagttgtatactgttaatgactgtctgcccatgtcctgcctgaaataccatgattgtttatggaaagtatctttaataaagctgggtcgacgcggccgcgaattccagatctatgaatcgtagatactgaaaaaccccgcaagt

SEQ ID NO: 21729 - DNA, 691 bp, Homo sapiens
ttttttttttttccaagccaaactgtatccagctttattaaagatactttccataaacaatcatggtatttcaggcaggacatgggcagacaatcgttaacagtatacaacaactttcaaactcccttcttcaatggactaccaaaaatcagaaagccactataaaacccaatgaagtcttcatctggactttccagtgatgccactgagatggcacctgtcaaaagagcagtggttccatttctagattgtgggacttcagataaattctgccattttcatttcacttcctgaaagtcagggtcggcttgtgaaaagttgttaaacaacatgctaaatgtgaaatgtcaaccctcactctaaactttccctgttcagagcatcagatgaagacttcattgggttttatagtggctttctgatttttggtagtccattgaagaagggagtttgaaagttgttgtatactgttaacgattgtctgcccatgtcctgcctgaaataccatgattgtttatggaaagtatctttaataaagctggatacagtttgaaaaaaaaacgcggccgcgtcgactttggtttttggagatggttttctcgatgggggctgggagggtataatgtcgacgcggccgcgaattccagatctatgaatcgtagatactgaaaaaccccgcaagttcacttca

SEQ ID NO: 21730 - DNA, 306 bp, Homo sapiens
  misc_feature (1)...(306): n = a,t,c or g
gcctttgcctaagctgttttagtagggtttagggacagggttggggcaaggaaggggcactgcagcctgttgaaagtggataaggaatgcaaagcagagaggaagtggaagtagaggcaggcggggtaccctgctgtttcaagcctggccgtgtgaggtggagagaaaggaagtagctaggatatatacacattcatctgttctttgtctctctcctcactagaaaataagttgcctgagggcaggaactttatctccagagtaaaaaattgctcctgcctgtantangcactcancaaatatttg

SEQ ID NO: 21731 - DNA, 384 bp, Homo sapiens
gccctttgcctaagctgttctagtagggtatagggacagggttggggcaaggaaggggcactgcagcctgttgaaagtggataaggaatgcaaagcagagaggaagtggaagtagaggcaggcggggtaccctgctgtttcaagcctggccgtgtgaggtggagagaaaggaagtagctaggatatatacacattcatctgttctttgtctctctcctcactagaaaataagttgcctgagggcaggaacttagttttattcactgctttatctccagagtaaaaaattgctcctggcctgtagtaggcactcaacaaatatttgatggccaaacaaatgaattatgttaagaaggtagagacttgagtgtgttcatttgttgg

SEQ ID NO: 21732 - DNA, 696 bp, Homo sapiens
  misc_feature (1)...(696): n = a,t,c or g
gcttgcaccaggcccagggccatatctcattccgccccagctactgagggaggggacagactgctggaggacaatttctcctagttaccactaggggttacatggctactcaaaatgaaagataaattgccaggcctgttgcaatcttttttttgagatgggagtcttgctctgtcgcccaggctggagtgcagaggtgcgatctcagctcactgcaacctccacctcccgggtcaagcaattctcctgcctcagcttcccgagtagctggaattacaggtgcccaccaccatgcctggctaatttttgtatttttagtggagacggggtttcaccatgttggccaggctggtcttgaacacctgacctcaaatgatccgcccacctcggcctcccaaagtgttgggattacaggcgtgagccacctcaccaggccccgttgcaatcttactccacttcgttttcacagcagtcccgggacatgcccattattaggcctatttgatagatgatactgaggctcagagtcgggggtcacaagccaaagccacaccgctagaagggctcaggacccagcccagctcccgtcctcttggtggcatcaagcttgtgtgatatgaggtcttatgtctgctcatgacagccttaaaagcaataaacagatacaacttncagcaacttccacgcagtgnaagg

SEQ ID NO: 21733 - DNA, 537 bp, Homo sapiens
ttatgacatgattacgaatttaatacgactcactatagggaatttggccctcgaggccaagaattcggcacgagatcttggtggaaaaggctcaggatgagatcccagcactgtccgtgtcccggccccagaccggcctgtccttcctgggccctgagcctgaggacctggaggacctgtacagccgctacaagaagctgcagcaagagctggagttcctggaggtgcaggaggaatacatcaaagatgagcaaaagaacctgaaaaaggaatttctccatgcccaggaggaggtgaagcgaatccaaagcatcccgctggtcatcggacaatttctggaggctgtggatcagaatacagccatcgtgggctctaccacaggctccaactattatgtgcgcatcctgagcaccatcgatcgggagctgctcaagcccaacgcctcagtggccctccacaagcacagcaatgcactggtggacgtgctgcccccgatgccgacagcagcatcatgatgctcacctcagaccagaagcc

SEQ ID NO: 21734 - DNA, 505 bp, Homo sapiens
tatgacatgattacgaatttaatacgactcactatagggaatttggccctcgaggccaagaattcggcacgagcatgccctagctgctcatgtttcccacctggagaatgtgtcagaggaagaaatgaacagactcctgggaatagtattggatgtggaatatctctttacctgtgtccacaaggaagaagatgcagataccaaacaagtttatttctatctatttaagctcttgagaaagtctattttacaaagaggaaaacctgtggttgaaggctctttggaaaagaaacccccatttgaaaaacctagcattgaacagggtgtgaataactttgtgcagtacaaatttagtcacctgccagcaaaagaaaggcaaacaatagttgagttggcaaaaatgttcctaaaccgcatcaactattggcatctggaggcaccatctcaacgaagactgcgatctcccaatgatgatatttcttggataccaagagaactacccagg

SEQ ID NO: 21735 - DNA, 535 bp, Homo sapiens
  misc_feature (1)...(535): n = a,t,c or g
ggatcaagctaatgatgatatggaaccttgagttcgaattgattggtttacttggaaaaaaacatgtttgaaaattgcaaaagttccgccaggtgcagtggctcacgcctgtaatcccagcactttgggaggccgaggcgggcggatcacgaggtcaggagattgagaccatcctggctaacacggtgaaaccccgtctctactaaaaatacaaaaaattagccgggtgtggtggcgggcgcctgtaatcccagctactcaggaggctgaggcaggagaatggcatgaacccgggaggcggagcttgcagtgagctgagatcatgccacaacaaacaaacgaaaacatcaacaccccatcacctccagaagcagaaccctccagctgcctcccactgtacccagaagaaaacccaaactgctcccttgtggcttcctgcgttattaggcctctcgtgccgaattcttggcctcgagggccaaattccctatagtgagtcgtattaaattcgtaatcatgtnaancgganntncaa

SEQ ID NO: 21736 - DNA, 525 bp, Homo sapiens
ggagctagggagtttatttgatcaccacgtccagagggcggtatgcgacacacgggccaaatatcgagagggacgacggcctcgtgctgtgaaggtatatacaatcaatttggaatctcagtacttattaatacaaggagttcctgctgtgggagtcatgaaggaattagttgagcgattcgctttatatggtgcaattgaacagtacaatgctctagatgaatacccagcagaagactttactgaagtttatcttattaaatttatgaacttacaaagtgcaaggacagccaagagaaaaatggatgaacagagtttcttcggtggattgcttcatgtgtgctatgctccagaatttgaaacagttgaagaaactggaaaaaaactacaaatgcggaaggcatatgtagtaaaaactactgaaaataaagaccattacgtgacaaagaagaaattggttacagagcataaagacacagaggattttagaccagacttccctcagagatgctggattttgaaagc

SEQ ID NO: 21737 - DNA, 475 bp, Homo sapiens
gagtaccagcgcatatcatctcatggggtccagagtggagtccaggcttctctgaaaccatggctgatcatatttccatagccaaggaggtgggactccctggagctatctgtggtcttagggaaggatccagacatacacggctttggggtacaagctgtgatcactgatcaataaattatctctagattggtccttgtgaggggagttttaagaatccagaacatcttgctcttgatcagcacatccaaaaacaccaagacaaacatccagtggagcagaacctctcctgcctcgggagttctgaccgggttccccagcagggtgttaagcctctgtctctggccctaccagcatccaggttccactttcctaggagagagtggagatgggaagacagggaaaggaaggcagcaggaggccacaagcccaccaggtcttcatgtcaagagagggagtaacatgtcttctcatt

SEQ ID NO: 21738 - DNA, 458 bp, Homo sapiens
  misc_feature (1)...(458): n = a,t,c or g
natgactgtgangtgattacgaatttaatacgactcactatagggaatttggccctcgaggccaagaattcggcacgagcgccggcttccagacaccaatgggaatcccaatggggaagtcgatgctggtgcttctcaccttcttggccttcgcctcgtgctgcattgctgcttaccgccccagtgagaccctgtgcggcggggagctggtggacaccctccagttcgtctgtggggaccgcggcttctacttcagcaggcccgcaagccgtgtgagccgtcgcagccgtggcatcgttgaggagtgctgtttccgcagctgtgacctggccctcctggagacgtactgtgctacccccgccaagtccgagagggacgtgtcgacccctccgaccgtgcttccggacaacttccccagataccccgtgggcaagttcttcaatatgacacctggaagc

SEQ ID NO: 21739 - DNA, 432 bp, Homo sapiens
  misc_feature (1)...(432): n = a,t,c or g
gaanccctttgaaancnntatgactgattacgaatttaatacgactcactatagggaatttggccctcgaggccaagaattcggcacgagccaatggctgcaaaatcgcaacccaacattcccaaagccaagagtctagatggcgtcaccaatgacagaaccgcatctcaagggcagtggggccgtgcctgggaggtggactggttttcactggcgagcgtcatcttcctactgctgttcgcccccttcatcgtctactacttcatcatggcttgtgaccaatacagctgcgccctgaccggccctgtggtggacatcgtcaccggacatgctcggctctcggacatctgggccaagactccacctataacgaggaaagccgcccagctctataccttgtgggtcaccttccaggtgcttctgtacacgtct

SEQ ID NO: 21740 - DNA, 608 bp, Homo sapiens
ggaactatgttcttaaatgggattatacatatgcaaacatgacctttcaagtttcagtggctccacgcctttttaaaaaggaatcctggaaaccatttgtataaatggaaacaaatacctgactgtgaaaatgtcaaaactacccagtgtgtctttcctcaaaacgttttccaaaaaggaatttaccttctccgcgtacaagcatctgatggaaataacacatctttttggtctgaagagataaagtttgatactgaaatacaagctttcctacttcctccagtctttaacattagatcccttagtgattcattccatatctatatcggtgctccaaaacagtctggaaacacgcctgtgatccaggattatccactgatttatgaaattattttttgggaaaacacttcaaatgctgagagaaaaattatcgagaaaaaaactgatgttacagttcctaatttgaaaccactgactgtatattgtgtgaaagccagagcacacaccatggatgaaaagctgaataaaagcagtgtttttagtgacgctgtatgtgagaaaacaaaaccaggaaatacctctaaaatttggcttatagttggaatttg

SEQ ID NO: 21741 - DNA, 642 bp, Homo sapiens
  misc_feature (1)...(642): n = a,t,c or g
aagcgctaggtccagccctgctgggagttttctgccacacagatttgcggaagaacctgaccgtggacgagggcaccatgaaggtagaggtgctgcctgccctgaccgacaactacatgtacctggtcattgatgatgagaccaaggaggctgccattgtggatccggtgcagccccagaaggtcgtggacgcggcgagaaagcacggggtgaaactgaccacagtgctcaccacccaccaccactgggaccatgctggcgggaatgagaaactggtcaagctggagtcgggactgaaggtgtacgggggtgacgaccgtatcggggccctgactcacaagatcactcacctgtccacactgcaggtggggtctctgaacgtcaagtgcctggcgaccccgtgccacacttcaggacacatttgttacttcgtgagcaagcccggaggctcggagccccctgccgtgttcacaggtgacaccttgtttgtggctggctgcgggaagttctatgaagggactgcggatgagatgtgttaagctctgctggaggtcttgggccggctccccccggacacaaaagtctactgtggcacgatacaccatcaacaactcaagtttcacgccacgtggagcccggnat

SEQ ID NO: 21742 - DNA, 971 bp, Homo sapiens
  misc_feature (1)...(971): n = a,t,c or g
gagacactccaggacctgctcacttcggactcacttagccacagcgatgtcatgatgacacagtcggaccccttgatgtctcaggccagcaccgctgtgtctgcccagaattcccgccggaacgtgatgcttcgcaatgatccgatgatgtcctttgctgcccagcctaaccagggaagtttggtcaatcagaacttgctccaccaccagcaccaaacccagggcgctcttggtggcagccgtgccttgtcgaattctgtcagcaacatgggcttgagtgagtccagcagccttgggtcagccaaacaccagcagcagtctcctgtcagccagtctatgcaaaccctctcggactctctctcaggctcctccttgtactcaactagtgcaaacctgcccgtcatgggccatgagaagttccccagcgacttggacctggacatgttcaatgggagcttggaatgtgacatggagtccattatccgtagtgaactcatggtgttgttggtttgaacgtggggaacttcactggtgctaagcaggcctcatctcagagctgggtgccaggctgaaggatcactgaggaaggggaagtgggcaaagcagaccctcaaactgacacaagacctacagagaaaaccctttgccaaatctgctctcagcaagtggacagtgataccgtttacagcttaacacctttgtgaatcccacgccattttcctaacccagcagagactgttaatggccccttaccctgggtgaagcacttacccttggaacagaactctaaaaagtatgcaaaatcttccttgtacagggtggtgagccgcctgccagtggaggacagcacccctcagcaccacccaccctcattcagagcacaccgtgagcccccgtcggccattctgtggtgttttaatattgcgatggtttatgggacgttttaagtggtgntcttgggttggtttcct

SEQ ID NO: 21743 - DNA, 634 bp, Homo sapiens
atttgataaccgttatgactgattacgaatttaatacgactcactatagggaatttggccctcgaggccaagaattcggcacgagcttgagcctcagggactacactggattagtgtttatgatcccttgactggctcctgagttattgcccatatgtggtcccaggtccatgttcttgagtctgagccccttgtatagtccctgtccttgtgattatatccttatgcctggtaacaaacccctatcccatgtacatgtcctgagtccataccccaaaactgtatcctcatgcccatgctggagaatctatgttcttaagttcttgctgtgtccctatagaggagggggctgatcctgatagcattgaaatggtggccacacgggtgctagagctctccatcccagcttcagctgagcagatccagcacctggcgggtgcgattgcagagcgagtccggagcctggcagatgtggatgcgatcctggcacgtactgtaggagatgtgcgtcgtgccgagcagctactgcaggatgcacggcggggcaaggagctgggctgaggatgagaaacagaaggcagagacagtacaggcagcactggaggaggcccagcggtcacagggtattgcccag

SEQ ID NO: 21744 - DNA, 445 bp, Homo sapiens
  misc_feature (1)...(445): n = a,t,c or g
tttgaanacctgntatgacatgattacgaatttaatacgactcactatagggaatttggccctcgaggccaagaattcggcacgaggggacttccaggcaggcccgcaagccgtgtgagccgtcgcagccgtggcatcgttgaggagtgctgtttccgcagctgtgacctggccctcctggagacgtactgtgctacccccgccaagtccgagagggacgtgtcgacccctccgaccgtgcttccggacaacttccccagataccccgtgggcaagttcttccaatatgacacctggaagcagtccacccagcgcctgcgcaggggcctgcctgccctcctgcgtgcccgccggggtcacgtgctcgccaaggagctcgaggcgttcagggaggccaaacgtcaccgtcccctgattgctctacccacccaagaccccgccacgg

SEQ ID NO: 21745 - DNA, 817 bp, Homo sapiens
  misc_feature (1)...(817): n = a,t,c or g
gcggcacgaggaagtggccattctgcagagcctgcggcatcccgggatcgtgaacctggagtgcatgttcgaccacgcctgagaaagtgtttgtggtgatggagaagctgcatggggacatgttggagatgatcctgtccagtgagaagggccggctgcctgagcgcctcaccaagttcctcatcacccagatcctggtggctttgagacaccttcacttcaagaacattgtccactgtgacttgaaaccagaaaacgtgttgctggcatcagcagacccatttcctcaggtgaagctgtgtgactttggctttgctcgcatcatcggcgagaagtcgttccgccgctcagtggtgggcacgccggcctacctggcacccgaggtgctgctcaaccagggctacaaccgctcgctggacatgtggtcagtgggcgtgatcatgtacgtcagcctcagcggcaccttccctttcaacgaaggatgaggacatcaatgaccagatccagaacgccgccttcatgtacccggccagcccctggagccacatctcagctggagccattgacctcatcaacaacctgctgcaggtgaagatgcgcaaacgctacagcgtggacaaatctctcagccacccctggttacaggagtaccagacgtggctggacctccgagagctggaggggaagatgggagagcgatacatcacgcatgagagtgacgacgcgcgctgggagcagtttgcacaaacatccgntgctggtctggcttgccacggacagggatctcggnggggctttcaccacaggaccacgaatt

SEQ ID NO: 21746 - DNA, 343 bp, Homo sapiens
  misc_feature (1)...(343): n = a,t,c or g
antaacnagctatgacatgattacgaatttaatacgactcactatagggaatttggccctcgaggccaagaattcggcacgagtggacacacatggcaacccctttgaccaggacatctacgggcgcgaggagctgcgcagccccaagctgttctacgccgaccaccccttcatcttcctagtgcgggacacccaaagcggctccctgctattcattgggcgcctggtccggcctaagggtgacaagatgcgagacgagttatagggcctcagggtgcacacaggatggcaggaggcatccaaaggctcctgagacacatgggtgctattggggnnnnnnnng

SEQ ID NO: 21747 - DNA, 576 bp, Homo sapiens
tatgacatgattacgaatttaatacgactcactatagggaatttggccctcgaggccaagaattcggcacgagcgagcgccttgaaaagctgctaaccaaagagcagctgaagatctggatggggaagatgcagaagaaggctgttgccatctccttgcccaagggtgtggtggaggtgacccatgacctgcagaaacacctggctgggctgggcctgactgaggccattgacaagaacaaggccgacttgtcacgcatgtcaggcaagaaggacctgtacctggccagcgtgttccacgccaccgcctttgagttggacacagatggcaacccctttgaccaggacatctacgggcgcgaggagctgcgcagccccaagctgttctacgccgaccaccccttcatcttcctagtgcgggacacccaaagcggctccctgctattcattgggcgcctggtccggcctaagggtgacaagatgcgagacgagttatagggcctcagggtgcacacaggatggcaggaggcatccaaaggctcctgagacacatgggtgctattggggttgggggggg

SEQ ID NO: 21748 - DNA, 849 bp, Homo sapiens
gtggaaaagattcggcaggatgatacgagttcatccatcggtttcctgactcgagttagtggcattggtccatctgctgcaaggaagtttgtagatgaaggaattaaaacactagaagatctcagaaaaaatgaagataaattgaaccatcatcagcgaattgggctgaaatattttggggactttgaaaaaagaattcctcgtgaagagatgttacaaatgcaagatattgtactaaatgaagttaaaaaagtggattctgaatacattgctacagtctgtggcagtttcagaagaggtgcagagtccagtggtgacatggatgttctcctgacccatcccagcttcacttcagaatcaaccaaacagccaaaactgttacatcaggttgtggagcagttccaaagggtcattttatcacagataccctgtcaaagggtgagacaaagttcatgggtgtttgccagcttcccagtaaaaatgatgaaaaagaatatccacacagaagaattgatatcaggttgatacccaaagatcagtattactgtggtgttctctatttcactgggagtgatattttcaataagaatatgagggctcatgccctagaaaagggtttcacaatcaatgagtacaccatccgtcccttgggagtcactggagttgcaggagaacccctgccagtggatagtgaaaaagacatctttgattacatccagtggaaataccgggaacccatggaccggagcgaatgaggcctgtatcctccctggcagacacaacccaataggagtcttaatttatttcttaacctttgctatgtaagggtctttggtgtttttaaatgat

SEQ ID NO: 21749 - DNA, 625 bp, Homo sapiens
  misc_feature (1)...(625): n = a,t,c or g
agtagttgnnncctttganacagcttgaatgatacgaatttaatacactactatagggaatttggccctcgaggccaagaattcggcacgaggggaatcccaatggggaagtcgatgctggtgcttctcaccttcttggccttcgcctcgtgctgcattgctgcttaccgccccagtgagaccctgtgcggcggggagctggtggacaccctccagttcgtctgtggggaccgcggcttctacttcagcaggcccgcaagccgtgtgagccgtcgcagccgtggcatcgttgaggantgctgtttccgcagctgtgacctggccctcctggagacgtactgtgctacccccgccaagtccgagagggacgtgtcgacccctccgaccgtgcttccggacaacttccccagataccccgtgggcaagttcttccaatatgacacctggaagcagtccacccancgcctgcncangggcctgctgncctctgcgtgcccnncgnnnnnacgtgctngccaagganctnnaagngtnanggnagncnannntnancgnncctgnntgnnntnnnnnncnananccnnnnnnngggggnnncnnnnnaaaaatgnnnnnnnnnnggaat

SEQ ID NO: 21750 - DNA, 550 bp, Homo sapiens
  misc_feature (1)...(550): n = a,t,c or g
gtcagattctaaaggccttattctttagttctctactttacagtttcccattgtcctttgaagaacacatttgggcttgctctcagactcgccaacataaatcatcatttacatatcagggcatgtgtgagttccagcagttcactgaaataaaatccctgagccttaaccctcccatctcaaatacagtgaaaatttattttaatgataatgatggtaattttttatttgacactttttataatgctgatgttaaagtcaagaagcatttctctgtaatggaaaaaatgtctcatttttcttcctactgggcggtcagaagttggattttagaaaaaatatattgaatagggattataccgccttccttccttaaacctcataaagcaatggagtaggtggataagaagaaatataaccaatttctggaaacaactttggagntatgatcntnnangntacagatatccaagatngcctaatganttnnatntntcnttncataccctttgactcacntntntggntttcgnnntatnagnnnattgcc

SEQ ID NO: 21751 - DNA, 700 bp, Homo sapiens
  misc_feature (1)...(700): n = a,t,c or g
gggggaaccacccctctgcgaggaaactcacagcccagaggagggcatccacagtttccagtgttactcaggtagaagttgatgaaaacgcttacagatgtggctctggcatgcagatggcagaggacagcaagagcttaaagacacaccagacacagcccggcatccgaagagcgagggacaaagccctttctggtggcaaacggaaagagactttggtgtagagaaggctctgtgtgttaactgatgggagagactgtttgtttataaatgtgtacagttttgttttctcgtaaggggagcatcatagggttactttataccagttgtaacattttcattgtttttggttgttcttttttctttttttaatggcagctaaagatatacagattactgttaaattgcagtccttttttttttaaagatattttcttgaattatttagaacatggtaagcctggtattttttaatcaaacaaaatatttatgaaatgggttttctcttaattctggattcatcatggctttctaataccaattgtaatatttacaatattcaccaaaacttaaaattttgcaaatgctggaattctgccagngtttctttgctaagccttgcatgcaaaatttgaaattttaacattggcacccaaaacctacatggaatgtatgtctggagtatttcaaactttacatt

SEQ ID NO: 21752 - DNA, 450 bp, Homo sapiens
  misc_feature (1)...(450): n = a,t,c or g
nggnnnnnggtgnnnntngngtnatgtcttccatgattacgaatttaatacgactcactatagggaatttggccctcgaggccaagaattcggcacgagaaagcagtgtcaagacagtaaggattcaaaccatttgccaaaaatgagtctaagtgcatttactctcttcctggcattgattggtggtaccagtggccagtactatgattatgattttcccctatcaatttatgggcaatcatcaccaaactgtgcaccagaatgtaactgccctgaaagctacccaagtgccatgtactgtgatgagctgaaattgaaaagtgtaccaatggtgcctcctggaatcaagtatctttaccttaggaataaccagattgaccatattgatgaaaaggcctttgagaatgtaactgatctgcagtggctcattctagatcacaaccttctaga

SEQ ID NO: 21753 - DNA, 502 bp, Homo sapiens
aattcggcacgaggtggattcttgtccatagtgcatctgctttaagaattaacgaaagcagtgtcaagacagtaaggattcaaaccatttgccaaaaatgagtctaagtgcatttactctcttcctggcattgattggtggtaccagtggccagtactatgattatgattttcccctatcaatttatgggcaatcatcaccaaactgtgcaccagaatgtaactgccctgaaagctacccaagtgccatgtactgtgatgagctgaaattgaaaagtgtaccaatggtgcctcctggaatcaagtatctttaccttaggaataaccagattgaccatattgatgaaaaggcctttgagaatgtaactgatctgcagtggctcattctagatcacaaccttctagaaaactccaagataaaagggagagttttctctaaattgaaacaactgaagaagctgcatataaaccacacaacctgacagagtctgtgggcccacttc

SEQ ID NO: 21754 - DNA, 597 bp, Homo sapiens
  misc_feature (1)...(597): n = a,t,c or g
cggacgcgtgggctggcgcacagggcgagggcggctgcggcgcagtctgcagcatggcgtacccggggcatcctggcgccggcggcgggtactacccaggcgggtatggaggggctcccggagggcctgcgtttcccggacaaactcaggatccgctgtatggttactttgctgctgtagctggacaggatgggcagatagatgctgatgaattgcagagatgtctgacacagtctggcattgctggaggatacaaaccttttaacctggagacttgccggcttatggtttcaatgctggatagagatatgtctggcacaatgggtttcaatgaatttaaagaactctgggctgtactgaatggctggagacaacactttatcagttttgacactgacaggagtggaacagtagacccacaagaattgcagaaggccctgacaacaatgggatttaggttgagtccccaggctgtgaattcaattgcaaaacgatacagcaccaatggaaagatcaccttcgacgactacatcgcctgctgcgtcaaactgagggctcttacagacagctttcgaagacgggatactgtcancaagg

SEQ ID NO: 21755 - DNA, 698 bp, Homo sapiens
gccaccgccccaccacctcctgggaccacaccaccaccgcccccaaccacagcagagactagcagcggggccacctccacaaccaccaccacaagtgcacttgcccccgtggccgccatcatccccccgccccccgacgtccagcccgtgattgacaagctggccgagtatgtcgccaggaacggcctgaagttcgagaccagtgttcgtgccaagaatgatcaaagatttgagttcctgcagccgtggcaccagtataatgcttattatgagtttaagaagcagttcttcctccagaaagaagggggcgatagcatgcaggctgtgtctgcaccagaagaggctcccacagactctgctcccgagaagccaagtgatgctggggaggatggcgcgcctgaagacgcagccgaggtgggagcacgggcaggctcaggcgggaagaaggaggcatcgtccagtaagaccgtcccggacgggaagctggtgaaagcttcctttgctccaataagctttgcaatcaaggccaaagaaaatgatctgcttcccctggaaaaaaatcgtgttaagctagatgatgacagtgatgatgatgaagaaagcaaagaaggccaagaaagttctagtagtgctgcaaacactaacccagcagttgccccaccctgtgtagttgttgaggagaagaagcctcaacttac

SEQ ID NO: 21756 - DNA, 494 bp, Homo sapiens
  misc_feature (1)...(494): n = a,t,c or g
tttgaannccatnagctatgacatgattacgaatttaatacgactcactatagggaatttggccctcgaggccaagaattcggcacgaggtgctacccccgccaagtccgagagggacgtgtcgacccctccgaccgtgcttccggacaacttccccagataccccgtgggcaagttcttccaatatgacacctggaagcagtccacccagcgcctgcgcaggggcctgcctgccctcctgcgtgcccgccggggtcacgtgctcgccaaggagctcgaggcgttcagggaggccaaacgtcaccgtcccctgattgctctacccacccaagaccccgcccacgggggcgcccccccagagatggccagcaatcggaagtgagcaaaactgccgcaagtctgcagcccggcgccaccatcctgcagcctcctcctgaccacggacgtttcatcaggtccattccgaaaatctctcggntccacgtccccctggg

SEQ ID NO: 21757 - DNA, 686 bp, Homo sapiens
ggatgactcagaggaggagaaggcagcagccacccccaagaagactgtacctaaaaagcaagttgtggccaaggccccagtgaaagcagctaccacccctacccggaagagttctagcagtgaggattcctccagtgacgaggaagaggagcaaaaaaaacccatgaaaaataaaccaggtccctacagttcagtccccccgccttctgctcccccaccaaagaagtctctgggaacccagcctcccaagaaggctgtggagaagcagcagcctgtggaaagcagtgaagacagcagtgatgagtctgattcaagttctgaagaagagaagaaacccccaactaaggcagtagtctctaaagcaaccactaaaccacctccagcaaagaaagcagcagagagctcttcagacagctcagactctgacagctctgaggatgatgaagctccttctaagccagctggtaccaccaagaattcttcaaataagccagctgtcaccaccaagtcacctgcagtgaagccagctgcagcccccaagcaacctgtgggcggtggccagaagcttctgacgagaaaggctgacagcagctccagtgaggaagagagcagctccagtgaggaggagaagacaaagaagatggtggccaccactaagcccaagggcgactgccaaagcagctcta

SEQ ID NO: 21758 - DNA, 1030 bp, Homo sapiens
  misc_feature (1)...(1030): n = a,t,c or g
cacagattcctcagatccagaagactgaaatttcctttcgtcctaatgatcccaagagctatgaggcatatgtactgaacatagttaggttcctggaaaagtacaaagattcagcccagagggatgacatgatttttgaagattgtggcgatgtgcccagtgaaccgaaagaacgaggagactttaatcatgaacgaggagagcgaaaggtctgcagattcaagcttgaatggctgggaaattgctctggattaaatgatgaaacttatggctacaaagagggcaaaccgtgcattattataaagctcaaccgagttctaggcttcaaacctaagcctcccaagaatgagtccttggagacttacccagtgatgaagtataacccaaatgtccttcccgttcagtgcactggcaagcgagatgaagataaggataaagttggaaatgtggagtattttggactgggcaactcccctggttttcctctgcagtattatccgtactatggcaaactcctgcagcccaaatacctgcagcccctgctggccgtacagttcaccaatcttaccatggacactgaaattcgcatagagtgtaaggcgtacggtgagaacattgggtacagtgagaaagaccgttttcagggacgttttgatgtaaaaattgaagntaagagctgatcacaagcacaaatctttcccactagccatttaataagttaaaaaaagatacaaaaacaaaaacctactagtcttgaacaaactgtcatacgtatgggacctacacttaatctatatgctttacactagctttctgcatttaataggttagaatgtaaattaaagtgtagcaatagcaacaaaatatttattctactgtaaatgacaaaagaaaaagaaaaattgagccttgggacgtgcccatttttactgtaaattatgattccgtaactgacttgtagtaagcagtgtttctggcccctaagtattgctgccttgtgtattttatttagtgtacagtactacaggtg

SEQ ID NO: 21759 - DNA, 667 bp, Homo sapiens
gtgagattgcccacaatgctgcctttggcaactgcaaagcaatgtggaatcgctggtttggaatgtttgctaatcttcctattgggattccatattcaatttcctttaagaggtatcacatggatcatcatcggtaccttggagctgatggcgtcgatgtagatattcctaccgattttgagggctggttcttctgtaccgctttcagaaagtttatatgggttattcttcagcctctcttttatgcctttcgacctctgttcatcaaccccaaaccaattacgtatctggaagttatcaataccgtggcacaggtcacttttgacattttaatttattactttttgggaattaaatccttagtctacatgttggcagcatctttacttggcctgggtttgcacccaatttctggacattttatagctgagcattacatgttcttaaagggtcatgaaacttactcatattatgggcctctgaatttacttaccttcaatgtgggttatcataatgaacatcatgatttccccaacattcctggaaaaagtcttccactggtgaggaaaatagcagctgaatactatgacaacctccctcactacaattcctggataaaagtactgtatgattttgtgatggatgatacaataagtccctactcaag

SEQ ID NO: 21760 - DNA, 418 bp, Homo sapiens
gaaatcaggaagagaggaatattcattatttgattgctttgagaaactaaaatggagataaactaactttatcattttccagatttttttttgggagacagggtctcgctttgtagcccagacctgagtgcagagttgtgatcatagctcatagctctctgtgaccttgacctcgtgtcaaatgatcctccagcctcagcctcctgaatagctggaaccacaggcatgtgccacaatgctgagctaatttttaaatttttttgtacagactaggtctcactttgttgcccaggttggtcttgaactcctggcctcaagcaatcctcccgccacagcctcctaaagtgctaggattacacgcatgaaccgtcatgccctgccttttccagaatttcatgtaacaaggggaaaaatagga

SEQ ID NO: 21761 - DNA, 656 bp, Homo sapiens
gaaataacattggaatacaggacttgttgccaattgggtaattttcattagttgttttgtttgttttgatttgaaacctggaaatacagtaaaatttgactgtttaaaatgttggccaaaaaaatcaagatttaatttttttatttgtactgaaaaactaatcataactgttaattctcagccatctttgaagcttgaaagaagagtctttggtattttgtaaacgttagcagactttcctgccagtgtcagaaaatcctatttatgaatcctgtcggtattccttggtatctgaaaaaaataccaaatagtaccatacatgagttatttctaagtttgaaaaataaaaagaaattgcatcacactaattacaaaatacaagttctggaaaaaatatttttcttcattttaaaacttttttaactaataatggctttgaaagaagaggcttaatttgggggtggtaactaaaatcaaaagaaatgattgacttgagggtctctgtttggtaagaatacatcattagcttaaataagcagcagaaggttagttttaattatgtagcttctgttaatattaagtgttttttgtctgttttacctcaatttgaacagataagtttgcctgcatgctggacatgcctcagaaccatgaat

SEQ ID NO: 21762 - DNA, 709 bp, Homo sapiens
gcaaacataataccaccatttaaaaatgttagggagatgagttgcagtttttataatagattttttttaaagtttggtattgtaaaacattcacacctctgtccctcaaaattgataattacgtttaaagtgcagtcatttgtggttagaatcttgttttgtttgcttccattattgagttcctcctaaggaaattgaggagagggactgaatagaagcccaaattcatataaaagttgcgtttaagttgtattaaaaatagatatataagaaaaaattctttcacttgatgtttgttagaccagaaagtgtgtgtgttctgtagctcagttcccagacagctttttaggtagtggaggaggtggcttcatgtggcacttgggcatttatattccacttgggagggtcaggctgtggccttctggagcaggtggcttgttaaggaacgctagcagggcatggcacgtgagctccggaatagatgtcttcatcacttcttccactgtgtgttgacactgttttccttacctatttcctcagatccccagctttctcctctgctatgcattttcttcacagtgcaagcttgcagtccgttgctgaaaatgattataaagccctgcataatgttaagctttattgtgattacgtgtatgtttcttctttcttttaagcagacccatacctttccagggtcaaagtacagaat

SEQ ID NO: 21763 - DNA, 435 bp, Homo sapiens
  misc_feature (1)...(435): n = a,t,c or g
ttgaanaccntttnaanacnattacgaatttaatacgactcactatagggaatttggccctcgaggccaagaattcggcacgaggacaatcagacgaattctcccccccccccaaaaaaaagccatccccccgctctgccccgtcgcacattcggcccccgcgactcggccagagcggcgctggcagaggagtgtccggcaggagggccaacgcccgctgttcggtttgcgacacgcagcagggaggtgggcggcagcgtctccggcttccagacaccaatgggaatcccaatggggaagtcgatgctggggcttctcaccttcttggccttcgcctcgtgctgcattgctgcttaccgccccagtgagaccctgtgcggcggtgagctggtggacaccctncagttcgtctgtggggaccgnggcttntacttc

SEQ ID NO: 21764 - DNA, 574 bp, Homo sapiens
  misc_feature (1)...(574): n = a,t,c or g
gnnnngnnnntnnnntttgannnatgananccgtntgacatgattacgaatttaatacgactcactatagggaatttggccctcgaggccaagaattcggcacgagcgcctcggcctcccaaggtgctgagattacaggcatgagccactgcacctggccgtcctttcacaatgaatttaaatcccttgatgttcccatttaacagataggaaaacgggggcagggagaagaggaactgtaactcccagtttccttccccttgcacccagaaacaggttctctgagcccctctccccatcccatggagggtggggatgggtcttacgcacccagaccgtgttcctccagggagaatgtgctacgaaacctagcggataaggcctttgaccggcccatctgcgaggccctcctggaccagaggttcttcaatggcattggcaactatctgcgggcagagatctgtaccggctgaagatcccccctttgagaaggcccntcggtcctggagccctgcagcagcacaggccgacccggactgacctgagccagaagatanggccaacttgagaatcc

SEQ ID NO: 21765 - DNA, 534 bp, Homo sapiens
gaaaacacaagaaaaagctccagtgaaaaaaataaaccaggaggaagtgggtcttgcggcacctgcacccaccgcaagaaacaaactgacatcggaagcaagagggaggattcctgtagctcagaaaagaaaaactccaaacaaagaaaagactgaagccaaaaggaataaggtgtcccaagagcagagtaagcccccgggtccctcaggagccagcacatctgcagctgtggatcatcccccactaccccagacctcatcatcaactccatccaacacttcgtttactccgaatcaggaaacccaggcccaacggcaggtggatgcaagaagaaatgttccccaaaacgacccagtgacagtggtggtactgaaagcaacagcgccatttaaatacgagtccccagaaaatgggaaaagcacaatgtttcatgctacagtggccagtaagactcaatatttccatgtgaaagtcttcgacatcaacttgaaagagaaatttgtaaggaagaaggtcattaccatatctgatta

SEQ ID NO: 21766 - DNA, 510 bp, Homo sapiens
ccccatataaatccctttacacctcagtacgaaactcccccattatattagaaaataaataaaaggttaccataagtaagttccagaaaaacaacatattgccgacctcacggatttttaccaaccactcgctttccctgtggccttggcacactggcatgctggtctaggatcctctacgcacaacgcctgctcgcctcctccgtgtggttgccaagccaagccgcctgctaccttcatcaccaaattgcactcgctccttcctggaatcctttttcctagcttcaccaccaaatcgttagcgctccttccttcttcctagcttccttcaccaaatcgcactggctcctggactcttttcctatcttcaccacgaactgctgcttgctcgcttgctcctcagtcctagcttcatcaaacactggttcctggaatcctgtctgctgctgtcttcctagattcactgaatccacttctgtgtagcacctgggtcagctgtcaattaatgcc

SEQ ID NO: 21767 - DNA, 558 bp, Homo sapiens
  misc_feature (1)...(558): n = a,t,c or g
gnnnnnnnnttnntnnnnntnatctgattaccgtntgacatgantacgaatttaatacgactcactatagggaatttggccctcgaggccaagaattcggcacgagggaggccaaacgtcaccgtcccctgattgctctacccacccaagaccccgcccacgggggcgcccccccagagatggccagcaatcggaagtgagcaaaactgccgcaagtctgcagcccggcgccaccatcctgcagcctcctcctgaccacggacgtttccatcaggttccatcccgaaaatctctcggttccacgtccccctggggcttctcctgacccagtccccgtgccccgcctccccgaaacaggctactctcctcggccccctccatcgggctgaggaagcacagcagcatcttcaaacatgtacaaaatcgattggctttaaacacccttcacataccctccccccaaattatccccaattatccccacacataaaaaatcaaaacattaaactaacccccttccccccccccacaacaaccctnttaaaactaattggcttt

SEQ ID NO: 21768 - DNA, 640 bp, Homo sapiens
ctatagaagagaaagttgctaaaaagtcaggaggagctactatagaagaactaactgagaaatgtaaacagatcgcacagagtaaagaagatgatgatgtaatagtgaataaacctcatgtttcggatgaagaggaagaataacctcctttttatcatcatccctttaaactcagtgaacccaaacctatttttttcaatctgaatattgctgcagcaaaaccaactccaccaaaaagccaggtaacattaacaaaagaattccctgtatcatctggatctcaacatcggaaaaaagaagcggatagtgtttatggagaatgggttcctgtggagaaaaatggtgaagaaaacaaagatgatgataatgttttcagcagcaatttgccctcagaggtaagtaggaggaatattatgtatttttccttttttatacctgaatctgccatttcattgttatgttatgtctgatttggattctgtttcactcttcttagggccgggttaaacggcagggccgggttagacgacagatgaaacaacccgcagcttctcatttgacagtaactcgatgcaattcactttgtggaaccaagccacaaagtgaaaagcatcgaattgcagagaacagtgttatcacc

SEQ ID NO: 21769 - DNA, 838 bp, Homo sapiens
tttgatggccgatgctataactatctattcgatgatgaagataccccaccaaacccaaaaaaagagatctctcgaggatccgaattgcggccgcgtcgacttcagataattttttgtagagacaagatttcaccatgtttccctgcctggtctctaactcctgaactcaagcaattcacctatcttggcctcccaaaatgctgagattacaggtgtgagccaccacacctggcctaaacctggatcttaataaataccatattgttctttccagaaagagacaagcagtgccctgacccatgctggagcccatcttgacctctctgcattctcctcctgggaggagttggcttctctgggtttggacagattgaaatctgctctcttagctttaggcttgaaatgtggcgggaccctagaagagcgagcccagagactattcagtaccaaaggaaagtccctggagtcacttgatacctctttgtttgccaaaaatcccaagtcaaagggcaccaagcgagacactgaaaggaacaaagacattgcttttctagaagcccagatctatgaatatgtagagattctcggggaacagcgacatctcactcatgaaaatgtacagcgcaagcaagccaggacaggagaagagcgagaagaagaggaagaagagcagatcagtgagagtgagagtgaagatgaagagaacgagatcatttacaaccccaaaaacctgccacttggctgggatggcaaacctattccctactggctgtataagcttcatggcctaaatatcaactacactgtgagaatttgggggaacctacacctaccgagg

SEQ ID NO: 21770 - DNA, 764 bp, Homo sapiens
  misc_feature (1)...(764): n = a,t,c or g
ggcgaacaccatcttctggagcccccaaggacagttcgtggtgttggcgggcctgaggagtatgaacggtgccttagcgtttgtggacacttcggactgcacggtcatgaacatcgcagagcactacatggcttccgacgtcgaatgggatcctactgggcgctacgtcgtcacctctgtgtcctggtggagccataaggtggacaacgcgtactggctgtggactttccagggacgcctcctgcagaanaacaacaaggaccgcttctgccaactgctgtggcggccccggnctcccaaactcctgagccaggaacagatcaagcaaattaaaaaggtcngaaanaaatactctaagatctttgaacagaaggatcgtttgagtcagtccaaagcctcaaaggaattggtggagagaaggcgcaccatgatggaagatttccggaagtaccggaaaatggcccaggagctctatatggagcagaaaaacgagcgcctggagttgcgaggaggggtggacactgacgagctggacagcaacgtggacaactggtataaggagaccattgagttcttcgtcactgaagaaatcattcccctcgggaatcaggagtgacctggagcactgtgccgcagccgtgtgtgctgtggagcccgaggccgtcctgcaggaagccgcgtgactcccgcctcctccctgtgctctctggctctggactgtgactgcgcctggattctgccattgcgacacattttgngccttt

SEQ ID NO: 21771 - DNA, 760 bp, Homo sapiens
gcctgatctcaatacctatatctactataacgagaagtacggaggccccaaccaccacctgccccttccagacaactggaaaagtcaggtggaacccgagacccgggcggtgatccggtggatgcactccttcaactttgttctttcagccaatctccacggaggggcggtggtggccaattacccgtatgacaagtcctttgagcaccgggtccgaggggtccgccgcaccgccagcacccccacgcctgacgacaagctcttccagaagctggccaaggtctactcctatgcacatggatggatgttccaaggttggaactgcggagattacttcccagatggcatcaccaatggggcttcctggtattctctcagcaagggaatgcaagactttaattatctccataccaactgctttgagatcacgctggaactgagttgcgacaagccctaatccagttcctggaacaggttcaccagggcatcaagggaatggtgcttgatgagaattacaataatctcgccaatgctgtcatttctgtcagtgggattaaccatgatgtcacttcaggtgaccatggtgattacttccggctgctgcttccaggtatctacactgttagtgccacagcacctgggtatgacccagagacagtaactgtgaccgtgggtcctgcggaaccaacgttggttaacttccacctcaaaagaagcatccctcagtaagccctgtgaggagagctcccagcagaaggcc

SEQ ID NO: 21772 - DNA, 1049 bp, Homo sapiens
gagctgagggaggtggggctaagttcaagaagtacgaggagattgacaatgccccggaggagcgagctcggggtatcaccatcaatgcggctcatgtggagtatagcactgccgcccgccactacgcccacacagactgcccgggtcatgcagattatgttaagaatatgatcacaggcactgcacccctcgacggctgcatcctggtggtagcagccaatgacggccccatgccccagacccgagagcacttattactggccagacagattggggtggagcatgtggtggtgtatgtgaacaaggctgacgctgtccaggactctgagatggtggaactggtggaactggagatccgggagctgctcaccgagtttggctataaaggggaggagaccccagtcatcgtaggctctgctctctgtgcccttgagggtcgggaccctgagttaggcctgaagtctgtgcagaagctactggatgctgtggacacttacatcccagtgcccgccgggacctggagaagcctttcctgctgcctgtggaggcggtgtactccgtccctggccgtggcaccgtggtgacaggtacactagagcgtggcattttaaagaagggagacgagtgtgagctcctaggacatagcaagaacatccgcactgtggtgacaggcattgagatgttccacaagagcctggagagggccgaggccggagataacctcggggccctggtccgaggcttgaagcgggaggacttgcggcggggcctggtcatggtcaagccaggttccatcaagccccaccagaaggtggaggcccaggtttacatcctcagcaaggaggaaggtggccgccacaagccctttgtgtcccacttcatgcctgtcatgttctccctgacttgggacatggcctgtcggattatcctgcccccagagaaggagcttgccatgcccggggaggacctgaagttcaacctaatcttgcggcagccaatgatcttagagaaaggccagcgtttcaccctgcgagatggcaaccggacta

SEQ ID NO: 21773 - DNA, 1031 bp, Homo sapiens
  misc_feature (1)...(1031): n = a,t,c or g
actttgcctgcaccgtgcctgactcatccagtggggaaggtgactcaagaagttgtttaagcctaggcctaggcagtccacttcgggaggtgggggcactccacactggggggccctgcagctccagggctggtgctctagcagatccgctcaggcacggttgggtgaccgtggggtcaccgattgcgtagattatttctagggcagtgctgggttagaaatgtctgtctggaaacaggacacatcttgccaccacaagtccacacctggccttggctgctgcccgctctctgcagcgtggatttcctttgcccatttgggccagaaggtcaccaggagttcatcactgcttagtgtcaacttgacatcttcagcttccagacagaaaacccatgctttactttgtacagccctgtcccagagttagtaagcctcggcttgtcacctgcttgcaaagggtatagacatcattctgggtagttctagaggatatcgcaacaagtgcgtttgaaggttcagcacagctggaattgtacggtagtgagctcttcaaaatgaaaacagaatgaccggatggccatctgtcctggaaactgtagaattgaataaatcactgaaaatagaacacttcttggaggctttcttcagaactgaactagaaacaaggtttccaggctcccaggtcagtagaccaaaccaacttccttagatttttttttttaagctgtttgcaaaaaactgggtggtagcgtgtctgaaccaaacggaagaatagccagcggagcatggactgttccagcacgggccaaatggccagctgtcgagagcagccctgcccaaattgcggtgggggctgtgccagcggctccgcagggcccttccaactctggagtgtctgtagttcttgtgaaaccaaaacgttgactacctgcctctttcctcggcatcgacgtgctcatttccaaagatgatgggtgcaggtgaccttttccatcggagctaangagaagggtaggaggcctgaggggcgg

SEQ ID NO: 21774 - DNA, 394 bp, Homo sapiens
caagatggaggattcggcctcggcctcgctgtcttctgcagccgctactggaacctccacctcgactccagcggccccgacagcacggaagcagctggataaagaacaggttagaaaggcagtggacgctctcttgacgcattgcaagtccaggaaaaacaattatgggttgcttttgaatgagaatgaaagtttatttttaatggtggtattatggaaaattccaagtaaagaactgagggtcagattgaccttgcctcatagtattcgatcagattcagaagatatctgtttatttacgaaggatgaacccaattcaactcctgaaaagacagaacagttttatagaaagcttttaaacaagcatggaattaaaaccgtttctcagattatc

SEQ ID NO: 21775 - DNA, 478 bp, Homo sapiens
tatgacatgattacgaatttaatacgactcactatagggaatttggccctcgaggccaagaattcggcacgagcgagaccagcggatctcggcaaaccctctttctcgaccacccacctaccattcttggaaccatggcggcagtggcggcggcctcggctgaactgctcatcatcggctggtacatcttccgcgtgctgctgcaggtgttcaggtactccctgcagaagctggcatacacggtgtcgcggaccgggcggcaggtgttgggggagcgcaggcagcgagcccccaactgaggccccagctcccagccctgggcggccgtatcatcaggtgctcctgtgcatctcggccagcacgggagccagtgccgcgcaggaatgtggggtcccctgtgttccctcgccagaggagcacttggcaaggtcagtgaggggccagtagacccccggagaagcagtaccgacaatgacga

SEQ ID NO: 21776 - DNA, 427 bp, Homo sapiens
gacaaagaaaagaaggaacaatggtcgtgccaaaaagggccgcggccacgtgcagcctattcgctgcactaactgtgcccgatgcgtgcccaaggacaaggccattaagaaattcgtcattcgaaacatagtggaggccgcagcagtcagggacatttctgaagcgagcgtcttcgatgcctatgtgcttcccaagctgtatgtgaagctacattactgtgtgagttgtgcaattcacagcaaagtagtcaggaatcgatctcgtgaagcccgcaaggaccgaacacccccaccccgatttagacctgcgggtgctgccccacgtcccccaccaaagcccatgtaaggagctgagttcttaaagactgaagacaggctattctctggagaaaaataaaatggaaattgtacttaaaaaaaaaaaaaa

SEQ ID NO: 21777 - DNA, 430 bp, Homo sapiens
ggcgtttcgctttcaagacccggggaaaggatgctgcttcgtctaccaaagtagacgcggctcctggcatccccccggcagttgaaagcatacaggactccccgctgcccaagaaggcggaaggagacctcggccccagctgggtctgcggtttctccaacctggagtcccaagtcttggagaagagagccagcgagttgcaccagcgcgacgttcttttgaccgaactgagcaactgcacggtcagactgtatggaaatcccaacaccctgcggctaaccaaggcccacagctgcaagctgctctgcggtccggtgtctacctctgttttcctggaggactgcagtgactgcgtgctggcagtggcctgccaacagctccgcatacacagtacgaaagacacccgcatcttctgcaggtgaccagcaag

SEQ ID NO: 21778 - DNA, 468 bp, Homo sapiens
  misc_feature (1)...(468): n = a,t,c or g
ttgaaaccncttntctgattacgaatttaatacgactcactatagggaatttggccctcgaggccaagaattcggcacgagaatcccagcactttgggaggctgaggtgggcagatcacgaggtcaggagatcgagaccatcctggctaacatggtgaaaccccgtctctactaaaaatacaaaactagccaggcatggtggcgggcgcctgtagtcccagctactcgggaggctgaggcaggagaatggtgtgaacccaggaggtggagtttgcagtgagcagagattgcaccactgcactccagcctgggtgacagagcgagactctgtctcaaaagcaaaaaaccggccgggtgcggtggctcacacttgtaatcccagcactttgggaggccgaggaaggccggatcaggaggtcaggagatcaagaccacggtgaaccctgctctactaaaaataccaaaaat

SEQ ID NO: 21779 - DNA, 460 bp, Homo sapiens
  misc_feature (1)...(460): n = a,t,c or g
gnnnnnnnngnnnnnnttnnnttnnnnctnctgatacccttttnnatgnccacgaatttaatacgactcactatagggaatttggccctcgaggccaagaattcggcacgaggtttgaaggctccgccttgggaaaacagctaaacctaaagctccttgacaactgggacagcgtgacctccaccttcagcaagctgcgcgaacagctcggccctgtgacccaggagttctgggataacctggaaaaggagacagagggcctgaggcaggagatgagcaaggatctggaggaggtgaaggccaaggtgcagccctacctggacgacttccagaagaagtggcaggaggagatggagctctaccgccagaaggtggagccgctgcgcgcagagctccaagagggcgcgcgccagaagctgcacgagctgcaagagaagctgagcccactgggcgaggagat

SEQ ID NO: 21780 - DNA, 1103 bp, Homo sapiens
  misc_feature (1)...(1103): n = a,t,c or g
cagctatgacatgattacgaatttaatacgactcactatagggaatttggccctcgaggccaagaattcggcacgagcttttcccccccgaaaagtacaacatctggcccgccccagcccgaagacagcccgtcctccctggacaatcagacgaattctccccccccccccaaaaaaaagccatccccccgctctgccccgtcgcacattcggcccccgcgactcggccagagcggcgctggcagaggagtgtccggcaggagggccaacgcccgctgttcggtttgcgacacgcagcagggaggtgggcggcagcgtcgccggcttccagacaccaatgggaatcccaatggggaagtcgatgctggtgcttctcaccttcttggccttcgcctcgtgctgcattgctgcttaccgccccagtgagaccctgtgcggcggggagctggtggacaccctccagttcgtctgtggggaccgcggcttctacttcagacttccaggcaggcccgcaagccgtgtgagccgtcgcagccgtggcatcgttgaggagtgctgtttccgcagctgtgacctggccctcctggagacgtactgtgctacccccgccaagtccgagagggacgtgtcgacccctccgaccgtgcttccggacaacttccccagataccccgtgggcaagttcttccaatatgacacctggaagcagtccacccagcgcctgcgcaggggcctgcctgccctcctgcgtgcccgccggggtcacgtgctcgccaaggagctcgaggcgttcagggaggccaaacgtcaccgtcccctgattgctctacccacccaagaagcaaaactgccgcaagtctgcagcccggcgccaccatcctgcagcctcctcctgaccacggacgtttccatcaggttccatcccgaaaatctctcggttccacgtccccctggggcttntcctgacccagtccccgtgccccgcctccccgaaacaggctactctccncggccccctccatcgggctgaggaagcacagcagcatnttcaaacatgtacaaaatcgattggctttaaacacccttcacataccctcccaccc

SEQ ID NO: 21781 - DNA, 592 bp, Homo sapiens
gctatgacatgattacgaatttaatacgactcactatagggaatttggccctcgaggccaagaattcggcacgagctccctgcgccccaccctggcctgcaaatagagtgccaagccaccagaatagaagtgctaaagtagtgagtttcctagaagtggcaagcctgagactccagtgagtcaccctcattgttcccctgaggcaccctgcctccacctgctctctgctctcgaagcgtcagttataccagcacttctctcttctcttttgtctctttttacagtcacccctttagagtgacaggcagcgtgagctcatggccttgactttgctgggtaaaagccagagcccttgaggacttcagtagattggtggattgaaaggcacatgggccggtgcggtggctcatgcctgtaatcccagcactttgggaggccgaggcgggtggatcacgaggtcaggagatcgagaccacggtgaaaccccgtctctactaaaaatacaaaaaattagccgggcatggtggcgggcgcctgtagtcccagctactcgggaggctgaggcaggagaatggcgtgaacccgggaggcg

SEQ ID NO: 21782 - DNA, 528 bp, Homo sapiens
ggcgaaactcctggaattttaaatttcctcatccattcttaccaaatgttgattttgttggaggactccactgcaaacctgccaaacccctacctaaggaaatggaggagtttgtacagagctctggagaaaatggtgttgtggtgttttctctggggtcaatggtcagtaacatgacagaagaaagggccaacgtaattgcaacagcccttgccaagatcccacaaaaggttctttggagatttgatgggaataaaccagatgccttaggtctcaatactcgactgtacaagtggataccccagaatgaccttctaggtcatccaaaaaccagagcttttataactcatggtggagccaatggcatctatgaggcaatctaccatgggatccctatggtgggcattccattgttttttgatcaacctgataatattgctcacatgaaggccaagggagcagctgttagagtggacttcaacacaatgtcgagtacagacttgctgaatgcattgaagagagtaatta

SEQ ID NO: 21783 - DNA, 651 bp, Homo sapiens
  misc_feature (1)...(651): n = a,t,c or g
ccttcaagaagaccaagaaggaaatcaagaaggtagccacgccaaagaaggcatccaagcccaagaaggctgcctccaaagccccaaccaagaaacccaaagccaccccggtcaagaaggccaagaagaagctggctgccacgcccaagaaagccaaaaaacccaagactgtcaaagccaagccggtcaaggcatccaagcccaaaaaggccaaaccagtgaaacccaaagcaaagtccagtgccaagagggccggcaagaagaagtgacaatgaagtcttttcttgcggacactccctcctgtctcctattttctgtaaataattttctccttttttctctcttgatgctcaccaccaccttttgcccccttctgttctgactttataagagacaggatttggattcttcagaaattacagaataattcatttttccttaaccagttgtgcaaggacagcaacaaccaatctaatgatgagaatgtacttatattttgttttgctattaacctacttacggggttaggggatttgcggggggggcttgtgtgttttgttggcttgtttgccatgaaggtagatgtgggtggggagaagacncaaggcagttggtctggctagatanagggncccnggattgngagggtac

SEQ ID NO: 21784 - DNA, 483 bp, Homo sapiens
  misc_feature (1)...(483): n = a,t,c or g
atttgaaancccntcagctatgacatgattacgaatttaatacgactcactatagggaatttggccctcgaggccaagaattcggcacgagagttttgtgacagaaaaaaggttgttttaatatctacttggtttttctcaaaatggaaataattttaaaatcaggaaagaataaatcagccaggtgtgatgacttgtaactgtaatcccagttataggggaggctgaagcaggaggatcacttgaggccaggagtttgagaccagcctgggcaacatagtgagatcccatctcaaaaaacattatttttaaaattagcctggtggctcacgcctgtaatcccagcactttgggaggccgaggtggccagatcacctgaggtcaggagttcgagaccaccctggccaacatggtgaaaccccatctctacagttttgtaaaaatacaaaaaattacctgggcctggtggcacacgcctgtagt

SEQ ID NO: 21785 - DNA, 531 bp, Homo sapiens
ccatagctatgacatgattacgaatttaatacgactcactatagggaatttggccctcgaggccaagaattcggcacgaggtatgccaaaattagttgtttaagtgaagttttgtgacagaaaaaaggttgttttaatatctacttggtttttctcaaaatggaaataattttaaaatcaggaaagaataaatcagccaggtgtgatgacttgtaactgtaatcccagttataggggaggctgaagcaggaggatcacttgaggccaggagtttgagaccagcctgggcaacatagtgagatcccatctcaaaaaacattatttttaaaattagcctggtggctcacgcctgtaatcccagcactttgggaggccgaggtggccagatcacctgaggtcaggagttcgagaccaccctggccaacatggtgaaaccccatctctacagttttgtaaaaatacaaaaaattacctgggcctggtggcacacgcctgtagtcccagctacttgggaggctgaggcaggagaat

SEQ ID NO: 21786 - DNA, 618 bp, Homo sapiens
gcgggcctgctggggctgctctggggccacaggtactttcttgtgcaccttgctgcccgtacctgtgattgaatgtaatcgtgggaaccctgagtttcatcagagccggcgcacagtctcctgcagcccaggcgttgcctgagctcaacacggcctaggcccaagctttagcgctgccgggttcttggagtcctgtgggatgagtcagggttctgaattgggctgcaccccctggacaggatgatcggctgaatgtaacagaggaactaacgtccaacgacaagacgaggattctcaacgtccagtccaggctcacagacgccaaacgcattaactggcgaacagtgctgagtggcggcagcctctacatcgagatcccgggcggcgcgctgcccgaggggagcaaggacagctttgcagttctcctggagttcgctgaggagcagctgcgagccgaccatgtcttcatttgcttccacaagaaccgcgaggacagagccgccttgctccgaaccttcagctttttgggctttgagattgtgagaccggggcatccccttgtccccaagagacccgacgcttgcttcatggcctacacgttcgagagagagtcttcgg

SEQ ID NO: 21787 - DNA, 448 bp, Homo sapiens
  misc_feature (1)...(448): n = a,t,c or g
ttgnaatcgttaccgnttgactgattacgaatttaatacgactcactatagggaatttggccctcgaggccaagaattcggcacgagtgctcaggagcttctctacaggtacaagcagaatcgatctggtcggcttaccataaagagtctctgtctgtcaaatggaggtatctttcctgagactcaccgtccactccttgtccaaaagctactcaaagatggaggtgtgctgacacccatcctcacacgactgatgaacttctttgtattctctcgaggtctcaccccagtctttgggccgtatactacggccctctgagagtagannntgngggacntgtggncagggatnccgngnattgacgggaacttagactttganagtctnttacngctcatntatcagannancaagtgntaaggcttntngntgtgagccctantcttg

SEQ ID NO: 21788 - DNA, 431 bp, Homo sapiens
  misc_feature (1)...(431): n = a,t,c or g
gnnnnagtnngnnttnnnttgtnntnntnatccntgatnctcttacgaatttaatacgactcactatagggaatttggccctcgaggccaagaattcggcacgaggcaggccagcatcgtggaagcgcttttgcggcatctggggctccagaaccgcaggatcaaccttctttctcatgactatggagatattgttgctcaggagcttctctacaggtacaagcagaatcgatctggtcggcttaccataaagagtctctgtctgtcaaatggaggtatctttcctgagactcaccgtccactccttctccaaaagctactcaaagatggaggtgtgctgtcacccatcctcacacgactgatgaacttctttgtattctctcgaggtctcaccccagtctttgggccggatactcnggcctnttgaaagg

SEQ ID NO: 21789 - DNA, 469 bp, Homo sapiens
  misc_feature (1)...(469): n = a,t,c or g
gtgnnnnnnttgaacctctatgaccgattacgaatttaatacgactcactatagggaatttggccctcgaggccaagaattcggcacgagcgggtgattgcccttgatttcttaggctttggcttcagtgacaaaccgagaccacatcactattccatatttgagcaggccagcatcgtggaagcgcttttgcggcatctggggctccagaaccgcaggatcaaccttctttctcatgactatggagatattgttgctcaggagcttctctacaggtacaagcagaatcgatctggtcggcttaccataaagagtctctgtctgtcaaatggaggtatctttcctgagactcaccgtccactccttctccaaaagctactcaaagatggaggtgtgctgtcacccatcctcacacgactgatgaacttctttgtattctctcgaggtctcaccccagctttggcccgta

SEQ ID NO: 21790 - DNA, 815 bp, Homo sapiens
cttacatgattacgaatttaatacgactcactatagggaatttggccctcgaggccaagaattcggcacgagggtgggtccaggtggggctgctggccgagcccctgcttgctgcgtacctgcacatcccaccccctcagctctcccctgcccttcactcatggaagtcttcaggcaagtttttcacttacaagggactgcgtatcttctaccaagactctgtgggagtggttggaagtccagagatagttgtgcttttacacggttttccaacatccagctacgactggtacaagatttgggaaggtctgaccttgaggtttcatcgggtgattgcccttgatttcttaggctttggcttcagtgacaaaccgagaccacatcactattccatatttgagcaggccagcatcgtggaagcgcttttgcggcatctggggctccagaaccgcaggatcaaccttctttctcatgactatggagatattgttgctcaggagcttctctacaggtacaagcagaatcgatctggtcggcttaccataaagagtctctgtctgtcaaatggaggtatctttcctgagactcaccgtccactccttctccaaaagctactcaaagatggaggtgtgctgtcacccatcctcacacgactgatgaacttctttgtattctctcgaggtctcaccccagtctttgggccgtatactcggccctctgagagtgagctgtgggacatgtgggcagggatccgcaacaatgacgggaacttagtcattgacagtctcttacagtacatcaatcagaggaagaag

SEQ ID NO: 21791 - DNA, 360 bp, Homo sapiens
ggagctacgtggataacctgatgtgcgatggctgctgccaggaggccgccattgtcggctactgcgacgccaaatacgtctgggcagccacggccgggggcgtctttcagagcattacgccaatagaaatagatatgattgtaggaaaagaccgggaaggtttctttaccaacggtttgactcttggcgcgaagaaatgctcagtgatcagagatagtctatacgtcgatggtgactgcacaatggacatccggacaaagagtcaagcattggttatagtcatgggaaaggaaggtgtccacggaggcacacttaacaagaaagcatatgaactcgctttatacctgaggaggtctgatg

SEQ ID NO: 21792 - DNA, 597 bp, Homo sapiens
cggacgcgtgggcgaagatggccggttggcagagctacgtggataacctgatgtgcgatggctgctgccaggaggccgccattgtcggctactgcgacgccaaatacgtctgggcagccacggccgggggcgtctttcagagcattacgccaatagaaatagatatgattgtaggaaaagaccgggaaggtttctttaccaacggtttgactcttggcgcgaagaaatgctcagtgatcagagatagtctatacgtcgatggtgactgcacaatggacatccggacaaagagtcaaggtggggagccaacatacaatgtggctgtcggcagagctggtagagtcttggtctttgtaatgggaaaggaaggtgtccacggaggcacacttaacaagaaagcatatgaactcgctttatacctgaggaggtctgatgtgtaagcagcctctccccatctacctagcaactgtcttcatcaacaaccctaattatggtcacaatgctaccaaactgtagatggtagctaatttttctttacctattttctaatgtcatgattcctgtttgcccaatggatcatttgtatgttaaccactg

SEQ ID NO: 21793 - DNA, 498 bp, Homo sapiens
  misc_feature (1)...(498): n = a,t,c or g
ttggannccgtancagctatgacatgattacgaatttaatacgactcactatagggaatttggccctcgaggccaagaattcggcacgagggtccccacaagttgagagagtgtctccccctcatcattttcctgaggaacagacttaagtatgccctgacaggagatgaagtaaagaagatttgcatgcagcggttcattaaaatcgatggcaaggtccgaactgatataacctaccctgctggattcatggatgtcatcagcattgacaagacgggagagaatttccgtctgatctatgacaccaagggtcgctttgctgtacatcgtattacacctgaggaggccaagtacaagttgtgcaaagtgagaaagatctttgtgggcacaaaaggaatccctcatctggtgactcatgatgcccgcaccatccgctaccccgatcccctcatcaaggtgaatgataccattcagattgatttggagactgcaagatta

SEQ ID NO: 21794 - DNA, 519 bp, Homo sapiens
ggacctacatgcttcctgctgtggctgtctcggaacccgtggtcctccgcttcatgattttctgccgtctcttggcaaaaatggcaaataatgatgctgttctgaagagactggagcagaagggtgcagaggcagatcaaatcattgaatatcttaagcagcaagtttctctacttaaggagaaagcaattttgcaggcaactttgagggaagagaagaaacttcgagttgaaaatgctaaactgaagaaagaaattgaagaactgaaacaagagctaattcaggcagaaattcaaaatggagtgaagcaaataccatttccatctggtactccactgcacgctaattctatggtttctgaaaatgtgatacagtctacagcagtaacaaccgtatcttctggtaccaaagaacagataaaaggaggaacaggagacgaaaagaaagcgaaagagaaaattgaaaagaaaggtatttttgacctttaagcatatttagctcttgactggattatcagaa

SEQ ID NO: 21795 - DNA, 701 bp, Homo sapiens
gcaacagagctgggatgtttgtgtctaagttctttgggggctatgtgcctgagatggtgctcacccctgatgatcagcgcctgctggcccatgtcaccctggagctccagcactatcaccagctacttgagaaggttcggatccgggatgccttgcgcagtatcctcaccatatctcgacatggcaaccaatatattcaggtgaatgagccctggaagcggattaaaggcagtgaggctgacaggcaacgggcaggaacagtgactggcttggcagtgaatatagctgccttgctctctgtcatgcttcagccttacatgcccacggttagtgccacaatccaggcccagctgcagctcccacctccagcctgcagtatcctgctgacaaacttcctgtgtaccttaccagcaggacaccagattggcacaggtcagtcccttgttccaaaaattggaaaatgaccagattgaaagtttaaggcagcgctttggagggggccaggtgagaaagctaaaggctgtgccctcgctccacaacagccacagcatcacttccctaatttccctaagtagtcctcacccatcactctttccatcttttggccctgccgcttcctcacttcagtttttctttcctgtcttaactagaagagaccttcgacttaaaggtaaccactttccctctgagatgctggataa

SEQ ID NO: 21796 - DNA, 791 bp, Homo sapiens
gcagattgccaaggacatggaacgctgggcccgcagtctcaacaaacaaaaagaaaacttcaaaaatagcttccagcctatcagctccctgcgagatgacgagaggcgggagtcagccactgcagatgctggctatgccatcctcgagaagaagggagcactagccgagagacagcacaccagcatggatctcccgaaattggccagtgacgaccgcccaagccctccgcgaggactggtggcagcctacagcggggagagtgacagtgaggaggagcaggagcgtgggggccctgagcgggaggagaagctcaccgactggcagaagctggcctgtctgctctgccgacgccagttccccagcaaagaggcgctcatccggcaccagcagctctcagggctccacaagcaaaaccttgagattcaccggcgagcccacttgtcagaaaacgagctagaagcactagagaagaatgacatggagcaaatgaagtaccgggaccgtgcagctgaacgcagagaaaagtatggcatccccgagccgccagagcccaagaggaggaagtacggcggcatatccacagcctctgtagacttcgagcagcctactcgggacgggctgggcagtgacaacattggcagtcggatgctgcaggccatgggctggaaagagggcagcggcctgggccgcaagaagcagggcattgtaacgcctatcgaggcccaaacacgggtgcggggctccggcctgggtgcacggggcagctcctacggggtcacctcaaccgagt

SEQ ID NO: 21797 - DNA, 875 bp, Homo sapiens
aacagctatgacatgattacgaatttaatacgactcactatagggaatttggccctcgaggccaagaattcggcacgagtccagttctagcagcaatctttcacttgctaaggttaggccgagcagtgatctcaacaacagtactggccagtctcctcaccacaaagtgcagagaagtgtttcttcaagccaaaagcaaagacgctacagtgaccatgctggaccagctattccttctgttgtggcgtatccgaaaaggagtcagaccagcactgcagatagtgacctcaaagaagatggaatttcctcccggaaatcaagtggcagtgctgttggaggaaagggaattgctccagccagtcccatgcttgggaatgcaagtaatcctaataaggcggatattcctgaacgcaagaaaagctccactgtccctagtagtaacacagcatctggtggaatgacacgacgaaatacttatgtttgcagtgagagaactacagctgatagacactcagtgattcagaatggcaaagaaaacagcactattcctgatcagagaactccagttgcttcaacacacagtatcagtagtgcagccaccccagatcgaatccgcttcccaagaggcactgccagtcgtagcactttccacggccagccccgggaacggcgaaccgcaacatataatggccctcctgcctctcccagcctgtcccatgaagccacaccattgtcccagactcgaagccgaggctccactaatctctttagtaaattaacttcaaaactcacaaggaggcttccaactgaatatgagaggaacgggagatatgagggctcaagtcgcaatgtatctgctgagcaaaaagatgaaa

SEQ ID NO: 21798 - DNA, 559 bp, Homo sapiens
  misc_feature (1)...(559): n = a,t,c or g
tattgaatcctttgaaatcctttgacatgattacgaatttaatacgactcactatagggaatttggccctcgaggccaagaattcggcacgagaggcgactgtggggacatcagtgatcggtgaagtaccatgcaagcatttcttaaaggtacatccatcagtactaaacccccgctgaccaaggatcgaggagtagctgccagtgcgggaagtagcggagagaacaagaaagccaaacccgttccctgggtggaaaaatatcgcccaaaatgtgtggatgaagttgctttccaggaagaagtggttgcagtgctgaaaaaatctttagaaggagcagatcttcctaatctcttgttttacggaccacctggaactggaaaaacatccactattttggcagcagctagagaactctttgggcctgaacttttccgattaagagttcttgagttaaatgcatctgatgaacgtggaatacaagtagttcgagagaaagtgaaaaatttgctcaattaactgngcaggaagtcgctcaaatgggaagccgtgtccgccttt

SEQ ID NO: 21799 - DNA, 939 bp, Homo sapiens
taatttactacgactcactatagggaatttggccctcgaggccaagaattcggcacgagcgcagccatggctcgtggtcccaagaagcatctgaagcgggtggcagctccaaagcattggatgctggataaattgaccggtgtgtttgctcctcgtccatccaccggtccccacaagttgagagagtgtctccccctcatcattttcctgaggaacagacttaagtatgccctgacaggagatgaagtaaagaagatttgcatgcagcggttcattaaaatcgatggcaaggtccgaactgatataacctaccctgctggattcatggatgtcatcagcattgacaagacgggagagaatttccgtctgatctatgacaccaagggtcgctttgctgtacatcgtattacacctgaggaggccaagtacaagttgtgcaaagtgagaaagatctttgtgggcacaaaaggaatccctcatctggtgactcatgatgcccgcaccatccgctaccccgatcccctcatcaaggtgaatgataccattcagattgatttggagactggcaagattactgatttcatcaagttcgacactggtaacctgtgtatggtgactggaggtgctaacctaggaagaattggtgtgatcaccaacagagagaggcaccctggatcttttgacgtggttcacgtgaaagatgccaatggcaacagctttgccactcgactttccaacatttttgttattggcaagggcaacaaaccatggatttctcttccccgaggaaagggtatccgcctcaccattgctgaagagagagacaaaagactggcggccaaacagagcagtgggtgaaatgggtccctgggtgacatgtcagatctttgtacgtaattaaaaatattgtggcaggattaatagcaaaaaaaaaaaaaa

SEQ ID NO: 21800 - DNA, 570 bp, Homo sapiens
ggatcgttctggctggcaaagagtacggtgcaggcagctcccgagactgggcagctaagggccctttcctgctgggaatcaaagccgtcctggccgagagctacgagcgcattcaccgcagtaacctggttgggatgggtgtgatcccacttgaatatctccctggtgagaatgcagatgccctggggctcacagggcaagaacgatacactatcattattccagaaaacctcaaaccacaaatgaaagtccaggtcaagctggatactggcaagaccttccaggctgtcatgaggtttgacactgatgtggagctcacttatttcctcaacgggggcatcctcaactacatgatccgcaagatggccaagtaggagacgtgcacttggtgctgcgcccagggaggaagccgcaccaccagccagcgcaggccctggtggagaggcctccctggctgcctctgggaggggtgctgccttgtagatggagcaagtgagcactgagggtctggtgccaatcctgtaggcacaaaaccagaagtttctacattctctatttttggtaatcatc

SEQ ID NO: 21801 - DNA, 681 bp, Homo sapiens
ggagagctagcaccatgagctgtgatcatgccctttaccgcctcgcctgcctccagcactactgccagggtcatcacaaaccagtacaacaacccagctggcctctactcttctgaaaatatctccaacttcaacaatgccctggagtcaaagactgctgccagcggggtggaggcgagcagcagacccttagaccatgctcagcctccaagcagccttgtcatcgacaaagaatctgaagtttacaagatgcttcaggagaaacaggagttgaatgagcccccgaaacagtccacgtctttcttggttttgcaggaaatcctggagtctgaagaaaaaggggatcccaacaagccctcaggattcagaagtgttaaagctcctgtcactaaagtggctgcgtcgattggaaatgctcagaagttgcctatgtgtgacaaatgttggcactgggattgttggtgtgtttgtgaagctgcgggaccgtcaccgccaccctgagtgttatgtgtgcactgactgttggcaccaacctgaaacaggaagggccatttctttgtggaggatcaaatctactgtgagaagcatgcccgggagcgagtcacaccacctgagggttatgaagtggtcactgtgttccccaagtgagccagcagatctgaccactgttctccagcagcc

SEQ ID NO: 21802 - DNA, 449 bp, Homo sapiens
  misc_feature (1)...(449): n = a,t,c or g
ggcgtgggagagatagaaaggagaaaaagggagaggagagagaaatagataccatattaatgtgtcatttatcacgaaactggacttcactttggacttcaccaccacagtagaagaaaagacttagaacgcagactggattcatttcctggggctgccaaaggaccacagactggggaactgaagtaacagaaattgattgtctgagttctggattccaggaacctcagatcggggtgttagcagggttggttccttctgagcatgtgagggaggatctgtgtcacagctctctcccagcggctgggagccaggtgttccttggcttgcaggggatattgtcctcgtatcttcacatcgtcttcctctctgcatgtctttctctgngtcccattttataaagacgcagtcttgtgggattaggcataccctaaggcctaatntnactt

SEQ ID NO: 21803 - DNA, 441 bp, Homo sapiens
  misc_feature (1)...(441): n = a,t,c or g
ccatagctatgacatgattacgaatttaatacgactcactatagggaatttggccctcgaggccaagaattcggcacgaggaattactgagttgtatgttaattccatgtttaacttttcgaggaacttccaaactgttttccactttacatccccactggcaatgtgtgagtgttctgatttctccacttgcttgccaacacttgttactgtgtcttgttgattatagagatccttagagtggccactgggtacacccacaagttcactaacgggggcaaggaaaaaagggttgctcattttgggtatcactggagtctgatggaaagagataggcgcatctctggagttgatcgttactatgtgtcaaagggtttggagaacattgattaaggaagtacccctgctagaaggttacagtgtattatgtancatgcaatg

SEQ ID NO: 21804 - DNA, 340 bp, Homo sapiens
ggcgagaatgaagactattctcagcaatcagactgtcgacattccagaaaatgtcgacattactctgaagggacgcacagttatcgtgaagggccccagaggaaccctgcggagggacttcaatcacatcaatgtagaactcagccttcttggaaagaaaaaaaagaggctccgggttgacaaatggtggggtaacagaaaggaactggctaccgttcggactatttgtagtcatgtacagaacatgatcaagggtgttgcttgttcagtatctcaagcccagaaagatgaattaatccttgaaggaaatgacattgagcttgtttcaaattcagcggct

SEQ ID NO: 21805 - DNA, 527 bp, Homo sapiens
  misc_feature (1)...(527): n = a,t,c or g
gaaggatgagcttctaagatcctgaattttactttctacttgattaacattttcgctttagccagagttgctatttgcaaacagctttccacttccaaagtgccactttctgaccggtttttcttcctgttttcgtcaaatcatcctactcccaaataggcacccactcactaccttggcgtcgttttttgggtctgacttgactcgtcaactgctggtctctcccacctggttggaaatgtcgttggaaacttgcaaagactctccagaccttagggaacaagaggcatcactcagtccttctgggacagcttccctgtaagcaaagccaggtttgttttagattcactctggcctgaaaaaaaaagtgccttttgctgctttaaagaattggggtatatggtatgaagcagccatgtacttgtattttcctggctttcctgggcactcttctctcttgcaaaagttttcttaaggggacccccccgaaancctttnacccancatattccagncttttttnaagc

SEQ ID NO: 21806 - DNA, 488 bp, Homo sapiens
cgctatgacatgattacgaatttaataccgactcactatagggaatttggccctcgaggccaagaattcggcacgaggatccgagtgaggcgacggggtaggggttggcgctcaggcggcgaccatggcgtatcacggcctcactgtgcctctcattgtgatgagcgtgttctggggcttcgtcggcttcttggtgccttggttcatccctaagggtcctaaccggggagttatcattaccatgttggtgacctgttcagtttgctgctatctcttttggctgattgcaattctggcccaactcaaccctctctttggaccgcaattgaaaaatgaaaccatctggtatctgaagtatcattggccttgaggaagaagacatgctctacagtgctcagtctttgaggtcacgagaagagaatgccttctagatgcaaaatcacctccaaaccagaccacttttcttgacttgcctgttttggccatta

SEQ ID NO: 21807 - DNA, 355 bp, Homo sapiens
gcgagaatgaagactattctcagcaatcacatcaatgtagaactcagccttcttggaaagaaaaaaaagaggctccgggttgacaaatggtggggtaacagaaaggaactggctaccgttcggactatttgtagtcatgtacagaacatgatcaagggtgttacactgggcttccgttacaagatgaggtctgtgtatgctcacttccccatcaacgttgttatccaggagaatgggtctcttgttgaaatccgaaatttcttggatgagaccaggtgttgcttgttcagtatctcaagcccagaaagatgaattaatccttgaaggaaatgacattgagcttgtttcaaattca

SEQ ID NO: 21808 - DNA, 556 bp, Homo sapiens
tatgacatgattacgaatttaatacgactcactatagggaatttggccctcgaggccaagaattcggcacgagcggcacgagcatccacagctctggggaacagctcatctctttcagtcctagagggccagtctctgcgcttggtctgtgctgttgacagcaatccccctgccaggctgagctggacctggaggagtctgaccctgtacccctcacagccctcaaaccctctggtactggagctgcaagtgcacctgggggatgaaggggaattcacctgtcgagctcagaactctctgggttcccagcacgtttccctgaacctctccctgcaacaggagtacacaggcaaaatgaggcctgtatcaggagtgttgctgggggcggtcgggggagctggagccacagccctggtcttcctctccttctgtgtcatcttcattgtagtgaggtcctgcaggaagaaatcggcaaggccagcagcggacgtgggagacataggcatgaaggatgcaaacaccatcaggggctcaacctctcagggtaacctgactg

SEQ ID NO: 21809 - DNA, 338 bp, Homo sapiens
ggactttttccagccattttgagggaaagtgaatggggctgcctgggagggcaggaaattcatctaaggtagcagaaaactaagatttgtggctagtgttaggacagcagctgtctgcatgtgatgaattatttgttatgatacagttcaacgtttctctggcctagtctctgagaaaacttaagtctttaataaagaactgaagaaaagcttaaagaaaaagactgcctcttggaggattaaattgagttagcctaagggccagctttcagctcagagagctgttacaagcaccagaaggaaggaggtaggaatccctctccctaccccacccctat

SEQ ID NO: 21810 - DNA, 150 bp, Homo sapiens
tggcacgtagcctcttgctgtctaaggtctcgttccgtgctggagaatgcatatgagcccaagagtgtgggcctgagtggctgcttaggacgttttcgtttaactcaccccctcttttcctcacaagggatggtggccggggtgtggctc

SEQ ID NO: 21811 - DNA, 347 bp, Homo sapiens
gcgagaatgaagactattctcagcaatcacatcaatgtagaactcagccttcttggaaagaaaaaaaagaggctccgggttgacaaatggtggggtaacagaaaggaactggctaccgttcggactatttgtagtcatgtacagaacatgatcaagggtgttacactgggcttccgttacaagatgaggtctgtgtatgctcacttccccatcaacgttgttatccaggagaatgggtctcttgttgaaatccgaaatttcttggatgagaccaggtgttgcttgttcagtatctcaagcccagaaagatgaattaatccttgaaggaaatgacattgagcttgttt

SEQ ID NO: 21812 - DNA, 435 bp, Homo sapiens
gagttgctctcagaggcagcgtgcgggtgtgctctttgtgaaattccaccatggcgtaccgtggccagggtcagaaagtgcagaaggttatggtgcagcccatcaacctcatcttcagatacttacaaaatagatcgcggattcaggtgtggctctatgagcaagtgaatatgcggatagaaggctgtatcattggttttgatgagtatatgaaccttgtattagatgatgcagaagagattcattctaaaacaaagtcaagaaaacaactgggtcggatcatgctaaaaggagataatattactctgctacaaagtgtctccaactagaaatgatcaatgaagtgagaaattgttgagaaggatacagtttgtttttagatgtcctttgtccaatgtgaacatttattcatattgttttgattaccctcggggg

SEQ ID NO: 21813 - DNA, 711 bp, Homo sapiens
  misc_feature (1)...(711): n = a,t,c or g
gggcatctgaagcattagccagggttgttcatcaggatgttgcctttactgacccaactctggattccacagagatcaatgttccacaggacattttgggaatttgggtggaccccatagattcaacttatcagtatataaaaggttctgctgacattaaatccaaccagggaatcttcccctgtggacttcagtgtgtcaccattttaattggtgtctatgacatacagacaggggttcccctgatgggagtcatcaatcaaccttttgtgtcacgagatccaaacaccctcaggtggaaaggacagtgctattggggcctttcttacatggggaccaacatgcattcactacagctcaccatctctagaagaaacggcagtgaaacacacactggaaacaccggctctgaggcagcattctcccccagtttttcagccgtaattagtacaagtgaaaaggagactatcaaagctgcattgtcacgtgtgtgtggagatcgcatatttggggcagctggggctggttataagagcctatgtgttgtccaaggcctcgttgacatttacatcttttcagaagataccacattcaaatgggactcttgtgctgctcatgccatactgcgggccatgggtgggggaatagtagacttgaaagaatgcttagaangaaatccagaaacagggcttgatttgccacagttggtgc

SEQ ID NO: 21814 - DNA, 389 bp, Homo sapiens
gggtggtggcggcggaggctttggcagctcgggactgagtgcaagaatcagcatgattcttcagaggctcttcaggttctcctctgtcattcggtcagccgtctcagtccatttgcggaggaacattggtgttacagcagtggcatttaataaggaacttgatcctatacagaaactctttgtggacaagattagagaatacaaatctaagcgacagacatctggaggacctgttgatgctagttcagagtatcagcaagagctggagagggagctttttaagctcaagcaaatgtttggtaatgcagacatgaatacatttcccaccttcaaatttgaagatcccaaatttgaagtcatcgaaaaaccccaggcctgaagaaataaag

SEQ ID NO: 21815 - DNA, 474 bp, Homo sapiens
  misc_feature (1)...(474): n = a,t,c or g
gttgaaanccctttganatgatcacgaatttaatangactcactatagggaatttggccctcgaggccaagaattcggcacgagatcaggccctttcagctctatgagatcatcgtgactcccttgtaccaggacaccatgggaccctcccagcatgtctatgcctactctcaagaaatggctccctcccatgccccagagctgcatctaaagcacattggcaagacctgggcacagctggagtgggtgcctgagccccctgagctggggaagagcccccttacccactacaccatcttctggaccaacgctcagaaccagtccttctccgccatcctgaatgcctcctcccgtggctttgtcctccatggcctggagcccgccagtctgtatcacatccacctcatggctgccagccaggctggggccaccaacagtacagtcctcaccctgatgaccttgaccccagagggg

SEQ ID NO: 21816 - DNA, 700 bp, Homo sapiens
gggcagctggaccccaggacagtgcagctgttctggaagccagtgcccctggaggaagacagcggacggatccaaggttatgtggtttcttggagaccctcaggccaggctggggccatcctgcccctctgcaacaccacagagctcagctgcaccttccacctgccttcagaagcccaggaggtggcccttgtggcctataactcagccgggacctctcgtcccactccggtggtcttctcagaaagcagaggcccagctctgaccagactccatgccatggcccgagaccctcacagcctctgggtaggctgggagccccccaatccatggcctcagggctatgtgattgagtgggggcctgggcccccccagcgcgagcaatagcaacaagacctggaggatggaacagaatgggagagccacggggtttctgctgaaggagaacatcaggccctttcagctctatgagatcatcgtgactcccttgtaccaggacaccatgggaccctcccagcatgtctatgcctactctcaagaaatggctccctcccatgccccagagctgcatctaaagcacattggcaagacctgggcacagctggagtgggtgcctgagccccctgacctggggaagagcccccttacccactacaccatcttctggaccaacgctcagaaccagtccttctccgcatct

SEQ ID NO: 21817 - DNA, 428 bp, Homo sapiens
tcgaacagctatgacatgattacgaatttaatacgactcactatagggaatttggccctcgaggccaagaattcggcacgagacaggataggagaggaatcaggagaacctgaaggcgctggtgtttgatggggctctcatcatagattagcgtaggttgatgagcaggctgggtgcagcataatttctgaggagggtccacattattacagcatagataccaggatgagcaactactttttacctggtctactttttgctctctttccccatcttgtaacagtttaatttaaaaaaaatgtacacgtggtgagtccaactgcagaaatagttcctcaatgatacattcggtgtatcactcagtgaggcattggcctctgagtttacctctcaggcctctgaggagagagaatattcattcatcttta

SEQ ID NO: 21818 - DNA, 493 bp, Homo sapiens
  misc_feature (1)...(493): n = a,t,c or g
gnnnccnaaacanctatgacatgattacgaatttaatacgactcactatagggaatttggccctcgaggccaagaattcggcacgagcgctgtcggtctcccgtcctccgacatcttgtctggaacttccgcctggcagtctccagtaggagtggagctctgtgcggcgtagtttggtggaaaaacgggccttgcgtcggcctcacccccagtgtttgtgtttcagaatgaagactattctcagcaatcagactgtcgacattccagaaaatgtcgacattactctgaagggacgcacagttatcgtgaagggccccagaggaaccctgcggagggacttcaatcacatcaatgtagaactcagccttcttggaaagaaaaaaaagaggctccgggttgacaaatggtggggtaacagaaaggaactggctaccgttcggactatttgtagtcatgtacagaacatgatcaagggtgttacactgggcttccg

SEQ ID NO: 21819 - DNA, 477 bp, Homo sapiens
gaacacaaatgatcttgagaccactttagtgtacttacatttagatgagtttgaaatctcaatggtgtctaattattgcagttaaattctagacatcagttctttaagtctcagaaaacgcccagtgaattggtaaacttagttctttttttggaagtgctgccttttcacaccaaatccaagaagcctgtgatgtcttatgaaccttatgagaaaactccgaagaggtgtgagcaggattcttctgaatgactgtctggatggttcattactcaagttactgctgctgctattgtctttcctttgttgtcgatctgttattgttgtattattattgttgatgttgtcatggttaatctattttttaaaattgaaatgaagcagaagtaggccttgtgagaactgaaaggctctttcatttttctcttcctgggattcattttttcaaaaccacatgctggaaaaaaaagattggtt

SEQ ID NO: 21820 - DNA, 525 bp, Homo sapiens
tgaataccgtttgactgattacgaatttaatacgactcactatagggaatttggccctcgaggccaagaattcggcacgagaaagaactcagtgggtttcagttcccagttgtatggctatgcacttcttgggaaggtggagttgcagcaagggctacgggctgtgtaccacaacatgcctctgatatggaaaccaggctaccttgacagagcccttcaagtgatggagaaagtggctgcctccccagaagacataaagctgtgtagagaagcgctcgatgtgctggatgcagtgctgaaggctctgacttcagctgatggggcttcagaggagcagtcccaaaatgatgaagacaaccaggggtcagaaaaactggtggagcagttagacatcgaggaaacagagcagtccaagcttcctcaatacctggaacgatttaaggccttacattctaagcttcaagctctgggcaaaattgagtcagaaggtcttttaagtctgacccccagcttgtcaaggaaaaa

SEQ ID NO: 21821 - DNA, 643 bp, Homo sapiens
  misc_feature (1)...(643): n = a,t,c or g
gagaacgtgaaggcattctacagacgggctcaagcccacaaggcactcaaggactataaatccagctttgcagacatcagcaacctcctacagattgagcctaggaatggtcctgcacagaagttgcggcaggaagtgaagcagaacctacactaaaaacccaacagggcaactggaacccctgcctgaccttacccagagaagccatgggccacctgctctgtgcccgctcctgaaacccagcatgccccaagtgagctctgaagccccctcctcaatcccttgatggcctcccaccctgtaagaggctttgcttgttcaaattaaactcagtgtagtcaaacacagacatggttgttgcaccagaaaggtccccactagagctaagcgtgaagctgaagctctgtccctattcccccagcccagctagctgatcacaccaacagatcctcatcagcaaagcatttggctttgtcctgcccaagtgggctgcagactgagtgctgcccttgtagcttccccagaccccaactcactgcagntctntgaacnncctgngctcctgngccggagtggnttnaggannngangncnnngnnnctggcnnccccnnntnccnnannnnnnatcttnnanncttctg

SEQ ID NO: 21822 - DNA, 508 bp, Homo sapiens
gctatgacatgattacgaatttaatacgactcctatagggaatttggccctcgaggccaagaattcggcacgagatttaaaattagagacatgtttgcatacaatggattaatgacgttttcatactaacccacaaaagtctgctgcactttcttttgtaggcctaacattcatttcatatgcattgattattattgttgaacttgcattaattacatcgtgcatatatggacatacaatgtcatctgcagaatttaggattttttattgttaatttttatagtgactgtggattgaggaattaaaattagcatgcttcatttataatagtatttctagtgtttcattagccctaaaaatgtgataagatcaggaataagattggaatgaaaatttctccttaaaatggtaccgtcttttgaaaacattttgtttataatatatagctaatcctaatttattacagtctttcaatatattctttaatttgattctataaggcttataa

SEQ ID NO: 21823 - DNA, 605 bp, Homo sapiens
  misc_feature (1)...(605): n = a,t,c or g
ggngnnnnnnttggaacagcttgactgattacgaatttaatacgactcactatagggaatttggccctcgaggccaagaattcggcacgagccagaaaatgtcgacattactctgaagggacgcacagttatcgtgaagggccccagaggaaccctgcggagggacttcaatcacatcaatgtagaactcagccttcttggaaagaaaaaaaagaggctccgggttgacaaatggtggggtaacagaaaggaactggctaccgttcggactatttgtagtcatgtacagaacatgatcaagggtgttacactgggcttccgttacaagatgaggtctgtgtatgctcacttccccatcaacgttgttatccaggagaatgggtctcttgttgaaatccgaaatttcttgggtgaaaaatacatccccaggggttcggatgaagaccagngttgcttgttcagtatctcaagcccagaaagatgaattaatccttgaaggaaatgacattgagcttgnttcaaattcacggntttgattcancaagccccaacngntaaaaacnaggatttnngaaattttggtgggntctatgcnctgaaaaaga

SEQ ID NO: 21824 - DNA, 967 bp, Homo sapiens
gttaggttctaaagttctaagattctgattttaggagctaaggctctatgagtctagatgtttattcttctagagttcagagtccttaaaatgtaagattatagattctaaagattctatagttctagacatggaggttctaaggcctaggattctaaaatgtgatgttctaaggctctgagagtctagattctctggctgtaaggctctagatcataaggcttcaaaatgttatcttctcaagttctaagattctaatgatgatcaattatagtttctgaggctttatgataatagattctcttgtataagatcctagatcctaagggtcgaaagctctagaatctgcaattcaaaagttccaagagtctaaagatggagtttctaaggtccggtgttctaagatgtgatattctaagacttactctaagatcttagattctctgtgtctaagattctagatcagatgctccaagattctagatgattaaataagattctaacggtctgttctgtttcaaggcactctagattccattggtccaagattccggatcctaagcatctaagttataagactctcacactcagttgtgactaactagacaccaaagttctaataatttctaatgttggacacctttaggttctttgctgcattctgcctctctaggaccatggttaagagtccaagaatccacatttctaaaatcttatagttctaggcactgtagttctaagactcaaatgttctaagtttctaagattctaaaggtccacaggtctagactattaggtgcaatttcaaggttctaaccctatactgtagtattctttggggtgcccctctccttcttagctatcattgcttcctcctccccaactgtgggggtgtgcccccttcaagcctgtgcaatgcattagggatgcctcctttcccgcaggggatggacgatctcccaccttt

SEQ ID NO: 21825 - DNA, 639 bp, Homo sapiens
  misc_feature (1)...(639): n = a,t,c or g
ggagactacatagggctcggcgtggcattggctcaggggagggaggcagtgatcgagacatcagagacagtcagaggaggagcaggaggaataagaccaaagaaatattaagaaagagataacaggatagacagacagtggggctagagttaaatttatgtatcaaggccatcctggtaagaacagggagcaggagttttaatggaatttatcctggacccccaaggtcacagtgggagggaggatcagggaggacctaaaagcaaaggacaaaggggcctggggctgacccgtctgacttcccgtccgtgcccgagcccactcgagccgcagccatgtctggggacgagatgatttttgatcctactatgagcaagaagaaaaagaagaagaagaagccttttatgttagatgaggaaggggatacccaaacagaggaaacccagccttcagaaacaaaagaagtggagccagagccaactgaggacaaggatttggaagctgatgaagaggacactaggaaaaaagatgcttctgatgatctagatgacttgaacttctttaatcaaaagaanaagaagaagagaactataaagatatttgatattgatgaagctgaagaaggtgtaaaggatctta

SEQ ID NO: 21826 - DNA, 513 bp, Homo sapiens
  misc_feature (1)...(513): n = a,t,c or g
gtaagctttggtggatgtcactcctttaatcctcacaacaccctgtcgggtagtcatattttgcaagtatggaagcagaggcagggcaacattaagtagcttacataactcacacggtaatttgtgcagttgggagatgttcagcttcagtccctggccaattgcccgttcttttccagcctgatttttcctgcatgggaagagcccacatgtagccctgaggttcccttcccaggacagctccaggatcgagatcactgtgagtggttgtggagttaagacccctatggactccttcccagctgattatcagagccttagacccagcactccttggattggctctgcagagtgtcttggttgagagaataacgttgcagttcccacagggcatgtgactttgaaagagactaaaggccacactcagttaataatggggcacagatgtgttcccacccaacaaatgtgataagtgatcgtgcagccagagccancttccttcagtcaaggttc

SEQ ID NO: 21827 - DNA, 415 bp, Homo sapiens
  misc_feature (1)...(415): n = a,t,c or g
ggtgactgggatcactcaacagcactgtgatgtattattttcaatgaggtgcctttcttaactgaccaaatgctgccttgtttggcccctaaatcaataaaatatgttaaaatttgtatcccctgttgtggcattttttttagataatctaagctagaaaaatgacattgaattctggacctggctggaaggaaaagaagccctttcttgtcgctggcagctgtgtggtagggaggtccaagtatgtgcatatgagataagcctgcaacctcttgaccttcagctcctatgcaggcttctcttgagcccagagacaaggcagcttggtctagtggagatagcactgtgcttggagttcaggggacctaggacaaatcccagccagttagttattcactgngctcctgtttcctca

SEQ ID NO: 21828 - DNA, 529 bp, Homo sapiens
accgctatgacatgattacgaatttaatacgactcactatagggaatttggccctcgaggccaagaattcggcacgagaataccctgtaagggtctgaataaatgaatgagtgaggggatgaacgcccaactccagtcacatggtctctgacttctgtctgcagggtggggtcaaggtgctcatcacaggtccttggaccgaagccgccgagcattactcctgtgtctttgatcacatcgcagtgccagcctcacttgtccagcctggtgtcttacgctgctactgtcccggtatgaggattgggaaccgtagcgggagggactgacatgtgggcagttaggacagatcaggacctccaggcttccagaaagcactgggaacaaatgggttgttttgagagcacaaggacttcatccagtcctgaggttgagccccaagctctccagcaggcagaagagcccagacttaggtgtcagaagaacgaggttctggtccaagaagtctactccttagctaaccagtgacctc

SEQ ID NO: 21829 - DNA, 383 bp, Homo sapiens
  misc_feature (1)...(383): n = a,t,c or g
gaacttgcggatgcacttgagtgctctttctgaaacacagactgagcaaataaaatctaaactccataggcacccagggtccctcgtgatccttccactctctgcagcttcatcttgagccactcacacatcagctcctgcctacacgtgagccatactgacatctttcagctcacctcccaccttcagctgctgtgtctaggccttcgcagcgctgtgccttgtgcctgacacagtattcactatcttccccagcatctcaattccctctccattcttgctttagctggaaggtcccttctgacagcctgccgctaaaaagatgggtgttttaacttcctatggctgctgnaacaaatcactgcagccataggaaactaatg

SEQ ID NO: 21830 - DNA, 444 bp, Homo sapiens
gcctcaaacatatctagagtttccctcaattgttcatttttcttaactttcatttccctaattgggtgaagattgtgatgtggtcattttatgaatcgcccaacaaaataagcagttaaaccaaagggtgtttgtttgagaaagttctatttatccagaaagaaggaaagatataaattttagcaaaacacatcaaattagaagacagctttgtgagatagaaaaatgtctagtcagtctctgaaactccctcctcactggtagtttagagagaaacaaaacagaatggggtttctcaaatgagtgctaaagttcccctcacaaggaaaacatttcccaataattcctgctttgccttaaacccactaccatgaagatcagcagtaacaggagacacggcggtgtgcttcggccgtgaggttgttgcttggtgatgtgacaggc

SEQ ID NO: 21831 - DNA, 455 bp, Homo sapiens
  misc_feature (1)...(455): n = a,t,c or g
gctctagccaacttttgggagcgcttctgtttgcaaagcgctggggatgtgcctgtctctgtgtgacccacgaacgggaagggagagcactggagtaatgacacttctgctgctgctttgattctcaaggctgatctttaaaaccctcgccttgctgacaggtgctttaaaggcagtctgcatcttttcttcccttggtgtgggagaggtaaacactttgatttgctgaaagctgtatggagtatatttgaacagctagtagttagctttgaaagtggaagtgtgaacagacactacttgtgtcgctttgggtccttcactttacccccacagaagtctagaggcgtctgttataaagcgttacggggcgcctgcatgcaggaggaaggacctgtattagctggaaatcatcaggaacccagcttgcctccatctctctgagatgngctggggac

SEQ ID NO: 21832 - DNA, 981 bp, Homo sapiens
  misc_feature (1)...(981): n = a,t,c or g
gctaataactgttttgtagaatgcctgccggggttttccacctcatccctttcctccggccccttgatttgtgctggacaacaaatggcagcaccaggacctcgcctcatgtggctttgtcttggatcttgcccttctccatcgctgatgtgatacagctctagaatttcgtgaagttgcatgcaaagttgcatgcagcccgtgggtatgactgtctcaggcccccagctcatttgccaagaggaaaccttaacccccctgagagggtctgcgtttcttctagagctcctacctcagtggtgtgcacagagttggagacacctgagggctggtccacgtctcacctttgccatacgggtcatttcttgatcaaatatatgactggggtcctggtttactcccgcccaccgtttcntttaaagtattcttaacatgaaatccacaaaagcggaaacaatgaaccattcttgcactttacagaatcattgtccttagctttagaggttgttaatttcttgtttttaacatgaacagaatgtgtggttctgaaggtgtgtgggggtctcaagaaattgtcctttggggccgggctcagtggctcacgcctgtactcccancactctgggaggccaagggggacggatcacctgaggtcaagagtttgagaccaccctgaccaacatggtgaaaccccgtctctactaaaatacaaaaattaggcagtcgtggtcgcctgtaatctcagctcttccggaggctgangcagganaatcgcttgaacccaggaggcanaggttgcagtgagccgaggttgcgccactgcactccancctgggtgaccgagtaanactgtctcaaanaaaaaaaagngaaangaanannnnnaaacnaattgcccttgggtnctnagttacananttgangaangtaaanttccggnnantggggggaanncggnnnaccctccttgnnttttctttg

SEQ ID NO: 21833 - DNA, 691 bp, Homo sapiens
cgtttttgttaaaagtcactctgccctatgtagggggagcaggtctggctgtgatggagcagcagagataaaatttaggctggtctaagcacagctgcatttttttgtttttgagacagagtctcactgtgtcgccctggctggagtgcagtggcgtgatctcagttcactgcaacctttacctcccgggttcaagtgattctcctgcctcagcctcctgagtagctgggattacaggcatgcgccactatacccagctaatttttgtatttttttggtggagccatgttgcccatgttggtcttgaactcctgggctcaggtgattcacccaccttagcctcccaaaatgctacggttgtatgagtgagccaccaggcccagcctttgtagccattctttctaaatatgtctttccactatagcagcaaacgcctccatcatcccttcagtgaacaaatacccactcccatgttcccactataaaggagagacaagtttaatttcaggaggctccggggccacctgaaaacgatgactggaacctttacaggattaatcttccatcaatctttcatttcttggacatcaattgaattgaaggtgggctacaataggaaagttcctttgaactttataactgcccaaaatctcctcctgaatccagaaccttttcatcctgaagaggtttt

SEQ ID NO: 21834 - DNA, 425 bp, Homo sapiens
  misc_feature (1)...(425): n = a,t,c or g
ggngnnnnnnttgnnttganaangctatgactgattacgaatttaatacgactcactatagggaatttggccctcgaggccaagaattcggcacgagggaacgtctgaggttatcaataagctcctagtccagacgccatgggtcatttcacagaggaggacaaggctactatcacaagcctgtggggcaaggtgaatgtggaagatgctggaggagaaaccctgggaaggctcctggttgtctacccatggacccagaggttctttgacagctttggcaacctgtcctctgcctctgccatcatgggcaaccccaaagtcaaggcacatgatggcctggctcacctggacaacctcaagggcacctttgccacactgagtgagctgcactgtgacaagctgcacgtggatcctgagaacttcag

SEQ ID NO: 21835 - DNA, 492 bp, Homo sapiens
  misc_feature (1)...(492): n = a,t,c or g
gnnttcntancagctatgacatgattacgaatttaatacgactcactatagggaatttggccctcgaggccaagaattcggcacgagtccaccttcagcaagctgcgcgaacagctcggccctgtgacccaggagttctgggataacctggaaaaggagacagagggcctgaggcaggagatgagcaaggatctggaggaggtgaaggccaaggtgcagccctacctggacgacttccagaagaagtggcaggaggagatggagctctaccgccagaaggtggagccgctgcgcgcagagctccaagagggcgcgcgccagaagctgcacgagctgcaagagaagctgagcccactgggcgaggagatgcgcgaccgcgcgcgcgcccatgtggacgcgctgcgcacgcatctggcccctacagcgacgagctgcgccagcgcttggncgcgcgccttgaggctctcaaggagaacggcggnccagactggt

SEQ ID NO: 21836 - DNA, 700 bp, Homo sapiens
aattcggcacgaggcgagaatgaagactattctcagcaatcagactgtcgacattccagaaaatgtcgacattactctgaagggacgcacagttatcgtgaagggccccagaggaaccctgcggagggacttcaatcacatcaatgtagaactcagccttcttggaaagaaaaaaaagaggctccgggttgacaaatggtggggtaacagaaaggaactggctaccgttcggactatttgtagtcatgtacagaacatgatcaagggtgttacactgggcttccgttacaagatgaggtctgtgtatgctcacttccccatcaacgttgttatccaggagaatgggtctcttgttgaaatccgaaatttcttgggtgaaaaatatatccgcagggttcggatgagaccaggtgttgcttgttcagtatctcaagcccagaaagatgaattaatccttgaaggaaatgacattgagcttgtttcaaattcagcggctttgattcagcaagccacaacagttaaaaacaaggatatcaggaaatttttggatggtatctatgtctctgaaaaaggaactgttcagcaggctgatgaataagatctaagagttacctggctacagaaagaagatgccagatgacacttaagacctacttgtgatatttaaatgatgcaataaaagacctattgatttgaaaaa

SEQ ID NO: 21837 - DNA, 415 bp, Homo sapiens
ctatgacatgattacgaatttaatacgactcactatagggaatttggccctcgaggccaagaattcggcacgagagtttgctacctgaaggcttcatctacatgaaaagaacctgggcttggctgggcacagcggctcacatctgtaatcccagcactttgagaggctgaggcaggcagatcacctgagctcaggagttggagaccagcctgggcaacatggcaaaacccaatctctgcaaaagataaaaaaaattagctgggcatggtggcacgcacctgtagtcccagctactcaggaggctgaggcagaactgctcgagtctggcaggcggaggttttggtgagccacgattgcgccattgcacttcagcctgggagacagagcaagactctgtgaccaaaaaaaaaaaaaa

SEQ ID NO: 21838 - DNA, 743 bp, Homo sapiens
  misc_feature (1)...(743): n = a,t,c or g
gtccgcgggagacgtggtgccgctgcgggctcgctctgccgtgcgctaggcttggtgggaaggcctgttctcgagtccgcgcttttcgtcaccgccatgtcgggaggtggtgtgattcgtggccccgcagggaacaacgattgccgcatctacgtgggtaacttacctccagacatccgaaccaaggacattgaggacgtgttctacaaatacggcgctatccgcgacatcgacctcaagaatcgccgcgggggaccgcccttcgccttcgttgagttcgaggacccgcgagacgcggaagacgcggtgtatggtcgcgacggctatgattacgatgggtaccgtctgcgggtggagtttcctcgaagcggccgtggaacaggccgaggcggcggcgggggtggaggtggcggagctccccgaggtcgctatggccccccatccaggcggtctgaaaacagagtggttgtttcaggacttcctccgtcaggcagctggcaggacctgaaggatcacatgcgagaagctggggatgtctgttatgctgatgtgcagaaggatggagtggggatggtcgagtatctcagaaaagaagacatggaatatgccctgcgtaaactggatgacaccaaattccgctctcatgagggtgaaacttcctacatccgagtttatcctgagagaacnccactatggtactcacggnctcggcttgggcaaggggcccgaanttttttttccaa

SEQ ID NO: 21839 - DNA, 725 bp, Homo sapiens
gcctgatgagcgccatgaacatcaagctggggcccgccctgaagatctacgcccgcatcagcatgctcaaggactcctagggctggtggcagccaggattctggcccagggcgcctcctcccgactgagcagagccagacagacattcctgaggggcccagaaatggggccggttggagggcaggggctctccctaggggcatagctggtgaggaggtctgggcacctcctccatggctctcaggggcctttcatttctgtgggaggggcagagaggtaggtggcacagaagatggggctttatgcttgtaaatattgatagcactggcttcctccaaagtcccaatactctagccccgctctcttcccctctttctgtcccccattttccagggggtatatggtcagggctccccaacctgagttgggttacttcaagggcagccagcaggcctggatggaggcctagaaagcccttgccttccttcctcccacttctttctccaggcctggttaactcttccgttgtcagcttctcccccttcagcctgtttctgcagcagccagggttctcccccctacaccctctgcaggtggagagagagaagctgggcccagccgggccgtgcctgctggcacagacgccttaacgctgtgtgtatgactgtgtgactgtgtgggaacctggactgacagataggccaagggctactctctggcatctc

SEQ ID NO: 21840 - DNA, 442 bp, Homo sapiens
gggcaaatcagggcccatgacgggggtggttctggtggctgttggggaggtggctatgaagatcctgcttctctgcctctgcctcatcctcctcagagtgaggtcttgcaggaggaaggcagcaagggcagcattgggcatggaggctgcagacgctgtcacggactaatctccagactccagactgcttccagatgcctcctcatccagttcctccacagtctgagcggccgtgtttcctctgcaggctttgcatggtctgtcccctgctggactctcctgatccctcctttccctgtcacccaacatctccccaaaccctccgggccaaggactctgcggctcttgacactttgcacgtgtagtttcttctcctgaaacacccttccctcctgccaaaccacgtctggaccctccttcaggttcactttttttttttttt

SEQ ID NO: 21841 - DNA, 396 bp, Homo sapiens
ggtagatggaaccctccttttactcctctcggaggccctggcccttacccagacctgggcgggctcccactccttgaagtatttccacacttccgtgtcccggcccggccgcggggagccccgcttcatctctgtgggctacgtggacgacacccagttcgtgcgcttcgacaacgacgccgcgagtccgaggatggtgccgcgggcgccgtggatggagcaggaggggtcagagtattgggaccgggagacacggagcgccagggacaccgcacagattttccgagtgaatctgcggacgctgcgcggctactacaatcagagcgaggccgttcgcctacgacggcaaggattatctcaccctgaatgaggacctgcgctcctggaccgcggtgg

SEQ ID NO: 21842 - DNA, 701 bp, Homo sapiens
  misc_feature (1)...(701): n = a,t,c or g
gcaaagcgttttaaaaaagaagaaattctttccagttctgacatttgtcaaaagttagtaaatactcaggacatgtcagcctctcaggttgatgtagctgtgaaaattaataagaaagttgtgcccctggacttttctatgagttctttagctaaacgaataaagcagttacatcatgaagcacagcaaagtgaaggggaacagaattacaggaagtttagggcaaagatttgtcctggagaaaatcaagcagccgaagatgaactaagaaaagagataagtaaaacgatgtttgcagaaatggaaatcattggtcagtttaacctgggatttataataaccaaactgaatgaggatatcttcatagtggaccagcatgccacggacgagaagtataacttcgagatgctgcagcagcacaccgtgctccaggggcagaggctcatagcacctcaggctcaacttaactgctgttaatgaagctgttctgatagaaaatctggaaatatttagaaagaatggctttgattttgttatcgatgaaaatgctccagtcactgaaagggctaaactgatttccttgccaactagtaaaaactggaccttcggaccccaggacgtccatgaactgatcttcatgctgagcgacagccctggggtcatgtgccggcctttccgagtcaaagcanatgtttgcctcc

SEQ ID NO: 21843 - DNA, 347 bp, Homo sapiens
  misc_feature (1)...(347): n = a,t,c or g
cttggcacgaggattagctagcgctcgctctactctctctaacgggaaagcagcggaatacaagagactgaactgtatctgcctctatttccaaaagactcacgttcaactttcgctcacacaaagccgggaaaattttattagtcctttttttaaaaaaagttaatataaaattatagcaaaaaaaaaagggaaaaanaggttaaattaagtngattttntggggttgtnggttgtncnntagnctnncgggganggaanctgcncattttttcaaagggnccgaaaacctgntgnnggttgggttnncccggcancagcccgacgcaaaccanggatntggggat

SEQ ID NO: 21844 - DNA, 504 bp, Homo sapiens
gcttcccttatggtggcatggagaatccttgccttacttttgtaactcctactctactggcaggcgacaagtcactctccaatgtcattgcacatgaaatatctcatagctggacagggaatctagtgaccaacaaaacttgggatcacttttggttaaatgagggacatactgtgtacttggaacgccacatttgcggacgattgtttggtgaaaagttcagacattttaatgctctgggaggatggggagaactacagaattcggtaaagacatttggggagacacatcctttcaccaaacttgtggttgatctgacagatatagaccctgatgtagcttattcttcagttccctatgagaagggctttgctttacttttttaccttgaacaactgcttggaggaccagagattttcctaggattcttaaaagcttatgttgagaagttttcctataagagcataactactgatgactggaaggatttcctgtattcctatt

SEQ ID NO: 21845 - DNA, 477 bp, Homo sapiens
  misc_feature (1)...(477): n = a,t,c or g
gnnngnnnnntgnttngntncctatgaagaccgttatgacatgattacgaatttaatacgactcactatagggaatttggccctcgaggccaagaattcggcacgagcctgctgctctggggggccctggccctgaccgagacctgggccggctcccactccatgaggtatttctacaccgccatgtcccggcccggccgcggggagccccgcttcatcgcagtgggctacgtggacgacacgcagttcgtgaggttcgacagcgacgccgcgagtccgagagaggagccgcgggcgccgtggatagagcaggaggggccggagtattgggaccggaacacacagatctacaaggcccaggcacagactgaccgagagagcctgcggaacctgcgcggctactacaaccagagcgaggccgggtctcacacttggcagacgatgtatggctgcgacctggggccggacggcgcctct

SEQ ID NO: 21846 - DNA, 625 bp, Homo sapiens
ctcatggattctacccctgccttcctggcctcttgattcttggcttgcctctcctccaattccaaacttagtgaaatggccttaagcattttaaactgtatgtatacattagcgcattcatgcctttctaaacgcatttcaaatgtcaaccaggaaggcacaccactgtattagttttatactgccgctgtaaaatttaccacaaacttagtgacttaacacaaatttattgcaattctgtaggctggaagtctgactatgggtctcactggactagaatcaaggctggcaggctgccttccttcctggaggttctaggggagactctgtctcctgctccttcaggctgctggcagaatccacatcctttcggtggcagggccaaggtccccactttcttgctgactgtaaactaaggccacttccagcttgtagaggctgcctacattccttggctcttggccccctcctccatcttcagagctagcaggttcagtctgtgtcacgaaccatttctctggttccctgcagacaggaaaggttgtccctaaggactcatgagattaggttgggcccagccagataatacatgataatctccctcctcaagggttttaatattaaa

SEQ ID NO: 21847 - DNA, 391 bp, Homo sapiens
ctcactatagggaatttggccctcgaggccaagaattcggcacgagctggaagaagatgtctgcagagagatggggtttcgccatgttggacagactggtcttgaactcctggcctcaagtgatccacccgcctcggcctcccaaagtgctgagattacaggagctggagaatcagtactgtcccagccgatgggttgtccgactgggagcagaggaagccttgaggacctactcacagataggaattgaagtccatttataggcttgagaactcctgtgtgaattaaatcacgaccttctgatgaagccactccgatgagcctgtgaggcacattgtcttcacactgtgctggggcagggttgttggcaaacccccatggatggcagccg

SEQ ID NO: 21848 - DNA, 352 bp, Homo sapiens
ggtagttaggctgaaagtggacttcccactgctgagccacccaagaggcacactgagcattagtgacgggtgagccacataagaataatgtttaaaaaagagaggacttgaagtagctatgcgaaaatttagaactttgcactttgttaacgcttatttatggtttagtgttgatgccatttggagtgacctatgggttggacccatatctttttattattaaggtctcaatctggctctggttaataaacgtttcccgcttcatcccttaggaaaatggtccaagtctcctcaggcttttggatactgaattgttataaaacacatcaattctgccagtttataaaacact

SEQ ID NO: 21849 - DNA, 445 bp, Homo sapiens
ggaagaagtcagtggccaaactgcaggatgaaagaacagtgcggaagatctgtgctttggatgacaacgtctgcatggcctttgcaggcctcaccgccgatgcaaggatagtcatcaacagggcccgggtggagtgccagagccaccggctgactgtggaggacccggtcactgtggagtacatcacccgctacatcgccagtctgaagcagcgttatacgcagagcaatgggcgcaggccgtttggcatctctgccctcatcgtgggtttcgactttgatggcactcctaggctctatcagactgacccctcgggcacataccatgcctggaaggccaatgccataggcccggggtgccaagtcagtgcgcgagttcctggagaagaactatactgacgaagccattgaaacagatgatctgaccattaagctggtgatcaagg

SEQ ID NO: 21850 - DNA, 673 bp, Homo sapiens
  misc_feature (1)...(673): n = a,t,c or g
tttgataccccttgacatgattacgaatttaatacgactcactatagggaatttggccctcgaggccaagaattcggcacgagggccgtcatggcgccccgaaccctcgtcctgctactctcgggggctctggccctgacccagacctgggcgggctctcactccatgaggtatttcttcacatccgtgtcccggcccggccgcggggagccccgcttcatcgcagtgggctacgtggacgacacgcagttcgtgcggttcgacagcgacgccgcgagtccgagaggggagccgcgggcgccgtgggtggagcaggaggggccggagtattgggaccgggagctgcggacgctgcgcggctactacaaccagagcgaggacgggtctcacaccctccagagcatgtacggctgcgacgtggggccggacgggcgcctcctccgcgggcatgaccagtacgcctacgacggcaaggattacatcgccctgaacgaggacctgcgctcctggaccgccgnggacaccgaggtcaaatcaccaacgnaatttgangggggccctttngggggnnaacttanaactacttganggnactnctngngggggnccnnnnnatanngnnannnnnangncccnnnnngnnnnnncnnnnnnnnnacgannnnnnnnccct

SEQ ID NO: 21851 - DNA, 595 bp, Homo sapiens
gaaaagatgctctggagaatatagaccctgctacccagatgatgattctcaactgcatctacttcaaaggatcctgggtgaataaattcccagtggaaatgacacacaaccacaacttccggctgaatgagagagaggtagttaaggtttccatgatgcagaccaaggggaacttcctcgcagcaaatgaccaggagctggactgcgacatcctccagctggaatacgtggggggcatcagcatgctaattgtggtcccacacaagatgtctgggatgaagaccctcgaagcgcaactgacaccccgggtggtggagagatggcaaaaaagcatgacaaacagaactcgagaagtgcttctgccgaaattcaagctggagaagaactacaatctagtggagtccctgaagttgatggggatcaggatgctgtttgacaaaaatggcaacatggcaggcatctcagaccaaaggatcgccatcgacctgttcaagcaccaaggcacgatcacagtgaacgaggaaggcacccaagccaccactgtgaccacggtggggttcatgccgctgtccacccaagtccgcttcactgtcga

SEQ ID NO: 21852 - DNA, 428 bp, Homo sapiens
gctcctcttaccaaagatgtttcacttctagatctggatgattttaacccagtatccactccagttgcacttcccacaccagctctttctccaagtttgatggctgatcttgaaggtttacacttgtcaacttcctcttcagtcatcagtgtcagtactcctgcatttgtaccaacgaaaactcacgtgctgcttcatcgaatgagtggaaaaggactagctgcccattatttctttccaagacagccttgcatttttggtgataagatggtctctatacaaataacactgaataacactactgatcgaaagatagaaaatatccacataggggaaaaaaaacttcctataggcatgaaaatgcatgtttttaatccaatagactctcttgagcctgagggatccattacagtttcaatgggtattgg

SEQ ID NO: 21853 - DNA, 210 bp, Homo sapiens
tgtcccctatcaatcgttgaggaaacatgaaatacaccaaattaccatgtgaggtttttgccacaaagaatccgttggccaggcccagtggctcacacctgtaatctcagcactttgggaggctgaagcgggaggatcgcttgagcccaggagtttgagaccagcgtgggcaacatagtgagaccccagtctctacaaaaaaaaaaaaaa

SEQ ID NO: 21854 - DNA, 438 bp, Homo sapiens
gcagtaaagtaaaaggaccagtaaagtaaaaggaccagtaaagagctagactgtgaccacttttagcagccatttgtagcatcaaggcctagagatttgcattctctccaggatctgccactgaccagccaggtgaccctggacaagtcacatcccttctcaggttcttgtttcctcacctgcaaagtgaagggtagactagatcatttctgccatcctttgagcttaaaaattatctccgactctcttcatcttctatcccaattgcctccaaagtgatctatgcaagatgcacattggggtgcaggaaaaaatatctaaacaaatagaacaaagaattcagctttagtcacatttgccaggtggagacacacttcgccagctggggtgtcaggcagcctcatgtggccaggagtctcctgctcatgtggccaagaa

SEQ ID NO: 21855 - DNA, 516 bp, Homo sapiens
aaccgctatgacatgattacgaatttaatacgactcactatagggaatttggccctcgaggccaagaattcggcacgagtggctgggcagagctggcacaggaggcttccaaaggaagcaactcaatcagggaagtcattaactccttgggattctagatcaacgcagggggcacgcgaaggaactgcactgcctgttagggaggggaaaatccctggttttgacatgtctggaaagagcagagaagtagaggaaagagcagagaagtagagcatctggcaaaggcccttgctttgggaaccccaggtccaggtgttactgcaaatacaggatgctcagcttgttgtgatgagggcaaatggagccatggggaggagctaaaaaaaaaatcaaaggcccccaaacatgcactaaaaatcccaaaaatgacctggcaatgaccctctcacagttcatttctacctgtgcccctcagctgccaccacgtcatggcttgtccccttccagctactcaga

SEQ ID NO: 21856 - DNA, 443 bp, Homo sapiens
  misc_feature (1)...(443): n = a,t,c or g
gnnnnnnnnnngnnntnnnnnnnnntnatttgannncctntgganacngctatgacatgattacgaatttaatacgactcactatagggaatttggccctcgaggccaagaattcggcacgagtatgcgaactgccacctggccagagccccgaatcacgctgtggtcacacggaaagataaggaagcttgcgtccacaagatattacgtcaacagcagcacctatttggaagcaacgtaactgactgctcgggcaacttttgtttgttccggtcggaaaccaaggaccttctgttcagagatgacacagtatgtttggccaaacttcatgacagaaacacatatgaaaaatacttaggagaagaatatgtcaaggctgttggtaacctgagaaaatgctccacctcatcactcctggaagcctgcactttccgtanacctta

SEQ ID NO: 21857 - DNA, 274 bp, Homo sapiens
  misc_feature (1)...(274): n = a,t,c or g
ggtaatgtttcgttaacttcccaaatacttgaaatttatctcattttaattgtcatgatagcagatgattataatcctgagattttaagctactttctcctaaattactcatcttgtttagtatatgttataataacaatgcattgaaattctttgtcttattaagaatcaacctcatatcatagcataaaaaactattcatatgtaatagcataaatcaggttttctagaggaaaagagctaatgnaaagattagnattctcttcttcattgt

SEQ ID NO: 21858 - DNA, 524 bp, Homo sapiens
  misc_feature (1)...(524): n = a,t,c or g
gatttaaacaaaaactaggcggttgaatgagaggttcctaagagtgctgggcatttttattttatgaaatactatttaaagcctcctcatcccgtgttctccttttcctctctcccggaggttgggtgggccggcttcatgccagctacttcctcctccccacttgtccgctgggtggtaccctctggaggggtgtggctccttcccatcgctgtcacaggcggttatgaaattcaccccctttcctggacactcagacctgaattctttttcatttgagaagtaaacagatggcactttgaaggggcctcaccgagtgggggcatcatcaaaaactttggagtcccctcacctcctctaaggttgggcaagggtgaccctgaagtgagcacaagcctaggggctgacctggggacctgggnaccctcctggctcttgatacccccctctgtcttgtgaaggcagggggaaggtggggtcctggagcagaccaccccgctgcctcatggcccctctgacctgca

SEQ ID NO: 21859 - DNA, 482 bp, Homo sapiens
ggaaatctcttgattcctagtctctcgatatggcacctccgtcagtctttgccgaggttccgcaggcccagcctgtcctggtcttcaagctcactgccgacttcagggaggatccggacccccgcaaggtcaacctgggagtgggagcatatcgcacggatgactgccatccctgggttttgccagtagtgaagaaagtggagcagaagattgctaatgacaatagcctaaatcacgagtatctgccaatcctgggcctggctgagttccggagctgtgcttctcgtcttgcccttggggatgacagcccagcactcaaggagaagcgggtaggaggtgtgcaatctttggggggaacaggtgcacttcgaattggagctgatttcttagcgcgttggtacaatggaacaaacaacaagaacacacctgtctatgtgtcctcaccaacctgggagaatcacaatgctgtgttttccgctgct

SEQ ID NO: 21860 - DNA, 499 bp, Homo sapiens
  misc_feature (1)...(499): n = a,t,c or g
gngnnnnnngnnnnnttnntntttgaantactaatcnccttctatgacangattacgaatttaatacgactcactatagggaatttggccctcgaggccaagaattcggcacgaggtgccttgatggtaccaggaaacctgtggaggagtatgcgaactgccacctggccagagccccgaatcacgctgtggtcacacggaaagataaggaagcttgcgtccacaagatattacgtcaacagcagcacctatttggaagcaacgtaactgactgctcgggcaacttttgtttgttccggtcggaaaccaaggaccttctgttcagagatgacacagtatgtttggccaaacttcatgacagaaacacatatgaaaaatacttaggagaagaatatgtcaaggctgttggtaacctgagaaaatgctccacctcatcactcctggaagcctgcactttccgtagaccttaaaatctcagaggtagggctgccaccaaggt

SEQ ID NO: 21861 - DNA, 479 bp, Homo sapiens
  misc_feature (1)...(479): n = a,t,c or g
tttgaantccttntgccatgatcacgaatttaatacgactcactatagggaatttggccctcgaggccaagaattcggcacgagcagaaaaggaaaaggaaaaagttcgaagaaatgaaaccatttttcactagcgacagccactttttactctccctcctgaccagtccagctggtctagagaaagccttgttttttcccagagcaaccatgttttagcataatgggatgacctggtgtcccattataaataaagggtggtatggctagaagggtatgagcagtaggcttatgtacacctcttatagaggttgataggactgcttgggtcctccactgtcctctgtcaatctagttagacgtgcttctgaatgactgtagaattggaactanaaactacacctgggctttggagcaaantttnntnacaattatgancttggaaccattnnnnctaaggcnnttttttgtaggcttaa

SEQ ID NO: 21862 - DNA, 456 bp, Homo sapiens
gctatgacatgattacgaatttaatacgactcactatagggaatttggccctcgaggccaagaattcggcacgagcggaatacaatgaagaattaaatgaagatgactctcaatctgatgagaaagaccaagatgctatagaaactgatgccatgatcaagaaaaagacaaaatcttcaaagccttcaaaaccagaaaaagataaggagcccagaaaaggaaaaggaaaaagttcgaagaaatgaaaccatttttcactagcgacagccactttttactctccctcctgaccagtccagctggtctagagaaagccttgttttttcccagagcaaccatgttttagcataatgggatgacctggtgtcccattataaataaagggtggtatggctagaagggtatgagcagtaggcttatgtacacctcttatagaggttgataggactgcttggg

SEQ ID NO: 21863 - DNA, 568 bp, Homo sapiens
tctatgacatgattacgaatttaatacgactcactatagggaatttggccctcgaggccaagaattcggcacgaggagagctagcaccaagcttaataccctggattcggaatacaatgaagaattaaatgaagatgactctcaatctgatgagaaagaccaagatgctatagaaactgatgccatgatcaagaaaaagacaaaatcttcaaagccttcaaaaccagaaaaagataaggagcccagaaaaggaaaaggaaaaagttcgaagaaatgaaaccatttttcactagcgacagccactttttactctccctcctgaccagtccagctggtctagagaaagccttgttttttcccagagcaaccatgttttagcataatgggatgacctggtgtcccattataaataaagggtggtatggctagaagggtatgagcagtaggcttatgtacacctcttatagaggttgataggactgcttgggtcctccactgtcctctgtcaatctagttagacgtgcttctgaatgactgtagaattggaactagaaactacacctgggct

SEQ ID NO: 21864 - DNA, 711 bp, Homo sapiens
gctttatctcatgtccttgaatataagttgtgtaactttattttttaggtaataattagaacagttcccttcagaggctgcatttgccttcttctgccacctaaatattacttcccttcaaatctgcctttgaatcatcatttttaaaaaaaaattaacatgtttttgttgtagttatcttctggggtttcaattcctcagaaacaacttttttcacaacggaaaggaaagaacactagtgttctttcagtaaagtacaaagtgtttattttacaaaagagtaggtactcttgagagcaattcaaatcatgctgacaaggatactgatagaaaaagtgatttcttcttattataaagtacatttaaagttcaaggactaaccttatttatttgggaaaggggaggaggaaggaaatgatatggtacccagacactgggctaggctgcaactttatctcatttaatactcccagctgtcatgtgagaaagaaagcaggctaggcatgtgaaatcactttcatggattattaatggatttaagagggcatcaatcagctcaactcaagatttcataatcatttttagtatttagattgtgcctcaaagttgtagtacctcacaatacctccactggtttcctgttgtaaaaaccttcagtgagtttgaccattgtgctcttggctcttgggctggagtaccgtggtgagggag

SEQ ID NO: 21865 - DNA, 638 bp, Homo sapiens
attctccccagtagctgggattacaggtgcccgccaccacaccagcctaatttttgtatttttagaggggtggagttccaccatgttggccaggctggtcttgaactcttgacctcaggtgatccttgagcctcagcctcccaaagtgctggaattataggcgtgaaccaccgcccccggctgcagttggatttttaaattgcttttttttattgttgaggtttttttatctccaagggactctcccggcacttctaccttccagagttacttcagtgcataaagtttgaattattttgttcttgtgggcagaagtgggaatgatggaatatcctcacggaaaaggcagtgaagttgggagtactgcttacaaaacagggtcaccagtgcattatgtggcgtgttcatccccacgccgtgtgtcacgggctagggcggcgtgttcatccccacaccgtgtgtcacaacaggctagggcacttcacgatgtcactacttgtttttctgacgttccaaaaacaacgtaacttggttttcatgtgtttttccatggtatatgtgagattgatgctaccgggtcttacggactcacaccccgttcccattctctgcaatatggatcaggcagtgtttctgat

SEQ ID NO: 21866 - DNA, 515 bp, Homo sapiens
  misc_feature (1)...(515): n = a,t,c or g
gtgtgntnnataatctgaaacctttgaanaccctttgactgattacgaatttantacgactcactatagggaatttggccctcgaggccaagaattcggcacgagcggcacgagtccatgggctaagaatctgaatgaaaaagactatgagttgctgtgccttgatggtaccaggaaacctgtggaggagtatgctaactgccacctggccagagccccgaatcacgctgtggtcacacggaaagataaggaagcttgcgtccacaagatattacgtcaacagcagcacctatttggaagcaacgtatctgactgctcgggcaacttttgtttgttccggtcggaaaccaaggaccttctgttcagagatgacacagtatgtttggccaaacttcatgacagaaacacatatgaaaaatacttaggagaagaatatgtcaaggntgttggtaacctgagaaaatgctncacctcatcactcctggaaacctgcactttccgtagaccttnaaatc

SEQ ID NO: 21867 - DNA, 637 bp, Homo sapiens
accctttatgacatgattacgaatttaatacgactcactatagggaatttggccctcgaggccaagaattcggcacgagctctgttacagctctgaccacgaaaaactgaagcctcagtacttggaagagctacctggacaactgaaacaattctccatgtttctggggaaattctcatggtttgccggggaaaagctcacctttgtggattttctcacctatgatatcttggatcagaaccgtatatttgaccccaagtgcctggatgagttcccaaacctgaaggctttcatgtgccgttttgaggctttggagaaaatcgctgcctacttacagtctgatcagttctgcaagatgcccatcaacaacaagatggcccagtggggcaacaagcctatatgctgagcaggaggcagacttgcagagcttgttttgtttcatcctgtccgtaaggggtcagcgctcttgctttgctcttttcaatgaatagcacttatgttactggtgtccagctgagtttctcttgggtataaaggctaaaagggaaaaaggatatgtggagaatcatcaagatatgaattgaatcgctgcgatactggcatttccctactccccaactgagtcaagggctggagg

SEQ ID NO: 21868 - DNA, 695 bp, Homo sapiens
ttttggctccagcaaccaagtccaacacaaaataggacatagccaggcctccttagccctcagggcctgaggggaagtggtggcttgtacctctaatagtctagtgggccgtcattcctccctggtgcataaggagcgaaggagcagtttttcccccagtgacaacctgttgaacacacctctgctttcccacactgccctgacacagtgggccccctgagaagaagatgggcatcaaggcttcaaacacagcagaggtgttctttgatggagtacgggtgccatcggagaacgtgctgggtgaggttgggagtggcttcaaggttgccatgcacatcctcaacaatggaaggtttggcatggctgcggccctggcaggtaccatgagaggcatcattgctaaggcggtagatcatgccactaatcgtacccagtttggggagaaaattcacaactttgggctgatccaggagaagctggcacggatggttatgctgcagtatgtaactgagtccatggcttacatggtgagtgctaacatggaccagggagccacggacttccagatagaggccgccatcagcaaaatctttggctcggaggcagcctggaaggtgacagatgaatgcatccaaatcatggggggtatgggcttcatgaaggaacctggagtagagcgtgtgctccgagatctt

SEQ ID NO: 21869 - DNA, 641 bp, Homo sapiens
ggaaagacaggcagtgctgcttcgtaacaggcatctttcttgccctaagtatacatcttagaatgtgtggagaaagtcacgctatgggagcacttgggcaggctcaggtgttcactgtagtagaaggagaatgactctagctgatgttgggaccctttgctgtcaccccgcagtccccacagtgcccggtgtgagttgtaagaaaatggtggtcagtgattgtcttcgcattttatatacgcacaggtcaaagagaatgaactctaaatgtttcccagtttgatttttctgcttctgtttagccacatgaaatgaagatcacctctgcctatctacaggacattgagaatgcctataagaaaacctttctccctgagatgagtgaaaaatgtgaggttttacagtattctgcaagggaagctcaagattcaaaaaaggtggtagaggacattgaatacctgaagttcgataaagggccgtggctcaagcaggacaatcgcactttataccacctgcgattactggttcaggataagtttgaggtgctgaattacacaagcattcctatctttctcccggaagtcaccattggagctcatcagactgccgtgtcttacatcagttcagagagctgccgggcc

SEQ ID NO: 21870 - DNA, 448 bp, Homo sapiens
gcgtgagcagcctgcagacttgtgtctgccttcaagaagccagacaggaaggccctgcctgccttggctctgacctggcggccagccagccagccacaggtgggcttcttccttttgtggtgacaacgccaagaaaactgcagaggccccagggtcaggtgtaagtgggtaggtgaccataaaacaccaggtgctcccaggaacccgggcaaaggccatccccacctacagccagcatgcccactggcgtgatgggtgcagagggatgaggcagccaggtgttctgctgtggtttgggagcctataaagtgagactaggctgggcatggtggctcccatctgcaaaaccagcactttgggaggccaaggtgggcggatcgcctgaggtcaggagtttgagaccagcctggccaacatggtgaacccccatctcttaaaaatataaaaa

SEQ ID NO: 21871 - DNA, 447 bp, Homo sapiens
  misc_feature (1)...(447): n = a,t,c or g
ntttgnanancgctatgacatgattacgaatttaatacgactcactatagggaatttggccctcgaggccaagaattcggcacgagcacgctgtggtcacacggaaagataaggaagcttgcgtccacaagatattacgtcaacagcagcacctatttggaagcaacgtaactgactgctcgggcaacttttgtttgttccggtcggaaaccaaggaccttctgttcagagatgacacagtatgtttggccaaacttcatgacagaaacacatatgaaaaatacttaggagaagaatatgtcaaggctgttggtaacctgagaaaatgctccacctcatcactcctggaagcctgcactttccgtagaccttaaaatctcagaggtagggctgccaccaaggtgaagatgggaacgcanatgatccatgagtttgccctggtttcac

SEQ ID NO: 21872 - DNA, 495 bp, Homo sapiens
gggtctacatgtgggtggggacccagactagccaggtggagatcaagctgagcctgaaggcctgccaggtatatatccagcacatgcggtccaaggaacatgagcggccgcgccggctgcgcctggtccgcaagggcaatgagcagcacgcctttacccgctgcttccatgcctggagcgccttctgcaaggccctggcctaagacaggctggcacagccccaggcttggtgaggaagaggaaggggcctcatccactgtctgctagcaaagaatgtactcaggtgacaccacctgctccagccacgtccagtgccacagtccccagtagcctcaagcagcaccaatggggatgaccctgacaggtgccctcaggggtctgggaaatccaactctctccacagtgtgagtgcacgtgtgaagccccctcactcttccgctagggataaagcagatgtggatgccctttaagagatattaaatgcttttattttca

SEQ ID NO: 21873 - DNA, 451 bp, Homo sapiens
gaaatcaatgtttaatttttgctgattgtctagacttcatagtgatggagaaaatattgattgcagattaaatttgtgtgtcacgactgtagctcttaaacattttttttcaataacacaaaaatttgtcctgcacagtggctcacacctgtaatcccaacactttgggaggctgaggtgggaggattgcctgagctcaggagtttgagaccagcctgggcagcatagcgagaccttgtctctacaaaaaatttaaaaaaaattaaccagacttggtggcgcataactaaagtatagctactcaggaggctgaggcaggaggattgcttgagtccaggaaatgaaagctgcaatgagctgtgatcatgccactgcaccccagcctgggtgacagcaggagactgtccctagaaaaaaaaatttttttgaggaaatattctaatatttgaaa

SEQ ID NO: 21874 - DNA, 442 bp, Homo sapiens
  misc_feature (1)...(442): n = a,t,c or g
ggcacttcctctcgcggccctcagtagtccctgcacagtgacttctgagatctgttgattgatgacccttttcatgattttaagtttctctgcagaaactactgacggagtcctgtgtttgtgagtcgtttcccctatggggaaggttatcagtgcttcccgagtgagcatggaacacttcgagttcccagggttatagacagtcgttcccagtgtggctgaggccacccagaggcagcagagcattcagactccaaacagatccctgttcatgccgacgcttgcacgaccgccccagttcctgtggctccctcggaatgctaaggggatcggacatgaaaggaccctgtgagccgattgtcctatctccagcggcctgtcatccagctcactcatcaatggggccagtcaggcccaggcactgggctncgaggactaccac

SEQ ID NO: 21875 - DNA, 387 bp, Homo sapiens
  misc_feature (1)...(387): n = a,t,c or g
gggggagcggcgtccgccaagttacttctaccgccagcaccttcgtgaagcccattttcagtcgggacatgaacgaggccaagcggaggtgcaccaattccagctggacatcactgtgaaaatgggacgggataaagtccgagaaatgtttatgaagaatgcccatgtcacagaccccagggtggttgatcttctggtcattaagggaaagatcgaactggaagaaacaattaaagtatggaagcagcggacacatgttatgcggttcttccatgaaacagaagcgccaaggccaaaggatttcctatccaagttctatgttggccacgatccatgaagtcattcagtggaaagatgcacgttgatactattttanagcacaaataa

SEQ ID NO: 21876 - DNA, 516 bp, Homo sapiens
agcagctatgacatgattacgaatttaatacgactcactatagggaatttggccctcgaggccaagaattcggcacgagggggagcggcgtccgccaagttacttctaccgccagcaccttcgtgaagcccattttcagtcgggacatgaacgaggccaagcggagggtgcgcgagctctaccgcgcctggtatcgggaggtgccgaacactgtgcaccaattccagctggacatcactgtgaaaatgggacgggataaagtccgagaaatgtttatgaagaatgcccatgtcacagaccccagggtggttgatcttctggtcattaagggaaagatcgaactggaagaaacaattaaagtatggaagcagcggacacatgttatgcggttcttccatgaaacagaagcgccaaggccaaaggatttcctatccaagttctatgttggccacgatccatgaagtcattcagtggaaagatgcacgttgatactattttagagcacaaataactcct

SEQ ID NO: 21877 - DNA, 769 bp, Homo sapiens
cccatcagctatgacatgattacgaatttaatacgactcactatagggaatttggccctcgaggccaagaattcggcacgagcggcacgagaggtattggtgagtcggatcgcagcttggatggccacttacctgaatgaccacctagagccttggatccaggagaacggcggctgggatacttttgtggaactctatgggaacaatgcagcagccgagagccgaaagggccaggaacgcttcaaccgctggttcctgacgggcatgactgtggccggcgtggttctgctgggctcactcttcagtcggaaatgaccagacactgaccatccactctaccctcccacccccttctctgctccaccacatcctccgtccagccgccattgccaccaggagaaccactacatgcagcccatgcccacctgcccatcacagggttgggcccagatctggtcccttgcagctagttttctagaatttatcacacttctgtgagacccccacaccttagttcccttggcctcagaattcacaaaatttccacaaaatctgtccaaaggaggctggcaggtatggaagggtttgtggctgggggcaggagggccctacctgattggtgcaacccttaccccttagcctccctgaaaatgtttttctgccagggagcttgaaagttttcagaacctcttccccagaaaggagactagattgcctttgttttgatgtttgtggcctcagaattgatcattttccccccactcttccc

SEQ ID NO: 21878 - DNA, 515 bp, Homo sapiens
  misc_feature (1)...(515): n = a,t,c or g
ttnnnttnnnnnatcttgaannnccgngctacgacatgattacgaatttaatacgactcactatagggaatttggccctcgaggccaagaattcggcacgagtgagaagggagatgtggcctttgtgaaacaccagactgtcccacagaacactgggggaaaaaaccctgatccatgggctaagaatctgaatgaaaaagactatgagttgctgtgccttgatggtaccaggaaacctgtggaggagtatgcgaactgccacctggccagagccccgaatcacgctgtggtcacacggaaagataaggaagcttgcgtccacaagatattacgtcaacagcagcacctatttggaagcaacgtaactgactgctcgggcaacttttgtttgttccggtcggaaaccaaggaccttctgttcagagatgacacagtatgtttggccaaacttcatgacagaaacacatatgaaaaatacttatgagaagaatatgtcaaggctgttggtaacctga

SEQ ID NO: 21879 - DNA, 716 bp, Homo sapiens
agctatgactgattacgaatttaatacgactcactatagggaatttggccctcgaggccaagaattcggcacgaggtgccattccagcttcagtgctcagtgagctgctccctgctgaggctgcccctctggctcgtgccctgagtgccatcactgcagtgtctgtagctgtggtgaatctgcagtaccaaggagcccatctgcctgtccagggatttggacatttggtgccatcttcagaagatccaggagtcctgggaatcgtgtatgactcagttgctttccctgagcaggacgggagcccccctggcctcagagtgactgtgatgctgggaggttcctggttacagacactggaggctagtggctgtgtcttatctcaggagctgtttcaacagcgggcccaggaagcagctgctacacaattaggactgaaggagatgccgagccactgcttggtccatctacacaagaactgcattccccagtatacactaggtcactggcaaaaactagagtcagctaggcaattcctgactgctcacaggttgcccctgactctggctggagcctcctatgagggagttgctgttaatgactgtatagagagtgggcgccaggcagcagtcagtgtcctgggcacagaacctaacagctgatccccaactctcattcatgaaaataaaaattgactggagcaggtcgacgcggccgcg

SEQ ID NO: 21880 - DNA, 437 bp, Homo sapiens
gggacatagtagctgaggggttgcgccagctgctgggggaggagaaataccgccaggacctgactgtgcctccaggctactgcacagacttcctgctgtgcgccagcagctctggtgctgtgcttcccgtgaggacccagggaccccttcctgccatacccaccaaggtcctgcccacagggccaggctgcctctagcgccactactcgagaccctgcccagaggtaaaggaggcagggtgggggagccctggccaccttgcccgccatgccctgagccacgtccctccccctgcagggtggtgctggtgttgcgggaacgctggcatttctgccgggacggccgggtgctgctgggctcgagggccctgagggagcggcacctaagcctgatgggctaccagctcctgccgctacccttcgaggaactggagtcca

SEQ ID NO: 21881 - DNA, 533 bp, Homo sapiens
ggagcgttccagcttccggagccggagggggcccggcgtacccagcccccagcccgacgtgaccatgctgtcccgcctcctaaaagaacaccaggccaagcagaatgaacgcaaggagctgcaggaaaagaggaggcgagaggctatcactgcagcgacctgcctgacagaagctttggtggatcacctcaatgtgggtgtggcccaggcctacatgaaccagagaaagctggaccatgaggtgaagaccctacaggtccaggctgcccaatttgccaagcagacaggccagtggatcggaatggtggagaacttcaaccaggcactcaaggaaattggggatgtggagaactgggctcggagcatcgagctggacatgcgcaccattgccactgcactggaatatgtctacaaagggcagctgcagtctgccccttcctagcccctgttccctcccccaaccctatccctcctacctcacccgcagggggaaggagggaggctgacaagccttgaataaaacacaagcctcc

SEQ ID NO: 21882 - DNA, 503 bp, Homo sapiens
  misc_feature (1)...(503): n = a,t,c or g
tnntctttgaanntngtnatccccttgtatgacctgattacgaatttaatacgactcactatagggaatttggccctcgaggccaagaattcggcacgagggcgggcacatcaagactgcggtgaacttgcccctggaacgcgacgccgagagcttcctactgaagagccccattgcgccctgtagcctggacaagagagtcatcctcattttccactgtgaattctcatctgagcgtgggccccgcatgtgccgtttcatcagggaacgagaccgtgctgtcaacgactaccccagcctctactaccctgagatgtatatcctgaaaggcggctacaaggagttcttccctcagcacccgaacttctgtgaaccccaggactaccggcccatgaaccacgaggccttcaaggatgagctaaagaccttccgctcaagactcgcagctgggctggggagcggagccggcgggagctctgtagccggctgcaggaccagtgagg

SEQ ID NO: 21883 - DNA, 698 bp, Homo sapiens
tatgacatgattacgaatttaatatcgactcactatagggaatttggccctcgaggccaagaattcggcacgagtggagattactctaaggccttcctcctacagacagtagacggaaagcaccaagacctcaagtacatctcaccagaaacgatggtggccctattgacgggcaagttcagcaacatcgtggataagtttgtgattgtagactgcagatacccctatgaatatgaaggcgggcacatcaagactgcggtgaacttgcccctggaacgcgacgccgagagcttcctactgaagagccccattgcgccctgtagcctggacaagagagtcatcctcattttccactgtgaattctcatctgagcgtgggccccgcatgtgccgtttcatcagggaacgagaccgtgctgtcaacgactaccccagcctctactaccctgagatgtatatcctgaaaggcggctacaaggagttcttccctcagcacccgaacttctgtgaaccccaggactaccggcccatgaaccacgaggccttcaaggatgagctaaagaccttccgcctcaagactcgcagctgggctggggagcggagccggcgggagctctgtagccggctgcaggaccagtgaggggcctgcgccagtcctgctacctcccttgcctttcgaggcctgaagccagctgccta

SEQ ID NO: 21884 - DNA, 503 bp, Homo sapiens
  misc_feature (1)...(503): n = a,t,c or g
ggcggaagtgggtctcaaccactataaagcctctctgtgcccgtccggagctggtgaggacagcctgccagagtctggtctctggacactatgggcacacgactcctcccagctctgtttcttgtcctcctggtattgggatttgaggtccaggggacccaacagccccagcaagatgagatgcctagcccgaccttcctcacccaggtgaaggaatctctctccagttactgggagtcagcaaagacagccgcccagaacctgtacgagaagacatacctgcccgctgtagatgagaaactcagggacttgtacagcaaaagcacagcagccatgagcacttacacaggcatttttactgaccaagttctttctgtgctgaagggagaggagtaacagccagaccccccatcagtggacaaggggagagtcccctactcccctgatcccccaggttcagactgagctcccccttccaantactcttgatctctccaantcta

SEQ ID NO: 21885 - DNA, 735 bp, Homo sapiens
gaaggactggaggccagccatcacaatcaaacagatcctattaggaatacaggaacttctaaatgaaccaaatatccaagacccagctcaagcagaggcctacacgatttactgccaaaacagagtggagtacgagaaaagggtccgagcacaagccaagaagtttgcgccctcataagcagcgaccttgtggcatcgtcaaaaggaagggattggtttggcaagaacttgtttacaacatttttgcaaatctaaagttgctccatacaatgactagtcacctgggggggttgggcgggcgccatcttccattgccgccgcgggtgtgcggtctcgattcgctgaattgcccgtttccatacagggtctcttccttcggtcttttgtatttttgattgttatgtaaaactcgcttttattttaatattgatgtcagtatttcaactgctgtaaaattataaacttttatacttgggtaagtcccccaggggcgagttcctcgctctgggatgcaggcatgcttctcaccgtgcagagctgcacttggcctcagctggctgtatggaaatgcaccctccctcctgccgctcctctctagaaccttctagaacctgggctgtgctgcttttgagcctcagaccccagggcagcatctcggttctgcgccacttcctttgtgtttatatggcgttttgtctgtgttgctgtttagagtaaataaactgtttatataaa

SEQ ID NO: 21886 - DNA, 723 bp, Homo sapiens
ggggctcaggcctaaacctgtgtgaacccaacaacaaagagggatactacggctacacaggcgctttcaggtgtctggttgagaagggagatgtggcctttgtgaaacaccagactgtcccacagaacactgggggaaaaaaccctgatccatgggctaagaatctgaatgaaaaagactatgagttgctgtgccttgatggtaccaggaaacctgtggaggagtatgcgaactgccacctggccagagccccgaatcacgctgtggtcacacggaaagataaggaagcttgcgtccacaagatattacgtcaacagcagcacctatttggaagcaacgtaactgactgctcgggcaacttttgtttgttccggtcggaaaccaaggaccttctgttcagagatgacacagtatgtttggccaaacttcatgacagaaacacatatgaaaaatacttaggagaagaatatgtcaaggctgttggtaacctgagaaaatgctccacctcatcactcctggaagcctgcactttccgtagaccttaaaatctcagaggtagggctgccaccaaggtgaagatgggaacgcagatgatccatgagtttgccctggtttcactggcccaagtggtttgtgctaaccacgtctgtcttcacagctctgtgttgccatgtgtgctgaacaaaaaataaaaattattattgattttaaaaaaaaaaaaaa

SEQ ID NO: 21887 - DNA, 398 bp, Homo sapiens
ggagggaggcggcaggcccgggtcaggggcctcgagatcgggcttgggcccagagcatgttccagatcccagagtttgagccgagtgagcaggaagactccagctctgcagagaggggcctgggccccagccccgcaggggacgggccctcaggctccggcaagcatcatcgccaggccccaggcctcctgtgggacgccagtcaccagcaggagcagccaaccagcagcagccatcatggaggcgctggggctgtggagatccggagtcgccacagctcctaccccgcggggacggaggacgacgaagggatgggggaggagcccagcccctttcggggccgctcgcgctcggcgccccccaacctctgggcagcacagcgctatggccgcgagctc

SEQ ID NO: 21888 - DNA, 424 bp, Homo sapiens
gtggggttccagcccaacatagagtaacattatttgtacctcccaggctagctcagtccatgggaggctctcctgtccctgaaagctgacacccacctttcaccacttcgcccatgctacagttcagtttcctcgtctgtaaaatggggatgataatggtacctaccttgcagtgttgttataaggattaaaggagacagtgcaagaaaaggccttggttggtgaagagcccaacctcggaggggagctgctgggatcctccttatcttgactgggatgtccctgtctccccctccccttgctccttgaacatggccaaggaaagtgaaaaacaaaaattattcactctgctagcacccttccccttgatgcctgggaataggttttgccaataaacgtatctgtgttggaaaaaaaaaaaaaa

SEQ ID NO: 21889 - DNA, 429 bp, Homo sapiens
ttttgaaaccccttgacatgattacgaatttaatacgactcactatagggaatttggccctcgaggccaagaattcggcacgagagggcagccataatatctggtatttgattttcttactaagcggctgggatttctgtccttttgcagtttttctctgactctaattgatgcactggacaccttgctggtaagtatctcgtctgtttcttttcctttccactgttacataaccaacatccttcctcttttggcagcgtgactgtgggtgaaaaatgaattcctctcctaggccttttatttgcatctcatgattctgaagcgtccggctgtggttgcctagctagataggggaaaaacgaactacaacttatgcagattcatttatttagcaaacatttatagaggacctgttatgtacggagaatt

SEQ ID NO: 21890 - DNA, 495 bp, Homo sapiens
tacgaatttaatacgactcctatagggaatttggccctcgaggccaagaattcggcacgagcggcacgaggataattccttttagtttagctactattttaggggattttttttagaggtaactcactatgaaatagttctccttaatgcaaatatgttggttctgctatagttccatcctgttcaaaagtcaggatgaatatgaagagtggtgtttccttttgagcaattcttcatccttaagtcagcatgattataagaaaaatagaaccctcagtgtaactctaattcctttttactattccagtgtgatctctgaaattaaattacttcaactaaaaattcaaatactttaaatcagaagatttcatagttaatttattttttttttcaaccaaatggcatccaaactcaaacttgagaaaatatcttgctttcaaattggcactgattctgcctgctttatttttaacgctatcacaggacccaaaaccc

SEQ ID NO: 21891 - DNA, 378 bp, Homo sapiens
gcttggagatgatattgaccttattgtccgttgtgagcacgatggcgtcatgactggagccaacggggaagtgtccttcatcaacatcaagacactcaatgagtgggattccaggcactgtaatggcgttgactggcgtcagaagctggactctcagcgaggggctgtcattgccacggagctgaagaacaacagctacaagttggcccggtggacctgctgtgctttgctggctggatctgagtacctcaagcttggttatgtgtctcggtaccacgtgaaagactcctcacgccacgtcatcctaggcacccagcagttcaagcctaatgagtttgccaagccagatcaacctgaagcgtggagaatgcctggggg

SEQ ID NO: 21892 - DNA, 678 bp, Homo sapiens
acccgttatgacatgattacgaatttaatacgactcactatagggaatttggccctcgaggccaagaattcggcacgaggccatggaagtcggaatccgctaaggagtgtgtaacaactcacctgccgaatcaactagccctgaaaatggatggcgctggagcgtcgggcccatacccggccgtcgccggcaatcgggattactgttctggttatcttcatcatcatcatcatcgtgtgggttgtctcttcatgaagaaccagcggaactcaaaactgctgttcaagaaacctcttcaagacttttgacttagaacctgctatattatcaagcttacctactgttatctctaaaattttttttgtgttaatgtaaagttgaatttctaggaaacgtgcctttgttttttaatatgcactccaaattagaaggccggccccgtccacattttgcacagggcctttacagatttacgtatgggctgatgaagaggccttcttaagttccagagtgctataatctatatgtaatgctgtcactaattaattgccattactcccagttagttacccttgtcatttggcattattttcagaaccacattttaaacctttgggtaatcagatttccaacttatgccttccagaaaaaaacactactgcctaacacaaatctgtg

SEQ ID NO: 21893 - DNA, 754 bp, Homo sapiens
ggcgacggcagtaacagcggcagctacagcggggacgcgagcggggcggtgacggtgtgggaggtggtctcactcttgggaaaactgctgggcaccgtcgtcgcgctgaaggtggttctgtacctgctccgagtgtgcttagcgatggcctggaaatccggcggcgccagccactcggagctaatccacaatctccgcaaaaatggaatcatcaagacagataaagtatttgaagtgatgctggctacagaccgctcccactatgcaaaatgtaacccatacatggattctccacaatcaataggtttccaagcaacaatcagtgctccacacatgcatgcatatgcgctagaacttctatttgatcagttgcatgaaggagctaaagctcttgatgtaatgtactggaaaagtcataggaattgatcacattaaagagctagtagatgactcaataaataatgtcaggaaggacgatccaacacttctgtcttcagggagagtacagcttgttgtgggggatggaagaatgggatatgctgaagaagccccttatgatgccattcatgtgggagctgcagcccctgttgtaccccaggcgctaatagatcagttaaagcccggaggaagattgatattgccctgttggtcctgcaggcggaaaccaaatgttggagcagtatgacaagctacaagatggcagcatcaaaatgaagcctctgatgggggtgatatacgtgcctttacagataaa

SEQ ID NO: 21894 - DNA, 892 bp, Homo sapiens
ttgacatgattacgaatttaatacgactcactatagggaatttggccctcgaggccaagaattcggcacgagaggaggtgcgtcctgctgcctgccccggtcactctggctccccagctcaaggttcaggccttgccccaggccgggcctctgggtacctgaggtcttctcccgctctgtgcccttctcctcacctggctgcaatgagtgggggagcacggggcttctgcatgctgaaggcaccccactcagccaggcccttcttctcctccaggtcccccacggcccttcaggatgaaagctgcggtgctgaccttggccgtgctcttcctgacggggagccaggctcggcatttctggcagcaagatgaacccccccagagcccctgggatcgagtgaaggacctggccactgtgtacgtggatgtgctcaaagacagcggcagagactatgtgtcccagtttgaaggctccgccttgggaaaacagctaaacctaaagctccttgacaactgggacagcgtgacctccaccttcagcaagctgcgcgaacagctcggccctggtgacccaggagttctgggataacctggaaaaggagacagagggccctgaggcaggcctaccttggacgacttccagaagaagtggcaggaggagatggagctctaccgccagaaggtggagccgctgcgcgcagagctccaagagggcgcgcgccagaagctgcacgagctgcaagagaagctgagcccactgggccgaggagatgcgcgaccgcgcgcgcgcccatgtggacgcgctgcgcacgcatctggccccctacagcgacgagctgcgccagcgcttggccgcgcgccttgaggctctcaaggagaacggcggcccagac

SEQ ID NO: 21895 - DNA, 386 bp, Homo sapiens
ggctgttggatggggatgatgtatataactatctattcgatgatgaagataccccaccaaacccaaaaaaagagatctctcgaggatccgaattcgcggccgcgaattccagatctatgaatcgtagatactgaaaaaccccgcaggttcacttcaactgtgcatcgtgcaccatctcaatttctttcatttatacatcgttttgccttcttttatgtaactatactcctctaagtttcaatcttggccatgtaacctctgatctatagaattttttaaatgactagaattaatgcccatcttttttttggacctaaattcttcatgaaaatatattacgagggcttattcagaagctttggacttcttcgccagaggtttggctc

SEQ ID NO: 21896 - DNA, 490 bp, Homo sapiens
tgagtcgccggcgctgcagagggaggcggcactggtctcgacgtggggcggccagcgatgaagccgcccagttcaatacaaacaagtgagtttgactcatcagatgaagagcctattgaagatgaacagactccaattcatatatcatggctatctttgtcacgagtgaattgttctcagtttctcggtttatgtgctcttccaggttgtaaatttaaagatgttagaagaaatgtccaaaaagatacagaagaactaaagagctgtggtatacaagacatatttgttttctgcaccagaggggaactgtcaaaatatagagtcccaaaccttctggatctctaccagcaatgtggaattatcacccatcatcatccaatcgcagatggagggactcctgacatagccagctgctgtgaaataatggaagagcttacaacctgccttaaaaattaccgaaaaaccttatacactgctatggaggacttgg

SEQ ID NO: 21897 - DNA, 573 bp, Homo sapiens
ggaaacggcaattcggcagctggaggctgacattttggatgtcaatcagatatttaaagatttggccatgatgatccatgaccagggtgatctgattggtatgtattattgatacctttaacctcaaggtgagttgatagtatttggcatgcatctgtaatcccagctactcagaaggctgaggctgaagcaccatctaggagtttgaagccaacctgggcaacataatgagaatttgtctcttaaaaaagaaagaaagaaagaaaaaggagttaggctaggcgtggtggctcaggcctgtagtcccagcactttgggaggcccaagcgggcagatcatgaggtcaggagatggagaccatcctggctcacacggtgaaacccgctctactaaaaatacaaaaaattagctgggcgtggtggcatgcacctgtagtcccagctacccgggaggctgaggcaggagaatcacttgaacctgggaagtggagggcggaggttgcagtgagccgagatcacaccactgcactccagcctaggcgacagagcaagactgtctcaaaaaaaaaaaaaa

SEQ ID NO: 21898 - DNA, 398 bp, Homo sapiens
gatagtggatgcctatgtgctgctaaatttgggagattcggtaacaactgaccacatctccccagctggaaatattgcaagaaacagccctgctgctcgctacttaactaacagaggcctaactccacgagaattcaactcctatggctcccgccgaggtaatgacgccgtcatggcacggggaacatttgccaacattcgcttgttaaacagatttttgaacaagcaggcaccacagactatccatctgccttctggggaaatccttgatgtgtttgatgctgctgagcggtaccagcaggcaggccttcccctgatcgttctggctggcaaagagtacggtgcaggcagctcccgagactgggcagctaagggccctttcctgctgggaatcaaag

SEQ ID NO: 21899 - DNA, 435 bp, Homo sapiens
gccaggcctttgaggattggaataagacagagctagactcattcctgattgaaatcacagccaatattctcaagttccaagataccgatggcaaacacctgctgccaaagatcagggacagcgcggggcagaagggcacagggaagtggaccgccatctccgccctggaatacggcgtacccgtcaccctcattggagaagctgtctttgctcggtgcttatcatctctgaaggatgagagaattcaagctagcaaaaagctgaagggtccccagaagttccagtttgatggtgataagaaatcattcctggaggacattcggaaggcactctacgcttccaagatcatctcttacgctcaaggctttatgctgctaaggcaggcagccaccgagtttggctggactctcaattatggggggcatcgccctgatg

SEQ ID NO: 21900 - DNA, 452 bp, Homo sapiens
  misc_feature (1)...(452): n = a,t,c or g
ctttntnacaccattacgaatttaatacgactcactatagggaatttggccctcgaggccaagaattcggcacgagggaaatatataattcaaataatcaaaagattgttaacctgaaagagaaggtagcccagcttgaagcacagtgccaggaaccttgcaaagacacggtgcaaatccatgatatcactgggaaagattgtcaagacattgccaataagggagctaaacagagcgggctttactttattaaacctctgaaagctaaccagcaattcttagtctactgtgaaatcgatgggtctggaaatggatggactgtgtttcagaagagacttgatggcagtgtagatttcaagaaaaactggattcaatataaagaaggatttggacatctgctcctactggcacaacagaattttggctgggaaatgagaagattcatttgataa

SEQ ID NO: 21901 - DNA, 545 bp, Homo sapiens
gctatgacatgattacgaatttaatacgactcactatagggaatttggccctcgaggccaagaattcggcacgaggctgtgggaaccaggattgtcccaggattgttctggggggtcgctatcacagccatgagccatggcctctgctcatgacctgtgggtccaggtgactaggaggcctatgtggaaagattccaccttgggaagcccccaaggagcataagtacaaagctgaagagcacacagtcgttctcactgtcaccggggagccctgccacttccccttccagtaccaccggcagctgtaccacaaatgtacccacaagggccggccaggccctcagccctggtgtgctaccacccccaactttgatcaggaccagcgatggggatactgtttggagcccaagaaagtgaaagaccactgcagcaaacacagcccctgccagaaaggagggacctgtgtgaacatgccaagcggcccccactgtctctgtccacaacacctcactggaaaccactgccagaaagagaagtgctttgag

SEQ ID NO: 21902 - DNA, 457 bp, Homo sapiens
ggcgtgatctcggctcactgcaacttccacctcctgggttccagcagttctcctgcctcagcctcccaagtagctgagattacaggcgcctgccaccccacctggctgatttttgtaattttagtagagacggggtttcaccatgttggccaggctgattaactcctgacctcaggtgatccacctttctcggcctcccaaagtgctgggattacgggtgtgagccaccgtgcccggcctgcaaacacattttaattgacaacactagggctgttgtacaaaatagtaatgatagccatggaagttttaccttattctgtgagaagtgttcttaaacttattaagtgtctaaactaaggtttagtgcttttttaaaggaaagttgtcccaggattcatcctaaagaaagcaaaagttaattcaactgatccccaatggaattagatgggtaagaagt

SEQ ID NO: 21903 - DNA, 781 bp, Homo sapiens
gtgaaaatggcggcggcggcggcggcggctgcagctacgaacgggaccggaggaagcagcgggatggaggtggatgcagcagtagtccccagcgtgatggcctgcggagtgactgggagtgtttccgtcgctctccatccccttgtcattctcaacatctcagaccactggatccgcatgcgctcccaggaggggcggcctgtgcaggtgattggggctctgattggcaagcaggagggccgaaatatcgaggtgatgaactcctttgagctgctgtcccacaccgtggaagagaagattatcattgacaaggaatattattacaccaaggaggagcagtttaaacaggtgttcaaggagctggagtttctgggttggtataccacaggggggccacctgacccctcggacatccacgtccataagcaggtgtgtgagatcatcgagagccccctctttctgaagttgaaccctatgaccaagcacacagatcttcctgtcagcgtttttgagtctgtcattgatataatcaatggagaggccacaatgctgtttgctgagctgacctacactctggccacagaggaagcggaacgcattggtgtagaccacgtagcccgaatgacagcaacaggcagtggagagaactccactgtggctgaacacctgatagcacagcacagcgccatcaagatgctgcacagccgcgtcaagctcatcttggagtacgtcaaggcctctgaagcgggagaggtcccctttaatcatgagatcctgcggg

SEQ ID NO: 21904 - DNA, 494 bp, Homo sapiens
tgaaacagctatgacatgattacgaatttaatacgactcactatagggaatttggccctcgaggccaagaattcggcacgaggtggcccacgtgttcccgagcctgcctgagtatctgaaggggatagagctgatgtccactgacctgcctggctccctgcaccttcagccacatttcggaagcacttgctacccagtgttaaggatgtgcggaggcttagaggattccagctctgtggtcagggccttttgcccttgtgtccaggagcctccagggctagctcccatcactcaaggactggacagttgtccctgaaccccagccctgtacttgctgccatgcccctcgatgctgctgcctaaccacttgctagtgtgtatctccatgtatggccagccccccacccctgccagttcccccttgcttgcttctttcccctctctgccagaatagctctgatcaccacttgtggatggttctacctggccccaag

SEQ ID NO: 21905 - DNA, 526 bp, Homo sapiens
  misc_feature (1)...(526): n = a,t,c or g
tnntttgannnccatntganncccatntatgacatgattacgaatttaatacgactcactatagggaatttggccctcgaggccaagaattcggcacgagcggcacgagccttgcaaagacacggtgcaaatccatgatatcactgggaaagattgtcaagacattgccaataagggagctaaacagagcgggctttactttattaaacctctgaaagctaaccagcaattcttagtctactgtgaaatcgatgggtctggaaatggatggactgtgtttcagaagagacttgatggcagtgtagatttcaagaaaaactggattcaatataaagaaggatttggacatctgtctcctactggcacaacagaattttggctgggaaatgagaagattcatttgataagcacacagtctgccatcccatatgcattaagagtggaactggaagactggaatggcagaccagtactgcagactatgccatgttcaaggtgggacctgaagctgacaagtaccgcctaa

SEQ ID NO: 21906 - DNA, 545 bp, Homo sapiens
gcggataccctcccaatcccagtggttacccaggctgtccttacccacctggtggtccatatcctgccacaacaagttctcagtacccttctcagcctcctgtgaccactgttggtcccagtagggatggcacaatcagcgaggacaccatccgagcctctctcatctctgcggtcagtgacaaactgagatggcggatgaaggaggaaatggatcgtgcccaggcagagctcaatgccttgaaacgaacagaagaagacctgaaaaagggtcaccagaaactggaagagatggttacccgtttagatcaagaagtagccgaggttgataaaaacatagaacttttgaaaaagaaggatgaagaactcagttctgctctggaaaaaatggaaaatcagtctgaaaacaatgatatcgatgaagttatcattcccacaagctcccttatacaaacagatcctgaatctgtatgcagaagaaaacgctattgaagacactatcttttacttgggagaagccttgagaaggggcgtgatagacctgga

SEQ ID NO: 21907 - DNA, 508 bp, Homo sapiens
taccgtttgactgattacgaatttaatacgactcactatagggaatttggccctcgaggccaagaattcggcacgagggcgcttcaggactaccgcaagaagttgcttgaacacaaggagatcgacggccgtcttaaggagttaagggaacaattaaaagaacttaccaagcagtatgaaaagtctgaaaatgatctgaaggccctacagagtgttgggcagatcgtgggtgaagtgcttaaacagttaactgaagaaaaattcattgttaaagctaccaatggaccaagatatgttgtgggttgtcgtcgacagcttgacaaaagtaagctgaagccaggaacaagagttgctttggatatgactacactaactatcatgagatatttgccgagagaggtggatccactggtttataacatgtctcatgaggaccctgggaatgtttcttattctgagattggagggctatcagaacagatccgggaattaagagaggtgatagaat

SEQ ID NO: 21908 - DNA, 548 bp, Homo sapiens
gtcaatgtcctgcccctggggagtggggccattgcaggcaatcccctgggtgtggaccgagagctgctccgagcagaactcaactttggggccatcactctcaacagcatggatgccactagtgagcgggactttgtggccgagttcctgttctgggcttcgctgtgcatgacccatctcagcaggatggccgaggacctcatcctctactgcaccaaggaattcagcttcgtgcagctctcagatgcctacagcacgggaagcagcctgatgccccagaagaaaaaccccgacagtttggagctgatccggagcaaggctgggcgtgtgtttgggcggtgtgccgggctcctgatgaccctcaagggacttcccagcacctacaacaaagacttacaggaggacaaggaagctgtgtttgaagtgtcagacactatgagtgccgtgctccaggtggccactggcgtcatctctacgctgcagattcaccaagagaacatgggacaggctctcagccccgacatgctggccactgaccttgcctatta

SEQ ID NO: 21909 - DNA, 868 bp, Homo sapiens
gggtgcacaaagctgtggtggaggtggacgagtcgggaaccagagcagcggcagccacggggacaatattcactttcaggtcggcccgcctgaactctcagaggctagtgttcaacaggccctttctgatgttcattgtggataacaacatcctcttccttggcaaagtgaaccgcccctgaggtggggcttctcctgaaatctacaggcctcagggtgggagatgaagggggctaagctatggcccatctgtatgctggtagctagtgatttacacaggtttagttgactaatgaggcattacaaataatattactctatgatgattgcttccacccacacgactgcaacatacaggtgccttggggaaatgtggagaacattcaatcttgccgtcactattcatcaatgaagattaacactgagatccagagaggctggatgacttgctcaagttcaccagcatggtagtggcaaagagaggtccagagtcctggcccttgatgcccagctcagtgccacaaagctcaataggagggatgttccagtggatgagggccaccaggaagcacaggtccaaggctggtcccacacttatcagcagcaacaactgtcagttcatcctgcatgggaaaaatgttggaatgggagtctgaaatggggctactgtttcagtcctaatgtgctgtgtgacattgggacaacactttccctctctggacctcagtttccctctgtatacaaggatcagattcttgctgtgacccaagaactcctgaaatcatatagaaaggctggggtgggccctgtcattcgtggttgatttcaatacactcaagtgccattcatcctttaagaaaaacatctg

SEQ ID NO: 21910 - DNA, 626 bp, Homo sapiens
gggttacgctgcgctgctggagcagtatcagaaggccattgacatctacgaacaggtggggaccaatgccatggacagccccctcctcaagtacagcgccaaagactacttcttcaaggcggccctctgccacttctgcatcgacatgctcaacgccaagctggctgtccaaaagtatgaggagctgttcccagctttctctgattcccgggaatgcaagttgatgaaaaaattgctagaggcccacgaggagcagaatgtggacagctacaccgagtcggtgaaggaatacgactccatctcccggctggaccagtggctcaccaccatgctgctgcgcatcaagaagaccatccagggcgatgaggaggacctgcgctaagccccacccagccccccagtgcccgtcttcctgtcccatctgctcagagagaggtggggccgagacttgctggagagcttccctcctttcccatctggggagtcccgcgggccacagtgggcaggtggcaccgggggtcagcatgcaggggcgccagaggcccaggctgctggccggacagtcaccctctgttctcgctacatcccttgccccctgtcatttatttaagcccccataggtgccg

SEQ ID NO: 21911 - DNA, 502 bp, Homo sapiens
gctatgacatgattacgaatttaatacgactcactatagggaatttggccctcgaggccaagaattcggcacgagtgaaatgggatatggtgctccctaatatatcccaaatcggtgtgtcacttgggcaagtcacctctctcccagattcttatttgtcctacacgtaactggggttttgcaacagatgttactcttccttctcctttccaggtctgttagaaactttattaggaaagcctgaaagtaaaatctgtactgtttacatccagagaaaagtttatactgactaaataatttcctcaaatctggtcacctttctatgggaaaattcctcatcttaacaatgtttcatgcataaagtcatctggcctcttaactgcattgttggatatttttaagaccaaaagcttgctaaacccaaaacagcaaaagcattcagctgaaaataaagtgaaaagccacatatgtcttagagggagaaaacagtgctaatgatttt

SEQ ID NO: 21912 - DNA, 381 bp, Homo sapiens
gaaggctcggaagcccgtcaccatgtcgtgcgagtcgtctatggttctcgggtactgggatattcgtgggctggcgcacgccatccgcctgctcctggagttcacggatacctcttatgaggagaaacggtacacgtgcggggaagctcctgactatgatcgaagccaatggctggatgtgaaattcaagctagacctggactttcctaatctgccctacctcctggatgggaagaacaagatcacccagagcaatgccatcttgcgctacatcgctcgcaagcacaacatgtgtggtgagactgaagaagaaaagattcgagtggacatcatagagaaccaagtaatggatttccgcacacaacttgataaggctctggt

SEQ ID NO: 21913 - DNA, 460 bp, Homo sapiens
ccgctatgacatgattacgaatttaatacgactcactatagggaatttggccctcgaggccaagaattcggcacgagattataacacatgactcacgtattcgatatttgcaggaaatatataattcaaataatcaaaagattgttaacctgaaagagaaggtagcccagcttgaagcacagtgccaggaaccttgcaaagacacggtgcaaatccatgatatcactgggaaagattgtcaagacattgccaataagggagctaaacagagcgggctttactttattaaacctctgaaagctaaccagcaattcttagtctactgtgaaatcgatgggtctggaaatggatggactgtgtttcagaagagacttgatggcagtgtagatttcaagaaaaactggattcaatataaagaaggatttggacatctgtctcctactggcacaacagaattttg

SEQ ID NO: 21914 - DNA, 428 bp, Homo sapiens
  misc_feature (1)...(428): n = a,t,c or g
tntganaccgttatgacatgattacgaatttaatacgactcactatagggaatttggccctcgaggccaagaattcggcacgagcgatcaggtcattgccagcggttcagaggactgcacggtcatggtatggcagatcccagaaaatggactcaccctttccctgactgaacctgtggtgattttggaaggccactcaaagagagtcggcatcgtggcttggcatccaacggcccgcaatgtgcttcttagtgcaggctgtgataatgccattatcatctggaatgtgggaacaggggaagcccttataaacttggacgatatgcattcagacatgatttacaatgtgagctggaaccggaatggcagtctgatctgcacagcttccaaagacaagaaagtgagagtcattgatcccaggaaacaag

SEQ ID NO: 21915 - DNA, 425 bp, Homo sapiens
gcgtcattgccagtggctccgaggactgcacagtcatggtgtgggagatcccagatgggggcctgatgctgcccctgcgggagcccgtcgtcaccctggagggccacaccaagcgtgtgggcattgtggcctggcacaccacagcccagaacgtgctgctcagtgcaggttgtgacaacgtgatcatggtgtgggacgtgggcactggggcggccatgctgacactgggcccagaggtgcacccagacacgatctacagtgtggactggagccgagatggaggcctcatttgtacctcctgccgtgacaagcgcgtgcgcatcatcgagccccgcaaaggcactgtcgtagctgagaaggaccgtccccacgaggggacccggcccgtgcgtgcagtgttcgtgtcggaggggaagatcctgacc

SEQ ID NO: 21916 - DNA, 688 bp, Homo sapiens
gggagaaagaggttcccaaaggtggtgtgacagagatctcagctgctgacaaagctgaggagtttcgcaggcaacaggcagactttgtggacctgagcttcccaacaatttccagtacgggacccaacggcgccatcattcactacgcgccagtccctgagacgaataggaccttgtccctggatgaggtgtaccttattgactcgggtgctcaatacaaggatggcaccacagatgtgacgcggacaatgcattttgggacccctacagcctacgagaaggaatgcttcacatatgtcctcaagggccacatagctgtgagtgcagccgttttcccgactggaaccaaaggtcaccttcttgactcctttgcccgttcagctttatgggattcaggcctagattacttgcacgggactggacatggtgttgggtcttttttgaatgtccatgagggtccttgcggcatcagttacaaaacattctctgatgagcccttggaggcaggcatgattgtcactgatgagcccgggtactatgaagatggggcttttggaattcgcattgagaatgttgtccttgtggttcctgtgaagaccaagtataattttaataaccggggaagcctgacctttgaacctctaacattggttccaattcagaccaaaatgatagatgtggattctct

SEQ ID NO: 21917 - DNA, 699 bp, Homo sapiens
cggccattgaaaactcaagagcttcgagagccagtgttgtcagcagccattgccacgaagatggcgcaatttcatggcatggagatgcctttcaccaaggagccccactggctgtttgggaccatggagcggtacctaaaacagatccaggacctgcccccaactggcctccctgagatgaacctgctggagatgtacagcctgaaggatgagatgggcaacctcaggtgagggcaggcaggacaaggctaatggtaatggtgtccgcccttccagtatttgctgagggctggtgtcagggcctggcctgttagggtggctctgatcctcctctagtcactcctgctcaggacccatgctcccatacccctgtaggaagttactagagtctaccccatcgccagtcgtcttctgccacaatgacatccaggaagggaacatcttgctgctctcagagccagaaaatgctgacagcctcatgctggtggacttcgagtacagcagttataactataggggctttgacattgggaaccatttttgtgagtgggtttatgattatactcacgaggaatggcctttctacaaagcaaggcccacagactaccccactcaagaacagcagttgcattttattcgtcattacctggcagaggcaaagaaaggtgagaccctctcccaagaggagcagagaaaact

SEQ ID NO: 21918 - DNA, 437 bp, Homo sapiens
cagctatgacatgattacgaatttaatacgactcactatagggaatttggccctcgaggccaagaattcggcacgagcggcacgagtttttttaacaatgagcatgaaggtagcagaagctggtgtgtttccagatggttcttctaaccaaactaatttttcactgttgacaagcgaggcaagggttgcactggaccaaaggctgaggcttggccatctagcattccatacaaaattgtttcctataagcattccttttattctctattctatcctgggtctgcctcaaccgtgagataggagagtctctggtactagctgctgtagcagtgcccttcatccagggcagttaatggagtcttggaccctttctttctctgggatccctgcccagcaccttcctatagagatgactttaaaaggaaaaaaaaaaaaaa

SEQ ID NO: 21919 - DNA, 513 bp, Homo sapiens
gcagctcaaccacgccgccagtccattcttaaggaactgccgactaggactgatgatgcattttagctttgagcttttgggggttattctaccaacaaacagtccattggaaagaaaacagtccctggaattaacagatcagaatgttcacactggttaatctttttttaacaatgagcatgaaggtagcagaagctggtgtgtttccagatggttcttctaaccaaactaatttttcactgttgacaagcgaggcaagggttgcactggaccaaaggctgaggcttggccatctagcattccatacaaaattgtttcctataagcattccttttattctctattctatcctgggtctgcctcaaccgtgagataggagagtctctggtactagctgctgtagcagtgcccttcatccagggcagttaatggagtcttggaccctttctttctctgggatccctgcccagcaccttcctatagagatgactttaaaaggaaaaaaaaaaaaaa

SEQ ID NO: 21920 - DNA, 428 bp, Homo sapiens
  misc_feature (1)...(428): n = a,t,c or g
ttgannncancttgattgagtanccngctatgacatgattacgaatttantacgactcctatagggaatttggccctcgaggccaagaattcggcacgagatgagttggtccttgcacccccggaatttaattctctacttctatgctcttttatttctctcttcaacatgtgtagcatatgttgctaccagagacaactgctgcatcttagatgaaagattcggtagttattgtccaactacctgtggcattgcagatttcctgtctacttatcaaaccaaagtagacaaggatctacagtctttggaagacatcttacatcaagttgaaaacaaaacatcagaagtcaaacagctgataaaagcaatccaactcacttataatcctgatgaatcatcaaaaccaaatatgatagacgctgctactt

SEQ ID NO: 21921 - DNA, 524 bp, Homo sapiens
  misc_feature (1)...(524): n = a,t,c or g
gggcgggcgcagtttcgctcttgggtgtggtggggctgctgcttgtgtctgcgctgtccggggtcctaggagaccgcgccaatcccgacctccgggcacacccagggaacgcancccaccccggctctggagccacggaaccccggcggcgaccaccgctcaaggatcaacgcgagcggacccgggccgggtcgctgcctctgggggcgctgtacaccgcggccgtcgcggcttttgtgctgtacaagtgtttgcaggggaaanatgaaactgcggttctccacgaggaggcaagcaagcagcagccactgcagtcaagagcaacagctggcccagttgacacaacagctggcccanacanancagcacctgaacaacctgatggccaactggnacccctttttgagcgtgtgactaaccggntngngcccaacaagngctcttaanatnaaccnngggcanccaanaccggcgnaaaattnnancccggaaagggtttgggggtnaaaacaaggttaaggccc

SEQ ID NO: 21922 - DNA, 588 bp, Homo sapiens
ttttttttttttttaaatcctgaatgaatgttggattttgtcaaatagttttcctgtatttattgatattatcatgtgttttttttttctttcttttcttttttgagacagggtcttgctctgtcgcccaggctggagtgcagtggcacaatctcggctcactgcaacctctgcttcctgggtttaagcgattctcctgcctcagcctccacagtagctgggattacaggtgcataccaccgtgcctggctaatttttgtatttttagtagagacggggtttcaccatgttggccaggatggtctcaatctcttgacctcgtgatctgcctgccttggcctcccaaagtgctgggattacaggtgtgagccaccacgcctggccggcttatttttatccacagtaaatcttcagcaactcattgtctccaccagatagtatttttctgtaaatgaaatgctgacttcgcctcttcctgctgtatgctcatccctgcactgagcacagatatgacaagcagtagccatgggggaggtgggtgacaaagataggaccccgggagggggcgcaggtacatgctagtttcac

SEQ ID NO: 21923 - DNA, 505 bp, Homo sapiens
tgattacgaatttaataccgactcactatagggaatttggccctcgaggccaagaattcggcacgagctgggggggcctgaagcacaatgtagcgcagatgcttcctttccaggccattctctcacccagcctgcacggaggagatgggagatgctgggggtcctgccctcagtctttttgggccttaggcgtttcgttcatcctgctaaggggatgaagcaaacacgaggtgattcctttgcctttcagagtggaagccctggagtttgttttgaaggccaggaggctgaaggatctctaagctacggtgtgggcttaatagcagcaggctttgtcctcctgtctcctccaagccagtgtctgattccttggcaacacaggtcttagtctgtggagtggctctgctgtggccttcctctggccgggcaggcactgtccagccatagccagctcctgagaataggtcagcctctcctttctgtctccccccaaaaaaaaaaaaaa

SEQ ID NO: 21924 - DNA, 371 bp, Homo sapiens
  misc_feature (1)...(371): n = a,t,c or g
tgcggggtttttcagtatctacgattcatagatctggaattcgcggccgcgtcgacctnacctgtgctccctccccaatcatctttcctgttccagagaggtggggctgaggtgtctccatctctgtctcaacttcatggtgcactgagctgtaacttcttccttccctattaaaattagaaccttagtataaatttactttctcaaattcttgccatgagaggttgatgagttaattaaaggagaagattcctaaaatttgagagacaaaataaatggaaggtcgacgcggccgcgaattccagatctatgaatcgtagatactgaaaaaccccgcaagttcacttcaactgtgcatcgtgcaccatctg

SEQ ID NO: 21925 - DNA, 741 bp, Homo sapiens
tatgacatgattacgaatttaatacgactcactatagggaatttggccctcgaggccaagaattcggcacgaggaagctcatcatcctggagcactattctcaggcgagcgagtgggcggctaaatacatcaggaaccgcatcatccagtttaacccagggccagagaagtacttcaccctggggctccccactgggagtaccccacttggctgctacaagaagctgattgaatactataagaatggggacctgtcctttaaatatgtgaagaccttcaacatggatgagtacgtgggccttcctcgagaccacccggagagttaccactccttcatgtggaacaacttcttcaagcacattgacatccacccagaaaacacccacattctggatgggaatgcagtcgacctacaggcagaatgtgatgcctttgaagagaagatcaaggctgcaggtgggatcgagctatttgttggaggcatcggccctgatggacacattgccttcaacgagccaggctccagtctggtgtccaggacccgtgtgaagacgctggccatggataccatcctggccaatgctaggttcttcgatggagaactcaccaaggtgcccaccatggccttgacggtgggggtgggcactgtcatggatgctagagaggtgatgatccttatcacaggtgctcacaaggcatttgctctgtacaaggccatcgaggagggagtgaaccacatgt

SEQ ID NO: 21926 - DNA, 705 bp, Homo sapiens
  misc_feature (1)...(705): n = a,t,c or g
aattcggcacgagggtaagggtttccactctgcacattgtaaagggaacactctgtaggcccatgggtcccttactagagaggttgagtgaatttgccttcagttaacatgggaccttctgtttagcttcctcttgcttcccaaagattttaagcattttgtaaatgtataaactcacctctggtaacagtggcccagacgctgctttgtgctaaaagcatgggaaatgtaaaggcagtctttctctgggaaatggatgctattctattctgctgcccctacctgttcctgaggcctcatttagaaagaaaatcccctcagaaggctgtctggcacccagtgtcctagccaggccaagtatatgagaaaggtaagtccattttccccttcaggtcctcagtggattacttaaccactgctgtccctcggtccctttttcctaaacgggtttagttctgtcttttttctccttttttctaaatgctggtaaatatttacattcagccagggaagaggaggccagaggtcgggccagctgccccattcttttaacgttgtagggcctgcccatggagcggaccctcctctttgggcctcgtgagcttttttgcttatatgttccatttcgtgccgctttccccttcaagatgccatttggagggtaggggatctgcttccactgngactgggctatgggattctgac

SEQ ID NO: 21927 - DNA, 1041 bp, Homo sapiens
acccgttttgactcattacgaatttaatacgactcactatagggaatttggccctcgaggccaagaattcggcacgagctacaaggctcggagctccgggcactcagacatcatgagttggtccttgcacccccggaatttaattctctacttctatgctcttttatttctctcttcaacatgtgtagcatatgttgctaccagagacaactgctgcatcttagatgaaagattcggtagttattgtccaactacctgtggcattgcagatttcctgtctacttatcaaaccaaagtagacaaggatctacagtctttggaagacatcttacatcaagttgaaaacaaaacatcagaagtcaaacagctgataaaagcaatccaactcacttataatcctgatgaatcatcaaaaccaaatatgatagacgctgctactttgaagtccaggaaaatgttagaagaaattatgaaatatgaagcatcgattttaacaccaaaagattgttaacctgaaagagaaggtagcccagcttgaagcacagtgccaggaaccttgcaaagacacggtgcaaatccatgatatcactgggaaagattgtcaagacattgccaataagggagctaaacagagcgggctttactttattaaacctctgaaagctaaccagcaattcttagtctactgtgaaatcgatgggtctggaaatggatggactgtgtttcagaagagacttgatggcagtgtagatttcaagaaaaactggattcaatataaagaaggatttggacatctgtctcctactggcacaacagaattttggctgggaaatgagaagattcatttgataagcacacagtctgccatcccatatgcattaagagtggaactggaagactggaatggcagaaccagtactgcagactatgccatgttcaaggtgggacctgaagctgacaagtaccgcctaacatatgcctacttcgctggtggggatgctggagatgcctttgatggctttgattttggcgatgatccta

SEQ ID NO: 21928 - DNA, 368 bp, Homo sapiens
ggtggtctgcacctgtaatcccagctatgcaggaggctgaggcaggagaatcgcttgaacccaggaggcagagattgcagtgagccgagacgacggcattggactccaggctgggcaacagagcatgactccgtctcaaaaacaaacaaacaaaaaaaacgagtgtcacctggggctacttggccagacacagagagcaaggagacatccctattatctgtcaaaaataattgttggggctgagcacagtttgaggcctggagtttgagatcagcctgggcaacatagcgagcaccccatctccagaaaaaatttaaaaattggctggggttacaggcgtgagccaccggacccggccccttctttat

SEQ ID NO: 21929 - DNA, 435 bp, Homo sapiens
gctttagtcaggaaggacgttggtgttgaggttagcatacgtatcaaggacagtaactaccatggctcccgaagttttgccaaaacctcggatgcgtggccttctggccaggcgtctgcgaaatcatatggctgtagcattcgtgctatccctgggggttgcagctttgtataagtttcgtgtggctgatcaaagaaagaaggcatacgcagatttctacagaaactacgatgtcatgaaagattttgaggagatgaggaaggctggtatctttcagagtgtaaagtaatcttggaatataaagaatttcttcaggttgaattacctagaagtttgtcactgacttgtgttcctgaactatgacacatgaatatgtgggctaagaaataagttcctcttgataaataaacaattaacaaataaaaaaaaaaaaaa

SEQ ID NO: 21930 - DNA, 511 bp, Homo sapiens
cccacgcgtccgtattgggaaagggctcaatgagagacaaagccaaggaggaagagctgcgcaaaggtggagaccccaaatatgcccacttgaatatggatctgcatgtcttcattgaagtctttggacccccatgtgaggcttatgctcttatggcccatgccatggaggaagtcaagaaatttctagtaccggatatgatggatgatatctgtcaggagcaatttctagagctgtcctacttgaatggagtacctgaaccctctcgtggacgtggggtgccagtgagaggccggggagctgcacctcctccaccacctgttcccaggggccgtggtgttggaccacctcggggggctttggtacgtggtacaccagtaaggggagccatcaccagaggtgccactgtgactcgaggcgtgccacccccacctactgtgaggggtgctccagcaccaagagcacggacagcgggcatccagaggatacctttgcctccacctcctgcacc

SEQ ID NO: 21931 - DNA, 967 bp, Homo sapiens
gaggaggtagcttggaacctaacttctgttgaccttgttggagcaagtgaggcacattgccactatgtggtagttaagctcttttcagaaaaactcctcaaaattcaagataaagccattcaagctgtcttaaggagtttatgtctgctgtattctctgtatggaatcagtcagaacgcgggggatttccttcaggggagcatcatgacagagcctcagattacacaagtaaaccagcgtgtaaaggagttactcactctgattcgctcagatgctgatgctttggttgatgcatttgattttcaggatgtgacacttggctctgtgcttggccgctatgatgggaatgtgatgaaaacttgtttgagtgggctaagaactccccactgaacaaagcagaggtccacgaatcttacaagcacctgaagtcactgcagtccaagctctgaagtgtcacaaggacaagtttaatctgcttcagaaagcgcctgtgtgcaactcaaattttgtggaatctttttcgaattcaaatagctatagagcaaatgataaattgacccctttttataaatggagggaaaaaatgaacagatttcagagattaaatgaaaaaaagcagatgttttaagtgcaattaacactgaaagagacctgttaaaccattcagaaaaagcttaagaaatgcgatatgacttccttttgtaatgctgctgatcccagtagactatgacttttgataattagcagaatttaactactgagtagttgattattttcacattttaattgctaatcactggctatataagtgtttttaagcaaaggtatttttgaagtggtgtagaacccttccaagctttcctgctcagtgttctaccagacttaccctggggcctggcttaaaagcaggattgaagaaaagggactgggggaaggaaacttattggaaaacttgatgcgaatgagt

SEQ ID NO: 21932 - DNA, 559 bp, Homo sapiens
  misc_feature (1)...(559): n = a,t,c or g
ggntttnnnaacagtttgacatgattacgaatttaatacgactcactatagggaatttggccctcgaggccaagaattcggcacgagatggaaggatccctttgggaaattctcaggagggggacctgggccaagggcttggccagcatcctgctggcaactccaaggccctgggtgggcttctggaatgagcatgctactgaatcaccaaaggcacgccccacctctctgaagatcttcctatccttttctgggggaatggggtcgatgagagcaacctcctagggttgttgtgagaattaaatgagataaaagaggcctcaggcaggatctggcatagaggaggtgatcagcaaatgtttgttgaaaaggtttgacanggcagtcccttcccacccctcttgcttgtcttacttgtcttatttattctccaacagcactccaggcagcccttgtccacgggctctccttgcatcagggctaatctcgggccttgtcgaaaggaagaggctnncaacgttaaatgagggtaactgctggaatccagnaattcgtcgca

SEQ ID NO: 21933 - DNA, 554 bp, Homo sapiens
gaaaaataaaaaaactagctgggtatggtgacgcacatctgtagtcccagctccttgggggactgagacagaaggatagcttgaacctgagaggttgaagaggcttcagtgcaccgagatcgcccactgcacttcagcctgggtgacaaagtgagacgctgtctcaaatagtgaagccccgtctttactaaaaatacaaaaattagctgggcatgatggcaggtgcctgtaatcccagctactggggaggttaaggcaggagaattgcttgaacctgggaggcagaggttgcagtgagcccagatcacaccactgcactccagcctgagtgacagagcaagactccgtctcaaaaaataataataataaataaactgttaaatatgacatacagtgttactgtccatttgggactaccttgagtccagagagaaaaacagattgagtgaatggtaggtgtttacatttttgtacctagccaaatgtttatgacattggtcatcaggttcactgtcaacaatgcctgtttaatgttagactacctcttcagttct

SEQ ID NO: 21934 - DNA, 517 bp, Homo sapiens
accgtttgacatgattacgaatttaatacgactcactatagggaatttggccctcgaggccaagaattcggcacgagagagaactcgctccagggagcttccaacttttaattcaaggagccaggctgcaggctccagggctttgagggatgttcatttgaggaggtggtagagacatctggggtccaggaaacccagggttcagtcctggatctgtccctggccagcacctcgcatagcatctggtgtgcagagggtggtccttctccccacttgctggtagacacacctttctcggactcaggagctcacctgagaacacagagtagcagaacctggcccaggggcctggcttacaccaaatcactctgtttgtttgttttttgttgtttttgtttgtttgttttttgcctcagactcctgtaatcccagctgtacttgggaggctgaggcaggagaatcgcttgaacccaggaggtggaggttgcagtgagccaacattgcaccactgcactcc

SEQ ID NO: 21935 - DNA, 446 bp, Homo sapiens
gaaaatacaaaaattaaggggtgtggtgacacatgcctgtagtctcagctgtttgggaggctggggcaggaggattgcttgagcctgagaggttgaggctacagtgagccatgtttacgccattgcagtccagcctgggcgacagagtgaaaccctgtctcaaaaaaaaagtaacatttctatatgatttttgggatcgacatgtccataatgttaatgaagcgcatagcagtcactagtaaattaggagttatacattgcttctatagcatcagaaattgtatatcaggccaggtgcaaaagctcactcctgaaatccaagcactttgggaggctgaggtgggcggattgcttgaggtcaggagttcaagaacagcctggccaacttgatgaaaccccaggtctctactaaaaatacaaaaattggcaggcatggtggtgcatcc

SEQ ID NO: 21936 - DNA, 404 bp, Homo sapiens
  misc_feature (1)...(404): n = a,t,c or g
ggccctcgaggccaagaattcggcacgagttttaaaataacaagtttggggagttaggagaaatttaaagtaaaaaaatgaaaaaataaaggctgggattacaggagtgagccaccgtgcctggcctggagtaagtttttttgttttttcttttattctttttgaaatgaagttttgctcttgttgcccaggctggagtgtagaggcatgatcgcagctcactgcaacctctgcctctcaggttcaggcgattctcctgtctcagcctcccgagtagctgggattacaggtgcctgccaccacgcctggctaatttttggtatttttagtagagacagggtnnnactatgttggccaggcttgtctggaactcctgacctcatgatctgcctgctcggcctccc

SEQ ID NO: 21937 - DNA, 364 bp, Homo sapiens
gggtgaaagtacgggtcgcgagaggttgttcgcgccttgagagttaagcgaagtgtggtggcttccaaggaatacaaacataaaggccttcgaccgttgcaaatagactaaagtgaaaacaaatctgaatgaagatgaagttatttcagaccatttgcaggcagctcaggagttcaaagttttctgtggaatcagctgcccttgtggctttctctacttcctcttactcatgtggccggaagaaaaaagtgaacccatatgaagaagtggaccaagaaaaatactctaatttaagttcagtctgtcttgtcatccagaggcgtcgcccagaccccgggatcggtggaggaagatgctttgctct

SEQ ID NO: 21938 - DNA, 516 bp, Homo sapiens
aattcggcacgaggaaggagaaaagtgcccaagatcctttcaggatatttggttttttgggcgcgacacaaatcgaggtgagggaagagagaggaaaatcccctgaatccctgcaggattaatttattcaaaaaggaaataaaaaatactcaatatgcaaaagtcttgtgaagaaaatgagggaaaaccacagaacatgccaaaggccgaggaagatcgccctttggaggatgtaccacaggaggcagaaggaaatcctcaaccttccgaagaaggcgtaagccaggaagcagaaggaaaccccagaggagggccgaatcagcctggccagggatttaaagaggacacacccgttaggcatttggaccctgaagaaatgataagaggagtagatgagcttgaaaggcttagggaagagataagaagagtaagaaacaagtttgtgatgatgcattggaagcaaagacattcacgcagccgtcttatcctgtgtgctttaagccttgaattcatttt

SEQ ID NO: 21939 - DNA, 626 bp, Homo sapiens
  misc_feature (1)...(626): n = a,t,c or g
gaacagtgtatattctattaaaaagtaaattggctgggtgtggtggctcatgcatgtaatcccagcactttgggaggccgaggcaggaggatcgcttgagcccaagagtttgagaccagcctaggtgacaaagtgagaccccatctctacaaaaaaattaaaaaattatccagatgtggtggtgtttgcctgcggtcctagctacacaggaagttgaggcaggaggattgcttgagtgcaagagtttgaggctgcagagagccaagattgcaccattgcactccagcctgggtgacagagcgagaccctgtctcaaaaaataaaggaaattggctttgactatgaaaaacagccattttcaacctttttataaaacctcttcagggaatattggaatattatttttgtcaggcaaaaataatccagggcttgagcattgctgtagaatatgttatctgttcaaaacttancagagcacgcatgcatcacatgcattgtcatcagtatttgagagctgaaccaatggttttgatgggtgccgtaacanaagacgtgaaagatggtggnttgcacctgtcctgaatcaaactggaaaggtncaggattcaatttccnacctttgcaaa

SEQ ID NO: 21940 - DNA, 345 bp, Homo sapiens
gaaaatggcggtagttggtgtgtcctcggtttctcggctgctgggtcggtcccgcccacagctggggcggcctatgtcgagtggcgcccatggcgaagagggctcagctcgcatgtggaagactctcaccttcttcgtcgcgctccccggggtggcagtcagcatgctgaatgtgtacctgaagtcgcaccacggagagcacgagagacccgagttcatcgcctacccccatctccgcatcaggaccaagccgtttccctggggagatggtaaccatactctattccataaccctcatgtgaatccacttccaactggctacgaagatgaataaagagaatctgg

SEQ ID NO: 21941 - DNA, 660 bp, Homo sapiens
agtgccaagcacaataaaagaaaccctatactaggcaaattattatgaaatttgttttaggacaccagaaataaagataatatctaaaaactttttagaatcgcctaggagggattaggaatatgaatagcatataacttgttggcagtagaattgaaggtagaaggtggtaaaacatcaccttgaaagttttgcattcagcctagaattctgtatccagttaaaccatcaatcaagtgtgaaagtagggggaaaaactcaaggactaaaaaaatgtgctcatgaagaacattttttttggacattacccagaagtagaagaagctgatggcaacaagcagtggtggtttggtggtggatgtgacctcactccaacatacttgaatcaagaagacgctgtccattttcacagaactctgaaggaggcttgtgaccagcatggtccagatctctaccccaaatttaaaaaatggtgtgatgattacttctttatagcccatcgtggagagcggcggggcattggtggtatcttttttgatgatcttgactctccgtccaaggaggaggtgttttgctttgtacagagctgtgccagggctgtagttccttcttacattccccttgtgaaaaagcactgtgatgactcattcaccccccagg

SEQ ID NO: 21942 - DNA, 447 bp, Homo sapiens
  misc_feature (1)...(447): n = a,t,c or g
gtaatcttttgtgcctttgacattttttctgtatctgctactaacaacctcgttaaagtgattgctatttatttccattgctatcctttcccaaccttcagtctttttttcagagagagggtctcactctagcccgggctggagtgcagtggtgcggcctcggctcgctgcggcctcgacctcccgggctcaagcctctcaagtagctgggatcgcgggtgcatgccaccatgcccggccaatttttgtattttttgtagagacagggttttgccatgttgcccaggctgaccttgaactcctgagcgcaagtgattcacctgcctcagcactttgggaggccgaggtgggcagatcacctggggtcaggagtttgagaccagcctgaccaacatggagaaacccatctctactaaaaatacaaattanccagggggggggacatat

SEQ ID NO: 21943 - DNA, 511 bp, Homo sapiens
  misc_feature (1)...(511): n = a,t,c or g
tnnnnnnnnnnnntttgnnnccaacagctatgacatgattacgaatttaatacgactcactatagggaatttggccctcgaggccaagaattcgatgagagcaacctcctagggttgttgtgagaattaaatgagataaaagaggcctcaggcaggatctggcatagaggaggtgatcagcaaatgtttgttgaaaaggtttgacaggtcagtcccttcccacccctcttgcttgtcttacttgtcttatttattctccaacagcactccaggcagcccttgtccacgggctctccttgcatcagggctaatctcgggccttgtcgaaggaagaggctgcagacgttaatgaggttagctgctggattccagtattcgtcgcataaggatccttctttgtctgcgaaggaaaaacacactgattatcataatgaggcacgtggccgtggccggctgggtcggctgaaaactgcngatggaactgcngaanaagccctgtggnnccncatcc

SEQ ID NO: 21944 - DNA, 459 bp, Homo sapiens
aattcggcacgagcaccatgagcttcataccctggattttgtattatttcttgttcatatccacctgtccttgtttcatttccgccagtcggttcagaagttctcattcttgtctacggatgccattcctttctttgcctctttggagattctaaaggtctctgaaatcattattagattactgtattaccttccttcctactggaatgaattcacctccatgttttttattctgttgcttacctttcttagccttcatatacctcttgcgctttgaaattgatttgcgactcctcttagctgagccaatgttgtggagacagggagtggcctgcagtgcctgaaactgcagggcagcagccgcctcccaggaatgtcctgggtcctttcctcctttgaggtcccctgccatatgctcagatggggccaggcacaagcaacgggggcacaccttctttg

SEQ ID NO: 21945 - DNA, 462 bp, Homo sapiens
gggttatgaagaagaaattattcattttaagaaagaacttcgagaaccacaatttcgggatgctgaggaaaagtatagagaaatgatgattgttatgaggacaacagaacttgtgaacaaggatctggatatttattataagactcttgaccaagcaataatgaaatttcacagtatgaaaatggaagaaatcaataaaattatacgtgacctgtggcgaagtacctatcgtggacaagatattgaatacatagaaatacggtctgatgccgatgaaaatgtatcagcttctgataaaaggcggaattataactaccgagtggtgatgctgaagggagacacagccttggatatgcgaggacgatgcagtgctggacaaaaggtattagcctcactcatcattcgcctggccctggctgaaacgttctgcctcaactgtggcatcattgccttggatgagcc

SEQ ID NO: 21946 - DNA, 314 bp, Homo sapiens
ccctctctcgtttatttactcattatttatactaccatggattcagagagtctcctcttacttcatgggtattacattcctatcgttattcagtcaaatgctcaagttatcctagatttggcatctgtatcctttagacagtgtcccagatttggccactgggatccctttcaagctggctcctatgtacttttgatgtgtccttatcattttttttagcagtttcttactttatatttatagcacaataagatattccaggcttatctcgtattttccctgcttcagccctagaatccctctttctccccaat

SEQ ID NO: 21947 - DNA, 835 bp, Homo sapiens
  misc_feature (1)...(835): n = a,t,c or g
ggagccagtcaacccctcagagctgcccaagatgcttgatggcctgcgcaaggtcaacaagagctatccatccctcaccaccaaggtggaggagtctggcgagcatgtgatcctgggcactggggagctctacctggactgtgtgatgcatgatttgcggaagatgtactcagagatagacatcaaggtggctgacccagttgtcacgttttgtgagacggtggtggaaacatcctccctcaagtgctttgctgaaacgcctaataagaagaacaagatcaccatgattgctgagcctcttgagaagggcctggcagaggacatagagaatgaggtggtccagattacgtggaacaggaagaagctgggagagttcttccagaccaagtacgattgggatctgctggctgcccgttccatctgggcttttggcctgatgcgactggctcttcttggttcagtgaaggacagcatcgttcaaggtttccagtggggaaccagggagggccccctctgtgatgaattgattcggaatgtcaagtttaagatcctggatgcggtggttgcccaggagcccctgcaccggggcgggggccagatcatccccacagccaggagagtcgtctactctgccttcctcatggctactcctcgtctgatggagccttactactttgtanaagtccaagcccctgcaaattgcgtctctgcagtttataccgtcctggcangcgcaaggggcactnactcangatgcaccatccaagntccctctgtncacatcaaagnttttcccggcatcactcttttggcttgaaacgatcccggaccaaac

SEQ ID NO: 21948 - DNA, 496 bp, Homo sapiens
  misc_feature (1)...(496): n = a,t,c or g
ttggannacagctatgacatgattacgaatttaatacgactcactatagggaatttggccctcgaggccaagaattcggcacgagctccatgagaggccagaaagtgaagcagaccaaggaggcactccttaaaattctgggggacatgcagccaggggactactttgacctggttctttttgggactcgagtacaatcgtggaagggctcgctggtgcaagcatctgaggccaacctacaagcagctcaagactttgtgcggggcttttccctggatgaggccacaaacctgaatggaggtttgctccggggaattgagatcttgaaccaagttcaggaaagcctcccagaactcagcaaccatgcctcaatactcatcatgttgacagatggcgatcccacagaaggggtgacggaccgttcccaaatcctcaagaacgtccgnacgccttccgggcaaggtccgnttntacacctggggttcggcccatgggg

SEQ ID NO: 21949 - DNA, 480 bp, Homo sapiens
  misc_feature (1)...(480): n = a,t,c or g
tttgaannttttgaannccaanagctatgacatgattacgaatttaatacgactcactatagggaatttggccctcgaggccaagaattcggcacgagaagaggcctcaggcaggatctggcatagaggaggtgatcagcaaatgtttgttgaaaaggtttgacaggtcagtcccttcccacccctcttgcttgtcttacttgtcttatttattctccaacagcactccaggcagcccttgtccacgggctctccttgcatcagccaagcttcttgaaaggcctgtctacacttgctgtcttccttcctcacctccaatttcctcttcaacccactgcttcctgactcgctctactccgtggaagcacgctcacaaagggctaatctcgggccttgtcgaaggaagaggctgcagacgttaatgaggntagctgctggattccagtattcgtcgcataaaggacctctttgctgcnaaga

SEQ ID NO: 21950 - DNA, 765 bp, Homo sapiens
  misc_feature (1)...(765): n = a,t,c or g
tacgaattaatacgactcactatagggaatttggccctcgaggccaagaattcggcacgagcatgaacaagaacgtggtttttgtgattgacatcagtggctccatgagaggccagaaagtgaagcagaccaaggaggcactccttaaaattctgggggacatgcagccaggggactactttgacctggttctttttgggactcgagtacaatcgtggaagggctcgctggtgcaagcatctgaggccaacctacaagcagctcaagactttgtgcggggcttttccctggatgaggccacaaacctgaatggaggtttgctccggggaattgagatcttgaaccaagttcaggaaagcctcccagaactcagcaaccatgcctcaatactcatcatgttgacagatggcgatcccacagagggggtgacggaccgttcccaaatcctcaagaacgtccgcaacgccatccggggcaggttcccgctctacaacctgggtttcggccacaatgtggactttaactttctggaggtcatgtccatggagaacaacggacgggcccagagaatctacgaggaccatgatgccacccagcagctgcagggtttctacagccaggtagccaaacccctgctggtggatgtggatttgcagtacccncaggatgctgtcttggccctgacccagaaccaccataaacagtactacgaagggtcaaaagattgtggtggccgggcgcattgctganaacaacagagcactt

SEQ ID NO: 21951 - DNA, 475 bp, Homo sapiens
ttgaaacccctatgattgattctcctgatacccttatgacatgattacgaatttaatacgactcactatagggaatttggccctcgaggccaagaattcggcacgagcgattatcttacgtggggcaaatgatttcatgtgtgatgagatggagcgctctttacatgatgcactttgtgtagtgaagagagttttggagtcaaaatctgtggttcccggtgggggtgctgtagaagcagccctttccatataccttgaaaactatgcaaccagcatggggtctcgggaacagcttgcgattgcagagtttgcaagatcacttcttgttattcccaatacactagcagttaatgctgcccaggactccacagatctggttgcaaaattaagagcttttcataatgaggcccaggttaacccagaacgtaaaaatctaaaatggattggtcttgatttgagcaatggtaaacctcga

SEQ ID NO: 21952 - DNA, 462 bp, Homo sapiens
gcggcacgaggtgaagaaacctttgaagctgcaatgttgggacaggcagaagaagtggtacaggagagaatttgtgatgatgagctgatcttaatcaaaaatactaaggctcgtacgtctgcatcgattatcttacgtggggcaaatgatttcatgtgtgatgagatggagcgctctttacatgatgcactttgtgtagtgaagagagttttggagtcaaaatctgtggttcccggtgggggtgctgtagaagcagccctttccatataccttgaaaactatgcaaccagcatggggtctcgggaacagcttgcgattgcagagtttgcaagatcacttcttgttattcccaatacactagcagttaatgctgcccaggactccacagatctggttgcaaaattaagagcttttcataatgaggcccaggttaacccagaacgtaaaaatctaaaatggatt

SEQ ID NO: 21953 - DNA, 591 bp, Homo sapiens
gctggagtttctcagtgacatcaccgaggaggacttggaggaggctggggtgcaggacccggctcacaagcgcctccttctggacaccctgcagctcagcaagtgatagcggaggcaccacgaagctgtgaactcagagcccctccctgctaccaaggcccagctatggccccagggttgaaaagttatgagggtcagggcagtatctctctgcctatttattggggtgcctatttattggggatctgcattccccgctgcccaatcatttgcaatgccctaattagggcatcctgcccctcgccttttaggctcaggacggaaggtcagttgccatggttaccgaggaccctggttactctggtgctgtcctgttttactggaccccgcctcccagccccaggggtgcctgtgggggtccatttgggtacgtctgggcccccactttcaccagtttctgcggccttccaccgggcctgaaccacagcggaggagctccgctaagacctccccacccccgctgggggtgggggcgggtgtccatgaaggaatagcccgaggaccgggctggggtttatttaaactgttctg

SEQ ID NO: 21954 - DNA, 438 bp, Homo sapiens
  misc_feature (1)...(438): n = a,t,c or g
tttgataccgtttgacatgattacgaatttaatacgactcactatagggaatttggccctcgaggccaagaattcggcacgaggtggtcgctcctggttctgccagctcccctgagagcctgaacccgggcttgagagcctcgccaccccgggtgacatccctgccgtgggcttgggggctctgggtgtgattccgccggtccgggtcccgcagcgaccacctacccagcgcagtcaggggtggggctgggacccagagcgggaccccggctgccgagtccaggtgtcccgcgggcctcgatttggggagcagaaaacgccaggtcttcaagggtgtctgccaccaccatgcctgacccatttggcagcagcctcgtgtgtggtggtctggtgtggacggtggaagcgtgattctgtgantgnanngngaccactctg

SEQ ID NO: 21955 - DNA, 444 bp, Homo sapiens
  misc_feature (1)...(444): n = a,t,c or g
gnnnnngcnttnnnnaccncccccattgganancagctatgacatgattacgaatttaatacgactcactatagggaatttggccctcgaggccaagaattcggcacgagctgtctacacttgctgtcttccttcctcacctccaatttcctcttcaacccactgcttcctgactcgctctactccgtggaagcacgctcacaaaggtaaagacttttctgtggcttaatccttgtcatgttttcggctcatggacacaaggacacattttcatgccttctctcacagggctctgcgtctccggttcacttctgtgtctttacactcccttcacagaggacacttgctcccccttctctcgttcttagcatcccctaggaacttgcacacccaggtctctcgacttctggacctgcttcttaccatgccgcttaagcagncagg

SEQ ID NO: 21956 - DNA, 493 bp, Homo sapiens
  misc_feature (1)...(493): n = a,t,c or g
gcatggcaatgatgaagtaaaacggggtgtcctgctgatgctctttggtggcgttccaaagacaacaggagaagggacctctcttcgaggggacataaatgtttgcattgttggtgacccaagtacagctaagagccaatttctcaagcacgtggaggagttcagccccagagctgtctacaccagtggtaaagcgtccagtgctgctggcttaacagcagctgttgtgagagatgaagaatctcatgagtttgtcattgaggctggagctttgatgttggctgataatggtgtgtgttgtattgatgaatttgataagatggacgtgcgggatcaagttgctattcatgaagctatggaacagcagaccatatccatcactaaagcaggagtgaaggctactctgaacgcccggacgtccattttggcancagcaaaccaatcagtggacacttgnaggtcaaaatcaatggaacaggaattnaatttgcag

SEQ ID NO: 21957 - DNA, 382 bp, Homo sapiens
gagtagatgaaattcccaatatgtgactgtaatttacctacaaaaatggtaatgtcatgtgattcaacctaatctaacttaccactatatctataaaacagtagatacttaaaatacttagaatttttttcttcatttttctctttaagatcctgataacttaagtgactctctcttttccggtgatgaagaaaatgctgggactgaggaagtaaagaatgaaataaatggaaattggatttcagcatcctccattaacgaagctagaattaatgccaaggcaaaaaggcgactaaggaaaaactcatcccgggactctggcagaggcgattcggtcagcgacagtgggagtgacgcccttagaagtggattaactgtgcca

SEQ ID NO: 21958 - DNA, 476 bp, Homo sapiens
  misc_feature (1)...(476): n = a,t,c or g
tttgnaaacctttatgacangattacgaatttaatacgactcactatagggaatttggccctcgaggccaagaattcggcacgagcggcgctttcctgggttgcttctggcggccctggtgttgctgctgtcctccttctccgatcaatgcaatgtcccggaatggcttccatttgccaggcctaccaacctaactgatgactttgagtttcccattgggacatatctgaactatgaatgccgccctggttattccggaagaccgttttctatcatctgcctaaaaaactcagtctggacaagtgctaaggacaagtgcaaacgtaaatcatgtcgtaatcctccagatcctgtgaatggcatggcacatgtgatcaaagacatccagttcggatcccaaattaaatattcttgtcctaaaggataccgactcattggttcctcgtctgccacatgcatcatctcaggcaacactg

SEQ ID NO: 21959 - DNA, 472 bp, Homo sapiens
gcggcacgagcggcacgagggattgttgtgtccactaaccggactcagaagggacttccctgctcggctggctttcggtttctctgctcacctccggataaatcacggggtctcccgcgccgctcatggcgcctcccgtccgtctcgagcgtcccttttccttcccggcgctttcctgggttgcttctggcggccctggtgttgctgctgtcctccttctccgatcaatgcaatgtcccggaatggcttccatttgccaggcctaccaacctaactgatgactttgagtttcccattgggacatatctgaactatgaatgccgccctggttattccggaagaccgttttctatcatctgcctaaaaaactcagtctggacaagtgctaaggacaagtgcaaacgtaaatcatgtcgtaatcctccagatcctgtgaatggcattggcacatgtgatcaaagacatccagttc

SEQ ID NO: 21960 - DNA, 604 bp, Homo sapiens
  misc_feature (1)...(604): n = a,t,c or g
ctatgacatgattacgaatttaatacgactcactatagggaatttggccctcgaggccaagaattcggcacgagggcgatgggactaatgtgcggacgccgggagcttctgcgcttgctacagtccgggcgtcgggtccacagcgtcgcagggccctcgcaatggcttgggaaaccgctgaccacacggctcctattcccagtagccccgtgctgctgtcgcccacactacctcttccttgcggcttccggcccccgcagcctcagtacctctgctatctcttttgcagaagtccaggttcaggcccctcctgttgttgctgcaactccctcacccacagcagtacctgaggtggcttctggagagactgcagatgtagtccaaactgctgcagagcaagagcttcgctgaactggggctggggtcatacaccccagtgggactgatccagaatttactggaatttatgcatgttgatctgggcctaccttggtggggggccattgctgcatgtacagtctttgcccgctgcctgatttttcctctcatcgtgacgggccaacganangaaccaggatccacaatcacttgccannatccaaaa

SEQ ID NO: 21961 - DNA, 557 bp, Homo sapiens
  misc_feature (1)...(557): n = a,t,c or g
taaccaacatgactatacagggaacccggtttctgaggttaagaacctggtatgaggaaaactaaaagcagtaaaaaacataaagctacccggcaacccacgtctcccgggaacctacctttcgttaggcgtagcggtctaggttcgcaactttagtatctcgggaggttaaggcgggaggaccgagtctagataccggagagtagttcgggtaatacagtgggatttggctctcaccacccaaaaaaaaacaaagaacctgcctctttaaatcccatccccgcgttacaggaaaaaacgctccgaccctcgttcgcccgaacaacgttaagggcaccaggggcacactccacacatatagcaattcgcaactaaaacattccctcacacaaggagcgggagccaggaagataggagaagcaaccccggggtacggaatgtaccgcagcgggacaggttcagggcggcagatcacgggaatcctagtcagtcagacaatagtacaaacggggctaaggacancgancncccggaancnaaaaaaggaccnnaccaag

SEQ ID NO: 21962 - DNA, 645 bp, Homo sapiens
tacgactttaatacgactcactatagggaatttggccctcgaggccaagaattcggcacgagagagagctagcaccatgagcttcaaccctgctcctggagtaggcctataaggagatggtgttaaggtgaagaacagactgcaaatcagctcctagttgaggctagccaaacagcaggtgcctggggatgactcagtatccccatcatttgaaattttcctggtttaggtgaaaatactgggagttctgactcatcctactacatctcttgggagactgtgggctcaggagattcaacacaaagacatctgcccttgtgggttcacaggaacagatagacaatcaagaatgaaaataacaactaaaattaggagatggtaaaccctatggaaaaaagaaatgtaggtggcagatgggatggcactttaaaaattcctactccttatgactttcacaagtgaggctctgtggttcctaatctcttctcattgcctccgtattatgcactgaacaggataacagtccacccagagaatacacattctccactggaacatctcatttatgtgcactcgtgccgaattcttggcctcgagggccaaattccctatagtgagtcgtattaaattcgtaatcatgtcata

SEQ ID NO: 21963 - DNA, 484 bp, Homo sapiens
ctgcaatcatggaacttgacgatactctaaaatactctttcttgcagtttgacccagcacctcgtagaggcgagccacatgttactcgtcgtaccccagactacttcctgtaatgaaattttaaacttgtacagtattgccatgaaccatatatcgacctaatggaaatgggaagagcaacagtaactccaaagtgtcagaaaatagttaacattcaaaaaacttgttttcacatggaccaaaagatgtgccatataaaaatacaaagcctcttgtcatcaacagccgtgaccactttagaatgaaccagttcattgcatgctgaagcgacattgttggtcaagaaaccagtttctggcatagcgctatttgtagttacttttgctttctctgagagactgcagataataagatgtaaacattaacacctcgtgaatacaatttaacttccatttagctatagctttactcagcatgactgtag

SEQ ID NO: 21964 - DNA, 548 bp, Homo sapiens
  misc_feature (1)...(548): n = a,t,c or g
naacagctatgacatgattacgaatttaatacgactcactatagggaatttggccctcgaggccaagaattcggcacgagcaacatcaatgaggagcctggtgttatcctgagcctggtacaggaccccaacacaggcttctcagtgaatggacagctcattggcaacaaggccaggagccctgggcagcatgacggcacgtacttcgggcggctgggaatcgcaaaccctgccacggactttcagttggaagtgactcctcagaacattacgctgaaccccggctttggtgggcctgtgttttcctggagggacccagctgtgctgcggcnnnnnnnnnnnnnnnnnnnnnnnaacaagaagaggaaccctgtgtgctgtgaacacggtggcacctnttgaaggtntgcaccgagtgnngaaggggaanngnccaccagacttctgggctttttgtgctngncagncatncgtgtcanccgacgcacggctgtgggcaatttttnnccccatcggnnntanngnngacatnnnccangntntgaccc

SEQ ID NO: 21965 - DNA, 414 bp, Homo sapiens
gcatttgttaggcagatttttcagctgccagccagcgctctcacaaaggttttacacatagcatgccaccagcctggcatgtctacgtctttgtcacttacttttttgcatgccacaagagttgagagtcattctaagtttatccacatttgggatcctgcttttaatgtggcagaaagtagcttaactggaatgaagtatcatgaaaaagaaaaggactcttggtgtctggaaaataggaatttaaatcattgaaatacgctgatatctctcgaggcattttaacctcagtgttctgtctttgacatccagatgaattctgaccagcacgtctttgcacccaacaagaggaccacttgttgtggccatttctcagctgggaaatgtttgcagagatgattgagataatagacg

SEQ ID NO: 21966 - DNA, 399 bp, Homo sapiens
ggaactgcactgtgacaaggcagacgtgcagtccatcatcggcctgcagcgcttcttcgagacgcgcatgaacgaggccttcggtgacaccaagttctctgctgtgctggtggagcccccgccgatgagcctgcctggtgctggcctgagttcccaggagctgtctggtggccctggtgatggcccctgaggctggagcccccatggccagcccagcctggctctgttctctgtcctgtcaccccatccccactcccctggtggcctgactcccactccctggtggccccatcccccagttcctcacgatatggtttttacttctgtggatttaataaaaacttcaccagttcctcaggcgttggctggttgggggactgtggtcaaaaaaaaaaaaaa

SEQ ID NO: 21967 - DNA, 548 bp, Homo sapiens
gtttatattaaaaaaccaaaacctcaaaaattgtagttcatgtcagtcagtgatgactcatcttagaagtattttgtttttggatgtgtgaatgtgcatagttcttaaagtccaacattcatgtaataagacatcttgcatataacaatgacccttacgtctaagatgttaaatagatcctaagcctggtataactttattcaagtatccttatttgcccctaaaatgtctttaatacacattacttgggttatttcttgaatgaacatacaggtatcccaatttctgtttttaagagaatggggtcttgctctgtcacccaggctggagtgcagtggtgcagtcatggcttactgcatccatgatcctcctgcctcagcctcccaagtagatgggactgaaagcacacactgccatccctggctaatgttttcatattttgtagagttgcagccttgctacgtgacccaggctggagtgtagtagctattcacaggcatgattgcttgaaactcatggcttcaagggaaactcccaccctcaatatc

SEQ ID NO: 21968 - DNA, 556 bp, Homo sapiens
tagtcagcttgcaggcaggagggtgctgcatcgattcccaatgaagcacactgctgacaggccaagctagatctttaaggcatacaagcatggtaagagggtgtggacagatgctttgcagaaaaaaaatggatcctctagagacctaagaaggaaatgtaaatttattttctcattataaattaaaaaaaaaaattttgtagagatagggtttcgtcatggcccaggctggtctggaactcctgagcttaggcaatccgcccgtctcggcctcccaaagtgctgggattataaattattaacttgaggctgggcgtggtggctcacgcctgtaatcccagcatttttggaggccaaggcaggaggattagttgagccctggagtttgagatcagcctgggcaatatagtgagaccatgtctctataaaaaatatttaaaaatcagtagggtatggtggcatacacctgtggtcgcagctacccaggtgggtgagggtggagattgcttgagccctgaggtcaaggctgcactgagccatgattgcatcactgtac

SEQ ID NO: 21969 - DNA, 532 bp, Homo sapiens
ttgacatgattacgaatttaatacgactcactatagggaatttggccctcgaggccaagaattcggcacgagctggaatgctcctaacacaaagaaatgataaacgcttgaggtgatggaaaccccaattaccctgatttgatcattacggattctatgcttctacctaaatatcacatatactccataaatatgtacaactattacatatccatacctaaaagaaaaaagattataaaatgtgatgcgcaaaacaaaattatgaaagtaataggagaaaatattagagatttttatgattctggggctagagtgggcctccaaagtaattgagagttaaaattaatgaaagaaaaaagctattccccaagtgtcattagtctgaacaggtaaggttttagggtatatattctctgctcagtttatgcctattactcttcttcaggcacaagtctgggacaggaacccgcatggcctttgtagtccttaagccgactacatggtagccatgccagtgaattctgactttaaa

SEQ ID NO: 21970 - DNA, 539 bp, Homo sapiens
  misc_feature (1)...(539): n = a,t,c or g
cagcagcggcggcagctggaggatgaagaaggagcatgtgcttcactgccagttctccgcgtggtacccgttcttccgaggcgttaccatcaagagtgtcattcttccacttcctcagaatgtgaaggattatttactcgatgatggaactctggtggtttcaggaagggatgatccaccaacacattctcagccagacagtgatgatgaagcagaagaaatacagtggtctgatgatgagaacacagccacgcttacggcaccagaatttcctgagtttgccactaaagtccaggaagctatcaattccctcgggggcagtgtctttcctaagcttaattggagtgccccaagggatgcgtattggatagcaatgaatagttctctgaaatgtaaaaccctcagcgacatctttctgcttttcaagagttccgatttcatcactcgtgacttcactcagccgtttattcattgtactgatgattctccagatccatgtatagaatatgagctcgttctccgaaaatggngtgaattga

SEQ ID NO: 21971 - DNA, 462 bp, Homo sapiens
  misc_feature (1)...(462): n = a,t,c or g
anaacngctatgacatgattacgaatttaatacgactcactatagggaatttggccctcgaggccaagaattcggcacgagctcccatcagcgttcgtgctgtcagccttgcagccttctcctactcattccagctccaatacccagcggctgccagaccgagtgaccggcgtggacacagaccctcacttcatcatccacgtgccccagaaagaggacaccctgtgcttcaacatcaatgaggagcctggtgttatcctgagcctggtacaggaccccaacacaggcttctcagtgaatggacagctcattggcaacaaggccaggagccctgggcagcatgacggcacgtacttcgggcggctgggaatcgcaaaccctgccacggactttcagttggaagtgactcctcagaacattacgctgaaccccggctttggtgggcctgtgttttctgnagga

SEQ ID NO: 21972 - DNA, 705 bp, Homo sapiens
  misc_feature (1)...(705): n = a,t,c or g
gacatccatagtgaaagatagctctgcagccagaaatggtcttctcacggaacataacatctgtgaaatcaatggacagaatgtcattggattgaaggactctcaaattgcagacatactgtcaacatctgggactgtagttactattacaatcatgcctgcttttatctttgaacatattattaagcggatggcaccaagcattatgaaaagcctaatggaccacaccattcctgaggtttaaaattcacggnaccatggaaatgtagctgaacgtctccagtttccttctttggcaacttctgtattatgcacgtgaagccttcccggagccagcgagcatatgctgcatgaggacctttctatcttacattatggctgggaatcttactctttcatctgataccttgttcagatttcaaaatagttgtagccttatcctggttttacagatgtgaaactttcaagagatttactgactttcctagaatagtttctctactggaaacctgatgcttttataagccattgtgattaggatgactgttacaggcttagctttgtgtgaaaaccagtcacctttctcctaggtaatgagtagtgctgttcatattactttagttctatagcatacttgcatctttaacatgctatcatagtacatttagaatgattgcctttgattttttttttaaattctgtgtg

SEQ ID NO: 21973 - DNA, 649 bp, Homo sapiens
  misc_feature (1)...(649): n = a,t,c or g
ggcaatgtttgagttattacttgcagagataggagcaaaaattacaaaaacacacagggtagtgggtccttttgtggctttcctagttactcaaattgactttcccccacctttgcacaggtgctttcaatagttttaaaattatttttaaatatatattttagctttttaataaacaaaataaataaatgacttctttgctattttggttttgcaaaaagacccactatcaaggaatgctgcatgtgctattaaaaattgttccaaatgtccataaatctgagacttgatgtattttttcattttgtccagtgttaccaactaaattgtgcagtttggggcttttcccccttaccatagaagtgcagaggagttcagtatctctgttttaaagacgtatagaatgagcccaattaaagcgaaggtgtttgtgcttgtttgtgtgtatcagctgtaccttgttgagcatgtaatacatcctgtacataagaaattagttctttccatggcaaagctattaccttgtacgatgctctaatcatattgcatttaattttattttgcacagtgaccttgtagccacatgagaaagcactctgtggttttgttcggctcagatttatctggtgagttggtgntttgnttgggg

SEQ ID NO: 21974 - DNA, 547 bp, Homo sapiens
  misc_feature (1)...(547): n = a,t,c or g
ncccnttgganaacngntatgacatgattacgaatttaatacgactcactatagggaatttggccctcgaggccaagaattcggcacgaggaaggttcttttactgaaggatgcgaaggaagatgactgtggccaggatccgtatatcagggaattaggattatatggacttgaagccactttgatccctgttttatcgtttgagtttttgtctcttcccagtttctctgagaagctttctcatcctgaagattacgggggactcatttttaccagccccagagcagtggaagcagcagagttatgtttggagcaaaacaataaaactgaagtctgggaaaggtctctgaaagaaaaatggaatgccaagtcagtgtatgtggttggaaatgctactgcttctctagtgagtaaaattggcctggatacagaaggagaaacctgtggaaatgcagaaaagcttgcagaatatatttgttccagggagtcctcagcactgcctcttctatttccctgtggaaacctcaaaagagaaatcctgcaaaac

SEQ ID NO: 21975 - DNA, 801 bp, Homo sapiens
tatgacatgattacgaatttaatacgactcactatagggaatttggccctcgaggccaagaattcggcacgagccgtccccatcggaaattgcttaggaagagtctttgagatctaattaagatctgtttccttgctctgtcgcagtgccctataaggactgccaggcaataatgaaggttcttttactgaaggatgcgaaggaagatgactgtggccaggatccgtatatcagggaattaggattatatggacttgaagccactttgatccctgttttatcgtttgagtttttgtctcttcccagtttctctgagaagctttctcatcctgaagattacgggggactcatttttaccagccccagagcagtggaagcagcagagttatgtttggagcaaaacaataaaactgaagtctgggaaaggtctctgaaagaaaaatggaatgccaagtcagtgtatgtggttggaaatgctactgcttctctagtgagtaaaattggcctggatacagaaggagaaacctgtggaaatgcagaaaagcttgcagaatatatttgttccagggagtcctcagcactgcctcttctatttccctgtggaaacctcaaaagagaaatcctgccaaaagcgctcatggacaaagggattgccatggaaagcataactgtgtatcagacagttgcacacccaggaatccaagggaacctgaacagctactattcccagcagggggttccagccagcatcacattttttaagtccctctggcctcacatacagtctcaagcacattcagg

SEQ ID NO: 21976 - DNA, 534 bp, Homo sapiens
  misc_feature (1)...(534): n = a,t,c or g
tnnnnnnnnnnnattgganacntnttgactgattacgaatttaatacgactcactatagggaatttggccctcgaggccaagaattcggcacgaggtggacacagaccctcacttcatcatccacgtgccccagaaagaggacaccctgtgcttcaacatcaatgaggagcctggtgttatcctgagcctggtacaggaccccaacacaggcttctcagtgaatggacagctcattggcaacaaggccaggagccctgggcagcatgacggcacgtacttcgggcggctgggaatcgcaaaccctgccacggactttcagttggaagtgactcctcagaacattacgctgaaccccggctttggtgggcctgtgttttcctggagggaccaagctgtgctgcggcaggacggggtggtggtgaccatcaacaagaagaggaacctggtggtgtctgtggacgacggtggcacctttgangttgttttgcacccaatgtggaaggggaactcggtccaccaggacttctgggctt

SEQ ID NO: 21977 - DNA, 467 bp, Homo sapiens
agccgactgctgaaggctggtttgcgtcgacatggcggttaccctgagtctcttgctgggcgggcgcgtttgcgccgccgtcactcgctgtgggttcgcgacccggggggtggcgggcccaggccctattggccgggagccggaccccgattccgactgggagccggaggaacgggagctgcaggaggtggagaggtaccggcttctccccgggccctcagcttgaagcagggcctcgtgccccggcgctccaggccgcgcccccttggcgccgggtgtcctgccgctgcttgcgcagcggcccttgtttcttcttacccgttgttaggggcgcagcgtcaggtgttcagctcccctgggaccactggtcccttcattagtgacgtatttcatcatcagtttagagagttcggcatgcttacaggcagttattgttctaggtgttagctttctgggtgtacggacaa

SEQ ID NO: 21978 - DNA, 371 bp, Homo sapiens
  misc_feature (1)...(371): n = a,t,c or g
atctctactaaaaatacaaaaattcatcaggcatagtggtgcatgtctgtaattccagcttcttgggaggtagaggtacaagaatcgcttgaacctgggaggcagaggttgcagtaagctgagatcacgccactgcactccagcctgggcaacagagcgagactctgtctcaaaagaaaaaaaataaaacaaatcgattatctgttaagttttttaatcaactataagtagtatgacatgtggattaaagtaccgactctgaagctagactgcttgggttcagattctggcacttcaacctactagctatgacttagggcagagttacttaacttctctgaccctcatttttttttcatccggnaaggact

SEQ ID NO: 21979 - DNA, 484 bp, Homo sapiens
  misc_feature (1)...(484): n = a,t,c or g
gnngtgttttcttgcctcgagagactcttatgacatgacnacgaatttaataccgactcactatagggaatttggccctcgaggccaagaattcggcacgaggtggatgtccaagctggccaagttcaagccattgtggattgaggagccaacctcccctgatgacattctggggcacgccaccatttccaagggtgtgtgagtatgttgaccacctgcatgagcatttcaagtatcccgtgatgatccagcgggcttcctacatgcctcccaaggatcccggctactcaacagaaatgaaggaggaatctgtaaagaaacaccagtatccagatggtgaagtttggaagaaactctttcctgctcaagaaaattaagtgctcagccccaacaacttttttctttctgaagtgaaagggcttaaaatttcttggaaatagttttacaaaaatggatttaaaaaatcctacccgatcaagaatga

SEQ ID NO: 21980 - DNA, 395 bp, Homo sapiens
ttttttttttttttcaagagaattaaatcgtttattgattacacatgataatggatacacaagcttcattcccatctataattttatctggtaccattattcaatttagatatattgcataggatgtgccaacaatcacttttataaccattccatgattttgcttgggtaatcccttttaatggtgaacttcaggtcacaacagtaactatcagttcaactacaccaaggtttccgaagacaatggcttctccacccaagcaggttgtatataaattccaaatagaacctggcatcaccctgaaggaattctaacttcacactgttggggaaatttaccaagatggcttaagagtagactaactttacacagcacattaaaaaaaagacatttt

SEQ ID NO: 21981 - DNA, 1227 bp, Homo sapiens
  misc_feature (1)...(1227): n = a,t,c or g
tttaatacgactcactatagggaatttggccctcgaggccaagaattcggcacgagcggcacgagggtggacagggaggtgagggccaacctgtcatcccaggccctgcggatgtcgctggactatgggtttgtgaccccactgacctccatgagcatcaggggcatggcggaccaggacggcctgaagcccaccatcgacaagccctcagaggattctccgcctttggagatgctgggacccagaaggacgttcgtgctgtcagccttgcagccttctcctactcattccagctccaatacccagcggctgccagaccgagtgaccggcgtggacacagaccctcacttcatcatccacgtgccccagaaagaggacaccctgtgcttcaacatcaatgaggagcctggtgttatcctgagcctggtacaggaccccaacacaggcttctcagtgaatggacagctcattggcaacaaggccaggagccctgggcagcatgacggcacgtacttcgggcggctgggaatcgcaaaccctgccacggactttcagttggaagtgactcctcagaacattacgctgaaccccggctttggtgggcctgtgttttcctggagggaccaagctgtgctgcggcaggacggggtggtggtgaccatcaacaagaagaggaacctggtggtgtctgtggacgacggtggcacctttgaggttgttttgcaccgagtgtggaaggggagctcggtccaccaggacttcctgggcttctatgtgctggacagtcatcggatgtcagcccggacgcacgggctgctggggcaatttttccaccccatcggttttgaagtgtctgacatccacccaggctctgaccccacaaagccagatgccacgatggtggtgaggaaccgccggctcacggtcaccaggggtttgcaaaaagactacagcaaggacccgtggcatggggccgaggtgtcctgctggttcattcacaacaatggggctggactcatcgatggtgcctacactgattatatcgtccccgacatcttctgagccctctgggcaacaangcctgtcctcccccggggccaaggcagaggaggaggacgacatcctgacctgctgctgaggctgtacctccttgactaagctggttccttgtgtcaaagcacctcatgccttccattaaagagaggccgtgtccaaaaaaaaaaaaaa

SEQ ID NO: 21982 - DNA, 545 bp, Homo sapiens
ataaaggatacataaaaaatacagtataaactgcataagcttaacagtagcaaaaacactgatgaacttttaaaaagtcaaaaatatataaaaatattagcctgaaatggcaaattttcaaacaccgatctgtgtaaaaatgtttaaatattgatgttactccaaaaatatatacttattctattttttttctatttgcaacagtttataaaggcaaacaaacacctgcaattgaggtagcaaagccaaattcacaaactttggatcaagaaaaatacccttcctatgttttaacagcatcttctatacaatagtgaatgaattctaattgttccaaaatttttaattcacattactttacaaaattttatttaaaatactgaaaatgttttgttaaaaagacagttagtcctgacaatcatctcacattcaaaatactgtacaaaaaaatctgaagtcaccatatattacaaaaaactaagctatgtatttacattttcaatgtagttttagaagttgaggttaagccaactgctacaaatggt

SEQ ID NO: 21983 - DNA, 431 bp, Homo sapiens
ctatgacatgattacgaatttaatacgactcactatagggaatttggccctcgaggccaagaattcggcacgagtatagttccatgtggctggggaggcctaacaatcatggcggaacatgaaagccatgtctcacatggtggcagacaagagaagagagcttgtgcagggaaactctccttttaaaatgatcagatctcgtgagactcattcactatcccgagaacagtacaggagagacttgcccccataattcaatcacctcccactgggttcctcccatgacatgtgggaattgtggaagttacaattcaagatgagatttgggtggggacacagccaaaccatatcactccagaatatcacgatttcaaacatcatatttggaatttaaacaaaaatgttgactttagatctcaataaaatataga

SEQ ID NO: 21984 - DNA, 541 bp, Homo sapiens
accgctatgacatgattacgaatttaatacgactcactatagggaatttggccctcgaggccaagaattcggcacgaggctagagatagatgaatggtttgggtgacatacaagaaaggactagggtttttgcttccataattattatggattccagcaaagtgcaactactgataatggtttcactgttttcccacccaaatctcatcttgaattataactcccacaattcccacgtgtcctgggaagaaccagtggcaggtgattgaattatggggggcaggtctttcctgccctgttctcatgatagtgaatgagtctcacaagatctgatggctttaaaaaaggggagtttccctgcataagctctcttctcttgtctgccaccaggtgagatgtgccttttgccttctgccatgattttaaggaactccccagccacgtggaacttttgtaaattgcccagtcttggggtatgtcttcatcagcagcgtgaaaaccagagtaatacaggtaaattgggacccagtagaagtggggc

SEQ ID NO: 21985 - DNA, 596 bp, Homo sapiens
cctttgacatgattacgaatttaatacgactcactatagggaatttggccctcgaggccaagaattcggcacgagctcgggtgtagacctctgaagctgagatcacacaaaaacctggcctccccgccatgtagctgttggagagtagaaaaatagagcacgcctgatgtttctaaatgagaagactttcaatagtaatgaagaatccatggcactctcctcaccctcaaacacatggcagtcattcacatacaggccccaaagccactgttagtgctgcagtagctcctgtggacattggaaagcccggagagggcgtggaagaaatcagctggcccccggcaggttctctggggttttgtgcccaaggctcctggagccctaaaaactttcaaaagttaactccccacgtccccatcctgcttgggtttctggacttttctgaggcaccggcagaggggtctcgttgctcccttgagtgtaggggcagccctttaacctggctccttgagtccctgctttttctgcttctgttgccttcttcctcgtcttcctctctctcaatatcgccctctctttgtccctccccagttcct

SEQ ID NO: 21986 - DNA, 712 bp, Homo sapiens
gccttaatctagcagtaatttatcaaaaacccatatgataagagaattattttataatagtgttggtaaagaaaatctaaaatagaaaaaacatgccaacaattgattggctaatgaggtgggtgatgccagatgcaagactgctgggcctacagcggtagcgtgaggaaagccgtgcgttgcgttccaaggcatctgtgagcccgcggagtatacaccatgagcaaagctcaccctcccgagttgaaaaaatttatggacaagaagttatcattgaaattaaatggtggcagacatgtccaaggaatattgcggggatttgatccctttatgaaccttgtgatagatgaatgtgtgcgagatggcgactagtggacaacagaacaatattggaatggtggtaatacgaggaaatagtatcatcatgttagaagccttggaacgagtataaataatggctgttcagcagagaaacccatgtcctctctccatagggcctgttttactatgatgtaaaaattaggtcatgtacattttcatattagactttttgttaaataaacttttgtaatagtcaaaaatgctttctcagatgttctgaatatagaatatcagctctcattccagtttttttctaacatgaattttcctggttgacattgatttcaaagggttttatgcattaaagtgaaagaatcttattaaatgtgaa

SEQ ID NO: 21987 - DNA, 473 bp, Homo sapiens
  misc_feature (1)...(473): n = a,t,c or g
nggngtttnnnctttgaanctctganaaccctatgacatgattacgaatttaatacgactcactatagggaatttggccctcgaggccaagaattcggcacgagaaactgtccattactggaacctatgatctgaagagcgtcctgggtcaactgggcatcactaaggtcttcagcaatggggctgacctctccggggtcacagaggaggcacccctgaagctctccaaggccgtgcataaggctgtgctgaccatcgacgagaaagggactgaagctgctggggccatgtttttagaggccatacccatgtctatcccccccgaggtcaagttcaacaaaccctttgtcttcttaatgattgaacaaaataccaagtctcccctcttcatgggaaaagtggtgaatcccacccaaaaataactgcctctcgctcctcaacccctcccctccatccctggccccctccctgga

SEQ ID NO: 21988 - DNA, 780 bp, Homo sapiens
ggcaaagaattcctgaagaagcaaaagctgagccctgacgcagttgcccagctggcattccagatggccttcctgcggcagtacgggcagacagtggccacctacgagtcctgtagcactgccgcattcaagcacggccgcactgagaccatccgcccggcctccgtctatacaaagaggtgctctgaggcctttgtcagggagccctccaggcacagtgctggtgagcttcagcagatgatggttgagtgctccaagtaccatggccagctgaccaaagaagcaacaatgggccagggctttgaccgacacttgtttgctctgcggcatctggcagcagccaaagggatcatcttgcctgagctctacctggaccctgcatacgggcagataaaccacaatgtcctgtccacgagcacactgagcagcccagcagtgaaccttgggggctttgcccctgtggtctctgatggctttggtgttgggtatgctgttcatgacaactggataggctgcaatgtctcttcctacccaggccgcaatgcccgggagtttctccaatgtgtggagaaggccttagaaacatgtttgatgccttagaaggcaaatccatcaaaagttaacttctgggcagatgaaaagctaccatcacttcctcatcatgaaaactgggaggccgggcatggtggctcatgcctgtaatcccagcattttgagaggctgaggcgggtggatcacttgaggtcaggagtttgagaccaacctggccaacatggtgaa

SEQ ID NO: 21989 - DNA, 410 bp, Homo sapiens
ggtctgaacgactttattcagaagattgccaataactcctatgcatgcaaacaccctgaagttcagtccatcttgaagatctcccaacctcaggagcctgagcttatgaatgccaacccttctcctccaccaagtccttctcagcaaatcaaccttggcccgtcgtccaatcctcatgctaaaccatctgactttcacttcttgaaagtgatcggaaagggcagttttggaaaggttcttctagcaagacacaaggcagaagaagtgttctatgcagtcaaagttttacagaagaaagcaatcctgaaaaagaaagaggagaagcatattatgtcggagcggaatgttctgttgaagaatgtgaagcaccctttcctggtgggccttcacttctctttccagactgctga

SEQ ID NO: 21990 - DNA, 436 bp, Homo sapiens
  misc_feature (1)...(436): n = a,t,c or g
ctntgactgattacgaatttaatacgactcactatagggaatttggccctcgaggccaagaattcggcacgaggatctgaagagcgtcctgggtcaactgggcatcactaaggtcttcagcaatggggctgacctctccggggtcacagaggaggcacccctgaagctctccaaggccgtgcataaggctgtgctgaccatcgacgagaaagggactgaagctgctggggccatgtttttagaggccatacccatgtctatcccccccgaggtcaagttcaacaaaccctttgtcttcttaatgattgaacaaaataccaagtctcccctcttcatgggaaaagtggtgaatcccacccaaaaataactgcctctcgctcctcaacccctcccctccatccctggcccctcctggatgacatttaagaangggtga

SEQ ID NO: 21991 - DNA, 557 bp, Homo sapiens
  misc_feature (1)...(557): n = a,t,c or g
attattttctatcgacaatggccttctgactccaacaatgaaggcgaaaaggccagagctgcggaactatttcaggtcgcagatagatgacctctattccactatcaaggtttagtgtgaagaagaaagctcagaggaaatggcacagttccacaatctcttctcctgctgatggccttcatgttgttaattttgaatacagcaagtgtagggaaggaagcgttcgtgtttgacttgtccattcggggttcttctcataggaatgctagaggaaacagaacactgccttacagtcacctcatgttgcagaccatgtttatggtaatacacactttccaaaatgagccttaaaaattgtaaaggggatactataaatgtgctaagttatttgagacttcctcagtttaaaaagtgggttttaaatcttctgtctccctgtttttctaatcaaggggttaggactttgctatctctgaaatgtctgctacttgctgcaaattctgcanctgtctgctgctctaaagagtacantgcactagaaggaaatgttcccttaa

SEQ ID NO: 21992 - DNA, 463 bp, Homo sapiens
  misc_feature (1)...(463): n = a,t,c or g
ggttctaaaagaagggctgaactgatggaaggaatgctgttagcctgagactcaggaagacaacttctgcagggtcactccctggcttctggaggaaagagaaggagggcagtgctccagtggtacagaagtgagacataatggaatcaggcttcacctccaaggacacctatctaagccattttaaccctcgggattacctagaaaaatattacaagtttggttctaggcactctgcagaaagccagattcttaagcaccttctgaaaaatcttttcaagatattctgcctagacggtgtgaagggagacctgctgattgacatcggctctggccccactatctatcaactcctctctgcttgtgaatcctttaaggagatcgtcgtcactgactactcagaccanaacctgcaggaactggagaagtggctgaagaaagaaccccangcctttactggtcc

SEQ ID NO: 21993 - DNA, 500 bp, Homo sapiens
ttacgaatttaatacgactcactatagggaatttggccctcgaggccaagaattcggcacgagcacagccctacccttgaggagcttaaagacttaaagaagggaagggaatgctcctagagatgacaggaaggaaacagcaggaatatttatgaaaaaaattggtttggccgatttatattctaaaagagatctgattcattaggcattggagaacacagcaggacagaggaagtcatatccatgtttagacaggtgatggaagcagcctgaattcccagagtatgcttggtccttgcgttgtagggattctttagaggaagatttttctcttttcaggatacttgcctataaagtagtaaatgaaacaattttgccaaaataagaaacataggaaacatagttgctaaatctgggcaggcgtgatgattcacacctataatcccagcactgtgggaggctaaatcgcagatcacttgaggtcagtagttcaagaccac

SEQ ID NO: 21994 - DNA, 881 bp, Homo sapiens
tttaatacgactcactatagggaatttggccctcgaggccaagaattcggcacgagtacatatagtggacttgtcatccttaaaatgtgaacagaatttattggcagtgtggcaaagaattataaaacatagtgtttaatgtacttggagtttccttgtagtagtaagtatagagtttgatgataagtaaacgtcccttaacaaaaacctcaaccttattactatcccattaaaaaacagcaaatacttactgagttcttgtaagagctaatgtcattgtaagatttaaaactaagggcttttatcactttgcaaattattttttaaatgcattcatcatttgacagtgttctctcatttcttaaaatgcgagtcatcttccaaaagagttgtttttaactgccctaaacatttttggggaagtatgcagggtttaaatttttaagtataattagttctgaattaaaatatgcacatggaacttgtctggcagactgatgcaatagtaaaacaactgcagaattactattaatgtaaacaatccatttgaaagtcaatcagctgctcccattaaaatattatttaaaatacaatacccacagcatctaactaaatcctcaggatttattctccgggagaaattatccctttctaggaaaatgaagttatttctggttttaattcatacaatactttaagaaaatctgttaaatataacaaaacacaagctagatgcttaagaaatgcttaaagaaatattggggcgaaggtaacagcagtcaacaggattgtggccattactggtcctattattttgatgtaccatggaaggcacagaaatcgagcaaggaagaaaatattagttattttgatctacatct

SEQ ID NO: 21995 - DNA, 329 bp, Homo sapiens
  misc_feature (1)...(329): n = a,t,c or g
ntttgaaaancgctatgacatgattacgaatttaatacgactcactatagggaatttggccctcgaggccaagaattcggcacgagactgaagctgctggggccatgtttttagaggccatacccatgtctatcccccccgaggtcaagttcaacaaaccctttgtcttcttaatgattgaacaaaataccaagtctcccctcttcatgggaaaagtggtgaatcccacccaaaaataactgcctctcgctcctcaacccctcccctccatccctggccccctccctggatgacattaaagaagggttgagctggaaaaaaaaaaaaaa

SEQ ID NO: 21996 - DNA, 639 bp, Homo sapiens
  misc_feature (1)...(639): n = a,t,c or g
gccaagaattcggcacgagggaagtgctgggttcgggcatgcaccaccacctccagaacaatgagctactccgtgacatctttggcctgggccctgtgctgttgctggatgccactgccctgaaggcctgcaaggttccacgctttgagaagcacctgtacaatgctgctgccttcaaagcccggaccaaggctcgaagccgtgtgcgggacaagcgggcagacatcctgtgaagcaggacctgctgaagaagtatgtggactgtctcacagacaagagtgccaagacccggcagggtgctcttgagagcctgcgcctggccctagcgtcccgcctactccccgacttcttgctggagcgccgcctcacgctagccgatgccctggaaaagtgcctcaagaaagggaagggcgaggaacaagccctggctgctgctgtgctaggcctgctctgcgtgcagctgggccctggacctaagggtgaggagctgtttcacagcctgcagcctctgctggnctctgtgctcagtgacagcacagctagccctgctgccggctccactgngcttctgccttggcctgggctgctacgtggctgccgntgacattcangacctggctcttgccttgctgcttaaaa

SEQ ID NO: 21997 - DNA, 485 bp, Homo sapiens
tctatgacatgattacgaatttaatacgactcactatagggaatttggccctcgaggccaagaattcggcacgagaactggaagaattttttaataaagattttaatagttattttctgaactgtccaaaataatgaactatttgctctaactcagaggtgctcgtgctaagctagtatcttgggccaaagagacatgatggaaacagaaaaacaggcatctttcagaatgaccatgatacagacgctgctgctctcgtgagagagggactggagtagagttacaataagcctgagggcctggagtactagaatctgaagggaagcagcaggagctaagaatcctgtaggggaaaagtcactcaaacgctcatttcttgctgggcagggtggagcttgctgtcagctttttctccaatacgtgcacaaatcattgggtagtgttctaagatgagcagttttttacttcattaagcagctgcaaga

SEQ ID NO: 21998 - DNA, 437 bp, Homo sapiens
ggctcgcgtggaatcatgcggttggttgcaatactgtacggtgaagaataaaatccattctgtatggcagctgtggggtcataggtcaaagccatgccagcctctccttccctgggccaaggcctcccattctgggtatatttgctttgattctgtcgcttcttttgtcctccatcagcgaatttgcacagcaaaggctcactgggggctgggatgcctggtggtgttttcagatattttccattaaaatgttgaattaccacttcacatttttcagtagactccattctggcaaagccaacacctctgctgactccattagcgtctcttagtattcttgtggaaatgacatgtccaaagggttttcagcatattctcaagctcctgctcatccatagaaaatgggggagatttgagatgtataggtttgatgggtc

SEQ ID NO: 21999 - DNA, 338 bp, Homo sapiens
tgacagggtccccagggagaccgtgtcagtagggatgtgtgcctggctgtgtacgtgggtgtgcagtgcacgtgagagcacgtggcggcttctgggggccatgtttggggagggaggtgtgccagcagcctggagagcctcagtccctgtagccccctgccctggcacagctgcatgcacttcaagggcagcctttgggggttggggtttctgccacttccgggtctaggccctgccccaaatccagccagtcctgccccagcccacccccacattggagccctcctgctgctttggtgcctcaaataaatacagatgtcccccaaaaaaaaaaaaaa

SEQ ID NO: 22000 - DNA, 710 bp, Homo sapiens
ggaattacatcttctttaaaggcaaatgggagagaccctttgaagtcaaggacaccgaggaagaggacttccacgtggaccaggcgaccaccgtgaaggtgcctatgatgaagcgtttaggcatgtttaacatccagcactgtaagaagctgtccagctgggtgctgctgatgaaatacctgggcaatgccaccgccatcttcttcctgcctgatgaggggaaactacagcacctggaaaatgaactcacccacgatatcatcaccaagttcctggaaaatgaagacagaaggtctgccagcttacatttacccaaactgtccattactggaacctatgatctgaagagcgtcctgggtcaactgggcatcactaaggtcttcagcaatggggctgacctctccggggtcacagaggaggcacccctgaagctctccaaggccgtgcataaggctgtgctgaccatcgacgagaaagggactgaagctgctggggccatgtttttagaggccatacccatgtctatcccccccgaggtcaagttcaacaaaccctttgtcttcttaatgattgaacaaaataccaagtctcccctcttcatgggaaaagtggtgaatcccacccaaaaataactgcctctcgctcctcaacccctcccctccatccctggccccctccctggatgacattaaagaagggttgagctggaa

SEQ ID NO: 22001 - DNA, 463 bp, Homo sapiens
  misc_feature (1)...(463): n = a,t,c or g
gggcactgctacttttgtggatcttgtacctggcttcaggagacttgggacagaatgctttttggcccaaatgcgggcacagaaaggtgaacttctggaaagattatcaagtgctaggaacttttcaaatatggacgatgaagagaattattctgcagcaagtaaagcagtccggcaggtactgcaccaactaaagagacttggaattgtgtggcaggatgtcctgccagtgaatatatattgcaaggctatggggactttactcaatacagcaatttctgaggtcattggcaaaattactgccctagaggacatatctactgaagatggtgataggttatattccttatgcaaaacagtgatggatgaaggaccccaagtatttgcacctttatctgaagaaagcaagancaagaaatatcnagaagaggttccagtctatgtgccaaaatggatgccattc

SEQ ID NO: 22002 - DNA, 549 bp, Homo sapiens
atgacatgattacgaatttaatacgactcactatagggaatttggccctcgaggccaagaattcggcacgagggctcggcgtgggaggatcgcttgaacctgggagatggaggttgcagtgagctgagattgcgccactgaactccaacctggaggacagagcaagactctgtctcaacaaaaaaacctggaacttttaagaggtctatggagtagtaataaaatgtagttgtgagcagggggctaatgagtacaatctacaagtcctcaaacagaccaaagtttttagatttttgattatcataaaatctttgaacacattctcagtataaaaattaagtatgtatctgaggcacagtagctcaggcctgtaatcccagcactttgggaggccgaggcgggcaaatcacccgaggtcaggagttcgagaccagcccgaccaacatggtgaaaccccgtctccactaaaaatacaaaattagctgagtgtggtggcacatgcctgtaattccaactacttgggaagctgaagcaagagaatcgcttaaa

SEQ ID NO: 22003 - DNA, 613 bp, Homo sapiens
  misc_feature (1)...(613): n = a,t,c or g
gcgctgttcagtgccggtgttgcagggagtgagggcagctggagtgcgttctgccgaagcttgtggttgcacgcccatcgtcttaggggctaccttccgtgaccatgtccaagtctctgaagaagttggtggaggagagccgggagaagaaccagcccgaggtggacatgagtgaccggggcatctccaacatgctggatgtcaacggcctctttaccttatcccatatcacacaactggtcctcagccataacaagctaacaatggtgccaccgaacatcgcagaactgaagaatttggaggtgctcaacttttttaataaccaaatcgaggagctgcccacacagatcagtagccttcagaaactcaaacacctgaaccttggcatgaacaggctgaacactttgccacgaggcttcggctccctgccagctcttgaggttctggacttgacttacaacaacttgagcgaaaattctcttcctggaaacttcttctacctgaccaacctgcgtgcactctatctaagtgacaacgattttgaaatcctgccgccanatatggggaagnccanaaaagttngnggntntcnagncctnngggnnnagnggcc

SEQ ID NO: 22004 - DNA, 455 bp, Homo sapiens
gggaaaagatgaggtctgcctgactttatatggcgatggtgctgctaaccagggccagatattcgaagcttacaacatggcagctttgtggaaattaccttgtattttcatctgtgagaataatcgctatggaatgggaacgtctgttgagagagcggcagccagcactgattactacaagagaggcgatttcattcctgggctgagagtggatggaatggatatcctgtgcgtccgagaggcgacaaggtttgctgctgcctattgtagatctgggaaggggcccatcctgatggagctgcagacttaccgttaccacggacacagtatgagtgaccctggagtcagttaccgtacacgagaagaaattcaggaagtaagaagtaagagtgaccctattatgcttctcaaggacaggatggtgaacagcaatcttgccagtgtggaagaactaa

SEQ ID NO: 22005 - DNA, 471 bp, Homo sapiens
  misc_feature (1)...(471): n = a,t,c or g
gnnnnnngnntttgnnanccnttccccctttgnacancgntatgacatgattacgaatttaatacgactcactatagggaatttggccctcgaggccaagaattcggcacgaggcagagttcaaggaggccttctccctctttgacaaggatggagatggcactatcaccaccaaggagttggggacagtgatgagatccctgggacagaaccccactgaagcagagctgcaggatatgatcaatgaggtggatgcagatgggaacgggaccattgacttcccggagttcctgaccatgatggccagaaagatgaaggacacagacagtgaggaggagatccgagaggcgttccgtgtctttgacaaggatgggaatggctacatcagcggcgcagagctgcgtcacgtaatgacgaacctgggggagaagctgaccgatgaggaggtggntganatgatcnnnnnggctg

SEQ ID NO: 22006 - DNA, 708 bp, Homo sapiens
gaccaggctctctggtatgtcatgttccctcaacccttctggttgcctcacctttggcctgctttgctcatttcccttcatgcctgacagccacaggcttctgtatatctaagccccactggaaggaaagatgtagggggtctggtccaccaaggggcagcatctggaccaacagggcactggctttcttccttgtcacatctttctcatccttgctcacagcaggatgagcgcttggagagatggctggcttcctacagaaggttaccaaaagaccaagctatcttcccttgaaaataaaacccaattgcctgtatattagattgaactatataaaattgccatgttcaactttgccctataaagatgacaatttcacatgattcaacctattaacatggccctggcttagtcgctagtaggacaatggttctcagccttggttgcaaattagaataaactggaggttttaaaaaatacccttgctaggacctcaccacaagactattaaattcaaatttttgcagatgggggcaggcatagagctatttaaaaagctcctctgggctgggcacagtggctcaagcctgtaatcccagcactttgggaggccaaggcgggaggatcgcttgaggtcaggagtttgaggacagcctggccactgtggcaaaaccccatctctactaaaaatacaaaaatcagccaggc

SEQ ID NO: 22007 - DNA, 357 bp, Homo sapiens
gtgcgattcatctttctgtctctagttcttagcatgtgcacggcacagagcaggcgctcagagtgccttcagtgaaggaataaatgaccataccaccaggcacagagtgaggcctttagaaaccctgagcatcatcgggtgcgcccaccacttctgtatgtgactcaaagtaagtgtaaggaaatccagttctgttttgtttctgaaatactagatgtcaggaagggtgtttaggtgtcaggctttggtggcctacactgtgctttcggaattattcactgaggcgaaagaacagagattagctactgatgaaggacaaaaagaattttctgctgaatcctgaatttgccaggatga

SEQ ID NO: 22008 - DNA, 498 bp, Homo sapiens
gggggaggtcgtgatggcggcgccggaggcggaggttctgtcctcagccgcagtccctgatttggagtggtatgagaagtccgaagaaactcacgcctcccagatagaactacttgagacaagctctacgcaggaacctctcaacgcttcggaggccttttgcccaagagactgcatggtaccagtggtgtttcctgggcctgtgagccaggaaggctgctgtcagtttacttgtgaacttctaaagcatatcatgtatcaacgccagcagctccctctgccctatgaacagcttaagcacttttaccgaaaaccttctccccaggcagaggagatgctgaagaagaaacctcgggccaccactgaggtgagcagcaggaaatgccaacaagccctggcagaactggagagtgtcctcagccacctggaggacttctttgcacggacactagtaccgcgagtgctgattctccttgggggcaatgccctaagccccaa

SEQ ID NO: 22009 - DNA, 454 bp, Homo sapiens
gggcaaaactacccctgatccttcagctaacattagtctggatggtgtagacgttcctcttgggaccgggatttcatctggtgtgaatgacacctctctactatataacgagtacattgtctatgatattgctcaggtaaatctgaagtatctgctgaaactgaaattcaattttaagacctccctgtggtaattgggagaggtagccgagtcacacccggtggctctggtatgaattcacccgaagcgcttctgcaccaactcacctggccgctaagttgctgatgggtagtacctgtactaaaccacctcagaaaggattttacagaaacgtgttaaaggttttctctaacttctcaagtcccttgttttgtgttgtgtctgtggggaggggttgttttggggttgtttttgttttttcttgccaggtagataaaactgacatagagaaaag

SEQ ID NO: 22010 - DNA, 419 bp, Homo sapiens
  misc_feature (1)...(419): n = a,t,c or g
nnaccngntatgacatgattacgaatttaatacgactcactatagggaatttggccctcgaggccaagaattcggcacgagcgacatccacacctaatgtccacatggtcagcaccaccctgcctgtggacagcaggatgattgaggatgcaattcgaagtcacagcgaatcagcctcaccttcagccctgtccagtagccccaacaatctgagcccaacaggctggtcacagccgaaaacccccgtgccagcacaaagagagcgggcaccagtatctgggacccaggagaaaaacaaaattaggcctcgtggacagagagattcaagctattattgggaaatagaagccagtgaagtgatgctgtccactcggattgggtcaggctcttttggaactgtttataagggtaaatggcac

SEQ ID NO: 22011 - DNA, 453 bp, Homo sapiens
  misc_feature (1)...(453): n = a,t,c or g
naaccgctatgacatgattacgaatttaatacgactcactatagggaatttggccctcgaggccaagaattcggcacgagactcggattgggtcaggctcttttggaactgtttataagggtaaatggcacggattagctgtgggtgtccctatcaaacagggaaggcattgacttaattcttgaatctatgtggaatattaatgttctgattttaatggaaacactttgtcacttggaagaaaggagatgttgcagtaaagatcctaaaggttgtcgacccaaccccagagcaattccaggccttcaggaatgaggtggctgttctgcgcaaaacacggcatgtgaacattctgcttttcatggggtacatgacaaaggacaacctggcaattgtgacccagtggtgcgagggcagcagcctctacaaacacctgcatgtccaggagaccaa

SEQ ID NO: 22012 - DNA, 607 bp, Homo sapiens
  misc_feature (1)...(607): n = a,t,c or g
tnntnntntnntatnannnantnctnnntnnnnnnatntntcnntcnntnnnntnnctntatnttnnnnnnntannntattttnnnannatntnntntcntnnncnntntnttttanaatnanatantntnatnaattcggcacgagcccaacaatctgagcccaacaggctggtcacagccgaaaacccccgtgccagcacaaagagagcgggcaccagtatctgggacccaggagaaaaacaaaattaggcctcgtggacagagagattcaagctattattgggaaatagaagccagtgaagtgatgctgtccactcggattgggtcaggctcttttggaactgtttataagggtaaatggcacggagatgttgcagtaaagatcctaaaggttgtcgacccaaccccagagcaattccaggccttcaggaatgaaggtggctgttctgcgcaaaacacggcatgtgaacattctgcttttcatggggtacatgacaaaggacancctggcaantgtgacccanaggtgccanggccagcancctntacnaacacctgcatgttccaggaaaccnanttttcaaatgttccnccttaattgcctt

SEQ ID NO: 22013 - DNA, 454 bp, Homo sapiens
  misc_feature (1)...(454): n = a,t,c or g
ggtgtntntatntgaatcctttgacatgacacgaatttaatacgactcactatagggaatttggccctcgaggccaagaattcggcacgaggatcaatgaagtggatgctgatggtaatggcaccattgacttccccgaatttttgactatgatggctagaaaaatgaaagatacagatagtgaagaagaaatccgtgaggcattccgagtctttgacaaggatggcaatggttatatcagtgcagcagaactacgtcacgtcatgacaaacttaggagaaaaactaacagatgaagaagtagatgaaatgatcagagaagcagatattgatggagacggacaagtcaactatgaagaattcgtacagatgatgactgcaaaatgaagacctactttcaactcctttttcccccctctagaagaatcaaattgaatcttttacttacctcttgc

SEQ ID NO: 22014 - DNA, 547 bp, Homo sapiens
aatggatttcgatgtcagacttgtggctacaaatttcatgagcactgtagcaccaaagtacctactatgtgtgtggactggagtaacatcagacaactcttattgtttccaaattccactattggtgatagtggagtcccagcactaccttctttgactatgcgtcgtatgcgagagtctgtttccaggatgcctgttagttctcagcacagatattctacacctcacgccttcacctttaacacctccagtccctcatctgaaggttccctctcccagaggcagaggtcgacatccacacctaatgtccacatggtcagcaccaccctgcctgtggacagcaggatgattgaggatgcaattcgaagtcacagcgaatcagcctcaccttcagccctgtccagtagccccaacaatctgagcccaacaggctggtcacagccgaaaacccccgtgccagcacaaagagagcgggcaccagtatctgggacccaggagaaaaacaaaattaggcctcgtggacagagagattcaagctattattggg

SEQ ID NO: 22015 - DNA, 437 bp, Homo sapiens
  misc_feature (1)...(437): n = a,t,c or g
attgganaaccgntatgactgattacgaatttaatacgactcactatagggaatttggccctcgaggccaagaattcggcacgagggaaaattggcaaaatggaaacatggcttcatgaacaagaggcccagggacagcttctctgggacagttccagctctgactcagatgagcaggggaaagatgagaagaagccacgagcactggtgaggaccaggacagagagaatcccacttttcgatgagttttttgatcaagaataagaatactattcattaacctagaaactgagtgctttgaaagcttgttttactctcaaaatcttccaaactgatatatgaattactttgaggacagcaaatcactttggtaaaaagaaatgatatctttagagtcttatgattaacaagtccgtcacatgtgctgttaactattg

SEQ ID NO: 22016 - DNA, 443 bp, Homo sapiens
ggaggcccaaatggagttaaagaaaagtcttcatggagaggcaagaattaataagcaaagtccaagggaccataaagccaagaaaacccttcaaagcaccccaaggaatgatgaccatgaccttctaaccatgttgcctgatgaaatcttgaacagaggtcccggaaattcaaagaatacagaatttttgaaacatcaagcagtgaataactactgtccctggaaaattggcaaaatggaaacatggcttcatgaacaagaggcccagggacagcttctctgggacagttccagctctgactcagatgagcaggggaaagatgagaagaagccacgagcactggtgaggaccaggacagagagaatcccacttttcgatgagttttttgatcaagaataagaatctattcattacctagaaactgagtgctttgaaagcttgt

SEQ ID NO: 22017 - DNA, 495 bp, Homo sapiens
aacagctatgacatgattacgaatttaatacgactcactatagggaatttggccctcgaggccaagaattcggcacgaggccaagggggattagaatgggtgacagagcctttcacctttggggtcagcagcatgtctgacttcaggaccagaaggccaaaacatctgtcagctgagcagcagctcctgtgaatgaatcgcctttgtcttgttggaggcggggatgagtgtgaatttatttgctcaacagaaagccatgtaaacctgagatcagatggaagctctggtggtggcaagaagcccagtagcccttcagacagaagatgcccatcaacaatggaaaggagtacacaggacctcggaaggaagggtcctctctcttggcggaaggcccctcacctctttgtgaagccctctggggcagaaaaaggccttgccggttccagcaaaacttcatggagcgtgggggtggcaaatggggtgcctggtcccagc

SEQ ID NO: 22018 - DNA, 735 bp, Homo sapiens
gggaattcagaacgtcagcacctgcaggttcagtgcccccttgtttctctcctatcctcacttcctcaacgccgacccggttctggcagaagcggtgactggcctgcaccctaaccaggaggcacactccttgttcctggacatccacccggtcacgggaatccccatgaactgctctgtgaaactgcagctgagcctctacatgaaatctgtcgcaggcattggacaaactgggaagattgagcctgtggtcctgccgctgctctggtttgcagagagcggggccatggagggggagactcttcacacattctacactcagctggtgttgatgcccaaggtgatgcactatgcccagtacgtcctcctggcgctgggctgcgtcctgctgctggtccctgtcatctgccaaatccggagccaaggtcctgaggacaccgtgagccagccaggcctggccgctgggcctgaccggccccccagcccctacaccccgcttctcccggactctcccagcggacagccccccagccccacagcctgagcctcccagctgccatgtgcctgttgcacacctgcacacacgccctggcacacatacacacatgcgtgcaggcttgtgcagacactcagggatggagctgctgctgaagggacttgtaaggaaaagctcgtcaacaagcactgttctggaaccttctttcacgtggcccacaagcctgaccacaggggctg

SEQ ID NO: 22019 - DNA, 523 bp, Homo sapiens
gctgagacacttctgtatttcaatcatatcatgaacattttattttgctaaatcttgtgtcatgtgtaggctgtaatatgtgtacattgtgtttaagagaaaaatgaaacccacatgccgccattttcctgaatcaaattctgcagtggaatggagaggaaaatacttctaggcaagcagctagactggtgaattgggggaaatagaaggaactagtaactgagactcctccagcctcctccctattggaatcccaatggctcctggagtaggaaaaaagtttaaactacattcatgttcttgttctgtgtcactcggccctgggtagtctaccatttacttcaccccaagtcctgctgcccatccagttgggaagccatgattttcctaagaatccagggccatgggagatacaattccaagttctcgcttcctcctttgggcatctcttctgcctcccaatcaaggaagctccatgctcaggctctcagctctcgggccagtgctctgctctgtccaggga

SEQ ID NO: 22020 - DNA, 427 bp, Homo sapiens
gcggcacgagctgcaaaaaagatgttgaaatcaatgggatgtttattcccaaaggggtggtggtgatgattccaagctatgttcttcatcatgacccaaagtactggagagagcctgagaagttcctccctgaaaggttcagtaaaaagaacaaggacaacatagatccttacatatacacaccctttggaagtggacccagaaactgcattggcatgaggtttgctctcgtgaacatgaaacttgctctagtcagagtccttcagaacttctccttcaaaccttgtaaagaaacacagatccccctgaaattacgctttggaggacttcttctaacagaaaaacccattgttctaaaggctgagtcaagggatgagaccgtaagtggagcctgatttccctaaggacttctggtgtgctcttcaag

SEQ ID NO: 22021 - DNA, 509 bp, Homo sapiens
cccacgcgtccgggaatttggagtagtttcaaatacaagattgattgctgctgctacttctgtattaaaaactagattttcatatgcctttccaaaggaatttccttataggatgaatcatatattagaatgtgaattctatctgttagaactaatggattgttgcttgatagtgtatcatccttatagacctttgctccagtatgtgcaggacatgggccaagaagacatgttgcttccccttgcatggaggatagtgaatgatacctacagaacggatctttgcctactgtatcctcctttcatgatagctttagcttgcctacatgtagcctgtgttgtacagcagaaagatgccaggcaatggtttgctgagctttctgtggatatggaaaagattttggaaataatcagggttattttaaaactatatgagcagtggaagaatttcgatgagagaaaagagatggcaaccattcttagtaagatgccaaaaccaaaaccacctc

SEQ ID NO: 22022 - DNA, 699 bp, Homo sapiens
gcaaaaacccaggtggcaagcacaaggtacgtggtgatatcaacgtgctcttgtgcggagaccctggcacagcgaagtcgcagtttctcaagtatattgagaaagtgtccagccgagccatcttcaccactggccagggggcgtcggctgtgggcctcacggcgtatgtccagcggcaccctgtcagcagggagtggaccttggaggctggggccctggttctggctgaccgaggagtgtgtctcattgatgaatttgacaagatgaatgaccaggacagaaccagcatccatgaggccatggagcaacagagcatctccatctcgaaggctggcatcgtcacctccctgcaggctcgctgcacggtcattgctgccgccaaccccataggagggcgctacgacccctcgctgactttctctgagaacgtggacctcacagagcccatcatctcacgctttgacatcctgtgtgtggtgagggacaccgtggacccagtccaggacgagatgctggcccgcttcgtggtgggcagccacgtcagacaccaccccagcaacaaggaggaggaggggctggccaatggcagcgctgctgagcccgccatgcccaacacgtatggcgtggagcccctgccccaggaggtcctgaagaagtacatcatctacgccaaggagagggtccacccgaagctcaacc

SEQ ID NO: 22023 - DNA, 633 bp, Homo sapiens
gctgggagtttcgtggacgccgtgccgttactcgtagtcaggcggcggcgcaggcggcggcaggcggcatagcgcacagcgcgccttagcagcagcagcagcagcagcagcatcggaggtacccccgccgtcgcagcccccgcgctggtgcagccaccctcgctccctctgctcttcctcccttcgctcgcaccatggctgatcagctgactgaggagcagattgcagagttcaaggaggccttctccctctttgacaaggatggagatggcactatcaccaccaaggagttggggacagtgatgagatccctgggacagaaccccactgaagcagagctgcaggatatgatcaatgaggtggatgcagatgggaacgggaccattgacttcccggagttcctgaccatgatggccagaaagatgaaggacacagacagtgaggaggagatccgagaggcgttccgtgtctttgacaaggatggcaatggctatattagtgctgcagaacttcgccatgtgatgacaaaccttggagagaagttaacagatgaagaagttgatgaaatgatcagggaagcagatattgatggtgatggcaagtaaactatgaagagtttgtacaaatgatgac

SEQ ID NO: 22024 - DNA, 384 bp, Homo sapiens
ggtcacgactagaggttaggggtgctactggctttagtggatagaggctaagagtgaaacatcctatgcataggacagcctcccacaaaaaataatcataatctggcctaaaatgtcactgaggttgagaaaccctgttatagagtgacaggagctttagatatgcaaaattttatatattttatgtaaagatagttcagcttttggtcactgaggaaagaagccttggaaacagttaaatgacctgtaatgaaatcaacactgagggagccctagtttttgaccaccggccgtttaatatacagtccaggtctaactgcattaaatctttcctcaaaccgcctgattttaaacaaatagcttaatgaactgacatgttgtccg

SEQ ID NO: 22025 - DNA, 528 bp, Homo sapiens
  misc_feature (1)...(528): n = a,t,c or g
ttganatttntatgacatgattacgaatttaatacgactcactatagggaatttggccctcgaggccaagaattcggcacgagggcattctacaagggcactgtcccccgcctgggccgggtctgcctggatgtggccatagtgtttgtcatctatgatgaagtggtgaagctgctcaacaaagtgtggaagacggactaagcctagagaggccgcaaggggaccgccccaggcaccgccagagtgtcctgctacctttgtctcacatgattccagtgcagtagtgccaaaaggccccttcccacgtccctcgagctctgtagcctggtctgtgcattgtggctgtcaaatccatgtgtcccccctgtggtctgtgtgtgacaccaccactgtgtcccagtgtctggcccagccatggctggatgtgcatctggcctatgaccctgtgcccacttgtccatgtgcttactgtgaaccctgtgcctgtggttcatgtctgngtacgtgaaccttgcccgccttccgggg

SEQ ID NO: 22026 - DNA, 633 bp, Homo sapiens
caacagttatgacatgattacgaatttaatacgactcactatagggaatttggccctcgaggccaagaattcggcacgaggtaccagggcctcacagccactgtcctgaagcagggctcgaaccaggccatccgcttcttcgtcatgacctccctgcgcaactggaaccgaggggacaaccccaacaagcccatgaaccctctgatcactggggtcttcggagctattgcaggcgcagccagtgtctttggaaacactcctctggatgtgattaagacccggatgcagggcctggaggcgcacaaataccggaacacgtgggactgcggcttgcagatcctgaagaaggaggggctcaaggcattctacaagggcactgtcccccgcctgggccgggtctgcctggatgtggccatagtgtttgtcatctatgatgaagtggtgaagctgctcaacaaagtgtggaagacggactaagcctagagaggccgcaaggggaccgccccaggcaccgccagagtgtcctgctacctttgtctcacatgattccagtgcagtagtgccaaaaggccccttccacgtccctcgagctctgtagcctggtctgtgcattgtggcttgtcaaatcatgtg

SEQ ID NO: 22027 - DNA, 446 bp, Homo sapiens
gctttaaactcccgttctttatcctctgtttccataactcagctatgtatttttgtttgtttataatcgtttgtttgttgtgtttggagcttggtaaaagaatgaaatgtttttgtagagaaattcactcttccccccaataatgtggctcccccataagtgcaacaagatgtctctcaaatagggtgagctttagttacatcataggtggtgggttccagcttcatttccctgccaatatcatggtttttcccttttccaagtacaaacttcatcttcagcttggttccaggatgggcactagtgtgcccagcatcatagctctcatagctataaaatccactcaagacgttcagagccagcaaaggctcatctctttctcactctcctttataaagcaagtgagcctttacgggaagaccctacgctcattaacctgaattggg

SEQ ID NO: 22028 - DNA, 487 bp, Homo sapiens
gacccgattacgaatttaatacgactcactatagggaatttggccctcgaggccaagaattcggcacgaggtacgtcaaggtgccatattttagtttagcatgtccagagccccattactggtatctcttagatgtggttcatctctgcccctatgaaattcatgtgcattctttgccctgccattgggagaggcacagttccttcccaatatagctctctgctttttgtctgctggttttgatttttcactctcactctcacccattgcatttttctcaggcttgaatcaaggcatcactagtccctaatgtccgccagttgctggaaatacgtaacagcttcctaaattggtcttgtcagcatccattctttaaggtttgagatgaagcaggtggtgatagcaccctcatccatcctactgcacctttttgcaggagaaagggtttggagtacagtacttcctctaaaaaaattctttttttttt

SEQ ID NO: 22029 - DNA, 781 bp, Homo sapiens
gggcaacatatgtgtggtgaggctcccacctaacaccaatgatgaagtagatgaggatcctacaggaaacaaagccctgtgggaccgtggcttgctcaatggggcctcccagaaggcagaggtgatcatgaactaccatgtcggggagacggtgctgtccttgcagaagaccacgctgatccctggaggctcagaatcacttgtctataccaccttgtctggaggaattggcatccttgtgccattcacgtcccatgaggaccatgacttcttccagcatgtggaaatgcacctgcggtctgaacatccccctctctgtgggcgggaccacctcagctttcgctcctactacttccctgtgaagaatgtgattgatggagacctctgtgagcagttcaattccatggaacccaacaaacaaaagaacgtctctgaagaactggaccgaaccccacccgaagtgtccaagaaactcgaggatatccggacccgctacgccttctgagccctcctttcccggtggggcttgccagagactgtgtgttttgtttcccccaccaccatcactgccacctggcttctgccatgtggcaggagggtgactggataattaagactgcattatgaaagtcaacagctctttcccctcagctcttctcctggaatgactggcttcccctcaaattggcactgagatttgctacacttctccccacctggtacatgatacatgaccccaggttccagtgtagaacctgagtcccccattcccaaagccatc

SEQ ID NO: 22030 - DNA, 395 bp, Homo sapiens
ggggcctggagctgtacctggacctgctgtcccagccctgccgcgctgtttacatctttgccaagaagaacgacattcccttcgagctgcgcatcgtggatctgattaaaggtcagcacttaagcgatgcctttgcccaggtgaaccccctcaagaaggtgccagccttgaaggacggggacttcaccttgacggagagtgtggccatcctgctctacctgacgcgcaaatataaggtccctgactactggtaccctcaggacctgcaggcccgtgcccgtgtggatgagtacctggcatggcagcacacgactctgcggagaagctgcctccgggccttgtggcataaggtgatgttccctgttttcctgggtgagccagtatctcccccaaac

SEQ ID NO: 22031 - DNA, 617 bp, Homo sapiens
  misc_feature (1)...(617): n = a,t,c or g
gcaccaatcagagagcctagaacatccctgggcaagtggatggcccagcaggcaggcactgtggcccttctgtccaccagacccacctggagcccgcttcaagctctctgttgcgctcccgcatttctcatgcttcttctcatggggtggggttggggcaaagcctcctttttaatacattaagtggggtagactgagggattttagcctcttccctctgatttttcctttcgcgaatccgtatctgcagaatgggccactgtaggggttggggtttattttgttttgtttttttttttcttgagttcactttggatccttattttgtatgacttctgctgaaggacagaacattgccttcctcgtgcaaagctggggctgccagcctgagcggaggctcggccgtgggccgggaggcagggctgatccggctgctcctccagcccttcaaacgaaatcctgtttcagctaaatgcagggaaactcaaggtttttttaagtttnnnnnnncctttaaagcctttttttaggccncnttgacagtggnggccgggganaaaatagggaacactcatccctggncgtctatcccagggggngttnaacattcncagccc

SEQ ID NO: 22032 - DNA, 493 bp, Homo sapiens
  misc_feature (1)...(493): n = a,t,c or g
tttgatnccctntatnnaancccttgntatgacatgattacgaatttaatacgactcactatagggaatttggccctcgaggccaagaattcggcacgagcctgattcagaacaatatgcctggaaactatgtcttcagttatgaccagtttttcagggacaagatcatggagaagaaacaggatcacacctaccgtgtgttcaagactgtgaaccgctgggcttgatgcatatccctttgcccaacatttctctgagnnnnnngnggcctcaaaggatgtgnccgtcttggggnagnaatgatnacntggccattgacccnanaccttaaggntttggcagncacaccgggaaaccttgaancgcattgngcntgaacttggtgggcacccggaacatttttangcccnantaatttcattngggaaccttgancaggaacttgntttaacttngncccnaaaggganttaaaccctggtnttttttcttct

SEQ ID NO: 22033 - DNA, 718 bp, Homo sapiens
ggagaggcagacgtgagctgagggcgcagaggcaggcagcatctctgagggtccccaaggaacatggctgggagccgtgaggtggtggccatggactgcgagatggtggggctggggccccaccgggagagtggcctggctcgttgcagcctcgtgaacgtccacggtgctgtgctgtacgacaagttcatccggcctgagggagagatcaccgattacagaacccgggtcagcggggtcacccctcagcacatggtgggggccacaccatttgccgtggccaggctagagatcctgcagctcctgaaaggcaagctggtggtgggtcatgacctgaagcacgacttcagggcactgaaagaggacatgagcggctacacaatctacgacacgtccactgacaggctgttgtggcgtgaggccaagctggaccactgcaggcgtgtctccctgcgggtgctgagtgagcgcctcctgcacaagagcatccagaacagcctgcttggacacagctcggtggaagatgcgagggcaacgatggagctctatcaaatctcccagagaatccgagcccgccgagggctgccccgcctggctgtgtcagactgaagccccatccagcccgttccgcagggactagaggctttcggctttttgggacagcaactaccttgcttttggaaaatacatttttaatagtaaagtggctctatatttt

SEQ ID NO: 22034 - DNA, 1056 bp, Homo sapiens
ggctcgcgatgcctctacacaagtatcccgtgtggctctggaagcggctgcagctgcgggagggcatctgttcccgcctgcccggccactacctgcgctccctggaggaggagcggacgcccactcccgtgcactataggcctcatggggccaagttcaagatcaaccccaagaacgggcagcgggagcgtgtggaggacgtgcccattcccatctactttccccccgaatcccagcgggggttgtggggcggcgagggctggatcctgggccaaatatatgccaacaacgacaagctctccaagaggctgaagaaagtgtggaagccacagctgtttgagcgagagttctacagtgagatcctggacaagaagttcacagtgactgtgaccatgcggaccctggacctcatcgatgaggcttacgggctcgacttttacatcctcaagaccccgaaggaggacctgtgctccaagtttgggatggacctgaagcgagggatgctgctgcggcttgcccggcaggacccccagctgcaccccgaggaccccgagcggcgggcagccatctacgacaagtacaaggaatttgccatcccagaggaggaggcagagtgggtgggcctcacgctggaggaggccattgagaagcagagacttttggaggagaaggaccctgtacccctgttcaagatctatgtggcggagctgatccagcagctgcagcagcaggcactgtcagaacccgcggtggtgcagaagagagccagtggccagtgaccacacagctcctccatgcctgaccaacaggcccagctttccctgccaggccctttgcactgaggacacagatcccggggagctgtgagggccaccggtgggcagtgggtggatcctggtttcgtgtgctgcccatgcaccttccagcccggggccagcttggcagggatccccaggaggcctgggccgcccagaggctcctctcaggctgggccccgacgtttgcggcagtgttccttgtgcccgtggggccgggagcgagtaaagtctgggccag

SEQ ID NO: 22035 - DNA, 445 bp, Homo sapiens
ttaatacgactcactatagggaatttggccctcgaggccaagaattcggcacgagacacctagtggctctgatggcactgctctgtggggacccacaggaaaaggtggctgaggaggctgcagagggcattcactccctgctgcatatcaccctgaggctgaagtatatcactcatgacaagaaagatcagcaaaacttgaaaagagcattgacaaaatgtcgagaattcctggagctccacagctctgccgctaaatgcttctacaactgtcccttcagaattgcccaggtctttgaaggttttcttgattcaaatgagctctgccagtttataatgactacatttgataccctgaaaaacctgaaacatccctgcatccagcgatcagcaggagaattactgctaactttggcgaaaaatacagagtcccaatttgagaaggg

SEQ ID NO: 22036 - DNA, 449 bp, Homo sapiens
gcagcacccccatggccgccccctgccctcgcctcctccccctcctccatctgcgccctcaccttccagctccgagttcctggacccagaagcttgcagaaggaccgctttaatctcttggttcttgggggaagatggagacaggctgttccggttccaccacatcggcaccaggagcagctcaaagtcatgttcgtcggaggccccaactccaggaaggactatcacatcgaagagggtgaagaggtattttaccagctggagggagacatggttctccgagtcctggagcaagggaaacaccgggatgtggtcattcggcagggagagatattcctcctgcctgccagggtgccccactcaccacagaggtttgccaacaccgtggggctggtggttgagcgaaggcggctggagaccgagctagatgggctcaggtactatgtggg

SEQ ID NO: 22037 - DNA, 709 bp, Homo sapiens
cagcttgacatgattacgaatttaatacgactcactatagggaatttggccctcgaggccaagaattcggcacgagagcagagcatagttcttgattggctccgagctccctaggcataatgaccacctcctgttttgtagggtccagtgtccatcaaagtccaggtgcccaacatgcaggataagacggaatggaaactgaatgggcaggtgctggtcttcaccctcccactcacggaccaggtctctgtcattaaggtgaagattcatgaagccacaggcatgcctgcagggaaacagaagctacagtatgagggtatcttcatcaaagattccaactcactggcttactacaacatggccaatggcgcagtcatccacctggccctcaaggagagaggcgggaggaagaagtagacaagaggaacctgctgtcaagtccctgccattttgcctctcctgtctcccaccccctgccccagacccaggagcccccctgaggctttgccttgcctgcatatttgtttcgctcttactcagtttgggaattcaaattgtcctgcagaggttcattcccctgaccctttccccacattggtaagagtagctgggttttctaagccactctctggaatctctttgtgttagggtctcgatttgaggacattcatttcttcagcagcccattagcaactgagagcccagggat

SEQ ID NO: 22038 - DNA, 732 bp, Homo sapiens
ggcacagaaccattggctctcactgaaacagatatatgcaagttgccgaaagacgaaggaacttgcagggatttcatattaaaatggtactatgatccaaacaccaaaagctgtgcaagattctggtatggaggttgtggtggaaacgaaaacaaatttggatcacagaaagaatgtgaaaaggtttgcgctcctgtgctcgccaaacccggagtcatcagtgtgatgggaacctaagcgtggctggccaacatcatatacctcttgaagaagaaggagtcagccatcgccaacttgtctctgtagaagctccgggtgtagattcccttgcactgtatcatttcatgctttgatttacactcgaactcgggagggaacatcctgctgcatgacctatcagtatggtgctaatgtgtctgtggaccctcgctctctgtctccaggcagttctctcgaatactttgaatgttgtgtaacagttagccactgctggtgtttatgtgaacattcctatcaatccaaattccctctggagtttcatgttatgcctgttgcaggcaaatgtaaagtctagaaaataatgcaaatgtcacggctactctatatacttttgcttggttcattttttttcccttttagttaagcatgactttagatgggaagcctgtgtatcgtggagaaacaagagaccaactttttcattccctgccccaatttccagactagatttca

SEQ ID NO: 22039 - DNA, 509 bp, Homo sapiens
  misc_feature (1)...(509): n = a,t,c or g
aancctttgaanccattgctatgacatgattacgaatttaatacgactcactatagggaatttggccctcgaggccaagaattcggcacgaggtagtagagagttaatgtggtccataagtcaatgactgagcaaataaatgaatatgtggaaaaagagttggagaactcaaaatcagcaacatgggtaaaatacagactagccagggagagacttaaaacgaattcttttcatcctcatatctgctcctgcaggaaactatgtcttcagttatgaccagtttttcagggacaagatcatggagaagaaacaggatcacacctaccgtgtgttcaagactgtgaaccgctgggctgatgcatatccctttgcccaacatttctctgaggcatctgtggcctcaaaggatgtgtccgtctggtgtagtaatgattacctgggcatgagccgacaccctcaggtcttgcaagccacacagtgagtagtaggctttcagccatcagcagtgg

SEQ ID NO: 22040 - DNA, 522 bp, Homo sapiens
  misc_feature (1)...(522): n = a,t,c or g
ttgannctaaagcttgactgattacgaatttaatacgactcactatagggaatttggccctcgaggccaagaattcggcacgagcccggacgagaccatggtcataggaaactaccggacgcagctgtatgacaagcagcgggaggagtaccagccggccaccccggggcttggcatgtttgtggaggtgaaggacccagaggacaaggtcatcctggcccggcagtatggctccgagggcaggttcactttcacttcccatacccctggtgagcaccagatctgtcttcactccaattccaccaagttctccctctttgctggaggcatgctgagagttcacctggacatccaggtaggtgaacatgccaatgactatgcagaaattgctgctaaagacangttgagtgagttgcagctacgagtgcgacagctggtggaacaagtggagcanatccagaaagagctaactaccagcggtggcgagaggagcgctttcggcngaccagtgagagcccaaca

SEQ ID NO: 22041 - DNA, 526 bp, Homo sapiens
  misc_feature (1)...(526): n = a,t,c or g
gcccggacganaccatggtcataggaaactaccggacgcagctgtatgacaagcagcgggaggagtaccagccggccaccccggggcttggcatgtttgtggaggtgaaggacccanaggacaaggtcatcctggcccggcagtatggctccgagggcaggttcactttcacttcccatacccctggtgagcaccagatctgtcttcactccaattccaccaagttctccctctttgctggaggcatgctgagagttcacctggacatccaggtaggtgaacatgccaatgactatgcagaaattgctgctaaagacaagttgagtgagttgcagctacgagtgcgacagctggtggaacaagtggagcagatccagaaagagcagaactaccagcggtggcgagaggagcgcttccggcagaccagtgagagcaccaaccagcgggtgctgtggtggtccattctgcagaccctcatcctcgtggccatcggtgtctggcagatgcggcacctcaagagcttctt

SEQ ID NO: 22042 - DNA, 441 bp, Homo sapiens
aaccgtttgactgattacgaatttaatacgactcactatagggaatttggccctcgaggccaagaattcggcacgagaacagttgcaggatgtcgatgacagacttgctgaacgctgaggacatcaagaaggcggtgggagcctttagcgctaccgactccttcgaccacaaaaagttcttccaaatggtcggcctgaagaaaaagagtgcggatgatgtgaagaaggtgtttcacatgctggacaaggacaaaagtggcttcatcgaggaggatgagctgggattcatcctaaaaggcttctccccagatgccagagacctgtctgctaaagaaaccaagatgctgatggctgctggagacaaagatggggacggcaaaattggggttgacgaattctccactctggtggctgaaagctaagaagcactgactgcccctg

SEQ ID NO: 22043 - DNA, 367 bp, Homo sapiens
gggacaatacgcagatgaatgcgtgccgtcacctgggtcgggctgcaggtcatggcggatgggctggagcgaggacaccggggactggtgaactatcaaaggaacaatcagtgatggcaggagccatgctggcagctgggagcctcctcccctggtggggacaactgtacagtttcgaagacccaccccaccaatcactctggagaggcaatgtgcatgggaagctgggagagaaggacaaacacagccgggagaggttttgcaggggtggagtgggccacaaagttgagcgatgaagaatgctgccctccctcctggaagcccaggggctacaccaccttgtggggtggtggtctcaggtcaagga

SEQ ID NO: 22044 - DNA, 723 bp, Homo sapiens
ggaaatgtcaagggttaggacagcacagccctgacttctacccaggctcacttgttgcctgctccctgacccttgcaggatctgcccaaaggtgaagcgcgtcttcaggtcaatagataatctactagagattgtccccagagaacagaactgggccctgaggcccaccgttgccctttcctgagagtcccagcccagtgaaaggaacacagttgacatgttgttgaagccggagatgttgcctgtatgcgtaaaagagctctctgtttcaggctcatgtacagtcaggaatggttccttctcatccaactgcccatgcgccaatgatgctaatgacgacacagccacccggcggtccccaggccgccctcgctcaaagtgcactacagcccattccagtctcgacaacagcgcatttcccctatatgacgcacccttcagtacaagcccaccaccaacagcagttgtaaggctgccctggaggaaccgaaaggccaaattccctcctcccttctactgcttctaccaactggaagcacagaaaactagaatttcatttattttgtttttaaaatatatatgttgatttcttgtaacatccaataggaatgctaacagttcacttgcagtggaagatacttggaccgagtagaggcatttaggaacttgggggctattccataattccatatgctgtttcaaaagtcccgaggtaccccagct

SEQ ID NO: 22045 - DNA, 878 bp, Homo sapiens
ggaaatcaaagtcttctttgtaagtacaatgatcccatctatgttaaactagagaagttggacatcatgattcgtttggcatctcaagccaacattgctcaggtcagactttatgcagactcaagttgatgatgatttagctcttaaggtctggcctttaaagaagctaggctgtgagattgctatttgagaatccttaatgattaaccacttcctgggtttaacaggttctggcagaactgaaagaatatgctacagaggtggatgttgactttgttcgaaaagctgtgcgggccattggaccggtgtgccatcaaggtggagcaatctgcagagcgctgtgtaagcacattgcttgatctaatccagaccaaagtgaattatgtggtccaagaagcaattgttgtcatcagggacatcttccgcaaataccccaacaagtatgaaagtatcatcgccactctgtgtgagaacttagactcgctggatgagccagatgctcgagcagctatgatttggattgtgggagaatatgctgaaagaattgacaatgcagatgagttactagaaagcttcctggagggttttcacgatgaaagcacccaggtgcagctcactctgcttactgccatagtgaagctgtttctcaagaaaccatcagaaacacaggagctagtccagcaggtcttgagtttggcaacacaggattctgataatcctgaccttcgagaccggggctatatttattggcgccttctctcaactgaccctgttacagctaaagaagtagtcttgtctgagaagccactgatctctgaggagacggaccttattgagccaactctgctggatgagctaatctgccacattggtctttg

SEQ ID NO: 22046 - DNA, 476 bp, Homo sapiens
  misc_feature (1)...(476): n = a,t,c or g
ttgannccaatgctatnacatgattacgaatttaatacgactcactatagggaatttggccctcgaggccaagaattcggcacgagagtttttcagggacaagatcatggagaagaaacaggatcacacctaccgtgtgttcaagactgtgaaccgctgggctgatgcatatccctttgcccaacatttctctgaggcatctgtggcctcaaaggatgtgtccgtctggtgtagtaatgattacctgggcatgagccgacaccctcaggtcttgcaagccacacaggagaccctgcagcgtcatggtgctggagctggtggcacccgcaacatctcaggcaccagtaagtttcatgtggagcttgaccagaanntggttaacttgnccaaaagnnntaagcctngtntttttcctcnngtttgtngccanggactntactctnttcaccttgccaanatcctgcagggtgcgagat

SEQ ID NO: 22047 - DNA, 533 bp, Homo sapiens
  misc_feature (1)...(533): n = a,t,c or g
gcaaaggttcgcgtcccagtacgggaatgagcctctttgatctcttccggggctttttcggctttcctggacctcggagcttcagcccaggaggagggatacgtttccacnanaacttcggctttgatgacctantacganatttcaatancatcttcagcgatatgggggcctggaccttgccttcccatcctcctgaacttccaggtcctgagtcagagacacctggtgaganactacgggagggacagacacttcgggactcaatgcttaagtatccagatagtcaccancccaggatctttgggggggtcttgganagtgatgcaanaagtgaatccccccanccagcaccagactggggctcccanangccatttcaaaagttngangatgtatggctatggacccccatcctananccaganaggacaatgatcttgattccaggtttcccaaganggtcntggcccgttctanagcccagccaaatcctattcaagagcacnccgtgaccaaagtcactaaacaag

SEQ ID NO: 22048 - DNA, 425 bp, Homo sapiens
caggtttcccccgtatgcaaatggaccactggaggggttcaaaggttcgcgtcccagtacgggaatgagcctctttgatctcttccggggctttttcggctttcctggacctcggagccacagagatcccttttttggagggatgactcgagatgaagatgatgatgaggaagaagaagaagaagggggctcatggggccgtgggaacccaaggttccatagtcctcagcacccccctgaggaatttggcttcggcttcagcttcagcccaggaggagggatacgtttccacgataacttcggctttgatgacctagtacgagatttcaatagcatcttcagcgatatgggggcctggaccttgccttcccatcctcctgaacttccaggtcctgagtcagagacacctggtgagagactacggg

SEQ ID NO: 22049 - DNA, 630 bp, Homo sapiens
  misc_feature (1)...(630): n = a,t,c or g
gcccaccccgtgatacctcgcagagtgacaaagacctcgatgatgccttggataaactctctgacagtctaggacaaaggcagcctgacccagatgagaacaaaccaatggaagataaagtaaaggaaaaagctaaagctgaacatagagacaagcttggagaaagagatgacactatcccacctgaatacagacatctcctggatgataatggacaggacaaaccagtgaagccacctacaaagaaatcagaggattcaaagaaacctgcagatgaccaagaccccattgatgctctctcaggagatctggacagctgtccctccactacagaaacctcacagaacacagcaaaggataagtgcaagaaggctgcttccagctccaaagcacctaagaatggaggtaaagcgaaggattcagcaaagacaacagaggaaacttccaagccaaaagatgactaaagaaatacaagttaaggtatctggtatctgcatgtaaaatcttcagctggtggatgggtgacttttgaagaacaaaaggctttggcaacagaaaacaattgttcctggtgatttctaaaaatgggttttgtgagtctctgaacatcctaaatattggnttggtatt

SEQ ID NO: 22050 - DNA, 783 bp, Homo sapiens
  misc_feature (1)...(783): n = a,t,c or g
ggaagacgctcaaggaccctcgtgacttggccgagacaggggaagggagaagttgagtcgggcaaggaagagatgctaaagcctggggaattaagaacatgccagaatcatcccgagggagtctggaattagggagggtgaggactcgctaggatcgtcctgtggatctggctacagcaggagctgatgaccctcatgatgtctggcgataaagggatttctgccttccctgaatcagacaaccttttcaaatgggtagggaccatccatggagcagctggaacagtatatgaagacctgaggtataagctctcgctagagttccccagtggctacccttacaatgcgcccacagtgaagttcctcacgccctgctatcaccccaacgtggacacccagggtaacatatgcctggacatcctgaaggaaaagtggtctgccctgtatgatgtcangaccattctgctctccatccagagccttctagagaacccaacattgatagtcccttgaacacacatgctgccgagctctggaaaaaccccacagcttttaagaagtacctgcaagaaacctactcaaagcaggtcaccagccaggagccctgacccaggctgcccagcctgtccttgtgtcgtctttttaatttttccttagatggtctgtcctttttgtgatttctgtataggactctttatcttgagctgtggtatttttgttttgtttttgtcttttaaattaagcctcggttgagcccttgtatattaaataaatgcatttttg

SEQ ID NO: 22051 - DNA, 484 bp, Homo sapiens
  misc_feature (1)...(484): n = a,t,c or g
atttaatacgactcactatagggaatttggccctcgaggccaagaattcggcacgagtggagaagaaacaggatcacacctaccgtgtgttcaagactgtgaaccgctgggctgatgcatatccctttgcccaacatttctctgaggcatctgtggcctcaaaggatgtgtccgtctggtgtagtaatgattacctgggcatgagccgacaccctcaggtcttgcaagccacacaggagaccctgcagcgtcatggtgctggagctggtggcacccgcaacatctcaggcaccagtaagtttcatgtggagcttgagcaggagctggctgagctgcaccagaaggactcagccctgctcttctcctcctgctttgttgccaatgactctactctcttcaccttggccaaaatcctgcagggtgcgagatttactcanacgcaggcaaccatgcttcatgatcaaggtatccgaacagtggacac

SEQ ID NO: 22052 - DNA, 1181 bp, Homo sapiens
cggacgcgtgggctggtgtgatccagcgtggctttcacacgccgtccatctccctcgctggcgtgtccctcccagaatcaaaaggcagacttcccggggagatcccaggccatggcggggagcagagccatcgggagttccctgtcaggagtcctgccctcagatttgagagtgcagaaccccgccagccccccaacttgcatgcaaaccctggcatgtgtgcctctttcctgagggatcgtccataaatatcaccagattatctaaaggttgggaaaggatccatgaaccaaaatagggcaagagccactggtcaagatgcttcccctctgcaattgcaaaagtggagtggattgtgtggtgagatgaggaagtttcattcttctcgtttgttttctcccagtacgagtatgcgttgagacatttgtacgtgctggtcaacctttgtgagaagccgtatccgcttcacaggtaactaatgcagcggtgacgcttgaaaggtcgatgtcattctgaaagcagaaggggctgccatcctcttctgcaagtgggcagtttcacttctgccaggagctccctccagctttcctctacagccatttgtcagcagggtccagaagccacgttctcagtgacagctgctgggcgggcctgtcataactgcctgcctgccgcatgtgggtttgcgtttgtctgcctttcttcagagttgacgcggttcaccaagttctccttcctgtctctcgcaggataaaattgtccatggaccacgtgtgccttggtcactactgaagagctgcctcctggaagcttttccaagtgtgagcgccccaccgactgtgtgctgatcagagactggagaggtggagtgagaagtctccgctgctcgggccctcctggggagcccccgctccagggctcgctccaggaccttcttcacaagatgacttgctcgctgttacctgcttccccagtcttttctgaaaaactacaaattagggtgggaaaagctctgtattgagaagggtcatatttgctttctaggaggtttgttgttttgcctgttagttttgaggagcaggaagctcatgggggcttctgtagcccctctcaaaaggagtctttattctgagaatttgaagctgaaacctctttaaatcttcagaatgattttattgaag

SEQ ID NO: 22053 - DNA, 933 bp, Homo sapiens
  misc_feature (1)...(933): n = a,t,c or g
tatgacatgattacgaatttaatacgactcactatagggaatttggccctcgaggccaagaattcggcacgaggaacgggggccttgctggtcgcgtccctgcattcacccgcgcggccatcccgtcatccaacagttgatcctaactgagcacgcccacggccctggtctggcctgggcaccggccaccgtagcccatcccttgatggcctctgtgtccccaggagggcgggccggggggttgcccaggggctggagcagaggactgtggctccataaaggtaggccggagggtgtgagggcagattcaagctatccccagggctctgctctggtcggagccagccccttctccctctctgccttccccgccccattcctgatgctgaactgttctggacccctggccctgagtctctcaggaccaaagtgggcacgggaacagctgtagtgtgtgcccccccgggctttggccacaggtctccctntcgaggtgtggttgtgantgcgacccttcccttgccgtgatgccttcctcccccggggcttggtccagctccttcactctctagcagctgctggggcccacctcccatgccgaggaccagcaggggaaacctccagggagcatctgcaggctctgcttctgcccggctgctggcttgctctccctggtggctctccagcggccagcttcctcacccacccggcactccgctttgctctgtctcctgaggtgggcctgaccaacctccccttctctgcctcagtccctgggctccagggctcagctccacagccctctgcctagcaggctggttctccctgccaagcccatacctgtggtcacctggccctcctgtggtctgagtaccactcccctgccccaggagccactcccactccagntgnctgttnccagcangtcnccac

SEQ ID NO: 22054 - DNA, 450 bp, Homo sapiens
  misc_feature (1)...(450): n = a,t,c or g
gattgttattaactattttttagcatttgcctgtaagttattaaagactgataactgtagctcttaccttggtctggggcattttcctctccttatcttgccccagagacaattcaagatttctatatggggttgtggcgcagggggagggagatttatcttgaagctgaatttgcaaagcaagcacttataaaaattagattgtgtgttacgggatggcttgtgaaaattataggggggagtggaaaacccctcaagctattgcctgatctctgtagttttttgggtggggtcacttcctttttctctgatttaacacccctcccctcatcctctgggtcatacttgtcccttanatcaactgctccttgcagatttaacttctaattttagctagtctgagctacacctaggttcttgaccnnggtgacacctaagtctatataggta

SEQ ID NO: 22055 - DNA, 480 bp, Homo sapiens
gactggagacgggccattgacacatggactctgcctgggcatgttaggttaattctttgactccaagccttaaaatactcacatggagtcagcgctcacctcattcacacaattatcatagagctccctggacactgaacctctaaagggaaaaggtctaccctggagccaggagcatcagggttggcttgggagcatgagaggtgagcccagggctaggcctgggccaggccccggcagcactgctacttgggaggagccacttcacctttgtattagttattaaaaaatataatttgggctgggcgcagtggctcacgcctgtaatcccagcactttgggagtccgaggcatgcggatcacttgaggtcaggagttcgagaccaccctggccaatatggtgaaaccccatctctactaaaaatacaacaaagttagccgggcgtggtggcaggcgtctgtaatcccagctgcttggga

SEQ ID NO: 22056 - DNA, 452 bp, Homo sapiens
tgtggccaccgtgcttgcccaaatatttttttcttatatctttattctagagcttttttctatttatttttgaataaatacagtgtgcttgtatccaggaaacccatctcacatgcaggcacacacataggctcaaaattaagggatggaggaagatctaccaagcaaatggaaaacaaaaaaaggcaggggttgcagggacaaagaaggccattacataatggtaaagggatcaattcaacaagaagagctaagtatcctaaatatatatgcacccaacacaggagcacccagattcataaagcaagtccttagtgacctacaaagagacttagactcccacacaataataatgggagactttaacaccccactgtcaatattagacagatcgagacagaaagttaaaaaggatatccagggtattgaagctcatggtgctagctctctcc

SEQ ID NO: 22057 - DNA, 1253 bp, Homo sapiens
ttatgacatgattacgaatttaatacgactcactatagggaatttggccctcgaggccaagaattcggcacgaggcaagttttgggtgggaagctgaagacgaggatcaaaggcttggctttttgccaggccctcatgatggaacctcatctcttccatgtcttctgcaggactttaggttcaagatggtgactgcagccatgctgctacagtgctgcccagtgcttgcccggggccccacaagcctcctaggcaaggtggttaagactcaccagttcctgtttggtattggacgctgtcccatcctggctacccaaggaccaaactgttctcaaatccaccttaaggcaacaaaggctggaggagattctccatcttgggcgaagggccactgtcccttcatgctgtcggaactccaggatgggaagagcaagattgtgcagaaggcagccccagaagtccaggaagatgtgaaggctttcaagacagatctgcctagctccctggtctcagtcagcctaaggaagccattttccggtccccaggagcaggagcagatctctgggaaggtcacacacctgattcagaacaatatgcctggaaactatgtcttcagttatgaccagtttttcagggacaagatcatggagaagaaacaggatcacacctaccgtgtgttcaagactgtgaaccgctgggctgatgcatatccctttgcccaacatttctctgaggcatctgtggcctcaaaggatgtgtccgtctggtgtagtaatgattacctgggcatgagccgacaccctcaggtcttgcaagccacacaggagaccctgcagcgtcatggtgctggagctggtggcacccgcaacatctcaggcaccagtaagtttcatgtggagcttgagcaggagctggctgagctgcaccagaaggactcagccctgctcttctcctcctgctttgttgccaatgactctactctcttcaccttggccaagatcctgccagggtgcgagatttactcagacgcaggcaaccatgcttccatgatccaaggtatccgtaacagtggagcagccaagtttgtcttcaggcacaatgaccctgaccacctaaagaaacttctagagaagtctaaccctaagatacccaaaattgtggcctttgagactgtccactccatggatggtgccatctgtcccctcgaggagttgtgtgatgtgtcccaccagtatggggccctgaccttcgtg

SEQ ID NO: 22058 - DNA, 527 bp, Homo sapiens
  misc_feature (1)...(527): n = a,t,c or g
gaccttcagaaaatgaagctagcaaagaattggaaccagaaatggaatttgaaattgagccagataaagaatgtaaatccctttctcctgggaaagagaatgtcagtgctttagacatggaaaaggagtctgaggaaaaagaagaaaaagaatctgagccccaacctgagcctgtggctcaacctcagcctcagtctcagccccagcttcagcttcaataccctgatcttggacgtgcacctccctctcagcctgaggatttgtcattagctgttttacagccaacaccccaagttactcaggagcaagggcatttactacctgagaggaaggattttcctgtagagtctgtaaaactcactgaggtaccagtagagccagtcttgacagtacatccagagagcaagagcaaaaccaaaactaggagcagaagtagaggtcgagctagaaataaaacaagcaggagtagaatcgaagcagtagcagtagcagttctntancantcaaccagttcagcagtggaagta

SEQ ID NO: 22059 - DNA, 442 bp, Homo sapiens
gttgaatttgaatccgggatgatgtatataactatctattcgatgatgaagataccccaccaaacccaaaaaaagagatctctcgaggatccgaattccagatctatgaatcgtagatactgaaaaaccccgcaagttcacttcaactgtgcatcgtgcaccatctcaatttctttcatttatacatcgttttgccttcttttatgtaactatactcctctaagtttcaatcttggccatgtaacctctgatctatagaattttttaaatgactagaattaatgcccatcttttttttggacctaaattcttcatgaaaatatattacgagggcttattcagaggagtgagagattgaagaacatatttgaagacagagagacacagggaaaaagccagtgaagtcaggtagtgattggagagatgtgtctacaagccaagg

SEQ ID NO: 22060 - DNA, 736 bp, Homo sapiens
cacctttcctgcttcagtatatccaggaagaaattccaaattacagaaatgcagtcattgtagctaagtctcctgatgctgcaaagagggcccagtcctatgcggagagactgcgtctgggtttggccgtcattcacggggaagctcagtgcacggaactggacatggacgatggacggcactccccgcctatggtcaaaaatgctactgtgcacccaggcctggagttgccattgatgatggccaaagagaagccaccgataactgtagttggagatgttggaggccgcatcgcaatcatcgtggatgacattattgatgatgttgacagctttcttgctgcagcagagaccctgaaggaaagaggtgcatataagatctttgtgatggcaactcatggcttgttgtcttctgacgccccccggcggattgaagagtctgccattgatgaggtggtggtcaccaatacaattccacatgaagtccagaagctccagtgccccaagattaaaactgtggatatcagcatgatcctttcagaggcgatccgtcggatccacaatggggagtccatgtcctaccttttcagaaacataggcttagatgactgagttttcctttaggaaaactcccgagggccaaactggaaacataagagtgactgctcggtgggatggtttcacaggaaccgtcatgcttgttcctccctctcccctgtaacctcactcttattgat

SEQ ID NO: 22061 - DNA, 449 bp, Homo sapiens
ggaatgcttagcctcaaggggcctggcagctgtaatgtttgatttatgatgagaactatccgaggccacccttggcctctaaataagctgctctagggagccgcctactttttgatgagaaattagaagagtacctaatgttgaaaacatgacatgcgctcttgggatctgctgttctctccagggctccagaacctgatacctgttaccaaagctaggaaagagctttatcacaagccttcactgtcctggcatgagaactggctgccaggctcagtgtaccccattaactgtgaatgaatctgagcttggtttcctttattgcttcctctgcaatatgattgctgaaacacattttaaaaattcagaagcttgtcactcctgttaatgggaggatcagtcacacatgtgtagtacaaggcggactttgtgttggttttggggtaaat

SEQ ID NO: 22062 - DNA, 474 bp, Homo sapiens
ggggctctcttaaaattttcttcacaagcggttatccagtcgtgccccgcggccctgctgctggccccggggatctgagtcgtaccctcttgtttttctctgagtcagtcttaaggtgaaatgaagtgtggcccagtggctcctcactgtcgcttctctagttttctgcctccttttagaaaattgaattgaaaagacaggatgaagtggacacagcatgtgaagacaattctttcaagaagtttggctgtcaaggaaaacagagaatgtgctaaagaacatacagacacagagcagacaggccacctttgcaaccacatggaggtttgtctgatattgaagctaaagaagctaagctggaagacagagagaccaagtcctgatgacattgtttgaacccagagatccagacatgcctgaaaactagttttaccactggacttatccgttgaatgagccaataaactctctttt

SEQ ID NO: 22063 - DNA, 499 bp, Homo sapiens
cagctatgacatgattacgaatttaatacgactcactatagggaatttggccctcgaggccaagaattcggcacgagcctcactcagaggtcttctggttctggaaacaactctagctcagccttctccaccatgagcctcagacttgataccaccccttcctgtaacagtgcgagaccacttcatgccttgcaggtgctgctgcttctgtcattgctgctgactgctctggcttcctccaccaaaggacaaactaagagaaacttggcgaaaggcaaagaggaaagtctagacagtgacttgtatgctgaactccgctgcatgtgtataaagacaacctctggaattcatcccaaaaacatccaaagtttggaagtgatcgggaaaggaacccattgcaaccaagtcgaagtgatagccacactgaaggatgggaggaaaatctgcctggacccagatgctcccagaatcaagaaaattgtacagaaaaaattggggg

SEQ ID NO: 22064 - DNA, 408 bp, Homo sapiens
cccacgcgtccgcatgaaacacctgtgggactacacatttggaccagagaaacttaatatagataccagaaattgtaaaatcttactcacagaacctcctatgaacccaaccaaaaacagagagaagattgtagaggtaatgtttgaaacttaccagttttccggtgtatatgtagccatccaggcagttctgactttgtacgctcaaggtttattgactggtgtagtggtagactctggagatggtgtgactcacatttgcccagtatatgaaggcttttctctccctcatcttaccaggagactggatattgctgggagggatataactagatatcttatcaagctacttctgttgcgaggatacgccttcaaccactctgctgattttgaaacggttcgcatgat

SEQ ID NO: 22065 - DNA, 454 bp, Homo sapiens
gccgcctgccaccgctgcccgagcccgacgctatgtccagcaaaggctccgtggttctggcctacagtggcggcctggacacctcgtgcatcctcgtgtggctgaaggaacaaggctatgacgtcattgcctatctggccaacattggccagaaggaagacttcgaggaagccaggaagaaggcactgaagcttggggccaaaaaggtgttcattgaggatgtcagcagggagtttgtggaggagttcatctggccggccatccagtccagcgcactgtatgaggaccgctacctcctgggcacctctcttgccaggccctgcatcgcccgcaaacaagtggaaatcgcccagcgggagggggccaagtatgtgtcccacggcgccacaggaaaggggaacgatcaggtccggtttgagctcagctgctactcactggccccccagataaaggt

SEQ ID NO: 22066 - DNA, 414 bp, Homo sapiens
gcaacatggcaaaaccctgcctctactaaaaatacaaaaattagctgagcttggtggcgggtgcctgtaatcccagctacttgggaggctgaggcatgggaatcgcttgaactcgggaggcagaggttgcagtgagctgagatcgcaccactgcactccagcctgggcaacagagcgagactccatctcaaaataaaaataaaaataaaataaacttatcattgccttcaatgtaaagctgttgattacacattcttatacgacccactgtcctatgaagaacactcaagagacaattttgtccttgatgtcagaaactattgtccttcttgtctgttttagcctcataggcactgtacattttatagttggtttttctcttcttcatccaagtttggagccaaattactggcc

SEQ ID NO: 22067 - DNA, 717 bp, Homo sapiens
ggcggcggcgggaagatgctgctctttggcgtaaattgcaatcgattagggatcgtttctcagaatcaagttagaagtgagagttcagataagtgaggccgccattgctgctttgaacacctcagaaggggagaatggatttatcaggagtgaaaaagaagagcttgctaggagtcaaagaaaataataaaaagtccagcactagggctccttcacctaccaaacgcaaagaccgctcagatgagaagtccaaggatcgctcaaaagataaaggggccaccaaggagtcgagtgagaaggatcgcggccgggacaaaacccgaaagaggcgcagcgcttccagtggtagcagcagtaccaggtctcggtccagctcgacttccagctcaggctccagcaccagcactggctcaagcagtggctccagctcttcctcagcatccagccgctcaggaagctccagcacctcccgcagctccagctctagcagctcttctggctctccaagtccttctcggcgcagacacgacaacaggaggcgctcccgctccaaatccaaaccacctaaaagagatgaaaaggagaggaaaaggcggagcccatctcctaagcccaccaaagtgcacattgggagactcacccggaatgtgacaaaggatcacatcatggagatattttccacctatgggaaaattaaaatgattgacatgcccgtgg

SEQ ID NO: 22068 - DNA, 548 bp, Homo sapiens
tgaagaccgtttgacatgattacgaatttaatacgactcactatagggaatttggccctcgaggccaagaattcggcacgagcgagaagtcaggcacgtagctcagcggcggccgcggcgcgtgcgtctgtgcctctgcgcgggtctcctggtccttctgccatcatgccgatgttcatcgtaaacaccaacgtgccccgcgcctccgtgccggacgggttcctctccgagctcacccagcagctggcgcaggccaccggcaagcccccccagtacatcgcggtgcacgtggtcccggaccagctcatggccttcggcggctccagcgagccgtgcgcgctctgcagcctgcacagcatcggcaagatcggcggcgcgcagaaccgctcctacagcaagctgctgtgcggcctgctggccgagcgcctgcgcatcagcccggacagggtctacatcaactattacgacatgaacgcggccaatgtgggctggaacaactccaccttcgcctaagagccgcagggacccacgctgtctgcgctggctcc

SEQ ID NO: 22069 - DNA, 363 bp, Homo sapiens
  misc_feature (1)...(363): n = a,t,c or g
gagaagaagcacttccaacatgaaaggcctggagcaggctatcaggcacctggagattgttaggggaagagtccctgagagctggaggctgggaccccctcaaccagaccccagattgccctactcaacagggggtcccaaatgcccactgcaactaggtacagggtctgtgtgtggtggtggaggattggcattgggagacatgggaggcaaagagctgggcctggccaggccaggcctctggcttccaataactcctagttccaggggacacccattgggggaagagctaatttcttaataaagnanntnacgncttcatantcaacnntaaattcccaggangccantggntacttaact

SEQ ID NO: 22070 - DNA, 750 bp, Homo sapiens
gcgagcacagagcctcgcctttgccgatccgccgcccgtccacacccgccgccagctcaccatggatgatgatatcgccgcgctcgtcgtcgacaacggctccggcatgtgcaaggccggcttcgcgggcgacgatgccccccgggccgtcttcccctccatcgtggggcgccccaggcaccagggcgtgatggtgggcatgggtcagaaggattcctatgtgggcgacgaggcccagagcaagagaggcatcctcaccctgaagtaccccatcgagcacggcatcgtcaccaactgggacgacatggagaaaatctggcaccacaccttctacaatgagctgcgtgtggctcccgaggagcaccccgtgctgctgaccgaggcccccctgaaccccaaggccaaccgcgagaagatgacccagatcatgtttgagaccttcaacaccccagccatgtacgttgctatccaggctgtgctatccctgtacgcctctggccgtaccactggcatcgtgatggactccggtgacggggtcacccacactgtgcccatctacgaggggtatgccctcccccatgccatcctgcgtctggacctggctggccgggacctgactgactacctcatgaagatcctcaccgagcgcggctacagcttcaccaccacggccgagcgggaaatcgtgcgtgacattaaggagaagctgtgctacgtcgccctggacttcgagcaagagatggccacggc

SEQ ID NO: 22071 - DNA, 609 bp, Homo sapiens
  misc_feature (1)...(609): n = a,t,c or g
ggaatgttcatggcgctcacctggcaaacccacctcctggctcttggctgtgccctgntcacggcctatcttggagtcggcatggcaaactttatggctgaggttggattgccagcttgtacctggcccttctgtttggccacgctattgttcctcatcatgaccacaaaaaattccaacatctacaagatgcccctcagtaaagttacttatcctgaagaaaaccgcatcttctacctgcaagccaagaaaagaatggtggaaagccctttgtgagaacaagccccatttgcagccatggtcacgagtcatttctgcctgactgctccagctaacttccagggtctcagcaaactgctgtttttcacgagtatcaactttcatactgacgcgtctgtaatctgttcttatgctcattttgtattttcctttcaactccaggaatatccttgagcatatgagagtcacatccaggtgatgtgctctggtatggaatttgaaaccccaatggggccttggcactaagactggaatgtatataaagtcaaagtgctccaacagaaggaggaagtgaaaacaaactattagtatttattgatattcttggtg

SEQ ID NO: 22072 - DNA, 455 bp, Homo sapiens
cgctcttcccgcagccaagggtgggcgccggtcctaggaggcgcacggttgtaagccagacaaaaagaactggggtgcccggagtgccaggtggcgggcaagcggtgggcttttcggcggggtctttaggatttgcagctccaggaagcgagatgtcgaagccgccacccaaaccagtcaaaccagggcaagttaaagtcttcagagccctggatacgtttgaacccagaactccagatgaattatactttgaggaaggtgatattatctacattactgacatgagcgataccaattggtggaaaggcacctccaaaggcaggactggactaattccaagcaactatgtggctgagcaggcagaatccattgacaatccattgcatgaagcagcaaaaagaggcaacttgagctggttgagagagtgtttggacaacagagtgggtgttaatggg

SEQ ID NO: 22073 - DNA, 438 bp, Homo sapiens
ctaaactccatcgggaggtgagaagcacacctttgacagccacacctggaggccgaggagacatgaaatatggcatatatgctgtagagaatgagcatatgaatcggctacagtctcaaagggcaatgcttctgcagggcactgaaagcctgaaccgggccacccaaagtattgaacgttctcatcggattgccacagagactgaccagattggctcagaaatcatagaagagctgggggaacaacgagaccagttagaacgtaccaagagtagactggtaaacacaagtgaaaacttgagcaaaagtcggaagattctccgttcaatgtccagaaaagtgacaaccaacaagctgctgctttccattatcatcttactggagctcgccatcctgggaggcctggtttactacaaattctttcgcagccattgaactt

SEQ ID NO: 22074 - DNA, 406 bp, Homo sapiens
cagggagtgtttatttcgcgtccgcttctgtttctccgcgcccctgtgctgccccgactcacatactcgtccagaaccggcctcagcctctccgcgcagaagtttcccggagccatggccgagtactcctacgtgaagtctaccaagctcgtgctcaagggaaccaagacgaagagtaagaagaaaaagagcaaagataagaaaagaaaaagagaagaagatgaagaaacccagcttgatattgttggaatctggtggacagtaacaaactttggtgaaatttcaggaaccatagccattgaaatggataagggaacctatatacatgcactcgacaatggtctttttaccctgggagctccacacaaagaagttgatgagggccctagtcctccagagcagttta

SEQ ID NO: 22075 - DNA, 483 bp, Homo sapiens
  misc_feature (1)...(483): n = a,t,c or g
ggaaagaaattggtaaactgtactaagtttttttgtttttgttttgtttgtttgtttgtttttgagatggagtcttgctctgttgcccaggctggagtgcagtggcatgatcttggctcactgcaacctccatctcctgtgttcaagtgattctcctgactcagccttctgagtagctgggattacaggcacccgccaccatgcctggttaattttttgtatttttagtagagatgggggtttcaccatgttggccaagctggtctcaaactcctgacctcaagtgatccacccaccttgacctcccaaagtgctgggattacaggtgtgacccaccgcacagggccaactgtgctaagttctgtattccccaaacttacttgatcacaaaatccaatttatgaaagattaatgtangnanttgagtgatccttgaaaaaantaatgtgaaananttcatttttaanatttggaaggggttaa

SEQ ID NO: 22076 - DNA, 403 bp, Homo sapiens
  misc_feature (1)...(403): n = a,t,c or g
gggaagatctaaagacccaggaaggtctctgggtgggataaagccaagatgaaactccccctacttctggctcttctaaggtctgagacttccacctttgagacccctttgggtgctaagacgctgcctgaggatgaggagacaccagagcaggagatggaggagaccccttgcagggagctggaggaagaggaggagtggggctctggaagtgaagatgcctccaagaaagatgggcctgttgagtctatctcagtgccagatatggtggacaaaaaccttacgtgtcctgaggaagaggacacagtaaaagtggtgggcatccctgggtgccagacctgccgctacctcctggtngagaagtcttcagacgtttagtcaagcttggtttacttgcccggag

SEQ ID NO: 22077 - DNA, 499 bp, Homo sapiens
ggtgctgcttgtgtgctcgtttggtgcggacctggtacctcttttgtgaagcggcagctgaggagactccggcgctcgccatggccgacgaaaagcccaaggaaggagtcaagactgagaacaacgatcatattaatttgaaggtggcggggcaggatggttctgtggtgcagtttaagattaagaggcatacaccacttagtaaactaatgaaagcctattgtgaacgacagggattgtcaatgaggcagatcagattccgatttgacgggcaaccaatcaatgaaacagacacacctgcacagttggaaatggaggatgaagatacaattgatgtgttccagcagcagacgggaggtgtgccggagagcagcctggcagggcacagtttctagagggcccgtccccagcccgggccgtccatcctcgcattgctgttgaatggtgagcacgtgaccatgccgaccacaaaggtgtctgcggaaactcgaggacattc

SEQ ID NO: 22078 - DNA, 708 bp, Homo sapiens
gaggaggacctggaggtggcaattttggaggtagccccggttatggaggaggaagaggaggatatggtggtggaggacctggatatggcaaccagagtgggggttatggtgggaggagccgatactgagcttcttcctatttgccatgggcttcactgtataaataggagaggatgagagcccagaggtaacagaacagcttcaggttatcgaaataacaatgttaaggaaactcttatctcagtcatgcataaatatgcagtgatatggcagaagacaccagagcagatgcagagagccattttgtgaatggattggattatttaataacattaccttactgtggaggaaggattgtaaaaaaaaatgcctttgagacagtttcttagctttttaattgttgtttctttctagtggtctttgtaagagtgtagaagcattccttctttgataatgttaaatttgtaagtttcaggtgacatgtgaaaccttttttaagatttttctcaaagttttgaaaagctattagccaggatcatggtgtaataagacataacgtttttcctttaaaaaaatttaagtgcgtgtgtagagttaagaggctgttgtacatttatgatttaataaaataattctaaaggaaattgtgtaattatagactttttattttaaataagttaaggagtgggtagtataattaagggcccg

SEQ ID NO: 22079 - DNA, 341 bp, Homo sapiens
gcggcacgaggagcagaagctgaactgggccttcaatatgtatgacctggatggtgatggcaagatcacccgagtggagatgctggagatcatcgaggctatctacaaaatggtaggcactgtgatcatgatgaaaatgaatgaggatggcctgacgcctgagcagcgagtagacaagattttcagcaagatggataagaacaaagatgaccagattacactggatgaattcaaagaagctgcaaagagcgacccttccattgtattacttctgcagtgcgacatccagaaatgagctgatgtcaatgctatggactgcacaaaagtctcaatgttccatt

SEQ ID NO: 22080 - DNA, 561 bp, Homo sapiens
ctactatcaaactcttcatttgatgcggcagttatatcatgaatgtacgcttgtccatgctgacctcagtgagtataacatgctgtggcatgctggaaaggtctggttgatcgatgtcagtcagtcagtagaacctacccaccctcacggcctggagttcttgttccgggactgcaggaatgtctcgcagtttttccagaaaggaggagtcaaggaagcccttagtgaacgagaactcttcaatgctgtttcaggcttaaacatcacagcagataatgaagctgattttttagctgagatagaagctttggagaaaatgaatgaagatcacgttcagaagaatggaaggaaagctgcttcatttttgaaagatgatggagacccaccactactatatgatgaatagtactaatacccactgcttcagtgttaacacagcagtgattgtcagctgccaatagcagatgaagttatggctgacttgaaataccaaaacctgaggagtgggcaatggtgcttctgtgcttttcccccttgtaacccatgtgccagatgtgtgga

SEQ ID NO: 22081 - DNA, 814 bp, Homo sapiens
  misc_feature (1)...(814): n = a,t,c or g
gctcgtgggccgcatgctgctggtaaccaaagcccatcacagcagccaggagatgtcctctgagtaccgggagtatgcagacagttttggcaagtgccctggtgggcggaacccctggaccggggtatcccagttcctgcagacatctcagaagatcatccagtttgcttctgggaaggagccccagccaggggagacagtcatctatgtggctggtgccttcgacctgttccacatcgggcatgtggacttcctggagaaggtgcacaggctggcagagaggccctacatcatcgcgggcttacactttgaccaggaggtcaatcactacaaggggaagaactaccccatcatgaatctgcatgaacggactctgancgtgctgcctgccggtacgtgtcaaaagtggtgattggagccccgtacgcggtcacagcagagctcctaagtcacttcaaggtggacctggtgtgtcacggcaagacagaaattatccctgacagggatggctccgacccataccaggagcccaagagaaggggcatcttccgtcagattgacagtggcagcaacctcaccacagacctcatcgtccagcggatcatcaccaacaggttggagtatgaggcgcgaaaccagaagaaggaagccaaggagctggccttcctggaggctgccaggcagcaggcggcacagcccctgggggagcgcgatggtgacttctaacctggcagaggccctggccggccctccccctgctctgcttctgcgccttctgcgtttggacataggactctgcagggccgcctctcta

SEQ ID NO: 22082 - DNA, 514 bp, Homo sapiens
  misc_feature (1)...(514): n = a,t,c or g
gannccctaacagctatgacatgattacgaatttaatacgactcactatagggaatttggccctcgaggccaagaattcggcacgagggctcttctatttggggcagtttctgctcttcatctaaggtctgagacttccacctttgagacccctttgggtgctaagacgctgcctgaggatgaggagacaccagagcaggagatggaggagaccccttgcagggagctggaggaagaggaggagtggggctctggaagtgaagatgcctccaagaaagatggggctgttgagtctatctcagtgccagatatggtggacaaaaaccttacgtgtcctgaggaagaggacacagtaaaagtggtgggcatccctgggtgccanacctgcgctacctcctggtgagaagncttcagacgtttagtcnagcttggnttacttgccggaggtgctacaggggcaacctggtttccatgcncaacttcaanattaattatcgaatccagtgtctgtcaa

SEQ ID NO: 22083 - DNA, 279 bp, Homo sapiens
tatgacatgattacgaatttaatacgactcactatagggaatttggccctcgaggccaagaattcggcacgagcggcacgagaaattacaaaatgttagaaataaaaaatgaaaaagatactatttatcaaaacctgtagtttcgggaaagcagctataaaaaagtcctacaaggaaagaagaaatgctaaaattaataaactaagcatcctaattacaactttatcaaaataacagcagaatcaacccaaagtaaagaacatataaaaaaaaaaaaaa

SEQ ID NO: 22084 - DNA, 401 bp, Homo sapiens
  misc_feature (1)...(401): n = a,t,c or g
ggttgaccaatctgtggtgaatagtggaaatctgctcaatgacatgactcctcctgtaaatccttcacgtgaaattgaggacccagaagaccggaagcccgaggattgggatgaaagaccaaaaatcccagatccagaagctgtcaagccagatgactgggatgaagatgcccctgctaagattccagatgaagaggccacaaaacccgaaggctggttagatgatgagcctgagtacgtacctgatccagacgcatagaaacctgaggattgggatgaagacatggatggagaatggnannnnnnnnnntnnatgtgagtcagntcctggatgtggtgtctgcngcgacctgtgattgcaaccccattataaggcaaaatggaaaccttctatgatggac

SEQ ID NO: 22085 - DNA, 568 bp, Homo sapiens
ggttgaccaatctgtggtgaatagtggaaatctgctcaatgacatgactcctcctgtaaatccttcacgtgaaattgaggacccagaagaccggaagcccgaggattgggatgaaagaccaaaaatcccagatccagaagctgtcaagccagatgactgggatgaagatgcccctgctaagattccagatgaagaggccacaaaacccgaaggctggttagatgatgagcctgagtacgtacctgatccagacgcagagaaacctgaggattgggatgaagacatggatggagaatgggaggctcctcagattgccaaccctagatgtgagtcagctcctggatgtggtgtctggcagcgacctgtgattgacaaccccaattataaaggcaaatggaagcctcctatgattgacaatcccagttaccagggaatctggaaacccaggaaaataccaaatccagatttctttgaagatctggaacctttcagaatgactccttttagtgctattggtttggagctgtggtccatgacctctgacattttttttgacaactttatcatt

SEQ ID NO: 22086 - DNA, 501 bp, Homo sapiens
ggaagcgatagcgttttgcccgcattcggggcgcgcggagctggggggtccctgtggggctcccggagttaagatggcgtcctcagcggagggggacgaggggactgtggaggcgctggcgggggttctgcagtcgggtttccaggagctgagccttaacaagttggcgacgtccctgggcgcgtcagaacaggcgctgcggctgatcatctccatcttcctgggttacccctttgctttgttttatcggcattaccttttctacaaggagacctacctcatccacctcttccatacctttacaggcctctcaattgcttattttaactttggaaaccagctctaccactccctgctgtgtattgtgcttcagttcctcatccttcgactaatgggccgcaccatcactgccgtcctcactaccttttgcttccagatggcctaccttctggctggatactattacactgccaccggcaactatgatatcaagtggacaaa

SEQ ID NO: 22087 - DNA, 423 bp, Homo sapiens
ggatttgacagaggactcgaatgagcagccagacagtcttgtggaccacaataaactaaattctgaagcctctccctccagggaggcaataaatggccagcgagaagacactggggatcagcaggggttgttgaaggccattcagaacgacaagttggcatttcctggagagaccctttcagacattccttgcaaaacagaggaggagggtgttggctgtggaggtgcagggaggagaggcgactcccaggaatgttcgccacggagctgcccggagctgacgagtggcccgagaatgtgccccagaaaggagcaggacagttggagtgaagctgggggcatcctgttcaaagggaaggtgcctatggtggtcttgcaggacatcttggctgtgagaccaccgcaaatcaagtcccttccagc

SEQ ID NO: 22088 - DNA, 375 bp, Homo sapiens
aatagttgctggtgtctgagcacaaagagagctttgattacctagagaggaaaaaggctgtcagccagatgcagccaggcccaggggtagatacaggagttgctaaggaaggggccgagccaggagaggccaggcagatccacaaagcccaaggggatgcaggctgggtgtggtttctgagggaacctaccaaatagcaggtagatggaatcagaggactcttgtgtcctgaaagaacctccttaaaaacaactaaaaccaagaacttctggggctgttcacacattgttcaagtcaccccaagatcgttctggcacgctgagctgaacaccaccatctttgttcattctctctctaatgggcaaagcaggatca

SEQ ID NO: 22089 - DNA, 360 bp, Homo sapiens
ggttatggtaaaattccataattgctttgcaggattgcaagtcaagtagctgctttggaccttggctataagcctggggtggaagcaattcggaagaaccctcccaaggtgctgtttctcctgggagcagatggaggttgtatcacacgacaggatttgccaaaggattgtttcattatttatcaaggtaagtatcacctgtgacaccagaaacaaaagagagtagtacattatgtatgttagaaaccatttagtaatatatttagtgaactgaatgttttccatttgagaattttgcctcccccactcctcctcctttttttttaaacaaaccacaagtgttattaagttacataattg

SEQ ID NO: 22090 - DNA, 867 bp, Homo sapiens
accagctatgacatgattacgaatttaatacgactcactatagggaatttggccctcgaggccaagaattcggcacgagggaagatctaaagacccaggaaggtctctgggtgggataaagccaagatgaaactccccctacttctggctcttctatttggggcagtttctgctcttcatctaaggtctgagacttccacctttgagacccctttgggtgctaagacgctgcctgaggatgaggagacaccagagcaggagatggaggagaccccttgcagggagctggaggaagaggaggagtggggctctggaagtgaagatgcctccaagaaagatggggctgttgagtctatctcagtgccagatatggtggacaaaaaccttacgtgtcctgaggaagaggacacagtaaaagtggtgggcatccctgggtgccagacctgccgctacctcctggtgagaagtcttcagacgtttagtcaagcttggtttacttgccggaggtgctacaaggggcaacctggtttccatccacaacttcaatattaattatcgaatccagtgttctgtcagcgcgctcaaccagggtcaagtctggattggaggcaggatcacaggctcgggtcgctgcagacgctttcagtgggttgacggcagccgctggaactttgcgtactgggctgctcaccagccctggtcccgcggtggtcactgcgtggccctgtgtacccgaggaggctactggcgtcgagcccactgcctcagaagacttcctttcatctgttcctactgagctggtcccagccagcagttcagagctgccctctcctgggcagctgcctcccctcctctgcttgccatccc

SEQ ID NO: 22091 - DNA, 664 bp, Homo sapiens
taaacttcagcgcatgtttcaagacattggcgtgagcaaagatctgaacgagcaattcaaaaagcacttgacaaactcagaacccctagacttggatttcagcattcaagtgctgagctccgggtcctggcccttccagcagtcttgtacatttgccttgccgtcagagttggaacgtagttatcagcgattcacagctttctacgccagccgccacagtggccgaaaattgacgtggttatatcagttgtctaaaggagaattggtaactaactgcttcaaaaacagatatactttgcaggcgtcgacattccagatggctatcctgcttcagtacaacacggaagatgcctacactgtgcagcagctgaccgacagcactcaaattaaaatggacattttggcgcaagttttacagattttattaaagtcgaagctattggtcttggaagatgaaaatgcaaatgttgatgaggtggaattgaagccagataccttaataaaattatatcttggttataaaaataagaaattaagggttaacatcaatgtgccaatgaaaaccgaacagaagcaggaacaagaaaccacacacaaaaacatcgaggaagaccgcaaactactgattcaggcggccatcgtgagaatcatgaagatgaggaag

SEQ ID NO: 22092 - DNA, 494 bp, Homo sapiens
  misc_feature (1)...(494): n = a,t,c or g
ctatgacatgattacgaatttaataccgactcctatagggaatttggccctcgaggccaagaattcggcacgagagcgcttgttaaaaatgcagattatgggtctcacccactgagtttctaattcagtaggtcaggggtaaggccagggaatttctatttttaacatgttcctaagggatgctggtagaccatgaaacacagttggagaaccattgatgtaaaatgtagaaataagtcctggagagaacagacaatagcaacactgactggaagaagtggtaccactgagtgacattcaaatattgtcgtaagtttcataattctgaatttatctttaactggaatgtatacaggaaagcaaatgatactacaataactaaataaaaattacatattcttctagaccaatataggtagaaaatggaaatgtttttaaaataaacatgtttttcttttggtatagtgnactatactagtgagaaatttttcaac

SEQ ID NO: 22093 - DNA, 279 bp, Homo sapiens
ggaggattgaaaagagagtagcagggcagagctgagcaaatctcccacttggggtggcttcccagcttagttaggcctcatctggggagaagctccaaataattcatcagacagcttgagagtccctgcatgaattccagagttaaatgaaaatcccagctactcgggaggctgaggcaggagaatcacttgaacccgggaggcggaggttgtggtgagccaagatcgcgccattgcactccagcctggcaacagagcgagactctgtctcaaaaaaaa

SEQ ID NO: 22094 - DNA, 509 bp, Homo sapiens
agcagctatgacatgattacgaatttaatacgactcactatagggaatttggccctcgaggccaagaattcggcacgagatggcgggcggagaagctggagtgactctagggcagccgcatctttcgcgtcaggatctcaccaccttggatgttaccaagttgacgccactttcacacgaagttatcagcagacaagccacaattaacataggtacaattggtcatgtagctcatgggaaatccacagtcgtcaaagctatttctggagttcatactgtcaggttcaaaaatgaactagaaagaaatattacaatcaagcttggatatgctaatgctaagatttataagcttgatgacccaagttgccctcggccagaatgttatagatcttgtgggagcagtacacctgacgagtttcctacggacattccagggaccaaagggaacttcaaattagtcagacatgtttcctttgttgactgtcctggccacgatattttgatggcta

SEQ ID NO: 22095 - DNA, 754 bp, Homo sapiens
gcgaaggcagactggacaggcctattatgcaatactcctcaacaggggccgtctggaagtgcatctctccacaggggcacgaacaatgaggaaaattgtgatcagaccagagccaaatctgtttcatgatggaagagaacattccgttcatgtagagcgaactagaggcatctttacagttcaagtggatgaaaacagaagatacatgcaaaacctgacagttgaacagcctatcgaagttaaaaagcttttcgttgggggtgctccacctgaatttcaaccttccccactcagaaacattcctccttttgaaggctgcatatggaatcttgttattaactctgtccccatggactttgcaaggcctgtgtccttcaaaaatgctgacattggtcgctgtgcccatcagaaactccgtgaagatgaagatggagcagctccagctgaaatagttatccagcctgagccagttcccaccccagcctttcctacgcccaccccagttctgacacatggtccttgtgctgcagaatcagaaccagctcttttgatagggagcaagcagttcgggctttcaagaaacagtcacattgcaattgcatttgatgacaccaaagttaaaaaccgtctcacaattgagttggaacgtaagaaccggaagcctgaatccgggcttgcttttttacatggctcggcatcaatcatgctgattttgcaacagttcagctgagaaatggattgcctacttcagcta

SEQ ID NO: 22096 - DNA, 518 bp, Homo sapiens
tggcaatttttgacattaattatgaaacattttagcccacgttagttctacattattcttcacttaaactcagctactgcaaattttgtctttctgtaaatgttattaaaatatccagtgagctctttagaaggactcagtattatttcaagactatttttgaggtaattctagccttttaaaatattctacagacctacggggcttaaaagaaccccagtaccgactaagcaaataggcaaaagacatgttggaaatgtagtatagtacttgaaacagtcactatcatagggataattggtgcatcctgtgtaaatggaagctgagcttgacacctggtgcttttaagtagggataaagtcatcctctcactgcaagcacagcatacctgtacctccaaaagtgacgttttagtgaacaggccgttttcaacacttgtgccttggggtgttcattgaagctttgtgaaaactactgatgttttctcagtctccttaaaggtacgtccatgctttaaa

SEQ ID NO: 22097 - DNA, 1118 bp, Homo sapiens
  misc_feature (1)...(1118): n = a,t,c or g
gtactcgctgagcctgctgcaggccacgctacaccgctatgagcatgccctctctcagtgcagtgtggatgtgtataagaaagtgggcagcctgtaccctgagatgagtgcccatgagcgctccttggatttcctcattgaactgctgcacaaggatcagctggatgagactgtcaatgtggagcctctcaccaaggccatcaagtactatcagcatctgtacagcatccaccttgccgaacagcctgaggactgtactatgcagctggctgaccacattaagttcacgcagagtgctctggactgcatgagtgtggaggtaggacggctgcgtgccttcttgcagggtgggcaggaggctacagatattgcccttctgctccgggatctggaaacttcatgcagtgacatccgccagttctgcaagaagatccgaaggcgaatgccagggacagatgctcctgggatcccagctgcactggcctttggaccacaggtatctgacacgctcctagactgcaggaaacacttgacgtgggtcgtggctgtgctgcaggaggtggcagctgctgctgcccagctcattgccccactggcanagaatgaggggctacttgtggctgctctggaggaactggctttcaaagcaagcgagcagatctatgggaccccctccagcagcccctatgagtgtctgcgccagtcatgcaacatcctcatcagtaccatgaacaagctggccacagccatgcaggagggggagtatgatgcagagcggccccccagcaagcctccaccggttgaactgcgggctgctgcccttcgtgcagagatcacagatgctgaaggcctgggtttgaagctcgaagatcgagagacagttattaaggagttgaagaagtcactcaagattaagggagaggagctaagtgaggccaatgtgcggctgagcctcctggagaagaagttggacagtgctgccaaggatgcagatgagcgcatcgagaaagtccagactcggctggaggagacccaggcactgctgcgaaagaaggagaaagagttttgnggnaggaccaaatgggattgccacttccaaggcttgacatcgaccagct

SEQ ID NO: 22098 - DNA, 450 bp, Homo sapiens
aattcggcacgagctggctgggtcctgccatttactgcaggtggctttatctacgtagcaacagtgtctgtgttgcccgagctgctgagggaggcatcaccattgcaatcacttctggaggtgctggggctgctggggggagttatcatgatggtgctgattgcccaccttgagtgaggggtggataaactacccctgccccaaacctctacccctaactccaggtcaggggtgcgtagaggttgggggccctggccagggacatctgccaaaggaaggaactgtagcctgggagaatggttactttggcattagggccttcaagggctggcagtcttacagaggctggagcggtgagaatgagaggccaaaagggaccatagtgttgggcactgtctgaccatgttgcatttggaaggctaaatggggccatgaagaaggctggaaggg

SEQ ID NO: 22099 - DNA, 968 bp, Homo sapiens
gatgagcaagaagctagatgtggaagagccagacagcgccaactcatcgttctacagcacgcggtctgctcctgcttcccaggctagcctgcgagccacctcctctactcagtctctagctcgcctgggttctcccgattatggcaactcagccctgctcagcttgcctggctaccgccccaccactcgcagttctgctcgtcgttcccaggccggggtgtccagtggggcccctccaggaaggaacagcttctacatgggcacttgccaggatgagcctgagcagctggatgactggaaccgcattgcagagctgcagcagcgcaatcgagtgtgccccccacatctgaagacctgctatcccctggagtccaggccttccctgagcctgggcaccatcacagatgaggagatgaaaactggagacccccaagagaccctgcgccgagccagcatgcagccaatccagatagccgagggcactggcatcaccacccggcagcagcgcaaacgggtctccctagagccccaccagggccctggaactcctgagtctaagaaggccaccagctgtttcccacgccccatgactccccgagaccgacatgaagggcgcaaacagagcactactgaggcccagaagaaagcagctccagcttctactaaacaggctgaccggcgccagtcgatggccttcagcatcctcaacacacccaagaagctagggaacagccttctgcggcggggagcctcaaagaaggccctgtccaaggcttcccccaacactcgcagtggaacccgccgttctccgcgcattgccaccaccacagccagcgccgccactgctgccgccattggtgccacccctcgagccaaggggcaaggcaaagcactaaagggccagtaccagtgagtggccccacctgtgtccccgatgctgccgtcacctggtcctccgctactgtcct

SEQ ID NO: 22100 - DNA, 455 bp, Homo sapiens
ccgctatgacatgattacgaatttaatacgactcactatagggaatttggccctcgaggccaagaattcggcacgagaaatcttcctcatcctcattgtcttcttcatcatctttgtggtcttccttgcttgaaccctctctactctgaggcactctgttggggtttgggaccctcctgggaaggcaagtggccagtgctgccactgagcctgtgcagggtacttgggagaaaggccctgtttccctggaactgctaagaatgaccactgcccctgatcccccaccccttgcctctggccaccctgtcctccccccaccaccctcaggcctatgaaacacacagggttctagatttgaactctgctgtgaagtgactggaagggagcagaggccagctgggggccagtgggggaggttgtttccactaggagatttttataaaccctctccagcc

SEQ ID NO: 22101 - DNA, 622 bp, Homo sapiens
acagctatgacatgattacgaatttaatacgactcactatagggaatttggccctcgaggccaagaattcggcacgagaaccattcagaggatcgacgagaacgtgctaggagcccagctggacgttgaggccgcccattcagagatcctcaagtacttccagtctgtcacctccaaccggtggctcatggtcaaaatcttcctcatcctcattgtcttcttcatcatctttgtggtcttccttgcttgaaccctctctactctgaggcactctgttggggtttgggaccctcctgggaaggcaagtggccagtgctgccactgagcctgtgcagggtacttgggagaaaggccctgtttccctggaactgctaagaatgaccactgcccctgatcccccaccccttgcctctggccaccctgtcctccccccaccaccctcaggcctatgaaacacacagggttctagatttgaactctgctgtgaagtgactggaagggagcagaggccagctgggggccagtgggggaggttgtttccactaggagatttttataaaccctctcagcctctcccaaaggaagccgttggcagcaaagggagatgatgcccttacccacc

SEQ ID NO: 22102 - DNA, 513 bp, Homo sapiens
  misc_feature (1)...(513): n = a,t,c or g
tnnnnnnanngcttgactgattacgaatttaatacgactcactatagggaatttggccctcgaggccaagaattcggcacgaggatgactttagagtcaagtatgagacagagctggccatgcgccagtctgtggagaacgacatccatgggctccgcaaggtcattgatgacaccaatatcacacgactgcagctggagacagagatcgaggctctcaaggaggagctgctcttcatgaagaagaaccacgaagaggaagtaaaaggcctacaagcccagattgccagctctgggttgaccgtggaggtagatgcccccaaatctcaggacctcgccaagatcatggcagacatccggcccaatatgacgactggctcggaaaacccgaaggagtnaacangtctggttcaccaattggggngngccccaaggggnncccananttgntgnggtngnctttttnaanaacttcaaagttggaactncngccancctttggaangactggctc

SEQ ID NO: 22103 - DNA, 604 bp, Homo sapiens
  misc_feature (1)...(604): n = a,t,c or g
ggtcggggacagagcggtgaccatggccaggctggcgttgtctcctgtgcccagccactggatggtggcgttgctgctgctgctctcagctgagccagtaccagcagccagatcggaggaccggtaccggaatcccaaaggtagtgcttgttcgcggatctggcagagcccacgtttcatagccaggaaacggggcttcacggtgaaaatgcactgctacatgaacagcgcctccggcaatgtgagctggctctggaagcaggagatggacgagaatccccagcagctgaagctggaaaagggccgcatggaagagtcccagaacgaatctctcgccaccctcaccatccaaggcatccggtttgaggacaatggcatctacttctgtcagcagaagtgcaacaacacctcggaggtctaacaaggctgcggcacanagctgcagtcatgggattcagcaccttggcacagctgaagcagaggaacacgctgaaggatggtatcatcatgatccagacgctgctgatcatcctcttcatcatcgtgcctatcttcctgctgctggacaaggatgacagcaaggctggcatggaggaagatcaca

SEQ ID NO: 22104 - DNA, 566 bp, Homo sapiens
  misc_feature (1)...(566): n = a,t,c or g
ggaaggctgaactgctgagtctgacacttaacaggacttcggcattcccctgaatacagactagatcagagattttatttttttaattgaaaagtaacttgggttctctttagaaacccttatttggtgtgcgcatctggctatttcacagagatttcagttttgcaaagaagtcggagttgatttcttccctcagacaagctattggttgttggtgggcaacagaagttgctcagcatagacaggggaaaaaacggttacggatgagactgaaagaaaacctcaaaggagaactctgagaattcatctcaggatgaagctgcaagggcaaaggagaagtacttgtgacacaagcaaatgggtccattgatcaacagatgcaagaagattcttctcccaactactgtacctcctgcaacgatgagaatctggctccttggagcctgctgccattcctgctgctcctctctggcctgcananaccccaganggntntgaggttgcaataaaaacgactttnctttgacccgntttttgggacnagnnccanntttnnnaccggtttt

SEQ ID NO: 22105 - DNA, 885 bp, Homo sapiens
tattgaccctaccttggtatatatccaatatatgaaatttgcacggagagcagaaggcatcaaatctggaagaatgatatttaaaaaagcaagagaagataccagaacccgccaccatgtctatgttactgcagcactcatggaatattactgtagtaaggacaaatctgttgcctttaagatttttgagctggggctaaaaaaatatggagacattccagagtatgtcctggcctatattgactatctttctcacctcaatgaggacaataatacccgagttttgtttgaacgagttttaacatctggaagccttcctcctgagaagtctggagaaatctgggcccgatttctagcatttgaaagtaatattggtgatctagctagtatactcaaagtggagaaaagacggtttacagcattcaaagaagagtatgaagggaaagaaacggctttactagtagatagatacaagttcatggatttatatccttgctctgcaagtgaattaaaagcacttggttataaggatgtctcccgtgctaagctagcagctataattccggacccagttgtagctccttctatagtgcctgttctgaaagatgaagtggatagaaaaccagaataccctaaaccagacactcagcagatgattccatttcagccacgacatttagcacctccaggtttacaccctgtacctggtggagtgttcccagtccctcctgcagctgttgttttaatgaaacttctccctcctcctatctgtttccagggtccttttgtacaagtggatgaactgatggaaattttccgaagatgcaagataccaaatactgttgaggaagctgtgaggatcattactggtggggccccaaagct

SEQ ID NO: 22106 - DNA, 506 bp, Homo sapiens
ggaacgcacagatctgtttgactttgttataaaaatagggctcccccacctcccccatttctgtgtcctttattgtagcattgctgtctgcaagggagcccctagcccctggcagacatagctgcttcagtgccccttttctctctgctagatggatgttgatgcactggaggtcttttagcctgcccttgcatggcgcctgctggaggaggagagagctctgctggcatgagccacagtttcttgactggaggccatcaaccctcttggttgaggccttgttctgagccctgacatgtgcttgggcactggtgggcctgggcttctgaggtggcctcctgccctgatcagggaccctccccgctttcctgggcctctcagttgaacaaagcagcaaaacaaaggcagttttatatgaaagattagaagcctggaataatcaggctttttaaatgatgtaattcccactgtaatagcatagggattttggaagcagctgctggtgg

SEQ ID NO: 22107 - DNA, 414 bp, Homo sapiens
gcgtgcccctgtgcaaagaggactgtgagcaatggtgggaagattgtcgcacctcctacacctgcaagagcaactggcacaagggctggaactggacttcagggtttaacaagtgcgcagtgggagctgcctgccaacctttccatttctacttccccacacccactgttctgtgcaatgaaatctggactcactcctacaaggtcagcaactacagccgagggagtggccgctgcatccagatgtggttcgacccagcccagggcaaccccaatgaggaggtggcgaggttctatgctgcagccatgagtggggctgggccctgggcagcctggcctttcctgcttagcctggccctaatgctgctgtggctgtcagctgacctccttttaccttctgatacctggaaatccc

SEQ ID NO: 22108 - DNA, 570 bp, Homo sapiens
  misc_feature (1)...(570): n = a,t,c or g
acncntatgacatgattacgaatttaatacgactcactatagggaatttggccctcgaggccaagaattcggcacgaggggaggcatccagaacgagaaggagaccatgcaaagcctgaacgaccgcctggcctcttacctggactgagtgaggagcctgtagaccgagaaccggaggctggagagcaaaatccgggagcacttggagaagaagggaccccaggtcagatactggagccattacttcaagatcatcgaggacctgagggctcaaatcttctcaaatactgtggacaatgcccgcatcgttctgcagattgacaatgcccgtcttgctgctgatgactttagagtcaagtatgagacagagctggccatgcgccagtctgtgganaacgacatccatgggctncgcanggtcattgatgacaccaatatnacacgactgcactggagacaganatcgaggctctcaaggagganctgctcttcatgangangaaccncgaanaggaagtaanaggcctacaagcccaaatgccagctntgggntgaccgtggaggttatcc

SEQ ID NO: 22109 - DNA, 635 bp, Homo sapiens
ggagagctagcaccatgagcttcttttctgaatggatattaatgaaagcagggtaggagcttatagctgccagcaaagatcccgccaccaggagaggagaccccatctccttgagaaaggatctaacacaacaaaggaagagctgataagtgaaaagaaactgagacctgatgagaatgtataagcctctggatccaactttgcctaaagctgaatactacaagatttttcattacataaatcaataatttatgtttttgcttgcataatttgaattagattttctatgtcaagcatcaagcagttgaagttccaacgaatacaagcactcttccttattttttttaatttagttattctaaataggaacaaatcaaagaagattaaattagaaagcaaaggacaaattcttcaccaaacagaaaagctttgaaccccagagattaaccaaggtgtgaattttcttcagagattttttatgagcattcaagattaagctagtatggcctcagatgagaagacacatggaaacttgagaaataaaagggaaagttaatgaaagatgttagtgaaatttcattcaccagcagtaatgggtgttcatgcatgttcctaagacattacaaaagttaaaa

SEQ ID NO: 22110 - DNA, 517 bp, Homo sapiens
  misc_feature (1)...(517): n = a,t,c or g
ggtggcatcaaatggcaacatggaatattgtcctccatgcccctccagaaggacctaggagagtaggtgagctttccaaagtgagagacgaatctttctttctttttttttttaagagggcaggatgggtannctttgggctttctccttctggggccccgggggaaggagagactgaggcaaggcaaagtgatagtacactgaagcagaaccggaaacacccaggaactgttcagaaatctcagaagaaatctgcttctcttcgatggaaagatataattaacgatcaaagagctctaagaaaattgcaaagaagccttaatgttcaagctttagaaagatcagagcaatttttctctttcagtccaaactaagactctctgtatttaaatctctctggggcaagagggctagatttcctcattttgttatgagactagattggtaccagtagatcagctgcctagcgagggcaggtttcttctttgcatctgtgtggcttgcttccagtctggcg

SEQ ID NO: 22111 - DNA, 463 bp, Homo sapiens
gctttgccagttggagtgctggagactttggatcggttggtgccactgaatggctagaggtattctttatcatcccttcccatattggacacgagcttgtgggcttaggctgttgtccagaagtgatgtttttataggtttgattttaccacttttgcctttgcgtttagtctcagtagagtccagaattgaaaatgaatccctaatgctactgtatgtgataaataaacagatttatacttattagtgttttcccttctcttctagggatacctttcgtccctgcatttaaaggctttcacttatattaatctggataaagcggttcttggtaagtatccctttcattagctgtgtatgaattcaggtaaacttttttgagatggagttttgctcttgtcgcccaggctggagtgcaatggcacgatctcggctcactgcaacctctgtctcccggattcaa

SEQ ID NO: 22112 - DNA, 1400 bp, Homo sapiens
gctatgacatgattacgaatttaatacgactcactatagggaatttggccctcgaggccaagaattcggcacgagcccggacagcatgagcttcaccactcgctccaccttctccaccaactaccggtccctgggctctgtccaggcgcccagctacggcgcccggccggtcagcagcgcggccagcgtctatgcaggcgctgggggctctggttcccggatctccgtgtcccgctccaccagcttcaggggcggcatggggtccgggggcctggccaccgggatagccgggggtctggcaggaatgggaggcatccagaacgagaaggagaccatgcaaagcctgaacgaccgcctggcctcttacctggacagagtgaggagcctggagaccgagaaccggaggctggagagcaaaatccgggagcacttggagaagaagggaccccaggtcagagactggagccattacttcaagatcatcgaggacctgagggctcagatcttcgcaaatactgtggacaatgcccgcatcgttctgcagattgacaatgcccgtcttgctgctgatgactttagagtcaagtatgagacagagctggccatgcgccagtctgtggagaacgacatccatgggctccgcaaggtcattgatgacaccaatatcacacgactgcagctggagacagagatcgaggctctcaaggaggagctgctcttcatgaagaagaaccacgaagaggaagtaaaaggcctacaagcccagattgccagctctgggttgaccgtggaggtagatgcccccaaatctcaggacctcgccaagatcatggcagacatccgggcccaatatgacgagctggctcggaagaaccgagaggagctagacaagtactggtctcagcagattgaggagagcaccacagtggtcaccacacagtctgctgaggttggagctgctgagacgacgctcacagagctgagacgtacagtccagtccttggagatcgacctggactccatgagaaatctgaaggccagcttggagaacagcctgagggaggtggaggcccgctacgccctacagatggagcagctcaacgggatcctgctgcaccttgagtcagagctggcacagacccgggcagagggacagcgccaggcccaggagtatgaggccctgctgaacatcaaggtcaagctggaggctgagatcgccacctaccgccgcctgctggaagatggcgaggactttaatcttggtgatgccttggacagcagcaactccatgcaaaccatccaaaagaccaccacccgccggatagtggatggcaaagtggtgtctgagaccaatgacaccaaagttctgaggcattaagccagcagaagcagggtaccct

SEQ ID NO: 22113 - DNA, 420 bp, Homo sapiens
  misc_feature (1)...(420): n = a,t,c or g
ttganacngnttgacatgattacgaatttaatacgactcactatagggaatttggccctcgaggccaagaattcggcacgagggctgccgatgtaggaacactgcagcgcctgcccaaggtcatcgggaaccagagcctggtcaacgagctggccttcaccgcccgcaagatgatggctgacgaggccctgggcagtgggctggtcagccgggtgttcccagacaaagaggtcatgctggatgctgccttagcgctggcggccgagatttccagcaagagccccgtggcggtgcagagcaccaaggtcaacctgctgtattcccgcgaccattcggtggccgagagcctcaactacgtggcgtcctggaacatgagcatgctgcagacccaagacctcgtgaagtcggtccaggccacga

SEQ ID NO: 22114 - DNA, 720 bp, Homo sapiens
ctgcagcccaaaggagatgatgtggcccggatcagctggtacctccgtgacatcatcactcgataccaggagaccttcaacgtcatcgagaggtgccccaagcccgtgattgctgccgtccatgggggctgcattggcggaggtgtggaccttgtcaccgcctgtgacatccggtactgtgcccaggatgctttcttccaggtgaaggaggtggacgtgggtttggctgccgatgtaggaacactgcagcgcctgcccaaggtcatcgggaaccagagcctggtcaacgagctggccttcaccgcccgcaagatgatggctgacgaggccctgggcagtgggctggtcagccgggtgttcccagacaaagaggtcatgctggatgctgccttagcgctggcggccgagatttccagcaagagccccgtggcggtgcagagcaccaaggtcaacctgctgtattcccgcgaccattcggtggccgagagcctcaactacgtggcgtcctggaacatgagcatgctgcagacccaagacctcgtgaagtcggtccaggccacgactgagaacaaggaactgaaaaccgtcaccttctccaagctctgagagccctcgcgtcccaggccccagccagggggccggccttgtcccgcctcatccacagaaagggaggatgggcgatgacagttgtttctatgccttctgacccagtttcccatt

SEQ ID NO: 22115 - DNA, 372 bp, Homo sapiens
  misc_feature (1)...(372): n = a,t,c or g
gccgacgtgtatggtgtattccagtttaaagtggattacaaccggctaggctacacacacctgtactcttccactcaggtatccgtgcggccactccagcacacgcagtatgagcgcttcatcccctcggcctacccctactacgccagcgccttctccatgatgctggggctcttcatcttcagcatcgtcttcttgcacatgaaggagaaggagaagtccgactgaggggctagagccctctccgcacagcgtggagacggggcagggaggggggttattaggattggtggttttggtttgctttgtttaaagccgngggaaaatggcacaactttacctctgtgggagatgcaacactgagagccaagg

SEQ ID NO: 22116 - DNA, 520 bp, Homo sapiens
  misc_feature (1)...(520): n = a,t,c or g
ggacgctagggggacagccactgtgttgtctgctaccctcatcctggtcactgcttctgctataacagccctaggccaggaatatgaacaagccgctgctttggatctctgtcctcaccagcctcctggaagcctttgctcacacagacctcagtgggaaggtgtttgtatttcctagagaatctgttactgatcatgtaaacttgatcacaccgctggagaagcctctacagaactttaccttgtgttttcgagcctatagtgatctctctcgtgcctacagcctcttctcctacaatacccaaggcagggataatgagctactagtttataaagaaagagttggagagtatagtctatacattggaagacacaaagttacatccaaagttatcgaaaagttcccggctccagtgcacatctgtgtgagctgggagtcctcatcaggtattgctgaattttggatcaatgggacacctttggtgaaaaangggtctgcgacagggntacttttgtggaa

SEQ ID NO: 22117 - DNA, 438 bp, Homo sapiens
gggttgaggagaggctccagacccgcacgcgggcgcgcacagagctctcagcgccgctcccagccacagcctcccgcgcctcgctcagctccaacatggcaaaaatctccagccctacagagactgagcggtgcatcgagtccctgattgctgtcttccagaagtatgctggaaaggatggttataactacactctctccaagacagagttcctaagcttcatgaatacagaactagctgccttcacaaagaaccagaaggaccctggtgtccttgaccgcatgatgaagaaactggacaccaacagtgatggtcagctagatttctcagaatttcttaatctgattggtggcctagctatggcttgccatgactccttcctcaaggctgtcccttcccagaagcggacctgaggaccccttggccctggccttcaaa

SEQ ID NO: 22118 - DNA, 537 bp, Homo sapiens
gagaaaaagtgtgctgtccaaaccgactgactcttcccctgaggttataaattatttaggaaacaaagcatgtgagtgctacatctcaactgccgattgggctgctgtgcaggaatggcagaacgctatccatgacttgaaaaagagtaccagtagcacttccctcaacctgaaagctgacttcaactatataaaatcattaagcagctttgagtctggaaaatttgtcgaatgtaccgagcaattagaattgttaccaggagaaaatatcaatctacttgctggagggtcaaaagaaaaaaatagacatgaaaaaactgcttcgtaacatgtgaagtccagatccaagggaacctcagaaatccattgaagttccattgttaagaagttctgtttgtttggcaactgctttaaacccgatagaacaagatcagaagtggcagtctataactgagtaagtttactcttacggaggtaaatgtacattgtgtatatcatgtgataaacatacatggggtgaagagggctggaaggaga

SEQ ID NO: 22119 - DNA, 411 bp, Homo sapiens
gctggttgcacttatgatttcatgtgcggggatcatctgccgtgcctggatcctgaaatagaggctaaattactcaggaagaacaccctctaaatgggaaagtattctgtactcttagatggattctccactcagttgcaacttggacttgtcctcagcagctggtaatcttgctctgcttgacaacatctgagtgcagccgtttgagaagaaaacatctattctctccaaaaatgcacccaactagctctatgtttacaaatggacataggactcaaagtttcagagaccattgcaatgaatccccaataattgcagaactaaactcatttataaagctaaaataaccggatatatacatagcatgacatttctttgtgctttggcttacttggttaaaaaaaaaaaaaa

SEQ ID NO: 22120 - DNA, 693 bp, Homo sapiens
gggtagaaattacacccttactggtagggacagctgtactctgcctgcctcagctgagaaagcttgtggtgcctgcccactgtggggaaaatgtgatgctgagagcagcaaatgtgtctgccgagaagcatcggagtgcgaggaagaagggtttagcatttgtgtggaagtgaacggcaaggagcacacgatgtctgagtgtgaggcgggcgctctgagatgcagagggcagagcatctctgtcaccagcataaggccttgtgctgcggaaacccagtaggctcctggaggccctggtcagcttgcttggaatccagcaggcagctggggctgagtgaaaacatctgcacaactgggcactggacagcttttccttcttctccagtgtctaccttcctcctcaactcccagccatctgtataaacacaatcctttgttctcccaaatctgaatcgaattactcttttgcctcctttttaatgtcagtaaggatatgagcctttgcacaggctggctgcgtgttcttgaaataggtgttaccttctctgggccttggttttttaaaatctgtaaaattagaggattgcactagagaaacttgaatgctccattcaggcccatcattttattaagtatgattgacacagcccatgggccagaacacactctacaaaatgactaggataacagaaa

SEQ ID NO: 22121 - DNA, 539 bp, Homo sapiens
cgcagcgggtcctctctatctagctccagcctctcgcctgcgccccactccccgcgtcccgcgtggctagccgaccatggccgggcccctgcgcgccccgctgctcctgctggccatcctggccgtggccctggccgtgagccccgcggccggctccagtcccggcaagccgccgcgcctggtgggaggccccatggacgccagcgtggaggaggagggtgtgcggcgtgcactggactttgccgtcggcgagtacaacaaagccagcaacgacatgtaccacagccgcgcgctgcaggtggtgcgcgcccgcaagcagatcgtagctggggtgaactacttcttggacgtggagctgggccgaaccacgtgtaccaagacccagcccaacttggacaactgccccttccatgaccagccacatctgaaaaggaaaagcattctgctctttccagatctacgctgtgccttggcagggcacaatgaccttgtcgaaatccacctgtcaggaccctaggggtctgtaccgggctggcctg

SEQ ID NO: 22122 - DNA, 476 bp, Homo sapiens
  misc_feature (1)...(476): n = a,t,c or g
ngggnnnnatttganaccgtttgacatgattacgaatttaatacgactcactatagggaatttggccctcgaggccaagaattcggcacgagaactggaaaaacattcccaggtttcttctcacctatgttaggagagtttgtcagtgagactgagtctaggggctcagaatctggcatcttcacaaatacaaaggaatccagttctcatcaccctgggatagctgaattcccttcccgtggtaaatcttcaagttacagcaaacaatttactagtagcacgagttacaacagaggagactccacatttgaaagcaagagctataaaatggcagatgaggccggaagtgaagccgatcatgaaggaacacatagcaccaagagaggccatgctaaatctcgccctgtcagaggtatccacacttctcctttggggaagccttccctgtccccctagactaagttaaatatttctgc

SEQ ID NO: 22123 - DNA, 500 bp, Homo sapiens
gttgactttctgccccagcccctcttagttctcctagaattaggactaaggttaagtgccctcttgggatatgacttccttcccttcctcttgatacaaaaagagcctattaccaaccctcatacacacaagagttcccttcctagttgcagactcttctgctccagctggactcccctagctctggactcccactagatcacacaggggtccctgcatgtcagtaaactttggatgaccttgggagaccaaaaaatggaatatcattttttgatctaaacaaaatagtttcctgatttaacactggccaggaaggtgggctgcaccctcagtctctctctcccatcatggttttcacatgatatcaaaggactctcataacagtctgattcttatgagttgggcatcctgtgtttccctttaggggcctgcttccttcaaatagaggagatgggtgctatgaaacctattcactctggacttgggatggctcttctcca

SEQ ID NO: 22124 - DNA, 425 bp, Homo sapiens
gctgggtaatttataagaacaaaatttagtaatattacatttctggaggctgggaagtccaaggtcaaggtggagcatttggtggagaaccttcttgctggcaaggactctctgcagaattccaaggcaacgcagggaatcgcatggcaagggagatgagcatgttaacaggctagttcagacctttcttcttcttataaagccaccagtcccactctcatgataacaggttaatccactgatgagagcagagccttcatgacccgattacctctcaagggccccacctcccaacactgccacatcttgggttaagtttcaatatgtgttttggagggaacaaacattcaaaccatagcatacaaatccactttctgaaatctatcctaagggtaacagtccaaaacttggaaaagactgtattt

SEQ ID NO: 22125 - DNA, 353 bp, Homo sapiens
tggatttgagtgattctcgtgcctcagtctcccaagtagctgagactacaagtgtgtgccacccttgcccggctaattttgtatttttagtagagatgtggtttctctgtgttacccaggctggtcccaaaactcctggcctcaagtgatctgcctgccttggcctcccaaagtgttaggattacaggtgtgagccaccatgctcagcctgtagaacttttaacccaagtctcatttcttttttgaaagggaagagtgcacaagattaactgcttctttggatgaatcattgttaataaaaagctgggcatttagaattttgccttataagcccttctccaaccataagatta

SEQ ID NO: 22126 - DNA, 435 bp, Homo sapiens
  misc_feature (1)...(435): n = a,t,c or g
tttganatccgttatgacatgattacgaatttaatacgactcactatagggaatttggccctcgaggccaagaattcggcacgagctcagaatctggcatcttcacaaatacaaaggaatccagttctcatcaccctgggatagctgaattcccttcccgtggtaaatcttcaagttacagcaaacaatttactagtagcacgagttacaacagaggagactccacatttgaaagcaagagctataaaatggcagatgaggccggaagtgaagccgatcatgaaggaacacatagcaccaagagaggccatgctaaatctcgccctgtcagaggtatccacacttctcctttggggaagccttccctgtccccctagactaagttaaatatttctgcacagtgttcccatggccccttgcatttccttcttaacg

SEQ ID NO: 22127 - DNA, 782 bp, Homo sapiens
ctgggatcagcagagagaaggttgtcccgctttatgggcgagggagccagaagccccaggatcccagattaaaaactccaccccgcccccagggccagagaccagctccggagagcagagggggattccagccatttggtgataccgggggcttccacttctcatttggtgttggtgcttttccctttggctttttcaccaccgtcttcaatgcccatgagcctttccgccggggtacaggtgtggatctgggacagggtcacccagcctccagctggcaggattccctcttcctgtttctcgccatcttcttctttttttggctgctcagtatttgagctatgtctgcttcctgcccacctccagccagagaagaatcagtattgagggtccctgctgacccttccgtactcctggacccccttgacccctctatttctgttggctaaggccagccctggacattgtccaggaaggcctggggaggaggagtgaagtctgtgcatagatgggagagccttctgctcagaggctcactcagtaacgttgtttaattctctgccctggggaaggaggatggattgagagaatgtctttcttctctcctaagtctttgctttccctgatttcttgatttgatcttcaaaggtgggcaaagttccctctgactcttcccccactccccatcttactgatttaatttaatttttcactccccagagtctaatatggattctgactcttaagtgcttccgcccctcactacctcctttaatacaaat

SEQ ID NO: 22128 - DNA, 500 bp, Homo sapiens
  misc_feature (1)...(500): n = a,t,c or g
gggaaaatgagcccgagagtctcggcgtggtttataaatccacccgttcggcgaaacccgtgggaccagaggatatgggagcgacagctgtctatgagctggacacagagaaagagcgcgatgcacaagccatctttgagcgcagccagaagatccaggaggagctgaggggcaaggaggatgacaagatctatcggggaatcaacaattatcagaaatacatgaagcccaaggatacgtctatgggcaatgcctcttccgggatggtgaggaagggccccatccgagcgcccgagcatctacgtgccaccgtgcgctgggattaccagcccgacatctgtaaggactacaaagagactggcttctgcggcttcggagacagctgcaaattcctccatgaccgttcagattacaagcatgggtggcagatcgaacgtgagcttgtganggtcgctatggtgtctatgaggatgaaaacnatgaagnggnaaacgatgatg

SEQ ID NO: 22129 - DNA, 506 bp, Homo sapiens
  misc_feature (1)...(506): n = a,t,c or g
aaccgttatgacatgattacgaatttaatacgactcactatagggaatttggccctcgaggccaagaattcggcacgaggaaatttagaaatgcaggatgaataaagagaactctaaaagaaaggagttttagaattataggaggaggtagaaaatggggaaaggaatagaaggattttagaaaaagatacgttccataggttttagctctctgtagagctaatgagatctagcttagagttagcaataataaataataatagttttgttgaggcctatctaattagacagtactaagtatttaaatgcccttttaccgttaacactttcttcccgaggacagactctgttatccccattttacagatgtgtaaactgagccttaagggaagttaaataacttgatcatggtcacaccttaagtggttgaaaaggagttcctctcagatttctgtgagtctgaagcccttgngatctatactggccaagcattggggccattttgc

SEQ ID NO: 22130 - DNA, 442 bp, Homo sapiens
  misc_feature (1)...(442): n = a,t,c or g
gaagaagtttgtcattcctgattttgaggagttcacgggccatgtggatcgcatctttgaggatgtcaaagagctcactggaggcaaagtggcagcctacatccctcagctggccaagtcaaacccagacctgtggggtgtctccctgtgcactgtggatggtcaacggcactctgtgggccacacaaagatccccttctgcctgcagtcctgtgtgaagcccctcacctatgccatctccataagcaccctaggcactacgtgcacaagtttgtgggcaaagagccaagtggcctgcgctacaacaagctctccctcaatgaggaaggaatcccccataaccccatggtcaatgctggtgccattgttgtcagctccctgatcaagatggactgtaacaaagcacanaaagtttgattttgtgttgcacatctcaacaaaa

SEQ ID NO: 22131 - DNA, 974 bp, Homo sapiens
  misc_feature (1)...(974): n = a,t,c or g
gagacacgttgggaaatattgaccagccacagtacagacagatcgttgtagagttacttatggttgtatccattgtactggaaagaaaccccgagctagaatttcaagacaaagtagatctagacagactggtcaaagaagcatttaatgaatttcaaaaagatcagagtcggctaaaggaaattgaaaaacaagatgacatgacttccttttacaacactcctcccctgggaaaaagaggaacatgcagctatttgacaaaggcggtgatgaatctgctgctggaaggagaagtcaagccaaacaatgatgacccgtgtctgattagctagtggggaaggtgtaggaagctctgttgagacacatgttctgaagtgtgttgtgtttcatgttcaagcttaatcaaggcagccattaatatacgaactgagcatgctggggaggtgaatgccacatccttggcggggttatggacctcttgcatgtcatagccaatctaacggtaatggtaaatgcttttaatcaagcaggaaaaagttctcatgattatgccaactataatagtaatcctcactgagtgataaaaatagtttatgaattgaaaatttgccgctgcatgttgnatgatcaaatagttcatcaaaatgaatctttgctctttggactgaattcttaccatactgccattaaaataaatttgccaactagtaatgcatactggaaatcaaaagatactgaaagaatggtgaacttctcttagtggtattgtcatgctaaaagatgttaatatacatcataaaagcaaagtcagccagctgatattttggttctcaaaaactgcattattaataatattttagtatacagagctattctacagtttttacattgtaaacatgactgtggttttgtatttgctaaatataggggttggactaaaatataataaatctgtaccttatcaaacaaaaaaa

SEQ ID NO: 22132 - DNA, 657 bp, Homo sapiens
  misc_feature (1)...(657): n = a,t,c or g
tttgaaccctttgaatgaccacgaatttaatacgactcactatagggaatttggccctcgaggccaagaattcggcacgaggagagagctagcaccatgaccctgaatagccaaagcaataatgaacaaaaaagaaaaaagcagaagacatcacactacctgacttcaaaatatactaccagaccaatggaacagaatagagaacccagaaataacaccacacatttatagtcaacctaaattcaggaaaggcaacaaaaaaaagcaatggggaagaatccctgttcaataaatggtgctgggaaaactggctagccatatgcagaaaactgaaactggatcctcatctctcaccatatacaaaaatcaactcaaaatggattaaagacttaaaccattcaggacataggcatgggcaaagacttcatgtctaagacctcaaaagcaatggcaacaaaagccaaaattgacaaatgggatctaattaaactaaagagcttctgcacagcaaaagaaacaatcaacagagtgaacatgataaggggctaatatccagaatatacctcgtgccgaattcttggcctcgagggccaaattccctatagtgagtcgtattaaattcgtaatcagtcataagggtntccgntttcaaatttt

SEQ ID NO: 22133 - DNA, 427 bp, Homo sapiens
  misc_feature (1)...(427): n = a,t,c or g
gnnnntttganntctcccttngatcctnctatgactgattacgaatttaatacgactcactatagggaatttggccctcgaggccaagaattcggcacgaggtcctgatggtcacaaagaagttaccaaagaagtggtgacctccgaagatggttctgactgtcccgaggcaatggatttaggcacattgtctggcataggtactctggatgggttccgccataggcaccccgatgaagctgccttcttcgacactgcctcaactggaaaaacattcccaggtttcttctcacctatgttaggagagtttgtcagtgagactgagtctaggggctcagaatctggcatcttcacaaatacaaaggaatccagttctcatcaccctgggatagctgaattcccttcccgtggtaaatcttcaagttac

SEQ ID NO: 22134 - DNA, 646 bp, Homo sapiens
ggaatattctatctttcctcagacatactccatagatattaatggctatattcttgtgtattctgttacatcaatcaaaagttttgaagtgattaaagttatccatggcaaattgttggatatggtggggaaagtacaaatacctattatgttggttgggaataagaaagacctgcatatggaaagggtgatcagttatgaagaagggaaagctttggcagaatcttggaatgcagcttttttggaatcttctgctaaagaaaatcagactgctgtggatgtttttcgaaggataattttggaggcagaaaaaatggacggggcagcttcacaaggcaagtcttcatgctcggtgatgtgattctgctgcaaagcctgaggacactgggaatatattctacctgaagaagcaaactgcccgttctccttgaagataaactatgcttcttttttcttctgttaacctgaaagatatcatttgggtcagagctcccctcccttcagattatgttaactctgagtctgtccaaatgagttcacttccattttcaaattttaagcaatcatattttcaatttatatattgtatttcttaatattatgaccaagaattttatcggcattaatttttcagtgtagtttgttg

SEQ ID NO: 22135 - DNA, 452 bp, Homo sapiens
ggggcctcaccaagtctggcggctcagatcgcaccattgcctacgaaaacaaagccctgatgctctgcgaagggctcttcgtggcagacgtcaccgatttcgagggctggaaggctgcgattcccagtgccctggacaccaacagctcgaagagcacctcctccttcccctgcccggcagggcacttcaacggcttccgcacggtcatccgccccttctacctgaccaactcctcaggtgtggactagacggcgtggcccaagggtggtgagaaccggagaaccccaggacgccctcactgcaggctcccctcctcggcttccttcctctctgcaatgaccttcaacaaccggccaccagatgtcgccctactcacctgagcgctcagcttcaagaaattactggaaggcttccactagggtccaccaaggaattctcccaccacctcacca

SEQ ID NO: 22136 - DNA, 371 bp, Homo sapiens
  misc_feature (1)...(371): n = a,t,c or g
tatagggaatttggccctcgaggccaagaattcggcacgagctgcaatgtccacctcctgggttcaagcgattctcctgcctcagcctctcaagtagctgggattacaggcacctgccaccacgcccagccaatttttgtatttttagtagagacaatttcactatgttggccaggctggtcttgaactcctgacctcaagtgatctgcctgcctcggcctcccaaaggatgggattacaggcaccagccactgcgcctggctggcctctggtttttaataaaacatgactagagtgactccatcttaaagtgagtagctaggcacttacaaggttcatgcttatggcctgaaaataaccnccntccaagg

SEQ ID NO: 22137 - DNA, 575 bp, Homo sapiens
agatcagtcacccatgtgaataagaagccaggaaaggaaagatggggaagcccagatcaccaggcttctattaaggaggaaagcaacagaggaaacagtgaaggggaacagaagggggtagcaaagtgttacagaaaagcggactggatagacaaaactgcagaaggtgtatgttggggagaactgaaagggaaaacaaaatacttgacatagtcttaagtagaagaaggcagttagagaaaacaaagtatctactggccttgtcaacatacagacttcaaaataccccttatgagaatccaaagaatgatgtgtgtaagggaagattttatttgcccttccggaagaaatcagtatctatgcaaatcttgaaagacgaaatcaaagcccattaatgattcagaatcagtgcttgacctcctgtattctgaatggtgaactctggaagcagggattgtgtctggctctttttagagctggaagtgtagtggctttcattaaatacttgctgtaaagtctttctaagaccaattattatcttagcatgtttcagtatcttctctatcataggccct

SEQ ID NO: 22138 - DNA, 337 bp, Homo sapiens
gcccggaggagcagcaagagatagcatgacattctttcttcctgccaccaaccacatcccaagtgtcccctggagagcaagatagccttccactgattggctggtgtagcagtattttagccactgaacttcagtggagggtggtgagcagtgtccttatccaccctaatctcatactccctcattgtccagctgaactacctgtcccctgggagtcaggaccctctgcctgctctctttcctctttagaaatggcagttactggctgggcgcagtggctcacgcttgtaatcccagcactttgggaagccgaggtgggcggatcacctgaggtccg

SEQ ID NO: 22139 - DNA, 1249 bp, Homo sapiens
gcggcacgagggaatcctggcagctctgaacgcggaagtgctgggcactggacctctgagagctctgtatctggtagtactggacaatggcactctgaatctggaagttttaggccagatagcccaggctctgggaacgcgaggcctaacaacccagactggggcacatttgaagaggtgtcaggaaatgtaagtccagggacaaggagagagtaccacacagaaaaactggtcacttctaaaggagataaagagctcaggactggtaaagagaaggtcacctctggtagcacaaccaccacgcgtcgttcatgctctaaaaccgttactaagactgttattggtcctgatggtcacaaagaagttaccaaagaagtggtgacctccgaagatggttctgactgtcccgaggcaatggatttaggcacattgtctggcataggtactctggatgggttccgccataggcaccctgatgaagctgccttcttcgacactgcctcaactggaaaaacattcccaggtttcttctcacctatgttaggagagtttgtcagtgagactgagtctaggggctcagaatctggcatcttcacaaatacaaaggaatccagttctcatcaccctgggatagctgaattcccttcccgtggtaaatcttcaagttacagcaaacaatttactagtagcacgagttacaacagaggagactccacatttgaaagcaagagctataaaatggcagatgaggccggaagtgaagccgatcatgaaggaacacatagcaccaagagaggccatgctaaatctcgccctgtcagaggtatccacacttctcctttggggaagccttccctgtccccctagactaagttaaatatttctgcacagtgttcccatggccccttgcatttccttcttaactctctgttacacgtcattgaaactacacttttttggtctgtttttgtgctagactgtaagttccttgggggcagggcctttgtctgtctcatctctgtattcccaaatgcctaacagtacagagccatgactcaataaatacatgttaaatggatgaatgaattcctctgaaactctatttgagcttatttagtcaaattctttcactattcaaagtgtgtgctattagaattgtcacctaactgattaatcacatttttagtatgtgtctcagttgacatttaggtcaggctaaatacaagttgtgttagtattaagtgatgcg

SEQ ID NO: 22140 - DNA, 471 bp, Homo sapiens
ttgattcctgattacgaatttaatacgactcactatagggaatttggccctcgaggccaagaattcggcacgagcccaggcagagatgtttgaacacctctctggtaagctgcagcagttcatggaaaacaaaagtcggatgctggcctctggaaatcagccagatcaagatattacacatttcttccaacagatccaggagctcaatttggaaatggaagaccaacaggagaacctagatactcttgagcacctggtcactgaactgagctcttgtggctttgcgctggacttgtgccagcatcaggacagggtacagaatctaagaaaagacttcacagagctacagaagacagttaaagagagagagaaagatgcatcatcttgccaggaacagttggatgaattccggaagctggtcaggaccttccagaaatggttgaaagaaactgaagggagtattccacctac

SEQ ID NO: 22141 - DNA, 920 bp, Homo sapiens
ctcaaatataaagctgtcattacttgtaatatcttttatttaaactaccacatcaacaagcctaatttgcgttagctagcgtcgtcatcatgtatgttgtgtttgctacttacagcttgcagtttctaccttagtattcagaagtaattattgaatatgctaaaaatataaatatatttttaagtatagtttgtattttaaaaattaaagcactgtctcctgtccttgcctcccctatcatgtagttttctgactcagaatgtgccaaaaaggctttggaacaacttaatggatttgaactagcaggaagaccaatgaaagttggtcatgttactgaacgtactgatgcttcgagtgctagttcatttttggacagtgatgaactggaaaggactggaattgatttgggaacaactggtcgtcttcagttaatggcaagacttgcagagggtacaggtttgcagattccgccagcagcacagcaagctctacagatgagtggctctttggcatttggtgctgtggcagatttgcaaacaagactttcccagcagactgaagcttcagctttagctgcagctgcctctgttcagccacttgcaacacaatgtttccaactctctaacatgtttaaccctcaaacagaagaagaagttggatgggataccgagattaaggatgatgtgattgaagaatgtaataaacatggaggagttattcatatttatgttgacaaaaattcagctcagggcaatgtgtatgtgaagtgcccatcaattgctgcagctattgctgctgtcaatgcattgcatggcaggtggtttgctggtaaaatgataacagcagcatatgtacctcttccaacttaccacaacctgtttcctgattctatgacagcaacacagctactggttccaagt

SEQ ID NO: 22142 - DNA, 387 bp, Homo sapiens
cccacgcgtccgatggagatatcaagtgtgtactaaatgaaggcatgccaatttatcgtagaccatatgaaaagggtcgcctaatcatcgaatttaaggtaaactttcctgagaatggctttctctctcctgataaactgtctttgctggaaaaactcctacccgagaggaaggaagtggaagagactgatgagatggaccaagtagaactggtggactttgatccaaatcaggaaagacggcgccactacaatggagaagcatatgaggatgatgaacatcatcccagaggtggtgttcagtgtcagacctcttaatgggccagtgaataacactcactgctggcatttaatgtgcagtagtgaatgagtgaaggactgtaatcat

SEQ ID NO: 22143 - DNA, 855 bp, Homo sapiens
  misc_feature (1)...(855): n = a,t,c or g
ggtccccaaaaagcctcccccatcaccccaacctacagaggaggatcctgagcacagagtccgggtccgggtcaccaagctccgtctcggaggccctaatcaggatctgactgtcctcgagatgaaacgggaaaacccacagctgaaacaaatcgaggggctggtgaaggagctgctggagagggagggactcacagctgcagggaaaattgagatcaaaattgtccgcccatgggctgaagggactgaagagggtgcaccgttggctgactgatgaggacacgagaaacctcaaggagatcttcttcaatatcttggtgccgggagctgaagaggcccagaaggaacgccagcggcagaaagagctggagagcaattaccgccgggtgtggggctctccaggtggggagggcacaggggacctggacgaatttgacttctgagaccaacactacacttgacccttcacggaatccagactcttcctggactggcttgcctcctccccacctccccaccctggaacccctgagggccaaacagcagagtggagctgagctgtggacctctcgggcaactctgtgggtgtgggggccctgggtgaatgctgctgcccctgctggnagccaccttgagacctcaccgggcctgtgatatttgctctcctgaactctcactcaatcctcttcctctcctctgtggcttttcctgttattgtcccctaatgataggatattccctgctgcctacctggagattcantaggatcttttgagtggaggtgggtanacagncaaggaggncaggacacttagcaggcactgagcaagcanggcccacctgccttagtgattt

SEQ ID NO: 22144 - DNA, 641 bp, Homo sapiens
  misc_feature (1)...(641): n = a,t,c or g
gcagcagttcaccaaggatcagatgtctcacctgttcaatgtggcacacacactgcgtatgatggtgcagaaggagcggagcctcgacatcctgaaggggaaggtcatggcctccatgttctatgaagtgagcacacggaccagcagctcctttgcagcagccatggcccggctgggaggtgctgtgctcagcttctcggaagccacatcgtccgtccagaagggcgaatccctggctgactccgtgcagaccatgagctgctatgccgacgtcgtcgtgctccggcacccccagcctggagcagtggagctggccgccaagcactgccggaggccagtgatcaatgctggggatggggtcggagagcaccccacccaggccctgctggacatcttcaccatccgtgaggagctgggaactgtcaatggcatgacgatcacgatggtgggtgacctgaagcacggacgcacagtacattccctggcctgcctgctcacccagtatcgtgtcagcctgcgctacgtggacctccacctgcgcatgccaccactgtgcgggccttctggcctncgcgnaccaagcaggangaatcnaagcattgagaagcnctgctgacactgatgncttacatgatngaatc

SEQ ID NO: 22145 - DNA, 532 bp, Homo sapiens
  misc_feature (1)...(532): n = a,t,c or g
ggtgnnnnattganactgttgactgattcgaatttaatacgactcactatagggaatttggccctcgaggccaagaattcggcacgaggaaacgactggaggtggacattgatattaagatccgatcttgtcgagggtcatgcagtagggctttagctcgtgaagtagatctgaaggactatgaagatcagcagaagcaacttgaacaggtcattgccaaagacttacttccctctagagataggcaacacttaccactgataaaaatgaaaccagttccagacttggttcccggaaattttaagagccagcttcagaaggtacccccagagtggaaggcattaacagacatgccgcagatgagaatggagttagagagacctggtggaaatgagattactcgaggaggctccacctcttatggaaccggatcagagacggaaagccccaggaaccctagcagtgctggaagctggaactctgggagctctggcctggagtactggaacccaanccttgggnctttgnacgg

SEQ ID NO: 22146 - DNA, 442 bp, Homo sapiens
  misc_feature (1)...(442): n = a,t,c or g
gtgtntnnnntttganaccttnngacatgactacgaatttaatacgactcactatagggaatttggccctcgaggccaagaattcggcacgagcacttgggggttggcaattttatttttaaagaaaacttaaaaataaaacctgaaaccccagaacttgagccttgtgtatagattttaaaagaatatatatatcagccgggcgcggtggctcatgcctgtaatcccagcactttgggaggctgaggcgggtggattgcttgagcccaggagtttgagaccagcctggccaacgtggcaaaacctcgtctctgttaaaaattagccgggcgtggtggcacactcctgtaatcccagctactggggaggctgaggcaccgagaatcacttgaacccaggaagcggngttgcagtgagccaaaggtacaccactacactccac

SEQ ID NO: 22147 - DNA, 324 bp, Homo sapiens
gtagatgctggtgtggattgttcatcaattggcggggttccatttttccagcataaaaaatcacatggaaaagacaaagaaaacagaggcattaacacactggagaggtctaaagtggaagaaactacagagcacttggttacaaagagcagattacctctgcgagcccagatcaacctttaattcacttgggggttggcaattttatttttaaagaaaacttaaaaataaaacctgaaaccccagaacttgagccttgtgtatagattttaagtcgacgcggccgcgaattccagatctatgaatcgtagatactgaaaaacc

SEQ ID NO: 22148 - DNA, 690 bp, Homo sapiens
gattctagcctgtcggggtgtgcaaggcccctccatggaaaggcgccatccagtgtgctctggcacctgtcagcccacccagttccgctgcagcaatggctgctgcatcgacagtttcctggagtgtgacgacacccccaactgccccgacgcctccgacgaggctgcctgtgaaaaatacacgagtggctttgacgagctccagcgcatccatttccccagcgacaaagggcactgcgtggacctgccagacacaggactctgcaaggagagcatcccgcgctggtactacaaccccttcagcgaacactgcgcccgctttacctatggtggttgttatggcaacaagaacaactttgaggaagagcagcagtgcctcgagtcttgtcgtggcatctccaagaaggatgtgtttggcctgaggcgggaaatccccattcccagcacaggctctgtggagatggctgtcgcagtgttcctggtcatctgcattgtggtggtggtagccatcttgggttactgcttcttcaagaaccagagaaaggacttccacggacaccaccaccacccaccacccacccctgccagctccactgtctccactaccgaggacacggagcacctggtctataaccacaccacccggcccctctgagcctgggtctcaccggctctcacctggccctgctt

SEQ ID NO: 22149 - DNA, 532 bp, Homo sapiens
  misc_feature (1)...(532): n = a,t,c or g
cccaaaaggcatgttacttcgcttttttgtgcacttctatgacatggaaattattgaagaagaagctttcttggcttggaaagaagatataacccaagagtttccgggaaaaggcaaggctttgttccaggtgaatcagtggctaacctggttagaaactgctgaagaagaagaatcagaggaagaagctgactaaagaaccagccaaagccttaaattgtgcaaaacatactgttgctatgatgtaactgcatttgacctaaccactgcgaaaattcattccgctgtaatgttttcacaatatttaaagcagaagcacgtcagttaggatttccttctgcataaggtttttttgtagtgtaatgtcttaatcatagtctaccatcaaatattttaggagtatctttaatgtttagatagtatattagcagcatgcaataattacatcataagttctcaagcagaggcagtctattgcaaggaccttctttgctgcagttatcataggntgttttaagttagaaaactggaa

SEQ ID NO: 22150 - DNA, 440 bp, Homo sapiens
  misc_feature (1)...(440): n = a,t,c or g
gtnntttgaanaccctcattggancacctctatgacatgattacgaatttaatacgactcactatagggaatttggccctcgaggccaagaattcggcacgagaaaccagttccagacttggttcccggaaattttaagagccagcttcagaaggtacccccagagtggaaggcattaacagacatgccgcagatgagaatggagttagagagacctggtggaaatgagattactcgaggaggctccacctcttatggaaccggatcagagacggaaagccccaggaaccctagcagtgctggaagctggaactctgggagctctggacctggaagtactggaaaccgaaaccctgggagctctgggactggagggactgcaacctggaaacctgggagctctggacctggaagtactggaagctggaactctgggagct

SEQ ID NO: 22151 - DNA, 713 bp, Homo sapiens
ggctaccatggcggccgagcgaaagacaaggttgtccaagaatctactgcgcatgaagtttatgcaaaggggactggactcagaaaccaagaaacaactagaagaagaagaaaagaaaatcattagtgaagagcactggtacttggatttgccagagcttaaagagaaagagagtttcataatagaagagcagagtttcttactatgtgaagatcttctctatggaagaatgtcattcagaggatttaatcctgaggttgagatatgagaccttggtggggacaattgggaaaaagtttgccagaaagagagaccatgccaattatgaagaagatgaaaatggagacataacaccaattaaagcaaagaagatgttcttaaagccccaggattaagatggatgccttaagcgatggcccaggggtgcttggtggaagtcagcagggcatctggagctcatcccaatggtgtctctatagttattaatactgtaacgtttacttgtaaagagattatcattttagaaacatgctgtttttgaaacagatgtgtgatggatgttgtacatcctttgcttcttggtattcattcagagtggatttttagcccctgatctacaaatgtacattgttacagggctgcttcctaaagattttttttacctcaggtttctcttaatataggtctccagtcactgccttgaattgcttact

SEQ ID NO: 22152 - DNA, 558 bp, Homo sapiens
aacagctatgacatgattacgaatttaatacgactcactatagggaatttggccctcgaggccaagaattcggcacgaggcggattcgtgcctatgagatgacaatgcgggtgaaagacaaagtgtatcacctggaatgtttcaagtgcgccgcctgtcagaagcatttctgttaacaactgctctgaaaagaagatatttttcaacctgaacttgcagtagctagtggagaggcaggtaaggatacctccctcaacaatgggcattcctagggagcatcattaacaagattccagctctactccttcctgctgaggtttgtcgcttaagaatctggagacaggtagggtgcagtggcttacacctgtaatcctagcactttgggaggccaaggcgtgtggatcacctgaggtcaggagttcgacaccagcctgaccaatatggtgaaaccctgactctactacaaatacaaaaattagccaggcgtggtagtgtgcacctatagtcccagctactcaggaggctgagacaggagaatcacttgaaaccgggaggcag

SEQ ID NO: 22153 - DNA, 436 bp, Homo sapiens
gacggaatctgagcgtaaagacgagctgagtgattggtcattggcaggagaagatgatcgagacagccgacatcagcgtgacagcaggagacgcccaggaggaagaggcagaagtgtttcagggggtcgaggtcgtggtggaccacgtggtggcaaatcctccatcagttctgtgctcaaagatccagacagcaatccatacagcttacttgataatacagaatcagatcagactgcagacactgatgccagcgaatctcatcacagtactaaccgtcgtaggcggtctcgtagacgaaggactgatgaagatgctgttctgatggatggaatgactgaatctgatacagcttcagttaatgaaaatgggctaggcaaaagatgtgattgaagagcatggtccttcagaaaaggcaataaacggcccaactagtgt

SEQ ID NO: 22154 - DNA, 480 bp, Homo sapiens
ggctaaaaacaaacctttatcaggatgatgcagtaacaggggaagcagctggcctggccctaggtttggttatgttgggctctaaaaatgctcaggctattgaggacatggttggttatgcacaagaaactcaacatgagaagattctgcgtggtcttgcagttggcatagctttagtaatgtatgggaggatggaagaggctgatgctctcattgaatctctctgtcgtgacaaggacccaattcttcgaaggtctggaatgtatactgtagccatggcttattgtggctctggtaacaacaaagcaattcgacgcctgctacatgttgctgtaagtgatgttaatgatgatgtcaggagggcagcagtagaatcacttgggttcattctattcagaacccctgaacagtgcccaagtgttgtctctttgttgcagagagttacaaccctatgtgcgctacggagctgcaatggccttg

SEQ ID NO: 22155 - DNA, 705 bp, Homo sapiens
  misc_feature (1)...(705): n = a,t,c or g
tcctatcagctatgacatgattacgaatttaatacgactcactatagggaatttggccctcgaggccaagaattcggcacgagggcgctgtgcacaagccctacaactgctcccactgtggcaagagcttctcccggccggatcacctcaacagtcacgtcagacaagtgcactcaacagaacggcccttcaaatgtgagaaatgtgaggcagctttcgccacgaaggatcggctgcgggcgcacacagtacgacacgaggagaaagtgccatgtcacgtgtgtggcaagatgctgagctcggcttatatttcggaccacatgaaggtgcacagccagggtcctcaccatgtctgtgagctctgcaacaaaggcttcaccacggcagcatacctgcgcatccacgcggtgaaggaccacgggctccaggccccgcgggctgaccgcatcctgtgcaagctgtgcagcgtgcactgcaagacccctgcccagctggccggccacatgcagacccatctggggggggccgccccccctgtcccgggagacgccccccagccacagcccacctgctgagggggacccccgnacccaccaggtactggtgaggtttgtccaatggcggcngcnngcggcagcggcggcaacggctgcancggcancagtagcagcccctccacagctgtgggctcctnttgggggcgga

SEQ ID NO: 22156 - DNA, 552 bp, Homo sapiens
  misc_feature (1)...(552): n = a,t,c or g
ggntgnnnnntgnntttgaaaantcctgataccttatgacatgatcacgaatttaatacgactcactatagggaatttggccctcgaggccaagaattcggcacgagaacagacatgccgcagatgagaatggagttagagagacctggtggaaatgagattactcgaggaggctccacctcttatggaaccggatcagagacggaaagccccaggaaccctagcagtgctggaagctggaactctgggagctctggacctggaagtactggaaaccgaaaccctgggagctctgggactggagggactgcaacctggaaacctgggagctctggacctggaagtactggaagctggaactctgggagctctggaactggaagtactggaaaccaaaaccctgggagccctagacctggtagtaccggaacctggaatcctggcagctctgaacgcggaagtgctgggcactggacctctgagagctctgtatctggtagtactggacaatggcactctgaatctggaagtttangccagatacccagctct

SEQ ID NO: 22157 - DNA, 452 bp, Homo sapiens
gcgcgaggcgctggaacagtccgggagattctcgctctgctgctttagcttcggagtgtttggcgacggggcagcgcgagatgtggaggctcatgtcgaggtttaatgcattcaaaaggactaataccatactgcaccatttgagaatgtccaagcacacagatgcagcagaagaggtgctattggaaaaaaaaggttgcgcgggagtcataacactaaacagaccaaagttcctcaatgcactgactcttaatatgattcggcagatttatccacagctaaagaagtgggaacaagatcctgaaactttcctgatcattataaagggagcaggaggaaaggctttctgtgccgggggtgatatcagagtgatctcggaagctgaaaaggcaaaacagaggctagcaccagttttcttcagagaagaatatatgctgaataatgctgttggt

SEQ ID NO: 22158 - DNA, 746 bp, Homo sapiens
ggaagagaggaagaaaatagttgcatcgtcacatgatcacggatacacgactctagccaccagtgtgaccctgttaaaagcctcggaagtggaagagattctggatggcaacgatgagaagtacaaggctgtgtccatcagcacagagccccccacctacctcagggaacagaaggccaagaggaacagccagtgggtacccaccctgcccaacagctcccaccacttagatgccgtgccatgctccacaaccatcaacaggaaccgcatgggccgagacaagaagagaaccttccccctttgctttgatgaccatgacccagctgtgatccatgagaacgcatctcagcccgaggtgctggtccccatccggctggacatggagatcgatgggcagaagctgcgagacgccttcacctggaacatgaatgagaagttgatgacgcctgagatgttttcagaaatcctctgtgacgatctggatttgaacccgctgacgtttgtgccagccatcgcctctgccatcagacagcagatcgagtcctaccccacggacagcatcctggaggaccagtcagaccagcgcgtcatcatcaagctgaacatccatgtgggaaacatttccctggtggaccagtttgagtgggacatgtcatagaaggagaactcaccagagaagtttgccctgaagctgtgctcggagctggggttgggccggggagtttgtcaccaccatcgcatacagc

SEQ ID NO: 22159 - DNA, 707 bp, Homo sapiens
gccatcatctcctgccttcctcctgggccctctctgctctgcgtgtcacctgtgcttcgggcccttcccacaggacatttctctaagagaacaatgtgctatgtgaagagtaagtcaacctgcctgacatttggagtgttccccttccactgagggcagtcgatagagctgtattaagccacttaaaatgttcacttttgacaaaggcaagcacttgtgggtttttgttttgtttttcattcagtcttacgaatacttttgccctttgattaaagactccagttaaaaaaaattttaatgaagaaagtggaaaacaaggaagtcaaagcaaggaaactatgtaacatgtaggaagtaggaagtaaattatagtgatgtaatcttgaattgtaactgttcttgaatttaataatctgtagggtaattagtaacatgtgttaagtattttcataagtatttcaaattggagcttcatggcagaaggcaaacccatcaacaaaaattgtcccttaaacaaaaattaaaatcctcaatccagctatgttatattgaaaaaatagagcctgagggatctttactagttataaagatacagaactctttcaaaaccttttgaaattaacctctcactataccagtataattgagttttcagtgggggcagtcattatccaggtaatccaagatattttaaaatctgtcacgta

SEQ ID NO: 22160 - DNA, 876 bp, Homo sapiens
  misc_feature (1)...(876): n = a,t,c or g
tatgacatgattacgaatttaatacgactcactatagggaatttggccctcgaggccaagaattcggcacgaggttagagctcagttggttgatatgaaacgactggaggtggacattgatattaagatccgatcttgtcgagggtcatgcagtagggctttagctcgtgaagtagatctgaaggactatgaagatcagcagaagcaacttgaacaggtcattgccaaagacttacttccctctagagataggcaacacttaccactgataaaaatgaaaccagttccagacttggttcccggaaattttaagagccagcttcagaaggtacccccagagtggaaggcattaacagacatgccgcagatgagaatggagttagagagacctggtggaaatgagattactcgaggaggctccacctcttatggaaccggatcagagacggaaagccccaggaaccctagcagtgctggaagctggaactctgggagctctggacctggaagtactggaaaccgaaaccctgggagctctgggactggagggactgcaacctggaaacctgggagctctggacctggaagtactggaagctggaactctgggagctctggaactggaagtactggaaaccaaaaccctgggagccctagacctggtagtaccggaacctggaatcctggcagctctgaacgcggaagtgctgggcactggacctctgagagctctgtatctggtagtactggacaatggcactctgaatctggaattttagccagatanccaagctctgggaacgcgaggcctaacaacccagactggggcacatttgaagagttcaagaaatgtantcaaggacaaggagagagtnc

SEQ ID NO: 22161 - DNA, 528 bp, Homo sapiens
  misc_feature (1)...(528): n = a,t,c or g
nnacagctatgacatgattacgaatttaatacgactcactatagggaatttggccctcgaggccaagaattcggcacgagcgtgggagccagagccttttaagtccatcatctggatacatgcccatgaaccagggtaatcttggggagtcttgccaggagtctgcagtttctgggagcagtgaacggtgcccccgtccagtctctctacacccaatgccacggggatgcctggcatcagagtcatcagaggggcatgtaacaggctctgaggctgagctccaggagaaagtgtcaatgtgtaggagccggagcaggagccggagcccacggccacgcggagatagcgcctaccattcccagcgccacagtctgctgactcctgttaccccactctccccacccgggttagaggaagaggatgtcaacggttatgtcatgccagatacacacctcaaaggtactccctcctcccgggaaggcaccctttcttcagtgggtctcagtctgtctgggtactgaanaaaaa

SEQ ID NO: 22162 - DNA, 716 bp, Homo sapiens
  misc_feature (1)...(716): n = a,t,c or g
ttacgaatttaatacgactcactatagggaatttggccctcgaggccaagaattcggcacgaggaactagccaatgagttcaccaggatggcccgagacccaccacggtatctggtcataaagagagagagtgggcctggaatagcccctgggccagagccccatggtctgacaaacaagaagctagaggaagtagagctggagccagaactagacctagacctagacttggaagcagaggaggacaacctggcaaccaccacactgggctccgccctcagcctaccagttggaacacttaattggccacgtgggagccagagccttttaagtccatcatctggatacatgcccatgaaccagggtaatcttggggagtcttgccaggagtctgcagtttctgggagcagtgaacggtgcccccgtccagtctctctacacccaatgccacggggatgcctggcatcagagtcatcagaggggcatgtaacaggctctgaggctgagctccaggagaaagtgtcaatgtgtaggagccggagcaggagccggagcccacggccacgcggagatagcgcctaccattcccagcgccacagtctgctgactcctgttaccccactctccccacccgggttagaggaagaggatgtcaacggttatgtcatgccagatacacacctcaaaggtactcccttcttccgggaaagnaccct

SEQ ID NO: 22163 - DNA, 535 bp, Homo sapiens
gctccccacgaggccttcctggcctcctgtctgaagtgggtccctttccttactggtccctctccaaagccctggctgtaagactcggggaccccagcatctgcacatctggcagagtggacctcctatgagaactggctgtgagctgtggagcccagggccggaggagcagtaagggtggcatggggaccatgacaggctgctgcgggccaggggcaaacacgtcaggcctggcccccagtccgctgctgcccctccctttcaccttccgtccagcactaagggagtctggccacggcctaatataggagggcttgtgggaggagacacccaccccctctttctgcacctctcccctcttccatgccacccccaggccaggagccaccacagccctgtctgtgactctcagctcccgaggctgggctcttccccagggaagctgcatgaccatggccacatacaggaggtaggagacagaggcctccacggtggacgatcgtggcgtgaagtccacgttgaccacgttgtcggg

SEQ ID NO: 22164 - DNA, 320 bp, Homo sapiens
gcctcagcctcccaggcagccgggactacaggcgcatgccaccacgcccggctaatttttttgtatttttagtagagatggggcttcaccatgtcagccaggatgttctcgatctcccgacctcgtgatccgcccacctcggcctcccaaagtgctgagactacaggcgtgagccaccgtttccggccctgactttcacttttattcaacatagttctggaagtcctagctagagcaatcagacaagagaaaagaaataaagggcatccaaatcagtaaagaggaagtcaaactgctgctgtttgctgatgatatataag

SEQ ID NO: 22165 - DNA, 497 bp, Homo sapiens
  misc_feature (1)...(497): n = a,t,c or g
accgtttgacatgattacgaatttaatacgactcactatagggaatttggccctcgaggccaagaattcggcacgaggggaggccaaggcagatggattgcttgagcccaggagtttgagaccagcctggacaacatgacaaaaccctgtctctacaaaaaatacaaaaattagcttggtgtggtagtgtgcacctgtaatcccagctacaggaggctgaggcaggaggatcccttgagcccaggaggtggaggttgcagtgagccgagatcccgctactgcactccagcctgggctacagagtgagaccctaataaaagaagagaatatagatacagtcaaaggctggatggactcagtgagggacagtctgacctannnnntantcctgaaatatctggattccatttctaaggttgtcatgtattactctgaattagttaagtcattcaaacaagcgagtataatctttcctggctttggacacctancttggt

SEQ ID NO: 22166 - DNA, 440 bp, Homo sapiens
  misc_feature (1)...(440): n = a,t,c or g
naacngttatgacatgattacgaatttaatacgactcactatagggaatttggccctcgaggccaagaattcggcacgaggactgtgcccagtacttcctggacaagatcgacgtgatcaagcaggctgactatgtgccgagcgatcaggacctgcttcgctgccgtgtcctgacttctggaatctttgagaccaagttccaggtggacaaagtcaacttccacatgtttgacgtgggtggccagcgcgatgaacgccgcaagtggatccagtgcttcaacgatgtgactgccatcatcttcgtggtggccagcagcagctacaacatggtcatccgggaggacaaccagaccaaccgcctgcaggaggctctgaacctcttcaagagcatctggaacaacagatggctgcgcaccatctctgtgatcctgttcctcaac

SEQ ID NO: 22167 - DNA, 766 bp, Homo sapiens
gactacaactacagaatcctgtaagattctgaaactttgtcacttcctttctaaggcttccttcctaagcctctctgtgaaacttctttggaaaaaggggtatgtgggctagcctgcaaggacagccagaagggagaaggcagtgaaggacagagcatggggctgagtgtctgtagcccactgcattgagggcaggagagctcagggcaggtctgagtcatcaccattttctgtgtgtttcttcctaataagtgaaataatgtgtagtgtctagcacggtgcctgacagctcacagaaaatccccaacttcccctcccccaccgccatgccttctaactctcggtgagatgaacatctctactgggaggggaagccattgagggaagaaatgctggcaccttgacatttggggaaagaaagggaaggaattgttttccaagtatctactttgtgccagaaatggtgttgggcaatttactgattgcctcatttaatcctttgacgtatcctaggagttaggtattctcagccccatttccagaaagcaaaccaaggtgaaaaagagttaataatttgttcaaagacatatggaaaagtgccaggcatggtggctcacgcctgtaatcctagcactttgggaggccaaggcgggcagatcacttgaggtcaggagttcaagaccagcctggccaacaaggcgaaatgctgtctcgactaaaaatacaaaaattagccagaaatcacttgaatctgggaggcggaagt

SEQ ID NO: 22168 - DNA, 472 bp, Homo sapiens
gttttctctgagtgcctttttctccttaaggaggcctgcagagaaaggggctttgggctctgcccccctctgcttgggaacactgggtattctcatgagctcatccaagccaaggttggacccctccccaagaggccaacccagtgccccctcccattttccgctactgaccagttcatccagctttccacacagttgttgctgcctattgtggtgccgcctcaggttaggggctctcagccatctctaacctctgccctcgctgctcttggaattgcgcccccaagatgctctctcccttctccaatgagggagccacagaatcctgagaaggtgaatgtgccctaacctgctcctctgtgcctaggccttacgcatttgctgactgactcagcccccatgcttctggggacctttcctacccccatcagcatcaataaaacctcctgtctccagtgaaaaaaaaaaaaaa

SEQ ID NO: 22169 - DNA, 575 bp, Homo sapiens
cttacatcagggaaaaattggtatttatgcaaaaaaaaatgtttttgtccttgtgagtccatctaacatcataattaatcatgtggctgtgaaattcacagtaatatggttcccgatgaacaagtttacccagcctgctttgctttactgcatgaatgaaactgatggttcaatttcagaagtaatgattaacagttatgtggtcacatgatgtgcatagagatagctacagtgtaataatttacactattttgtgctccaaacaaaacaaaaatctgtgtaactgtaaaacattgaatgaaactattttacctgaactagattttatctgaaagtaggtagaatttttgctatgctgtaatttgttgtatattctggtatttgaggtgagatggctgctcttttattaatgagacatgaattgtgtctcaacagaaactaaatgaacatttcagaataaattattgctgtatgtaaactgttactgaaattggtatttgtttgaagggtcttgtttcacatttgtattaataattgtttaaaatgcctcttttaaaagcttatataaatttttt

SEQ ID NO: 22170 - DNA, 391 bp, Homo sapiens
gcggcacgagggcgggtgtgctgaagaagaccactggccttgtgggattggctgtgtgcaatactcctcacgagaggctaagaatattgtacacaaagattcttgatgttcttgaggaaatccctaaaaatgcagcatatagaaagtatacagaacagattacaaatgagaagctggctatggttaaagcggaaccagatgttaaaaaattagaagaccaacttcaaggcggtcaattagaagaggtgattcttcaggctgaacatgaactaaatctggcaagaaaaatgagggaatggaaactatgggagccattagtggaagagcctcctgccgatcagtggaaatggccaatataattattaagtgactttggtgtgttcatgggaaa

SEQ ID NO: 22171 - DNA, 646 bp, Homo sapiens
gccaggtcagtgtggaggtggattccgctccgggcaccgatctcgccaagatcctgagtgacatgcgaagccaatatgaggtcatggccgagcagaaccggaaggatgctgaagcctggttcaccagccggactgaagaattgaaccgggaggtcgctggccacacggagcagctccagatgagcaggtccgaggttactgacctgcggcgcacccttcagggtcttgagattgagctgcagtcacagctgagcatgaaagctgccttggaagacacactggcagaaacggaggcgcgctttggagcccagctggcgcatatccaggcgctgatcagcggtattgaagcccagctgggcgatgtgcgagctgatagtgagcggcagaatcaggagtaccagcggctcatggacatcaagtcgcggctggagcaggagattgccacctaccgcagcctgctcgagggacaggaagatcactacaacaatttgtctgcctccaaggtcctctgaggcagcaggctctggggcttctgctgtcctttggagggtgtcttctgggtagagggatgggaaggaagggacccttacccccggctcttctcctgacctgccaataaaaatttatggtccaaaaaaaaaaaaaa

SEQ ID NO: 22172 - DNA, 464 bp, Homo sapiens
ctcaccattatttgtcatggaggcagacatacaccagaaatgggggagaaacagtacatatctttctgtctttagtttattgtgtgctggtctaagcaagctgagatcatttgcaatggaaaacacgtaacttgtttaaaagtttttctggtagctttagctttatgctaaaaaaaataatgacattgggtatctatttctttctaagactacattagtaggaaaataagtcttttcatgcttatgatttagctgttttgtggtaattgctttttaaaggaagttattaatatcataagttattattaatattttgaacacaggtggatgtgaaggattttcatttaaaaaccaagtggttttgactttttctgttgaatgaacaactgtgccttgtggaatttttgcagaagtgtttatgctttgttagcatttcaacttgcattattataaagaggtattaa

SEQ ID NO: 22173 - DNA, 477 bp, Homo sapiens
cttgactgatttggaaacccttgactgattacgaatttaatacgactcactatagggaatttggccctcgaggccaagaattcggcacgaggacatcaaaaacaacctgaaagaggcgattgaaaccattgtggccgccatgagcaacctggtgccccccgtggagctggccaaccccgagaaccagttcagagtggactacattctgagtgtgatgaacgtgcctgactttgacttccctcccgaattctatgagcatgccaaggctctgtgggaggatgaaggagtgcgtgcctgctacgaacgctccaacgagtaccagctgattgactgtgcccagtacttcctggacaagaacgacgtgatcaagcaggctgactatgtgccgagcgatcaggacctgcttcgctgcgtgtcctgacttctggaatctttgagaccaagttccaggtggacaaagtcaacttcacatgtttg

SEQ ID NO: 22174 - DNA, 437 bp, Homo sapiens
tatgacatgattacgaatttaatacgactcactatagggaatttggccctcgaggccaagaattcggcacgagttatttcctgcttgctcaatttgctttctcaaacaactggaatcatgctgttttcagtagaaagtctcccttaatccattttgtgttgctataacagagcactagagattgggtagtttacaaaaagagaggtttatttagcccatggctttgcagtttgggaagtttaagattgagggctgcatctggtggcttctagtgagggccttgtgctgtatcaaaatgtggcagagaaacagaagggcagctgggctcatgagaaagggcaaaacatgagaggcaatctcactgtgcaacaactcactttcatgggaactaatccagtcccaagagaactaacccagtctggggggaaagacattaa

SEQ ID NO: 22175 - DNA, 908 bp, Homo sapiens
  misc_feature (1)...(908): n = a,t,c or g
gggaggaagcagctaatgctatgcccacactngccttcagcagtgcccccgggagggaggcccggcagtgtctgctggtgataatacatttcacacagggagggggaaccccaaggatgggctttggaggcccagaaggcctgtcaggtggtgtgattttccatctccagccaataaataactctgttggatgaatgcatacattagaaatggatgccactacacttcacacgtgggggaccaggtcaaaatcaaaccatgcaaagtggcagggcaagtgaggagggatccgggtgagagatattatcaacagcacacgctctattctgtaccctacaatatataccattagttggattttgctttcctccccgcgccggcaggccctggcgccagcgtctcccagcgcaactcgctgggagggtagggggtcgccgcttgaagagagaagtgctggagaggcagtaggctggggaggaaagcaaaatccaactaatggtatatattgtagggtacagaatagagcgtgtgctgttgataatatctctcacccggatccctcctcacttgccctgccactttgcatggtttgattttgacctggtcccccacgtgtgaagtgtagtggcatccatttctaatgtatgcattcatccaacagagttatttattggctggagatggaaaatcacaccacctgacaggccttctgggcctccaaagcccatccttggggttccccctccctgtgtgaaatgtattatcaccagcagacactgccgggcctccctcccgggggcactgcctgaaggcgagtgtgggcatagcattagctgcttcctcccctcctggcacccactgtggcctggcatcgcaatcgtggtgtgtcaatgccacaaaatcgtgtg

SEQ ID NO: 22176 - DNA, 547 bp, Homo sapiens
tttgaaaaccgctatgacatgattacgaatttaatacgactcactatagggaatttggccctcgaggccaagaattcggcacgagtttttctctgtagtagctatgatttctggttttctagtgtgatcatctattgagtaagaaagactaatctcatttggttgtttttgtttttgtttttaactgtccctattttaaaatatttagatgctaattcttccttttggcagtttgcacctgagtttcaggtaggagatggaattggaatggatttaaaactatcaaaccatgttttcaatgctttaaaacaacatgcctactcagaagaacgtcgaagtgcccgcctacatgagaaaaaggagcattctacagcagaaaaagcagttgatcgtaagacacgtttgcttatgtataaaatggtccactctggaatgttggagacaatcactggctgtattagtacaggaaaggagtctgttgtctttcatgcatatggagggagcatggaggatgaaaaggaagatagtaaaggtcgacgcggccgcg

SEQ ID NO: 22177 - DNA, 477 bp, Homo sapiens
ggtgttgaaaaccaaaatgacatctttttaaagcttatccataaaaaaaaatagatgtcttttatagtggaaaaacacatggggaaaaaaatcatctattttgatgcagcatttgataatgataaaacacctcacacctcactctttatagtgcacaaaatgaatgaggtctgggctaggtagaaaaagggtcaatgctatttttgtttttagaatcattaccttttaccagcttttaaccatctgatatctatagtagacacactatcatagttaacatagttaagttcagcacttgtctcattttaatgtaaagatttgcttccattttcctacaggcagtctctctcttcctcacagtcccactgtgcaggtgctattgttactcttacgaatattttcagtaatgttattttcttctaagtgaaatttctagcctgcactttgatgtcatgtgttccctttgtctttcaaact

SEQ ID NO: 22178 - DNA, 660 bp, Homo sapiens
cataaaaccctccctaagatgtctggaggttgggagctggaactgaatgggacagaagcgaaattagtgcggaaagttgccggggaaaaaatcacggtcactttcaacattaacaacagcatcccaccaacatttgatggtgaggaggaaccctcgcaagggcagaaggttgaagaacaggagcctgaactgacatcaactcccaatttcgtggttgaagttataaagaatgatgatggcaagaaggcccttgtgttggactgtcattatccagaggatgaggttggacaagaagacgaggctgagagtgacatcttctctatcagggaagttagctttcagtccactggcgagtctgaatggaaggatactaattatacactcaacacagattccttggactgggccttatatgaccacctaatggatttccttgccgaccgaggggtggacaacacttttgcagatgagctggtggagctcagcacagccctggagcaccaggagtacattacttttcttgaagacctcaagagttttgtcaagagccagtagagcagacagatgctgaaagccatagtttcatggcaggctttggccagtgaacaaatcctactctgaagctagacatgtgctttgaaatgattacacctaatacag

SEQ ID NO: 22179 - DNA, 400 bp, Homo sapiens
acaaccccctcttcaactacgaggacatgcaggagatcacccagcactttgccgtctgccacgtggacgcccctggccagcaggacggcgcagcctccttccccgcagggtacatgtacccctccatggatcagctggctgaaatgcttcctggagtccttcaacagtttgggctgaaaagcattattggcatgggaacaggagcaggcgcctacatcctaactcgatttgctctaaacaaccctgagatggtggagggccttgtccttatcaacgtgaacccttgtgcggaaggctggatggactgggccgcctccaagatctcaggatggacccaagctctgccggacatggtggtgtcccacctttttgggaaggaagaaatgcagagtaacgtgga

SEQ ID NO: 22180 - DNA, 631 bp, Homo sapiens
gctctgttcacgtcacgctgtgtgggactcccaagggaaaccggcctgtcatcctcacctaccatgacatcggcatgaaccacaaaacctgctacaaccccctcttcaactacgaggacatgcaggagatcacccagcactttgccgtctgccacgtggacgcccctggccagcaggacggtgcagcctccttccccgcagggtacatgtacccctccatggatcagctggctgaaatgcttcctggagtccttcaacagtttgggctgaaaagcattattggcatgggaacaggagcaggcgcctacatcctaactcgatttgctctaaacaaccctgagatggtggagggccttgtccttatcaacgtgaacccttgtgcggaaggctggatggactgggccgcctccaaggtgaggtgggggcctgtcaggccggcgggatccctgcaagaagagggacagatctcaggatggacccaagctctgccggacatggtggtgtcccacctttttgggaaggaagaaatgcagagtaacgtggaagtggtccacacctaccgccagcacattgtgaatgacatgaaccccggcaacctgcacctgttcatcaatgcctacaacagccggcg

SEQ ID NO: 22181 - DNA, 910 bp, Homo sapiens
ggactgcatagggctcggcgtggtgagacttcaatgcagccttgatctcccaggctcaagtgattctcccacctcagcctcccaagcaactgggaccacaaggtgtgtgccaccatgcctgggtaattttttgtttttttgtggagatgcgggtctcactgttttccaggctggtctcaaattcctgggctcaagtgatcctcccacttcagcctcacattgttgggattacagtcacgagccactgtacccatccatatgtcattctttagacacactacttactaaatttctctttttaaaggatatactgaatttccggttgagccaacttaactgctaattttctattttagctttaaaacattgataagcaacatgaagcaatctagaacttaacctttaaatggctttattaaagcaatccagctatgaaaattatgcagaaatgattatctacaatcttaccagcacataagaaattcttcctctattctgaaataccatcttctcacaatatactttgatgttatgaatcaatgtctgttcttgaacattatttattgtctttctctattaaacaattccaaaataaaatttccagcacaactaaatattgttgatgataagaggatttttaaaaaagttcttttaaaacagaagcttatatacaacttagaatctaaaaccaatagatttatggtaaaccttaaaactgaaccaaaacaaacaaaaaccaaagttttaatcatttaaaaatcatgtttattgaggtacaacttatagtaaaacctgcccttttcagcgtatagcactgagtcttgacaaatgcacagttatgtaccaccaccgaccaaggcctggcacatttttacctcctcaaagttctccctggctgcttctcccactc

SEQ ID NO: 22182 - DNA, 433 bp, Homo sapiens
  misc_feature (1)...(433): n = a,t,c or g
gtctcgaacctctgggctcaagcaattcactcgcctcggcctcccaaaatgctgggattacaggcctgagccactgcgcccagccaggatttgaattattttaactcatccatgggctgccctagaatgtcacaaatgagggttgtttaatgcctttcttatagctgctactggaacactattatgacctaatttatgagccatccttactcatctacaagtgctgaagcaatgttacatacttttttgctaaactcagattttttagcctaatttcttgtcctcctatccacctgcatccacacatggcctgcatggggctgccttccctgcagtgttctgcagccatgcttcagggtatagctgttggtggacaagctcaggtcttggggggcactataagccctaaaccaaggtgtgaaangnttaagaa

SEQ ID NO: 22183 - DNA, 791 bp, Homo sapiens
  misc_feature (1)...(791): n = a,t,c or g
gcggcacgagcggcacgagcggcacgaggtcatcagtgatgtcttcaggttcactgtccccaagctgctcagccttttcctggagtttattggtgatcccaagcctccagcctggaagggctacctcctcgcccgtgctgatgttcctctcggcctgcctgcaaacgctgtttgagcagcagaacatgtacaggctcaaggtgctgtagatgaggctgcggtcggccatcactggcctggtgtacagaaaggcatccacagcatatctgaagaaatattcagaagttaactaatctcagatgatttcagcaggagtaaagaagagaaacagactcagaaatgccattacnacagttaattatgtcaaatttatcaccctgattgatcacgcagcattaacctcaagaacgccaagccaagtttttttgacaaatgtgagccaaggtttccgaaaaactagcagatatgactgtgacttacaaaatggaaaaagtaaacgagaaacacaatttgatatgatttaataaaagatttgtttccaccacttctcctgggaacctcagcacattttctttccactgacagttattatctctacctttattgaacaaagacacccggaacacagctgctgaggatcagtaaagaaaatcattcttttattaataagactgttattagcagggaaaaaaaaatccatgtttggggagtttgcactgaagttacaggccattttgaagaaatatggctgactagtgccaacnttatttcaggcaatttcatgatcaatt

SEQ ID NO: 22184 - DNA, 453 bp, Homo sapiens
gatcaacttgataaataacttataggtgatagtgataattcctgattccaagaatgccatctgataaaaaagaatagaaatggaaagtgggactgagagggagtcagcaggcatgctgcggtggcggtcactccctctgccactatccccagggaaggaaaggctccgccatttgggaaagtggtttctacgtcactggacaccggttctgagcattagtttgagaactcgttcccgaatgtgctttcctccctctcccctgcccacctcaagtttaataaataaggttgtacttttcttactataaaataaatgtctgtaactgctgtgcactgctgtaaacttgttagagaaaaaaataacctgcatgtgggctcctcagttattgagtttttgtgatcctatctcagtctgggggggaacattctcaagaggtgaaatacagaaagcctt

SEQ ID NO: 22185 - DNA, 395 bp, Homo sapiens
gctcttcaataccctgcttattcctgtgactcaagtggtaatcttcctgcagcttggaataaagaaaaagggatgggtaatgtaaaaatctgaatcactatactaattgtgggaaattatcctgcaaattctgccaggtaataaaagtaagtagggtatccataacccgaaggtttctttgtttaggaaaataaaaccaaagcttcatagaccaccaaagggaaattatcttggcaagtaaaattttagatggaaattatctactacaccacacttgtgggaattgctatactcactctactgtttgcaatagggatacacacggtagcaccttctaactgaaatattggacagagtttccattgctgttgtattttgcttaattattatcctta

SEQ ID NO: 22186 - DNA, 578 bp, Homo sapiens
  misc_feature (1)...(578): n = a,t,c or g
gggacttacttattgcttactatgatgtggactatgaaaagaacgctaaaggttccaactactggagaaacagggtaatgatggtggcaaagaaattcctggatgctgggcacaaactcaactttgctgtagctagccgcaaaacctttagccatgaactttctgattttggcttggagagcactgctggagagattcctgttgttgctatcagaactgctaaaggagagaagtttgtcatgcaggaggagttctcgcgtgatgggaaggctctggagaggttcctgcaggattactttgatggcaatctgaagagatacctgaagtctgaacctatcccagagagcaatgatgggcctgtgaaggtagtggtagcagagaattttgatgaaatagtgaataatgaaaataaagatgtgctgattgaattttatgccccttggtgtggtcactgtaagaacctggagcccaagtataaagaacttggcgagaagctcagcaaagacccaaatatcgcatagccaagatggatgccacanccaatgatgtgccttctccatatgaagtcagangttttc

SEQ ID NO: 22187 - DNA, 582 bp, Homo sapiens
  misc_feature (1)...(582): n = a,t,c or g
tttgaacacccttgatttgaaacgaatttaatacgactcactatagggaatttggccctcgaggccaagaattcggcacgagctggtggagaagtgaaggatggaaaggtcatacagaaaaagtttctaaaatgacttcagaatacccagcagcaagactacaagtctacaaaggagcatcaaaattctgagggaaaatgacttccaatctagacttctatgaccaaagtgtacctcctatgtgcttctgtcaaggagcattataccaaaacatggtcgtcaaccaaatgaatacaagcaatgaagaaaaaaagggtttcaacctaagagagaggaaatgtacatcctcattagaggataaagtgagatccaggatgaaaacagttgactatagactagagcaggtcagaagattctgggagagataacctccaaggttcgatcaatcatgacatgtatctgaacttagagatgcatacagctggggaaaagtctgaggttaaataatttaaatacactgaaaataggctgggtgcggtggctnacacctataatcccagcactttnggangcccangcagg

SEQ ID NO: 22188 - DNA, 524 bp, Homo sapiens
cttaggtcactggattcgtttatcaaaattaagccttgtgattatgattcagcccttgcttcatatgtatgacttttatgcaaaaatgtttctatttacaaaggtagaaaaaagttagcagtgcaagatagtggtttaaagtttgttttaaactgtaggagtctaattgtgtaatggaaagaaaacaaaacaagcaccatttcaagaagaaatgaattggatattttggaatttatttataggctaggcaataagttactcagattaacacagatcaataccaccttgacttgttgacccagagaattctaattagattttaggtgcatttttctttatcttggtatttaatacatcatctaagtcagtaaccgtgttaaacaaaattaaaatgacaagttacagcttacttcacagtctatttcaaattcagcttgtccactaggtcagttttacaggagatggtcttttaacatgaagaggtctgataatctggcaggtctcttctctcccaattaaaaaaa

SEQ ID NO: 22189 - DNA, 673 bp, Homo sapiens
cccacgcgtccgggcagtaccggaggagaaagatggcggctaccttactagctgctcggggagccgggccagcaccggcttgggggccggaggcgttcactccagactgggaaagccgagaagtttccactgggaccactatcatggccgtgcagtttgacgggggcgtggttctgggggcggactccagaacaaccactgggtcctacatcgccaatcgagtgactgacaagctgacacctattcacgaccgcattttctgctgtcgctcaggctcagctgctgatacccaggcagtagctgatgctgtcacctaccagctcggtttccacagcattgaactgaatgagcctccactggtccacacagcagccagcctctttaaggagatgtgttaccgataccgggaagacctgatggcgggaatcatcatcgcaggctgggaccctcaagaaggagggcaggtgtactcagtgcctatggggggtatgatggtaaggcagtcctttgccattggaggctccgggagctcctacatctatggctatgttgatgctacctaccgggaaggcatgaccaaggaagagtgtctgcaattcactgccaatgctctcgctttggccatggagcgggatggctccagtggaggagtgatccgcctggcagccattgc

SEQ ID NO: 22190 - DNA, 1154 bp, Homo sapiens
gccccggccttctcgcggccgtgatgcacctccctctgcggtggggtccgggacatggcaggtaatgagccggacgaggggagccaagctggagtttacacaggcaaactgtcagaaaagagtagcctgggctgtctggaaatctgaggtgctggagaatctggtaaaagcaccattgtgaagcagatgaggatcctgcatgttaatgggtttaatggagagggcggcgaagaggacccgcaggctgcaaggagcaacagcgatggtgagaaggcaaccaaagtgcaggacatcaaaaacaacctgaaagaggcgattgaaaccattgtggccgccatgagcaacctggtgccccccgtggagctggccaaccccgagaaccagttcagagtggactacattctgagtgtgatgaacgtgcctgactttgacttccctcccgaattctatgagcatgccaaggctctgtgggaggatgaaggagtgcgtgcctgctacgaacgctccaacgagtaccagctgattgactgtgcccagtacttcctggacaagatcgacgtgatcaagcaggctgactatgtgccgagcgatcaggacctgcttcgctgccgtgtcctgacttctggaatctttgagaccaagttccaggtggacaaagtcaacttccacatgtttgacgtgggtggccagcgcgatgaacgccgcaagtggatccagtgcttcaacgatgtgactgccatcatcttcgtggtggccagcagcagctacaacatggtcatccgggaggacaaccagaccaaccgcctgcaggaggctctgaacctcttcaagagcatctggaacaacagatggctgcgcaccatctctgtgatcctgttcctcaacaagcaagatctgctcgctgagaaagtccttgctgggactactcctgaggatgctactcccgagcccggagaggacccacgcgtgacccgggccaagtacttcattcgagatgagtttctgaggatcagcactgccagtggagatgggcgtcactactgctaccctcatttcacctgcgctgtggacactgagaacatccgcgtgtgttcaacgactgccgtgacatcattcagcgcatgcaccttcgtcagtacgagctgctctaagaa

SEQ ID NO: 22191 - DNA, 663 bp, Homo sapiens
gggaggccttcttccagtgccaagtgtgtgcccacacgacccgggtggagatggaccgcggccgcattgcagagcccagtgtgtgcgggcgctgccacaccacccacagcatggcactcatccacaaccgctccctcttctctgacaagcagatgatcaagcttcaggagtctccggaagacatgcctgcagggcagacaccacacacagttatcctgtttgctcacaatgatctcgttgacaaggtccagcctggggacagagtgaatgttacaggcatctatcgagctgtgcctattcgagtcaatccaagagtgagtaatgtgaagtctgtctacaaaacccacattgatgtcattcattatcggaaaacggatgcaaaacgtctgcatggccttgatgaagaagcagaacagaaacttttttcagagaaacgtgtggaattgcttaaggaactttccaggaaaccagacatttatgagaggcttgcttcagccttggctccaagcatttatgaacatgaagatataaagaagggaattttgcttcagctctttggcgggacaaggaaggattttagtcacactggaaggggcaaatttcgggctgagatcaacatcttgctgtgtggcgaccctggtaccagcaagtcccagctgctgc

SEQ ID NO: 22192 - DNA, 510 bp, Homo sapiens
gggagcaatttcttatcaagtgggttggctgattccattcttctgttaccgactttttgacttcgtcctcagttgcctggttgctattagttctctcacctatttgccaagaatcaaagaatatctggatcaactacctgattttccctacaaagatgacctcctggccttggactccagctgcctcctgttcattgttcttgtgttctttgccttattcatcatttttaaggcttatctaattaactgtgtttggaactgctataaatacatcaacaaccgaaacgtgccggagattgctgtgtaccctgcctttgaagcacctcctcagtacgttttgccaacctatgaaatggccgtgaaaatgcctgaaaaagaaccaccacctccttacttacctgcctgaagaaattctgcctttgacaataaatcctataccagctttttgtttgtttatgttacagaatgctgcaattcagggctcttcaaacttgtttgatataaaatatg

SEQ ID NO: 22193 - DNA, 455 bp, Homo sapiens
gggttttgttccctatttttctctcctgtcctccctcaccccctccttcatatgaaaggtgccatggaagaggctacagggccaaacgctgagccacctgcccttttttctgcctcctttagtaaaactccgagtgaactggtcttcctttttggtttttacttaactgtttcaaagccaagacctcacacacacaaaaaatgcacaaacaatgcaatcaacagaaaagctgtaaatgtgtgtacagttggcatggtagtatacaaaaagattgtagtggatctaatttttaagaaattttgcctttaagttattttacctgtttttgtttcttgttttgaaagatgcgcattctaacctggaggtcaatgttatgtatttatttatttatttatttggttcccttcctattccaagcttccatagctgctgccctagttttctttcctcctttc

SEQ ID NO: 22194 - DNA, 437 bp, Homo sapiens
  misc_feature (1)...(437): n = a,t,c or g
tttganaccntttgactttgaacncctttaatacgactcctatagggaatttggccctcgaggccaagaattcggcacgagaaatggattgcctcaggatcaacaggaagaggagccaattcctgagaccagaatagaagtagaaatacccaaagtaaacactgatttaggaaacgacttatattttgttaaactgcccaactttctcagtgtagagcccagaccttttgatcctcagtattatgaagatgaatttgaagatgaagaaatgctggatgaagaaggtagaaccaggttaaaattaaaggtagaaaatactataagatggaggatacgccgagatgaagaaggaaatgaaattaaagaaagcaatgctcggatagtcaagtggtcagatggaagcatgtccctgcatttaggcaatgaagtgtttgatg

SEQ ID NO: 22195 - DNA, 432 bp, Homo sapiens
ctgctatgacatgattacgaatttaatacgactcactatagggaatttggccctcgaggccaagaattcggcacgagaaagacacagaagattagaatcttgccaatggctggtcgtgatcctgaatgccaacgcacagaaatgattaagaaagaagaagaacgtttgagggcttccatacgtagggaatctcagcagcgccgaatgagagagaaacagcaccagcgggggctgagcgccagttacctggaacctgatcgatacgatgaggaggaggaaggcgaggagtccatcagcttggctgccattaaaaaccgatataaagggggcattcgagaggaacgagccagaatctattcatcagacagtgatgagggatcagaagaagataaagctcaaagattactcaaagcaaagaaacttaccagtgat

SEQ ID NO: 22196 - DNA, 487 bp, Homo sapiens
  misc_feature (1)...(487): n = a,t,c or g
gnnnnnnngnnnnntntttgtnttccctactganaccgttatgacatgattacgaatttaatacgactcactatagggaatttggccctcgaggccaagaattcggcacgagggaggctcagatccatgaaggcttccaggaactcctccgtaccctcaaccagccagacagccagctccagctgaccaccggcaatggcctgttcctcagcgagggcctgaagctagtggataagtttttggaggatgttaaaaagttgtaccactcagaagccttcactgtcaacttcggggacaccgaagaggccaagaaacagatcaacgattacgtggagaagggtactcaagggaaaattgtggatttggtcaaggagcttgacagagacacagtttttgctctggtgaattacatcttctttaaaggcaaatgggagagaccctttgaagtcaaggccccgaggaagaggacttcacgtggaccaggcga

SEQ ID NO: 22197 - DNA, 502 bp, Homo sapiens
  misc_feature (1)...(502): n = a,t,c or g
nttgannccnaacagctatgacatgattacgaatttaatacgactcactatagggaatttggccctcgaggccaagaattcggcacgagcagctgtcctctgaagccctggaggctgcccgaatttgtgccaataagtacatggtaaaaagttgtggcaaagatggcttccatatccgggtgcggctccaccccttccacgtcatccgcatcaacaagatgttgtcctgtgctggggctgacaggctccaaacaggcatgcgaggtgcctttggaaagccccagggcactgtggccagggttcacattggccaagttatcatgtccatccgcaccaagctgcagaacaaggagcatgtgattgaggccctgcgcagggccaagttcaagtttcctggccgcagaagatccacatctcaaagaagtggggcttcaccaagttcaatgctgatgaatttgaagacatggtggctgaaaagcggctcatcccagatgntgngggg

SEQ ID NO: 22198 - DNA, 331 bp, Homo sapiens
  misc_feature (1)...(331): n = a,t,c or g
ggtcaagtggtcagatggaagcatgtccctgcatttaggcaatgaagtgtttgatgtgtacaaagccccactgcagggcgaccacaatcatctttttataagacaaggtactggtctacagggacaagcagtctttaaaacgaaactcaccttcanacctcactctacggacngtgccacacatanaaagatgactctgacncttgcagataggtgntcaatnctcataatattntaatgtttccacntnntgnacntngntcntnattttctntgngntttntgnttttanttaaaanttnntttntnncnanttnnnnnnttntgtttt

SEQ ID NO: 22199 - DNA, 505 bp, Homo sapiens
catctatgacatgattacgaatttaatacgactcactatagggaatttggccctcgaggccaagaattcggcacgaggcgattgcatctgattcagaagcggatagtgacactgaggtgccaaaagataatagtggaaccatggatttatttggaggtgcagatgatatctcttcagggagtgatggagaagacaaaccacctactccaggacagcctgttgatgaaaatggattgcctcaggatcaacaggaagaggagccaattcctgagaccagaatagaagtagaaatacccaaagtaaacactgatttaggaaacgacttatattttgttaaactgcccaactttctcagtgtagagcccagaccttttgatcctcagtattatgaagatgaatttgaagatgaagaaatgctggatgaagaaggtagaaccaggttaaaattaaaggtagaaaatctataagatggaggatccccgagatgaagaagaaatgaaattaa

SEQ ID NO: 22200 - DNA, 471 bp, Homo sapiens
  misc_feature (1)...(471): n = a,t,c or g
ggagtcctttgatcttgnaaaccctttgactgacacgaatttaatacgactcactatagggaatttggccctcgaggccaagaattcggcacgaggtgaggggctgctctggctggaatggagggctggctgccacagtagtggaaatggtaaatgaggcaaataaggttggattggtaggatagcatcaaggttgccagcttattaaatcactcttccaatatgctagcacgggcctattgggaaaagtaatgcatcatgtaatcaaacaaaaggcaaacagaggcaagctccaggaatgggcactgtaaacaggactcaccctagagtggccagatgtagactttagatatgttaatgcaggttgagcatctctaatccgagggggaatgtctcatatggtgtccaagaaatggacacatctcacagagggcctagactcaggagggctacagtatgagacatttccct

SEQ ID NO: 22201 - DNA, 676 bp, Homo sapiens
  misc_feature (1)...(676): n = a,t,c or g
gagcagcagccaggtgtggcagtgacagggaggtgtgaatgaggcaggatgaactggacaggtttgtacaccttgctcagtggcgtgaaccggcattctactgccattggccgagtatggctctcggtcatcttcatcttcagaatcatggtgctggtggtggctgcagagagtgtgtggggtgatgagaaatcttccttcatctgcaacacactccagcctggctgcaacagcgtttgctatgaccaattcttccccatctcccatgtgcggctgtggtccctgcagctcatcctagtttccaccccagctctcctcgtggccatgcacgtggctcaccagcaacacatagagaagaaaatgctacggcttgagggccatgggggaccccctacacctggaggaggtgaagaggcacaaggtccacatctcagggacactgtggtggactatgtcattagcgtgntgttccggctgtttttgangcccgctttntgganngctttantcggntanacctgnctttcnatgggcnggttgtnaagtcaacgttanccttgncaaaanagtggatngttttttccgcccactnnaaacngnttacgtttatgtacttccttgnatctgcatatcctaatgtgccaggggtnanctaatattcggcntgnccccaacc

SEQ ID NO: 22202 - DNA, 666 bp, Homo sapiens
  misc_feature (1)...(666): n = a,t,c or g
gagaattttgagtgaattagacctttatttttctatctggttggatggtggctttaggggaagggggaaaggtgtaggctgggggattgaggtggggaatcattttagctggtgtcagcccctcttcccttcctccattgcacatgaacatatgtccatccatatatattcatcagaatgttaatttattttgctccctctgttaggtccattttctaagggtagaagaggcaagtggtagggatgaggtctgataagaacccagggtggagagggagactcctgggcagccgttttcctcatccttttccctctcccagtccatttccaaatgtggcctccatgtgggtgctagggacatgggaaaaaccactgctatgccatttcttctctctgttcccttcctcacccccgacggtgtggctgatgatgtcttctggtgtcatggtgaccaccccctgttccctgttctggtatttcccctgtcagtttcccctctcggccaggttgtgtcccaaaatcccctcagcctcttctctgcacgttgctgaaggtccaggcttgcctcaagttccatgcttgagcaataaagtgggaacaataaaaaaaaanaaaaaaaaaaagatnttnaattaagcgcccgnaagcttatccctttaggggggg

SEQ ID NO: 22203 - DNA, 450 bp, Homo sapiens
tcagctatgacatgattacgaatttaatacgactcactatagggaatttggccctcgaggccaagaattcggcacgagggagctacaggcgctctacgccctccaggcccttgtagtgaccttagaacagcctcccaacctgctgcggatgttctttgacgcactgtatgacgaggacgtggtgaaggaggatgccttctacagttgggagagtagcaaggaccccgctgagcagcagggcaagggtgtggcccttaaatctgtcacagccttcttcaagtggctccgtgaagcagaggaggagtctgaccacaactgagggctggtggggccggggacctggagccccatggacacacagatggcccggctagccgcctggactgcaggggggcggcagcagcggcggtggcagtgggtgcctgtagtgtgatgtgtctgaactaataa

SEQ ID NO: 22204 - DNA, 246 bp, Homo sapiens
cctgtgttccctccccgatcatctttcctgttccagagaagtgggctggatgtctccatctctgtctcaactttacgtgtactgagctgcaacttcttacttccctactgaaaataagaatctgaatataaatttgttttctcaaatatttgctatgagaggttgatggattaattaaataagtcaattcctggaagttgagagagcaaataaagacctgagaaccttccagaaaaaaaaaaaaaa

SEQ ID NO: 22205 - DNA, 828 bp, Homo sapiens
ccccaacagctatgacatgattacgaatttaatacgactcactatagggaatttggccctcgaggccaagaattcggcacgagcactgaagatcctggtgtcgccatgggccgccgcccccgcccgttgttaccggtattgtaagaacaagccgtacccaaagtctcgcttctgccgaggtgtccctgatgccaagattcgcatttttgacctggggcggaaaaaggcaaaagtggatgagtttccgctttgtggccacatggtgtcagatgaatatgagcagctgtcctctgaagccctggaggctgcccgaatttgtgccaataagtacatggtaaaaagttgtggcaaagatggcttccatatccgggtgcggctccaccccttccacgtcatccgcatcaacaagatgttgtcctgtgctggggctgacaggctccaaacaggcatgcgaggtgcctttggaaagccccagggcactgtggccagggttcacattggccaagttatcatgtccatccgcaccaagctgcagaacaaggagcatgtgattgaggccctgcgcagggccaagttcaagtttcctggccgccagaagatccacatctcaaagaagtggggcttcaccaagttcaatgctgatgaatttgaagacatggtggctgaaaagcggctcatcccagatggctgtggggtcaagtacatccccagtcgtggccctctggacaagtggccgggccctgccactcatgagggcttccaatgtgctgcccccctcttaatactccccaataaaattcttacttccctgtccaaaaaaaaaaaaaa

SEQ ID NO: 22206 - DNA, 389 bp, Homo sapiens
gctcgtgccgccgccgcgccgccatcatggacaccagccgtgtgcagcctatcaagctggccagggtcaccaaggtcctgggcaggaccggttctcagggacagtgcacgcaggtgcgcgtggaattcatggacgacacgagccgatccatcatccgcaatgtaaaaggccccgtgcgcgagggcgacgtgctcacccttttggagtcagagcgagaagcccggaggttgcgctgagcttggctgctcgctgggtcttggatgtcgggttcgaccacttggccgatgggaatggtctgtcacaatctgctccttttttttgtccgccacacgtaactgagatgctcctttaaataaagcgtttgtgtttcaagttaaaaaaaaaaaaaa

SEQ ID NO: 22207 - DNA, 446 bp, Homo sapiens
ggaaggcgccaccatggcggcgcccccgcagcccgtcacccacctcatctttgacatggacggacttcttctggatactgaacggctgtattcagtggtgtttcaagaaatatgtaatcgctatgacaagaaatacagctgggatgtaaagtccctggttatgggtaagaaggcattagaggcggcacagattataatagacgtcttgcagctcccgatgtccaaagaggagctggtggaagaaagccaaacgaagttaaaggaagtgttccccacggctgcgctcatgccaggggcggagaaactcatcatccacctgcggaaacatggcatcccctttgcactagccaccagctcggggtccgcgtcgttcgatatgaagacaagccgccacaaggagttcttcagcttgttttcccacattgtgctgggagatgaccccgaag

SEQ ID NO: 22208 - DNA, 650 bp, Homo sapiens
tacgattcatagatctggaattcgcggccgcgtcgacgggggcatccatatagtcactccaggtttatggagggttcttctactattaggacttttcgcttcgaagcgaaggcttctcaaatcatgaaaattattaatattactgctgttagagaaatgaatgagcctacagatgataggatgtttcatgtggtgtatgcatcggggtagtccgagtaacgtcggggcattcctgaagctgacagcattcgggccgagatgtctcgctccgtggccttagctgtgctcgcgctactctctctttctggcctggaggctatccagcgtactccaaagattcaggtttactcacgtcatccagcagagaatggaaagtcaaatttcctgaattgctatgtgtctgggtttcatccatccgacattgaagttgacttactgaagaatggagagagaattgaaaaagtggagcattcagacttgtctttcagcaaggactggtctttctatctcttgtactacactgaattcacccccactgaaaaagatgagtatgcctgccgtgtgaaccatgtgactttgtcacagcccaagatagttaagtgggatcgagacatgtaagcagcatcatggaggtttgaagatgccgcatt

SEQ ID NO: 22209 - DNA, 456 bp, Homo sapiens
gctttgacatgattacgaatttaatacgactcactatagggaatttggccctcgaggccaagaattcggcacgagctggaatgatttgctcttacctatctatcctagactgtgagctccttgaaggcacagtcctggcctagagtaggcatgccataaatgattagaaagtagagggaagtggcagggcagccaagacagttttagagacttttaagtagttcaaacaaacaagccagcacatgttggaggtggagggatggttggcgatggagcagagagggttatttattagggtattatcatcaggctcggcctgaaaagtacataccgaaataaaaaggaaccaagaagacactcaagggtttttgagcagaggactgaaaaagagagacatgtcagagagaagaccccttcccctagcacacttccacacggaaggagtcctggcttttc

SEQ ID NO: 22210 - DNA, 588 bp, Homo sapiens
  misc_feature (1)...(588): n = a,t,c or g
ggttttctgatcatagcacaaagtataacaggcaaaatcaaagtagagagagccttgaacaagcccagtcccgagcaagctgggcgtcttccacaggttactggggagaagactcagaaggtgacacaggcacaataaagcggaggggtggaaaggatgtttccattgaagccgaaagcagtagcctaacgtctgtgactacggaagaaaccaagcctgtccccatgcctgcccacatagctgtggcatcaagtactacaaaggggctcattgcacgaaaggagggcaggtatcgagagcccccgcccacccctcccggctacattggaattcccattactgactttccagaagggcactcccatccagccaggaaaccgccggactacaacgtggcccttcagagatcgcggatggtcgcacgatcctccgacacagctgggccttcatccgtacagcagccacatgggcatcccaccagcagcaggcctgtgaacaaacctcagtggcataaaccgaacgagtctgacccgcgcctcgtcccttatcagtcccaagggttttccaccgaggaggangaanatgaat

SEQ ID NO: 22211 - DNA, 389 bp, Homo sapiens
tttatgtcttttgccattttcaaattttttcatgtccatttaggggaatgactctgactttgagacggtgtaccagcagtgtgtcaggtgctgcagagcgttcttggagaaggcccactgaggcaggttcgtgccctgctgcggccagcctgactagaccccaccctgaggtcctgcatttctcagtcggtgtgtaatcacgttccagggcccaaagcccagctctttgttcagttgacttactgtttcttaccttaaaaagtaattgtagatggaaatcagttgtgtttggcaggagaatcaataaaaatctttgattcagacagcttatggggtattttaagcattcttagactaattgaacatcttacttttgcccaagttccaaa

SEQ ID NO: 22212 - DNA, 916 bp, Homo sapiens
tgattattttgtttataatttaataatatatcttatgagccctatatattcaaaatattatgttaacatgtaatccatgtttctttttcaaatctaaagttaaaaaaaaatagcagaagccagtgtcttaaagtctatcttttgtttctaagaccatgggatttcataatctcaagataaaatatgtatgaagtaattaatgtagaatttttacaccaaataataaataatgcttaataaactagagatatgagatgtgtaggaaatttggttaaacttttttcagatactttctggcccaaataataatttgttagcaaataatatgacccttgaactcaatggccatctattaaaagactgttgttcacactggaaaacatttaaagatgtgactatatccatgggtggattgaatcactcaaaatatattagtatccttctttagggatggttggttacagacatgtatttattcaggaggcagaaaatattccattttaattgcttattaaagaaaacattaaattctaaattattttgaggactgtgaagacttttcattagtgtaatattaggtcattgtcaatctcccagaatgtagttctatattctctaaatatgaaagtatccagaaaggccagtggtagtaaaaagcttagtgtatataatctcaaaagggatggaatatttacagctcatatttataacatgttgaatcttctcagttatcagtagtcatcagaagtgtcaatagctttctaaataaatattaaatatctactgtcctgtagtgaaggagtaatttttagtaattttctctttacaaagtctccagtgtttccaggtaaatatttgtgaaacaaaatacagcaaactacattgttacttcagtgtattgttgccaaaaatgaca

SEQ ID NO: 22213 - DNA, 556 bp, Homo sapiens
  misc_feature (1)...(556): n = a,t,c or g
ctgggttaggtgccgctgttgctgctcgtgttgaatctagaaccgtagccagacatgggactggaggacgagcaaaagatgcttaccgaatccggagatcctgaggaggaggaagaggaagaggaggaattagtgataggactgaggctttcagtgcatactggcaaccttggaaggcaggaatgtgaaacttttccctactacttagcatcagaattgaatgggagaccgcattctgccatttctggcggcagtgtggctctgccagctggccttctgcacggatcccctaacaacagtgagagagcaatgcgagcagttggagaaatgtgtaaaggcccgggagcggctagagctctgtgatgagcgtgtatcctctcgatcacatacagaagaggattgcacggaggagctctttgacttcttgcatgcgagggaccattgcgtggcccacaaactctttaacaacttgaaataaatgtgtggacttaattcaccccagtcttcatcatctgggcatcagaatatttccttatggntttggatgtaccatttg

SEQ ID NO: 22214 - DNA, 435 bp, Homo sapiens
gaacgaccaagagggtgttcgactgctagagccgagcgaagcgatgcctaaatcaaaggaacttgtttcttcaagctcttctggcagtgattctgacagtgaggttgacaaaaagttaaagaggaaaaagcaagttgctccagaaaaacctgtaaagaaacaaaagacaggtgagacttcgagagccctgtcatcttctaaacagagcagcagcagcagagatgataacatgtttcagattgggaaaatgaggtacgttagtgttcgcgattttaaaggcaaagtgctaattgatattagagaatattggatggatcctgaaggtgaaatgaaaccaggaagaaaaggtatttctttaaatccagaacaatggagccagctgaaggaacagatttctgacattgatgatgcagtaagaaaactgtaaaattcgag

SEQ ID NO: 22215 - DNA, 879 bp, Homo sapiens
cccttctatgactgattacgaatttaatacgactcactatagggaatttggccctcgaggccaagaattcggcacgaggcgctggtgaacaggacccgtcgccatgggccgtgtgatccgtggacagaggaagggcgccgggtctgtgttccgcgcgcacgtgaagcaccgtaaaggcgctgcgcgcctgcgcgccgtggatttcgctgagcggcacggctacatcaagggcatcgtcaaggacatcatccacgacccgggccgcggcgcgcccctcgccaaggtggtcttccgggatccgtatcggtttaagaagcggacggagctgttcattgccgccgagggcattcacacgggccagtttgtgtattgcggcaagaaggcccagctcaacattggcaatgtgctccctgtgggcaccatgcctgagggtacaatcgtgtgctgcctggaggagaagcctggagaccgtggcaagctggcccgggcatcagcgtgtgaagctgccctccggctccaaaaaaggttatctcctcagccaacagagctgtggttggtgtggtggctggaggtggccgaattgacaaacccatcttgaaggctggccgggcgtaccacaaatataaggcaaagaggaactgctggccacgagtacggggtgtggccatgaatcctgtggagcatccttttggaggtggcaaccaccagcacatcggcaagccctccaccatccgcagagatgcccctgctggccgcaaagtgggtctcattgctgcccgccggactggacgtctccggggaaccaagactgtgcaggagaaagagaactagtgctgagggcctcaataaagtttgtgtttatgccaaaaaaaaaaaaaa

SEQ ID NO: 22216 - DNA, 605 bp, Homo sapiens
ggatgaatgctgtctttgtaaagggcattttagattatctggataacatatcccctcagcaaatacgaaaactcttctatgttctcagcacactggcatttagcaaacagagtgaagccagcagccacatccaggatgacatgcacttggtgataagaaagcagctctctagcaccgtattcaagtacaagctcattgggattattggtgctgtgaccatggctggcatcatggcggcagacagaagtgaatcacctagtttgacccaagagagagccaacctgagcgatgagcagtgcacacaggtgacctccttgttgcagttggttcattcctgcagtgagcagtctcctcaggcctctgcactttactatgatgaatttgccaacctgatccaacatgaaaagctggatccaaaagccctggaatgggttgggcataccatctgtaatgatttccaggatgccttcgtagtggactcctgtgttgttccggaaggtgactttccatttcctgtgaaagcactgtacggactggaagaatacgacactcaggatgggattgccataaacctcctgccgctgctgttttctcaggactttgcg

SEQ ID NO: 22217 - DNA, 415 bp, Homo sapiens
ggagctgcagatgttactagaggaggagatcccgtctggcaagagggcgctgatcgagagttaccagaacctgactcgggtggcagactactgtgaaaacaactacatacaggctacagacaagagaaaagctttagaggagaccaaagcctatacaacccaatctctagctagtgttgcttatcaaataaatgcattggccaacaatgtactccagttgctggatatccaagcctctcagcttcggagaatggagtcttccatcaatcatatctcacagactgtggatattcataaggagaaagtggcacgaagagagattggtattttgacaacaaataagaatacatcaagaactcacaaaataatagcacctgcgaatatggagccgccctgtaaggtatattcggaaacc

SEQ ID NO: 22218 - DNA, 989 bp, Homo sapiens
  misc_feature (1)...(989): n = a,t,c or g
aggccaagaattcggcacgagccacgtctctcggtttcttcttagatcactcctctgccaaagatcccaacaagacaacatggctcccaagaagcctgagcctaagaaggaggcagccaagccagctccagctccagctccagcccctgcaccagcccctgccccagctcctgaggctcccaaggaacctgcctttgaccccaagagtgtaaagatagacttcactgccgaccagattgaagagttcaaagaggccttttcattgtttgaccggaccccgactggagagatgaagatcacctacggccagtgcggggatgtactgcgggccctgggccagaaccctaccaatgccgaggtgctgcgtgtgctgggcaagcccaagcctgaagagatgaatgtcaagatgctggactttgagacgttcttgcccatcctgcagcacatttcccgcaacaaggagcagggcacctatgaggacttcgtggagggcctgcgtgtctttgacaaggaaggaaatggcaccgtcatgggtgctgaaatccggcatgttcttgtcacactgggtgagaagatgacagaggaagaagtagagatgctggtggcagggcatgaggacagcaatggttgtatcaactatgaagcgtttgtgaggcatatcctgtcggggtgacgggcccatggggcggagctcgtccgcatggtgctgaatggctgaggaccttcccagtctccccagagtccgtgcctttccctgtgtgaattttgtatctagcctaaagtttccctaggctttcttgtctcagcaactttcccatccttgtctctcttggatgaagttttgccgtcagcattcaccaaataaacttgctcccctgggaaaaaaaannnnnnncnncnnnnngnngnngnnnnnnnnnnnncngnnnnngnnaaaaaancntnttttttaccggngcnganttttcccctttggggggggttttttt

SEQ ID NO: 22219 - DNA, 623 bp, Homo sapiens
cgaaattttattctggatcagacaaatgtgtctgctgctgcccagaggagaaaaatgtgcctgtttgcaggcttccagcgaaaagctgttgtagtttgcccaaaagatgaagactataagcaaagaacacagaagaaagcagaagtagaggggaaagacctaccagaacatgcggtcctcaaaatgaaaggaaactttaccctcccagaggtagctgagtgctttgatgaaataacctatgttgaacttcagaaggaagaagcccaaaaactcttggagcaatataaggaagaaagcaaaaaggctcttccaccagaaaagaaacagaacactggctcaaagaaaagcaataaaaataagagtggcaagaaccagtttaacagaggtggtggccatagaggacgtggaggattcaatatgcgtggtggaaatttcagaggaggagcccctgggaatcgtggcggatataataggaggggcaacatgccacagagaggtggtggcggtggaggaagtggtggaatcggctatccataccctcgtgcccctgtttttcctggccgtggtagttactcaaacagagggaactacaacagaggtggaatgcccaacagagggaacta

SEQ ID NO: 22220 - DNA, 507 bp, Homo sapiens
ggcatgctaaagacagccagcgctacaaagttgactacgagtctcagagcacagatacccagaacttctcctccgagtccaagcgggagacagaatatggtccctgccgtagagaaatggaagacacactgaatcacctgaagttcctcaatgtgctgagtcccaggggtgtacacattcccaactgtgacaagaagggattttataagaaaaagcagtgtcgcccttccaaaggcaggaagcggggcttctgctggtgtgtggataagtatgggcagcctctcccaggctacaccaccaaggggaaggaggacgtgcactgctacagcatgcagagcaagtagacgcctgccgcaaggttaatgtggagctcaaatatgccttattttgcacaaaagactgccaaggacatgaccagcagctggctacagcctcgatttatatttctgtttgtggtgaactgattttttttaaaccaaagtttagaaagaggtttttgaaatgcct

SEQ ID NO: 22221 - DNA, 538 bp, Homo sapiens
  misc_feature (1)...(538): n = a,t,c or g
tgagggtgntggctcagcacggttcccagatgaaggtctgtcatntaaaggagagaggcaggctcagctcctgaaggtcgcagagcctcagtagtcctcctgagtgtgtctagctgactgttatcgagggacacgtaaaagcagcatcacaaaactggactgcagccatcaccacggcaccaagtctatgcttgggctcttccctgctctgctcttggagtcatgaccaacactctaaaagccaacaaagtcccttcaacatgagtaaaggaaacagtttcaagcactgacagtttttacgagtgactattcaaagaatgcacaggagccagagagccagactccacagagaggccaaaggctctgaacacacgagtcaatgttcatggaggtatagacaaaggattctacctcacagagtttgaagacaacctgccctttcacccacaactactgctttctatgtcaaccctataaagatcaggtctgcgccctgccacgagcctacttctgaagccatctggaaaaatgaaagccg

SEQ ID NO: 22222 - DNA, 711 bp, Homo sapiens
gggcacgagacaagatattcgaaaaataggaggactactcaaaaccatacctctcacttcaacctccctcaccattggcagcttcccaagtattcgatttcattcatgtgattaaaacaagttgccatatttcaaagccttgaactaagactcaattaccaacccgcagttttgtgtcagtgcccaaaggaggtaggttgatggtgcttaacaaacatgaagtatggtgtaataggaataatatttatccaaaagatttttaaaaatagggctgtgtttaaaaaaaaaaacaaaacaagaaaagcagcagtgattatagagaggtcacactctaagtggggtcgcggcgtggccacgcttcacggtcacgctcgtccgtcctgcagtggcgtgtttacatggtcacacgtgtgtgtatcaccagtgggtcaactgcttgtcattcctcccgtggcagtttgtgtagacaatcttactgagcaaaaggcaatgaaaagtcttggttcccacactgcgatatattggaattttcacctcagtttatgaagtttatttcgaaatccatagtcatctaagaatgaatacctgtctgccatgtatttcaatcttagtgagccaaaattgtttgtttgttactacagaatagagatgactgttttttgccacagccctatggaatttgcaatctgtgattgccttgtaaaaaggaga

SEQ ID NO: 22223 - DNA, 697 bp, Homo sapiens
  misc_feature (1)...(697): n = a,t,c or g
tttcatacatttttgtaagttatgtttccatgtctcgtgtgtgatgttgtgtactgttgacatgaaatactccttttttggtaaagatggattggcttaacagattagagctacagaaagtatgacttagcacgctggtaaggccacaaaaacccaagcaagttcccccagtttcgtatcctgtaaatagagataagttagtttttctgtttcagagagtggttatggaaaactactaggctttaaaatgattgttaatctcagtgtggggacatttggtttggggacatcagttcaggagtaaatgtatctgatcctgctttgaataaatgcaacttgaaagccttggaattttaccagatcgaatctgggccaaatagaaagcattttaagaaagaaagatggatcaacctagtggaagaagtttcatgcaagtattatgtgaaaaatatagtcctgaaaattttccttatcgccgtggcccggggatgggagtccatgtcccagccacacctcagggctctcctatgaaagatcgcctcaacctcccaagtgtactagtgttgaacagctgtggaataacctgtgcaggagatgaaaaagaaattgctgctttctgcgctcatgtgtcggaactagatctttctgacaacaaactcgaagactggcatgaggcacttcangtggcaagacagct

SEQ ID NO: 22224 - DNA, 519 bp, Homo sapiens
  misc_feature (1)...(519): n = a,t,c or g
tnnnnnnnnnnnntgannccctaatgctatgacatgattacgaatttaatacgactcactatagggaatttggccctcgaggccaagaattcggcacgagccaaagtgcacagctgcaagccgagctgcggagcctgaaggaagctttcagcaacttctcctcgagcaccctgacggaggtccaggcaatcagcacccacggaggcagcgtgggtgacaagatcacatccctaggagccaagctggagaaacagcagcaggacctgaaagcagatcacgatgccctgctcttccatctgaagcacttccccgtggacctgcgcttcgtggcctgccagatggagctcctccacagcaacggctcccaaaggacctgctgccccgtcaactgggtggagcaccaaggcagctgctactggttctctcactccgggaaggcctggctgaggcggagaatactgccagctggagaacgcacacctngnggncatcaactcctgggaggagcagaaattcttg

SEQ ID NO: 22225 - DNA, 827 bp, Homo sapiens
  misc_feature (1)...(827): n = a,t,c or g
gcaccacagtctccaacctataccccaagctcacccagctacagccccagctcgcccaggtacagcccaacctcacccaagtacaccccaaccagtccttcttacagtcccagctccccagagtataccccaacctctcccaagtactcacctaccagtcccaaatattcacccacctctcccaagtactcgcctaccagtcccacctattcacccaccaccccaaaatactccccaacatctcctacttattccccaacctctccagtctacaccccaacctctcccaagtactcacctactagccccacttactcgcccacttcccccaagtactcgcccaccagccccacctactcgcccacctcccccaaaggctcaacctactctcccacttcccctggttactcgcccaccagccccacctacagtctcacaagcccggctatcagcccggatgacagtgacgaggagaactgagggcacgtggggtgcggcagcgggctagggcccagggcagcttgcccgtgctgctgtgcagttcttgcctccctcacggggcgtcacccccagcccagctccgttgtacataaatgccttgtggcagagctcccggtgaacttctggatcccgtttctgatgcagactcttgtcttgttctccacttgtgctgttagaactcactggcccagtggtgttctcactcctaccccacccaccccctgcctgtccccaaattgaagatccttccttgcctgtggcttgatgcggggcgggtaaagggtaatttaaacttnnggggaantccnngctngnnaggggttaca

SEQ ID NO: 22226 - DNA, 468 bp, Homo sapiens
gaccgattaactaatcggaacatgtaaaacagttacaaaaataaacgaactctcctcttgtcctacaatgaaagccctcatgtgcagtagagatgcagtttcatcaaagaacaaacatccttgcaaatgggtgtgacgcggttccagatgtggatttggcaaaacctcatttaagtaaaaggttagccagagcaaagtgcggtgctttagctgctgcttgtgccgctgtggcgtcggggaggctcctgcctgagcttccttccccagctttgctgcctgagaggaaccagagcagacgcacaggctggaaaaggcgcatctaacgcgtatctaggctttggtaactgcggacaagttgcttttacctgatttgatgatacatttcattaaggttccagttataaatattttgttaatatttattaagtgactatagaatgcaactccatttaccaagtaacttatttt

SEQ ID NO: 22227 - DNA, 608 bp, Homo sapiens
gctcttagatcagcatgaccagcgaggattaggaggaattcttttacaagacatagaagaagcactgcccaattcccagaaagctgacaaggctttgggggaccagatactattagaaaatcgtcccgataagaagaaaatacttttcttcaatgataagagctgtcagttttctgtggatgaagaatttcagaaactgtggaggagtgtcactgtagattccatggacgaggagaaaattgaagaataattaaagcgacagggtatttcttccatgcaggaatctggaccaaagaaagtggcccctattcagagaaggaaaaagcctgcttcacagaaaaagcgacgctttaagactcataacgaacacttggctggagtgctgaaggattactctgacattacttccagcaaatagggaacagttttgccctggaacagagttacagatacacaatcaagagtgttcttgctgatgctcggggtctgaagactgtcttcctatctgcttcttgcggctgaggagaggagcagttcagtttacaaaacaagtgcaaattaccaaactcaaagcttatttgagtagaatgggctcatgggcaatgtga

SEQ ID NO: 22228 - DNA, 763 bp, Homo sapiens
cggacgcgtgggttcgctgctgggcagttggctggaggggctgctgctgggaacacctggagtctccgcgggcagatctcatattttggattctggatatattataatgagtgacactttgacagcggatgtcattggtcgaagagttgaagttaatggagaacatgcaacagtacgttttgctggtgttgtccctcccgtggcaggaccctggttaggagtagaatgggacaatcccgagagaggaaagcatgatgggagccacgaagggactgtgtattttaaatgcaggcacccgacaggaggatcctttattcgtccgaacaaggtaaattttggaacagactttcttactgcaattaagaaccgctatgtgttagaagatggaccagaggaagatagaaaagagcaaattgttacaattggaaataaacctgtggagactatcggttttgactctattatgaaacagcaaagtcagctgagcaagttgcaagaagtttctctgaggaactgtgcagtaagttgtgctggtgaaaaaggaggagttgctgaagcatgtcctaatatcagaaaggtagatttgtcaaaaaacctgttgtcatcatgggatgaagtgatacacattgctgatcagctcagacacctggaagtccttaatgtcagtgaaaataaactaaaatttccctccggttcagtattaactggaacgctttctgtactgaaggttttaagtcctcaatcaaacaggaataacgtgggg

SEQ ID NO: 22229 - DNA, 410 bp, Homo sapiens
ggagctacccccaccaattgcctttgatgttgaagcccccacgacgttaccgccctgcaagggaagctattttggaacagaaaacttgaagagtctggtcttgcacttcctgcaacagtactatgcaatttacgactctggagaccgacaagggctcctggatgcctaccatgatggggcctgctgttccctgagcattcctttcattcctcagaaccctgcccgaagcagcttagccgagtatttcaaggatagcagaaatgtgaagaagcttaaagaccctaccttgcggttccggctgctgaagcacacgcgtctcaacgttgttgccttcctcaatgagttgcccaaaacccagcacgacgtcaattccttcgtggtagacataagcgcccagacaagcacattgg

SEQ ID NO: 22230 - DNA, 1043 bp, Homo sapiens
  misc_feature (1)...(1043): n = a,t,c or g
gggcaataaacagcaccagttaggggtctggccccttctgcctggttcatttaaaactcttgaaatgaaggcatcaaaacctggctggtggctcctaaacacagaggttggagaaaaccagagagcagggatgcaaacgccatttcttatcatggacagagactgtaggatgccaatgggactaagcactggtatcatatctgattcacagatcaaggcttcagagtttctgggttactgggagcccagattagcaagattaaacaatggtggatcttataatgcttggagtgtagaaaaacttgcagcagaatttgcctctaaaccttggatccaggtggacatgcaaaaggaagtcataatcacagggatccagacccaaggtgccaaacactacctgaagtcctgctataccacagagttctatgtagcttacagttccaaccagatcaactggcagatcttcaaagggaacagcacaaggaatgtgatgtattttaatggcaattcagatgcctctacaataaaagagaatcagtttgacccacctattgtggctaagatatattaggatctctccaactcgagcctataacagacctacccttcgattggaactgcaaggttgtgaggtaaatggatgttccacacccctgggtatggaaaatggaaagatagaaaacaagcaatcacagcttcttcgtttaagaaatcttggtggggagattactgggaacccttccgtgcccgtctgaatgcccagggacgtgtgaatgcctggcaagccaaggcaancaacantaagcagtggcnacaaattgatctactcaagatcaanaagataacggcaattntaacacagggctgcaagtctctgtcctctgaaatgtatgtanagagctataccatccactacagtgagcanggagtggaanggaaaccatncaagctnaaatcctccatggtggacangatttttgaaggaaatactnataccaanggacatgttaagaacttttaaacccccaatcatttcaggttaa

SEQ ID NO: 22231 - DNA, 1463 bp, Homo sapiens
  misc_feature (1)...(1463): n = a,t,c or g
aacagctatgacatgattacgaatttaatacgactcactatagggaatttggccctcgaggccaagaattcggcacgagccgctctccacacctttcacagatcctacccaggccaccaccccgaacccctccgaccctgcgttccatcccaccatcaacctccacgtgaatctgcacctctgccccagccccagccctcagagcaacctcagcccagcccagcccagctccagctccagctccagcccgggccccatcatggccaaggactttcaagatatccagcagctgagctcggaggaaaatgaccatcctttccatcaaggtgaggggccaggcactcgcaggctgaatcccaggagaggaaatccatttttgaaagggccacctcctgcccagcccctggcacagcgtctctgctccatggtctgcttcagtctgcttgccctgagcttcaacatcctgctgctggtggtcatctgtgtgactgggtcccaaagtgcacagctgcaagccgagctgcggagcctgaaggaagctttcagcaacttctcctcgagcaccctgacggaggtccaggcaatcagcacccacggaggcagcgtgggtgacaagatcacatccctaggagccaagctggagaaacagcagcaggacctgaaagcagatcacgatgccctgctcttccatctgaagcacttccccgtggacctgcgcttcgtggcctgccagatggagctcctccacagcaacggctcccaaaggacctgctgccccgtcaactgggtggagcaccaaggcagctgctactggttctctcactccgggaaggcctgggctgacgccgacaactactgccggctggaggacgcgcacctggtggtggtcacgtcctgggaggagcagaaattcattgtacaacacacgaaccccttcaatacctggataggtctcacggacagtgatggctcttggaaatgggtggatggcacagactataggcacaactacaagtaagtggcctcttccctcatctccttgttagatttctctggggacagccccctggcctttcactccaagctaccctgactcgtccctcagggaccaaattccccaatcctctcctccccagactccaacccctccaaagctgtgctcttctgggctgggggtgagggttgctgggactgggcataggaaacatctttctctgcggttgggttctccccagactgggtagcagggcacaccccaagctccactctcggccttcaaggaaaatggtcatgaanangaggaggatgggtaagtcgctttctcaacaccgtggaaagtccgagttttctcttgcctccttaggaacgggctgtcactcagcagataattggcacnggcacaactgggtggaagtnaanactgtgttgaatccacccggtgggcgctggacnatgactttgcc

SEQ ID NO: 22232 - DNA, 380 bp, Homo sapiens
gtataaatatagatataattttattttcggagctaagatggtgttatttaagggtggtgatgggtgagcgctctggcccaggctgggccagactcccgcccaagcatgaacaggacttgaccatctttccaacccctggggaagacatttgcaactgacttggggaggacacagcttcagcacagcctctcctgcgggccagcccgctgcgaaccctccaccagctaccggagggaggagggaggatgcgctgtggggttgtttttgccataagcgaactttgtgcctgtcctagaagtgaaaattgttcagtccaagaaactgatgttatttgatttatttaaaggctaaaatttggttttttattctttgcacaattg

SEQ ID NO: 22233 - DNA, 466 bp, Homo sapiens
ggggatggagaaaggttgtggtgagccaccgcacccagccaagattagtcatttctaaagataattctgatcggacagaacgtgagcggtaacacctcataaattcagaacaccctgcacttgtgggatggattgtgcttccttacttcagtggaaaagtggttcgtttcggctgggcgtggtggctcacacctgtaatcccagcactttgggaggccgaggtgggtggatcacctgaggtcaggagcttgagatcagcctggccactatggtgaaaacctgtctctactaaaaatacaaaaattatccgggcatggtggcacatgcctgtaatctcagctactcaggaggctgaggcaagagaatcgcttgaacccgggaggcagaggttgcggtgagccaggatcacaccactgcactccagcctggatgacagagcaagactccatctcaaaaaaaaaaaaaa

SEQ ID NO: 22234 - DNA, 776 bp, Homo sapiens
  misc_feature (1)...(776): n = a,t,c or g
ggacgtgcggaggctctcactttccgtcatggcgctgaaggtagcgaccgtcgccggcagcgccgcgaaggcggtgctcgggccagcccttctctgccgtccctgggaggttctaggcgcccacgaggtcccctcgaggaacatcttttcagaacaaacaattcctccgtccgctaagtatggcgggcggcacacggtgaccatgatcccaggggatggcatcgggccagagctcatgctgcatgtcaagtccgtcttcaggcacgcatgtgtaccagtggactttgaagaggtgcacgtgagttccaatgctgatgaagaggacattcgcaatgccatcatggccatccgccggaaccgcgtggccctgaagggcaacatcgaaaccaaccataacctgccaccgtcgcacaaatctcgaaacaacatccttcgcaccagcctggacctctatgccaacgtcatccactggaagagccttccaggcgtggtgacccggcacaaggacatagacatcctcattgtccgggagaacacagagggcgagtacagcaagcctggagcatgagagtgtggcgggagtggtggagagcctgaagatcatcaccaaggccaagtccctgcgcattgccgagtatgccttcaagctggcgcaagagatcgggcgcaagaaagtgacggccgtgacaaaggcaacatcatgaaactgggccatnggctttcctccattgctgaaggaagttgancccgtaccncaagtcaacttccagaaatgt

SEQ ID NO: 22235 - DNA, 922 bp, Homo sapiens
  misc_feature (1)...(922): n = a,t,c or g
gatacccttcgacatgactacgaatttaatacgactcactatagggaatttggccctcgaggccaagaattcggcacgagccgggtgtcatccgcggggaaagaacttggtcctgatgtctgaccatggagatgtgagcctcccgcccgaagaccgggtgagggctctctcccagctgggtagtgcggtagaggtgaatgaagacattccaccccgtcggtacttccgctctggagttgagattatccgaatggcatccatttactctgaggaaggcaacattgaacatgccttcatcctctataacaagtatatcacgctctttattgagaaactaccaaaacatcgagattacaaatctgctgtcattcctgaaaagaaagacacagtaaagaaattaaaggagattgcatttcccaaagcagaagagctgaaggcagagctgttaaaacgatataccaaagaatatacagaatataatgaagaaaagaagaaggaagcagaggaattggcccggaacatggccatccagcaagagctggaaaaggaaaaacagagggtagcacaacagaagcagcagcaattggaacaggaacagttccatgccttcgaggagatgatccggaaccaggagctagaaaaagagcgactgaaaattgtacaggagtttgggaaggtagaccctggcctaggtggcccgctagtgcctgacttggagaagccctccttagatgtgttccccaccttaacagtctcatccatacagccttcagactgtcacacaactgtaaggccagctaagccacctgtggtggacaggtccttgaaacctggagcactgagcaactcagaaagtattcccacaatcgatggattgcgccatgtggtggtgcctgggccggntgtgcccacaagtttcttc

SEQ ID NO: 22236 - DNA, 487 bp, Homo sapiens
  misc_feature (1)...(487): n = a,t,c or g
gnngnnnnntnnnntnnnnnntntganaccgntatgactgantacgaatttaatacgactcactatagggaatttggccctcgaggccaagaattcggcacgagccgcgcgccgctgcatcccgcgtccagcacctacgtcccgctgccgtcgccgccgccaccatgcccaagagaaaggctgaaggggatgctaagggagataaagcaaaggtgaaggacgaaccacagagaagatccgcgaggttgtctgctaaacctgctcctccaaagccagagcccaagcctaaaaaggcccctgcaaagaagggagagaaggtacccaaagggaaaaagggaaaagctgatgctggcaaggaggggaataaccctgcagaaaatggagatgccaaaacagaccaggcacagaaagctgaaggtgctggagatgccaagtgaagtgtgtgcatttttgataactgngtacttctggtgactgtacagtttga

SEQ ID NO: 22237 - DNA, 489 bp, Homo sapiens
tatgacatgattacgaatttaatacgactcactatagggaatttggccctcgaggccaagaattcggcacgagattgtagtaaagaggtgcaaattagttctaataaaaaatgtctttaacaaaatgtgaatacgtgactaagatgggaaagtaggtagcagtaatataaatatggaacaatgtagactactaattggaatagtaaagggagccattttaccaaataaaattaaaatgtaagattctgcagtcagaaacaaaactttaaaaactccgaacagaggttacctctgacagcatatggactgggaaggggcaaaaggaatgctttttgcatctcagcatagtgagaccttgtctctacaaacaataaagcagccaggagaatcacctgaacctggcaggtggaggttgtagtgagctgagatcgtgccactgcattcctgcctgggcgacagagtgagactctgtctcaaaaaaaaaaaaaa

SEQ ID NO: 22238 - DNA, 342 bp, Homo sapiens
gcagcccccggggcacagcaggacgtttgggggccttctttcagcaggggacagcccgattggggacaatggcgtctcttggccacatcttggttttctgtgtgggtctcctcaccatggccaaggcagaaagtccaaaggaacacgacccgttcacttacgactaccagtccctgcagatcggaggcctcgtcatcgccgggatcctcttcatcctgggcatcctcatcgtgctgagcagaagatgccggtgcaagttcaaccagcagcagaggactggggaacccgatgaagaggagggaactttccgcagctccatccgccgtctgtccacccgcaggg

SEQ ID NO: 22239 - DNA, 598 bp, Homo sapiens
gcggaggcacattgggaaccctgagtatctgatgaaaaggataccacagaacccaagataccagcatatcaaatcaagactggacactggtaacagtatgactaaatatactgagaagctcgaagagattaagaaaaattatagatacaaaaaagatgagcttttcaagagactaaaagttacaacttttgcccagctgatcatccaagttgcttccctctctgatcaaacactggaagtgacagctgaggagattcaaaggctggaagacaatgattctgcagcttcagaccctgatgctgaaaccactggcaggaccaatgggaaaggaaatccaggtgagcagtcgccgagccctgagcagttcataaacaacgcaggagcaggggactccagccgctcaactcttcagagtgtcatcagtggtgttggggaactggatctagacaaagggccagtgaagaaagcagagccccataccaaagacaaaccttatcctgactgccccttcctgctgctagatgtgccgtgatagagattcttaccagcagtgccacattgttggagcttacagttacccaattgcaactctgctaaa

SEQ ID NO: 22240 - DNA, 434 bp, Homo sapiens
ggctagtaggcaacacgcagtactatggccaacaggccggggtactccaggaggctcgagtccccataatcagcaatgatgtctgcaatggcgctgacttctatggaaaccagatcaagcccaagatgttctgtgctggctaccccgagggtggcattgatgcctgccagggcgacagcggtggtccctttgtgtgtgaggacagcatctctcggacgccacgttggcggctgtgtggcattgtgagttggggcactggctgtgccctggcccagaagccaggcgtctacaccaaagtcagtgacttccgggagtggatcttccaggccataaagactcactccgaagccagcggcatggtgacccagctctgaccggtggcttctcgctgcgcacctccagggcccgaggtgatcccggtggtgggatcacgc

SEQ ID NO: 22241 - DNA, 635 bp, Homo sapiens
ttggaaaccccttgacatgattacgaatttaatacgactcctatagggaatttggccctcgaggccaagaattcggcacgagatttgtcctacattcgaaaaatagaaattgtaaatcagaggttatctgtctgcattttaaactgccaaattaccttatagtaagtttctattttatgactttgggccaagaattaagtattttcctaagcacaaatctttttctatattctcattttaatatcttatgctattattctgtaaacattttaattttagtttcatgagtctttattttttgttacctgcaagttatgttcttcttcattgaatttcatatttgagagacatttgtcttcatgaagcagatttgcactggaaccattgctttactctggttggaaatgccattgttttggggacagacttttaaaatgcccttgtgtctcccagtgaggagccctaagcattgacttctctaccctaaaactgtttgagagagggagagtgggccctggctttctcaagcatgggtcgggggttcagcggggcctctgtcttttgtggtgacccctcaggggtttcattgtttccttctgacttaagcaatagagagagaatttgttttggtactc

SEQ ID NO: 22242 - DNA, 481 bp, Homo sapiens
cgactcactatagggaatttggccctcgaggccaagaattcggcacgagcatcccgcgtccagcacctacgtcccgctgccgtcgccgccgccaccatgcccaagagaaaggctgaaggggatgctaagggagataaagcaaaggtgaaggacgaaccacagagaagatccgcgaggttgtctgctaaacctgctcctccaaagccagagcccaagcctaaaaaggcccctgcaaagaagggagagaaggtacccaaagggaaaaagggaaaagctgatgctggcaaggaggggaataaccctgcagaaaatggagatgccaaaacagaccaggcacagaaagctgaaggtgctggagatgccaagtgaagtgtgtgcatttttgataactgtgtacttctggtgactgtacagtttgaaatactattttttatcaagttttataaaaatgcagaattttgttttactttttttttttttt

SEQ ID NO: 22243 - DNA, 659 bp, Homo sapiens
gaagcctcagagagttgtgatcacatgccctcaggacttccctcattgctccattccactacgggttgggctgcccctcctctcgcctgagttcctgctgactggagtgctgaagcaggaagccaagccagaggcctttgtcctctcccctttggagatgtcatccacctgagaactccactacccttttccctcccagaccacgaattagaagatatgtggaagaaagaactcagggcgttagaaaggattggagtatattgatacaacttgtcctggaacatgggtgggaccagaaatctttatgaataaatgaaaagataagggatttggaagccacaggttgttttttgtttgtctgttctgtttttttaatggccattttattttatttgtatttatagttttttatttgtatagatttaggggatacaagatttcttacatgcatgtattaaatggccattttaaaattagctagtttcatgctcagatgtcataagtggcagctatctttagccagactgttgcagttattgctcgatgccactcatggtgtcctacctcctatttggaaaccatctatatttttttcttacctgagattcttactttggggtcaggaacttgaagggatgcttggagtgagtagatttgag

SEQ ID NO: 22244 - DNA, 259 bp, Homo sapiens
gctgtgacctctacaagttccagagactactctctgacttttggtgcaatcaaccaaacatggtcctaccgcatccaccagaacatcacttaccaggtgtgcaggcacgcccccagacacccgtccttccccaccacccagcagctgaacgtggaccgggtctttgccttgtataatgacgaagaaagagtgcttagatttgctgtgaccaatcaaataataaatctattctgctaagagatcacaaaaaaaaaaaaaa

SEQ ID NO: 22245 - DNA, 569 bp, Homo sapiens
aatggctttaaagaatatatatatatttttaaagtagcttgagaagcaaattggcaggtaatatttcatacctaaattaagactctgacttggattgtgaattataatgatatgccccttttcttataaaaacaaaaaaaaaataatgaaacacagtgaatttgtagagtgggggtatttgacatattttacagggtggagtgtactatatactattacctttgaatgtgtttgcagagctagtgtatgtgtttgtctacaagtatgattgctgttacataacaccccaaattaactcccaaattaaaacacagttgtgctgtcaatacctcatactgctttacctttttttcctggatatctgtgtattttcaaatgttactatatattaaaggtcgacgcggccgcgaattccagatctatgaatcgtagatactgaaaaaccccgcaagttcacttcaactgtgcatcgtgcaccatctcaatttctttcatttatacatcgttttgccttcttttatgtaactatactcctctaagtttcaatcttggccatgtaacctctgatc

SEQ ID NO: 22246 - DNA, 774 bp, Homo sapiens
cctggagtccagacccgacggccggcccagttccacgcacccagcgagcccaagcgccttctccgcaccagggaagccccacccaccagaagccaagatgtccagcaagcgggccaaagccaagaccaccaagaagcggccacagcgggccacatccaatgtcttcgcaatgtttgaccagtcccagatccaggaatttaaggaggccttcaacatgattgatcagaacagagatggcttcatcgacaaggaagatttgcatgatatgcttgcttctctagggaagaatcccactgatgcataccttgatgccatgatgaatgaggccccagggcccatcaatttcaccatgttcctgaccatgtttggtgagaagttaaatggcacagatcctgaagatgtcatcagaaacgcctttgcttgctttgatgaagaagcaacaggcaccattcaggaagattacctaagagagctgctgacaaccatgggggatcggtttacagatgaggaagtggatgagctgtacagagaagcacctattgataaaaaggggaatttcaattacatcgagttcacacgcatcctgaaacatggagccaaagacaaagatgactgaaataacttcaaattccagccaaacgttccttgttgccactttgggtattctgagattttctcttgcatgcccttagctttacagcttttgcatttcctgttgtatttattctcagccattttgggcatatgtatctttataatcagactggaaacggg

SEQ ID NO: 22247 - DNA, 514 bp, Homo sapiens
gcatctctctcagacaccaagctgcagatccaggcttttctgggaaagtgaggccaccatggctctggagaagtctcttgtccggctccttctgcttgtcctgatactgctggtgctgggctgggtccagccttccctgggcaaggaatcccgggccaagaaattccagcggcagcatatggactcagacagttcccccagcagcagctccacctactgtaaccaaatgatgaggcgccggaatatgacacaggggcggtgcaaaccagtgaacacctttgtgcacgagcccctggtagatgtccagaatgtctgtttccaggaaaaggtcacctgcaagaacgggcagggcaactgctacaagagcaactccagcatgcacatcacagactgccgcctgacaaacggctccaggtaccccaactgtgcataccggaccaacccgaaggagagacacatcattgtggcctgtgaagggagcccatatgtgcagtccactttgatgctctgttgg

SEQ ID NO: 22248 - DNA, 497 bp, Homo sapiens
gggaagggaagtagatataatggagcttagtggcagagcagctggaatcctgagagaagagaataactttagttcagagcaggtggggaaatgagagattgagtaggaggaccaaggttgagggaagcagatcttcttagttgctgtcagcggctgatggggaagattgttggtagaaggaagtcagaatataggtacagagggataagtttgctaagaacagagatcagcaaacagcttttctgagagaaagaaacatctgcaaatgacatgctgtttctgcagtttctgctgctagctcttcttctcccaggtggtgacaatgcagacgcatcccaggaacacgtctccttccatgtcatccagatcttctcatttgtcaaccaatcctgggcacgaggtcagggctcaggatggctggatgagttgcagactcatggctgggacagtgaatcaggcacaataattttcctgcataactggtccaagggcaactt

SEQ ID NO: 22249 - DNA, 339 bp, Homo sapiens
cgcggagcacctgcgcccgcggctgacaccttcgctcgcagtttgttcgcagtttactcgcacaccagtttcccccaccgcgctttggattagtgtgatctcagctcaaggcaaaggtgggatatcatggcatctatctgggttggacaccgaggaacagtaagagattatccagactttagcccatcagtggatgctgaagctattcagaaagcaatcagaggaattggaactgatgagaaaatgctcatcagcattctgactgagaggtcaaatgcacagcggcagctgattgttaaggaatatcaagcagcatatggaaaggagctgaaagatgac

SEQ ID NO: 22250 - DNA, 441 bp, Homo sapiens
aattcggcacgagccggcagcctgtggatgctgtcaaactgggtctaccgattcccacctcgggttgggagaggaccacggtggccaaaattcttagcttcttcctttccctcatgcagcccatggatagccagccccagaggattatcacaaaattataaaacagcctatggacatgggtactattaagaggagacttgaaaacaattattattgggctgcttcagagtgtatgcaagattttaataccatgttcaccaactgttacatttacaacaagcccactgatgatattgtcctaatggcacaaacgctggaaaagatattcctacagaaggttgcatcaatgccacaagaagaacaagagctggtagtgaccatccctaagaacagccacaagaagggggccaagttggcagcgctccagggcagtgttaccaa

SEQ ID NO: 22251 - DNA, 940 bp, Homo sapiens
  misc_feature (1)...(940): n = a,t,c or g
tacgaatttaataccgactcactatagggaatttggccctcgaggccaagaattcggcacgagctggaagacccggatagttcctcccggccacgccgcgccggctctgggcactcagcatcgtttccttttcctccgctggagcagctatggcggcggtgaagaccctgaaccccaaggccgaggtggcccgagcgcaggcggcgctggcggtcaacatcagcgcagcgcggggtctgcaggacgtgctaaggaccaacctggggcccaagggcaccatgaagatgctcgtttctggcgctggagacatcaaacttactaaagacggcaatgtgctgcttcacgaaatgcaaattcaacacccaacagcttccttaatagcaaaggtagcaacagcccaggatgatataactggtgatggtacgacttctaatgtcctaatcattggagagctgctgaaacaggcggatctctacatttctgaaggccttcatcctagaataatcactgaaggatttgaagctgcaaaggaaaaggcccttcagtttttggaagaagtcaaagtaagcagagagatggacagggaaacacttatagatgtggccagaacatctcttcgtactaaagttcatgctgaacttgcagatgtcttaacagaggctgtagtggactccattttggccattaaaaagcaagatgaacctattgatctcttcatgattgagatcatggagattgaaacataaatctgaaactgatacaagcttaatcaaagggcttgtatcagtttcaggtcgacgcggccgcgaattccagatctatgaatcgtagatactgaaaaaccccgcaagttcacttcaactgtgcatcgtgcaccatctcaatttctttcatttatacatcgttttgccttcttttatgnaactatactcctctaagt

SEQ ID NO: 22252 - DNA, 557 bp, Homo sapiens
gacatgattacgaatttaatacgactcactatagggaatttggccctcgaggccaagaattcggcacgagcttcttctccccagtgagcatcgctacagcctttgcaatgctctccctggggaccaaggctgacactcacgatgaaatcctggagggcctgaatttcaacctcacggagattccggaggctcagatccatgaaggcttccaggaactcctccgtaccctcaaccagccagacagccagctccagctgaccaccggcaatggcctgttcctcagcgagggcctgaagctagtggataagtttttggaggatgttaaaaagttgtaccactcagaagccttcactgtcaacttcggggacaccgaagaggccaagaaacagatcaacgattacgtggagaagggtactcaagggaaaattgtggatttggtcaaggagcttgacagagacacagtttttgctctggtgaattacatcttctttaaaggcaaatgggagagaccctttgaagtcaaggcaccgaggaagaggacttccacgtggaccagc

SEQ ID NO: 22253 - DNA, 509 bp, Homo sapiens
  misc_feature (1)...(509): n = a,t,c or g
gnnnnnnnaggnggnnnnntttgaatcccgtnnatgaagaacctttgacatgatnacgaatttaatacgactcactatagggaatttggccctcgaggccaagaattcggcacgagcaaagacttcttggccggaggcatcgccgccgccatctccaagacggccgtggctccgatcgagcgggtcaagctgctgctgcaggtccagcacgccagcaagcagatcgccgccgacaagcagtacaagggcatcgtggactgcattgtccgcatccccaaggagcagggcgtgctgtccttctggaggggcaaccttgccaacgtcattcgctacttccccactcaagccctcaacttcgccttcaaggataagtacaagcagatcttcctggggggcgtggacaagcacacgcagttctggaggtactttgcgggcaacctggcctccggcggtgcggccggcgcgacctccctctgcttcgtgtacccgctggattttgccagaaccca

SEQ ID NO: 22254 - DNA, 540 bp, Homo sapiens
  misc_feature (1)...(540): n = a,t,c or g
aggccattcaattcggcacgagcacagctgcagcctgcaattcactcccactgcctgggattgcactggatccgtgtgctcagaacaaggtgaacgcccagctgcagccatgaagatctgtagcctcaccctgctctccttcctcctactggctgctcaggtgctcctggtggaggggaaaaaaaaagtgaagaatggacttcacagcaaagtggtctcagaacaaaaggacactctgggcaacacccagattaagcagaaaagcaggcccgggaacaaaggcaagtttgtcaccaaagaccaagccaactgcagatgggctgctactgagcaggaggagggcatctctctcaaggttgagtgcactcaattggaccatgaattttcctgtgtctttgctggcaatccaacctcatgcctaaagctcaaggatgagagagtctattggaaacaagttgcccggaatctgcgctcacagaaagacatctgtanatattccaagacagctgtgaaaaccaaagtgtgcanaaaggatttcca

SEQ ID NO: 22255 - DNA, 340 bp, Homo sapiens
tttcaatatttatttccagagtccggaggcagcagacacgccctcttagtagggacttaatgggccggtcggggagggggaggcgggatgggacacccaacactttttccatttcttcagagggaaactcagatgtccaaactaattttaacaaacgcattaagaggtttatttgggtacatggcccgcagtggcttttgccccagaaaggggaaaggaacacgcgggtagatgatttctagcaggcaggaagtcctgtgcggtgtcaccatgagcacctccagctgtactagtgccattggaataataaatttgataaggtggtgaaaaaaaaaaaaaa

SEQ ID NO: 22256 - DNA, 480 bp, Homo sapiens
  misc_feature (1)...(480): n = a,t,c or g
gnnnnnnnnnntgnnntgnnnnatttgaatcccttanatgaagaccgttatgacatgantacgaatttaatacgactcactatagggaatttggccctcgaggccaagaattcggcacgagagactgcgtggtccgtattcccaaggagcagggagttctgtccttctggcgcggtaacctggccaatgtcatcagatacttccccacccaggctcttaacttcgccttcaaagataaatacaagcagatcttcctgggtggtgtggacaagagaacccagttttggcgctactttgcagggaatctggcatcgggtggtgccgcaggggccacatccctgtgttttgtgtaccctcttgattttgcccgtacccgtctagcagctgatgtgggtaaagctggagctgaaagggaattccgaggcctcggtgactgcctggttaagatctacaaatctgatgggattaagggcctgtacc

SEQ ID NO: 22257 - DNA, 507 bp, Homo sapiens
  misc_feature (1)...(507): n = a,t,c or g
gtcgcaccattctgactcggtttctccaaactgaagcagcctctccccaggtccagctctggaggggagggggatccgactgctttggacctaaatggcctcgtggctggaagatcctgcgggtggggcttggggctcacacacctgtagcacttactggtaggaccaagcatcttgggggggtggccgctgagtggcaggggacaggagtccactttgtttcgtggggaggtctaatctagatatcgacttgtttttgcacatgtttcctctagttctttgttcatagcccagtagaccttgttacttctgaggtaagttaagtaagttgattcggtatccccccatcttgcttccctaatctatggtcgggagacagcatcagggtattgaagctcatggtgctagtctctcgtgccgaattcttggcctcgagggccaaattccctatagtgagtcggtattaaattcgtaatcggtcacaagggtttccaaannnnnanncac

SEQ ID NO: 22258 - DNA, 502 bp, Homo sapiens
gagaaaatgttattagttgaaaccttacgggaccttcctcccttagtgagtctgttggctaaaggttctctggcttcgtgaattagaatcggatactgtttccaagttagcaaaaccaactctaccccagcaccccacgaggaagaatgtggaaggatctcccattggccggttggggcaaaagcctgaggcaatctttcatccccttttgccaaggcgagactttcccagtgacggtgatgtagttggccactctgactatgggtggactcgggtgtaaacctctgaagctgagatcacacgaaaacctggcctccccgccatgtagctgttggagagtagaaaaatagagcacgcctgatgtttctaaatgagaagactttcaatagtaatgaagaatccatggcactctcctcaccctcaaacacatggcagtcattcacatacaggccccaaagccactgttagtgctgcagtagctcctgtggacattggaaagccc

SEQ ID NO: 22259 - DNA, 705 bp, Homo sapiens
ggaggtggaaaatggtggctccttgggcagcaagaagggtgtgaaccttcctggggctgctgtggacttgcctgctgtgtcggagaaggacatccaggatctgaagtttggggtcgagcaggatgttgatatggtgtttgcgtcattcatccgcaaggcatctgatgtccatgaagttaggaaggtcctgggagagaagggaaagaacatcaagattatcagcaaaatcgagaatcatgagggggttcggaggtttgatgaaatcctggaggccagtgatgggatcatggtggctcgtggtgatctaggcattgagattcctgcagagaaggtcttccttgctcagaagatgatgattggacggtgcaaccgagctgggaagcctgtcatctgtgctactcagatgctggagagcatgagcaagaagccccgccccactcgggctgaaggcagtgatgtggccaatgcagtcctggatggagccgactgcatcatgctgtctggagaaacagccaaaggggactatcctctggaggctgtgcgcatgcagcacctgattgcccgtgaggcagaggctgccatctaccacttgcaattatttgaggaactccgccgcctggcgcccattaccagcgaccccacagaagccaccgccgtgggtgccgtggaggcctccttcaagtgctgcaatggggccataatcgt

SEQ ID NO: 22260 - DNA, 323 bp, Homo sapiens
  misc_feature (1)...(323): n = a,t,c or g
gtagctggtgacattggggtcactctaggtcatagtttctccatctgtagaatatataccgtaataataatatctaccaataacatcatgctgtgttgactgatgattaaatgggttaatacatgtaaagcactcaggacagtgcctggtaggtagtcagtgctacgcgttttatccgttatcactcatattattattaatctctgctatgtttgacctccagcattctcttacagaggcaataaaggattaactacacagtagttattcaggggttaccaggcacaggaagaggagngataaatgaacagcctttcagagtt

SEQ ID NO: 22261 - DNA, 491 bp, Homo sapiens
ggtaggtggagttgagggaactgggcagggcacagtcacatcctggctgggattcgtgtagtgcttcacgtggcatgtcacggacttgccggctaggcactgtgtggccggcagggtcagctggctgctcgtggtgtacaggtccccggaggcatcctggctgggtgggaagtttctggcggtcacgccctgtccgctttcgctccaggtcacactgagtggctcctgggggaagaagccctggaccaggcaggcgatgaccacgttcccatctggctgggtgctgcagaggctcagcgggaagaccttggggctggtcggggatgctgaggagacggtgaccagggttccctggccccaggagtcaaggtaataaccagtactatcataggatgtgcttctggcacagtagtagaaggccgtatctgtggcagtcacagagttcagcttcagggagaactggttcttggacgtgtctagtgatatgataa

SEQ ID NO: 22262 - DNA, 597 bp, Homo sapiens
gcagtttcgaaataccttaatgctcctcaagaatgagcaaggcttcctttctacaatgagtcccatcacccacaccacccccgcccattttctccatgattctgattctgacactcttctcccttgtttgtctaggtgtgccctggaaacccaggtagcatttagtccctaaatttgtgaatgtcattgaacagcctgtagaagggaaacgctgcttcattggcatgcgggcagttgtagttgcatttgcaggactggatcatcatgacgttcttggaaaatgtctccccatcttcgcagcggaaccgcatcttcacagtcctggtcagctggggccgtgcagcatcggccgtccacgcaggaaccgcagtacttgggccggtatttcttcacactcaaacatccagcgtaagtaaacctgactggttcgggggatttcttggtcttgctgcatttcttgccctttttcaggctgctgtacactggctgtccacaaggccgcacctcacaaatccgggtttctttcacaaggcggcactcagggttgtcattggtaactcgtgtggagataccagttccacaggtctttgagcactc

SEQ ID NO: 22263 - DNA, 1156 bp, Homo sapiens
tttaatacgactcactatagggaatttggccctcgaggccaagaattcggcacgagggcggcggcagggctgagccagcgacgccctccattcactctccgcgcccgttctccggctgtcctcccgttccgctgcccgccctgccaccatgacggaacaggccatctccttcgccaaagacttcttggccggaggcatcgccgccgccatctccaagacggccgtggctccgatcgagcgggtcaagctgctgctgcaggtccagcacgccagcaagcagatcgccgccgacaagcggtacaagggcatcgtggactgcattgtccgcatccccaaggagcagggcgtgctgtccttctggaggggcaaccttgccaacgtcattcgctacttccccactcaagccctcaacttcgccttcaaggataagtacaagcagatcttcctggggggcgtggacaagcacacgcagttctggaggtactttgcgggcaacctggcctccggcggtgcggccggcgcgacctccctctgcttcgtgtacccgctggactttgctaggaccaggttggctgctgatgtgggcaagggcgccgcccagcgtgagttccatggtctgggcgactgtatcatcaagatcttcaagtctgatggcctgagggggctctaccagggtttcaacgtctctgtccaaggcatcattatctatagagctgcctacttcggtatctatgacactgcaaagggaatgcttccggatcccaagaacactcacatcgtcatcagctggatgatcgcacagactgtcactgctgttgccgggttgacttcctatccatttgacactgttcgccgccgcatgatgatgcagtcagggcgcaaaggaactgacatcatgtacacaggcacgcttgactgctggcggaagattgctcgtgatgaaggaggcaaagcttttttcaagggtgcatggtccaatgttctcagaggcatgggtggtgcttttgtgcttgtcttgtatgatgaaatcaagaagtacacataagttatttcctaggatttttccccctgtgaacaggcatgttgtattatataacatatcttgagcattcttgacagactcctggctgtcagtttctcagtggcaactatttac

SEQ ID NO: 22264 - DNA, 409 bp, Homo sapiens
gaacccaggagctccgcacggccaaggacagcgatgatgatgatgatgtcgctgtcaccgtggaccgagaccgcttcatggatgagttctttgagcaggtggaggagattcgaggcttcattgacaagatcgcagagaacgtggaggaggtgaagcggaagcacagtgccatcctggcatcccccaaccccgacgagaagacgaaggaggagctggaagaactcatgtccgacataaagaagacagcaaacaaagttcgttccaagttaaagagcatcgagcagtccatcgagcaagaggaaggcctgaaccgctcctccgctgacctgaggatccggaagacacagcactccacgctgtccagaaagtttgaggaggtcatgtcggagtacaacgccacgcagtccga

SEQ ID NO: 22265 - DNA, 628 bp, Homo sapiens
ggacggagtcttgctctgtcgcccaggttggagtgcagtggcagcgatctcggctcactgcaacctccacctcccgggttcaagcgattctcctgcctcagcctcccgagtagctgggactacaggcgcgcgccgccacgcccggctaatttttatatttttagtagagacggggtttcaccatgctggccaggctggtctcgaaccccgacctcgtgatccgccctccttagcctcccaatcctctcttaaaaaagtgatagctcagaaacatttgtaaaagcaaggtttttatttcattttggctctgtcattttcagaggcaaagaagttggcctgtaaaatagagtgctagagctcttacgcccctccccttcttcccaacttcctacttcctagcccttttatcaactcctagaatagttaaagagagacacatctagatgggatgaaaggtgccctaagcaggagaaactgaacaaaaggctagaggcatgggccaggtaaaaattgggcctagagtgaagactgtgctgtcgttaagagctttcgaggaaggagtacttactccccaatgatgatgaatggaaaaatacttttcagggagaattgaaggggttaaagtgtt

SEQ ID NO: 22266 - DNA, 333 bp, Homo sapiens
gaaagttccaacagaattgggaaaggtttacctcagggagactgaaatgaccaaggggatgggaagaatgggaattgtctaatataataaataagtgtggacaaaccagagctgagaagagatttagctggaatctgtattacagggtatgtataaggcagatatggacctgatttcccaaattccagattgctataactcagagacattccctaaatcttaaaatggttttaccatttacaaataaaatgaaggccttactgaacagagcaggcagtaatctatggagtactttatattaagagatgatctaggcaaaaagtagatatgatt

SEQ ID NO: 22267 - DNA, 503 bp, Homo sapiens
gggtccgcatggagaaatagttgaaggttgtaccggagcccttcacatcctagctcgggatgttcacaaccgaattgttatcagaggactaaataccattccattgtttgtgcagctgctttattctcccattgaaaacatccaaagagtagctgcaggggtcctctgtgaacttgctcaggacaaggaagctgcagaagctattgaagctgagggagccacagctcctctgacagagttacttcactctaggaatgaaggtgtggcgacatatgcagctgctgttttgttccgaatgtctgaggacaagccacaagattacaagaaacggctttcagttgagctgaccagctctctcttcagaacagagccaatggcttggaatgagactgctgatcttggacttgatattggtgcccagggagaaccccttggatatcgccaggatgatcctagctatcgttcttttcactctggtggatatggccaggatgccttgggta

SEQ ID NO: 22268 - DNA, 462 bp, Homo sapiens
  misc_feature (1)...(462): n = a,t,c or g
ctncttgactgattacgaatttaatacgactcactatagggaatttggccctcgaggccaagaattcggcacgaggaacagagctgatgaagcctctgagggcctggcttctgtcctgcacaacctccctcacagaacagggaagcagtgacagctgcagatggcagcgggcctctccccagccctgagcactgtgccagttcctgccttttctcatcagcagaacagaatccttttcctcttttccttcctcctctttggaattttcctgggacctacagaataaagggggggatggacagggggttttcaaaaggaacatggctcactcagagctatatggttagacgtttctccccttttccctaccttccatggtcctggttggccctggctttgcctactagaaaaccaaaacttcccccctggggttttgtgcccactctctgagaagttggggct

SEQ ID NO: 22269 - DNA, 980 bp, Homo sapiens
  misc_feature (1)...(980): n = a,t,c or g
gtgaaatccaggggaagccggggccacgtgagattccaggatgccttttgtggagcctatttcacctttgccatctaccatgagggccacgtgtacggcttcggcctctccaactaccattagcttgtaactccgggcacagaatcttgcttaataccccagaacctaacatccttcaagaattccaccaagtcctgggtgggcttctctggtggccagcaccatacagtctgcatggattcggaaggaaaagcatacagcctgggccgggctgagtatgggcggctcggcgtgggtgctgaggagaagagcatacccaccctcatctccaggctgcctgctgtctcctcggtggcttgtggggcctctgtggggtatgctgtgaccaaggatggtcgtgttttcgcctggggcatgggcaccaactaccagctgggcacagggcaggatgaggacgcctggagccctgtggagatgatgggcaagcagctggagaaccgtgtggtcttatctgnnnnnngcgggggccagcatacagtcttattagtcaaggacaaagaacagagctgatgaagcctctgagggcctggcttctgtcctgcacaacctccctcacagaacagggaagcagtgacagctgcagatggcagcgggcctctccccagccctgagcactgtgccagttcctgccttttctcatcagcagaacagaatccttttcctcttttccttcctcctctttggaattttcctgggacctacagaataaagggggggatggacagggggttttcaaaaggaacatggctcactcagagctatatggttagacgtttctccccttttccctaccttccatggtcctggttggccctggctttgcctactagaaaaccaaaacttcccccctggggttttgtgcccactctctganaagttggggctccatnaagccccattctagcatgngcccttttctg

SEQ ID NO: 22270 - DNA, 817 bp, Homo sapiens
cccacgcgtccgcaggcggctcggactgagcaggactttccttatcccagttgattgtgcagaatacactgcctgtcgcttgtcttctattcaccatggcttcttctgatatccaggtgaaagaactggagaagcgtgcctcaggccaggcttttgagctgattctcagccctcggtcaaaagaatctgttccagaattccccctttcccctccaaagaagaaggatctttccctggaggaaattcagaagaaattagaagctgcagaagaaagacgcaagtcccatgaagctgaggtcttgaagcagctggctgagaaacgagagcacgagaaagaagtgcttcagaaggcaatagaagagaacaacaacttcagtaaaatggcagaagagaaactgacccacaaaatggaagctaataaagagaaccgagaggcacaaatggctgccaaactggaacgtttgcgagagaaggataagcacattgaagaagtgcggaagaacaaagaatccaaagaccctgctgacgagactgaagctgactaatttgttctgagaactgactttctccccatccccttcctaaatatccaaagactgtactggccagtgtcattttattttttccctcctgacaaatattttagaagctaatgtaggactgtataggtagatccagatccagactgtaagatgttgttttaggggctaaaggggagaaactgaaagtgttttactctttttctaaagtgttggtctttctaatgtagctatttttcttgttgcatcttttctacttcagtacacttggtgtactg

SEQ ID NO: 22271 - DNA, 570 bp, Homo sapiens
ggtcatggagggagcaggagctggatccggcttccggaaggagctggtgagcaggctgctgcacctgcacttcaaggatgacaagaccaaagtgagcggggacgcgctgcagctcatggtggagttgctgaaggtcttcgttgtggaagcagcagtccgcggcgtgcggcaggcccaggcagaagacgcgctccgtgtggacgtggaccagctggagaaggtgcttccgcagctgctcctggacttctagggatctcagccgtggctgaggccacccccagaggagcccctggtccacagaagcaggccttgtgtttccagcggcctctgataagaggcagggaaggacctgaaggatttggagttgattcaaacaagatctctgggagtctccagcctgtgcagaaggggcaggactgcagtgcactgcgggccttggagtgtccagtggggacactggtgtgggaaggggcagcacctggggagtccctgcctctcctccctgggacaatagtgtgcatgccacccggggtcctacaggcaggtgctgggaaaggcctggccagcagg

SEQ ID NO: 22272 - DNA, 1278 bp, Homo sapiens
  misc_feature (1)...(1278): n = a,t,c or g
gagcacccagacttcatgcgcccgtggaatgctcaccacatgttggtcgaagcggccgaccactgactttgtgacttaggcggctgtgttgcctatgtagagaacacgcttcacccccactccccgtacagtgcgcacaggctttatcgagaataggaaaacctttaaaccccagtcatccggacatcccaacgcatgctcctggagctcacagccttctgtggtgtcatttctgaaacaagggcgtggatccctcaaccaagaagaatgtttatgtcttcaagtgacctgtactgcttggggactattggagaaaataaggtggagtcctacttgtttaaaaaatatgtatctaagaatgttctagggcactctgggaacctataaaggcaggtatttcgggccctcctcttcaggaatcttcctgaagacatggcccagtcgaaggcccaggatggcttttgctgcggccccgtggggtaggagggacagagagacagggagagtcagcctccacattcagaggcatcacaagtaatggcacaattcttcggatgactgcagaaaatagtgttttgtagttcaacaactcaagacgaagcttatttctgaggataagctctttaaaggcaaagctttattttcatctctcatcttttgtcctccttagcacaatgtaaaaaagaatagtaatatcagaacaggaaggaggaatggcttgctggggagcccatccaggacactgggagcacatagagattcacccatgtttgttgaacttagagtcattctcatgcttttctttataattcacacatatatgcagagaagatatgttcttgttaacattgtatacaacatagccccaaatatagtaagatctatactagataatcctagatgaaatgttagagatgctatatgatacaactgtggccatgactgaggaaaggagctcacgcccagagactgggctgctctcccggaggccaaacccaagaaggtctggcaaagtcaggctcagggagactctgccctgctgcagacctcggtgtggacacacgctgcatagagctctccttgaaaacagaggggtctcaagacattctgcctacctattagcttttctttatttttttaactttttggggggaaaagtatttttgagaagtttgcttgcaatgnatttataaatagtaaataaagtttttaccattaaaaaaaaannnanaaaaaggactttatttaagcgccgnaagcttatccctttaggggggg

SEQ ID NO: 22273 - DNA, 732 bp, Homo sapiens
gaaatgggctttaacattggagtccggctgattgaagatttcttggctcggtcaaatgttgggaggtgccatgactttcgggaaactgcggatgtcattgccaaggtggcgttcaagatgtacttgggcatcactccaagcattactaattggagcccagctggtgatgaattctccctcattttggaaaataaccccttggtggactttgtggaacttcctgataaccactcatcccttatttattccaatctcttgtgtggggtgttgcggggagctttggagatggtccagatggctgtggaggccaagtttgtccaggacaccctgaaaggagacggtgtgacagaaatccggatgagattcatcaggcggattgaggacaatcttccagctggagaggaataaccatccctacaactcgaggatagccatcaggagcactgttggaatcagcaggcctctgtgctccctctgccctccagaactcagtgactcttgaacatggatgttatatattcttataacctgtttccattctccattcaaataaagagcagactgcgatatagtccatttaccccatgtgtgcacattcaggagcgacagtctctgcccccattcccttgagaggggctggatgtaatcacctttggttggactagaaagagctcaaaccattttacattcctgtttgaatttttccaaagcaaaactcactttgaccccatt

SEQ ID NO: 22274 - DNA, 565 bp, Homo sapiens
gtgatcggagacgagaactacggcgagggctcgagccgggagcatgcagctctggagcctcgccaccttgggggccgggccatcatcaccaagagctttgccaggatccacgagaccaacctgaagaaacagggcctgctgcctctgaccttcgctgacccggctgactacaacaagattcaccctgtggacaagctgaccattcagggcctgaaggacttcacccctggcaagcccctgaagtgcatcatcaagcaccccaacgggacccaggagaccatcctcctgaaccacaccttcaacgagacgcagattgagtggttccgcgctggcagtgccctcaacagaatgaaggaactgcaacagtgagggcagtgcctccccgccccgccgctggcgtcaagttcagctccacgtgtgccatcagtggatccgatccgtccagccatggcttcctattccaagatggtgtgaccagacatgcttcctgctccccgcttagcccacggagtgactgtggttgtggtgggggggttcttaaaataactttttagcccccgtcttc

SEQ ID NO: 22275 - DNA, 503 bp, Homo sapiens
  misc_feature (1)...(503): n = a,t,c or g
atgacatgattacgaatttaatacgactcactatagggaatttggccctcgaggccaagaattcggcacgagagaaaagcaaaagtcagcttccaaggaattcacttaacaggcctgttcagtatggaagacattatttatctgcctttaactccccccaaaggaccataccaactgcatgaaagtgaacttttctatctacgtaactggtagacggagcatcttgatcactatgtgacaaccttggctgtcatttttagttgccatttgcattgatttgagcagccctatctttaccgaacatacctgaatttgttcctgggctcccactttcttcccagaagagggctaacttcctactaaggtctgaagagtgttgaaagtagactagagcttgggaactcctaacctagaactatctgcatcccacaaagtgattatatgccaaagggatactagtcatacctagtgnttctctttctgaaaagagaacttatcctaaa

SEQ ID NO: 22276 - DNA, 337 bp, Homo sapiens
gggcgcgggcgaggtggaggcccaggactctgaccctgcccctgccttcagcaaggcccccggcagcgccggccactacgaactgccgtgggttgaaaaatataggccagtaaagctgaatgaaattgtcgggaatgaagacaccgtgagcaggctagaggtctttgcaagggaaggaaatgtgcccaacatcatcattgcgggccctccaggaaccggcaagaccacaagcattctgtgcttggcccgggccctgctgggcccagcactcaaagatgccatgttggaactcaatgcttcaaatgacagcatgaccgacggagcccagcaagccttg

SEQ ID NO: 22277 - DNA, 696 bp, Homo sapiens
tcaacagctatgacatgattacgaatttaatacgactcactatagggaatttggccctcgaggccaagaattcggcacgagggccgtctgaggtggaccgggctaggcggaggcccatgactctgaccctgcccctgccttcataaaggcccccgacagcagccggccactactaactgcctgcgggttgaataatataggccaatagagctgaatgaaatgtgtcaggcaatgaatactcccctgagcaggctagaggtctttgcaagggaaggaaatgtgcccaacatcatcattgcgggccctccaggaaccggcaagaccacaagcattctgtgcttggcccgggccctgctgggcccagcactcaaagatgccatgttggaactcaatgcttcaaatgacaggtaggtcttagagtcagacctgtaggggggcgggtgctctgcattgagaattgttacagaaacaacctttctcagcattgggttgtatgcgaagccttgccagctatgtgatttcctccaccccttcccagtgaaagagcgttgctcacttgtcaacttgccggtttattttttttgttttcatggaaattttcaaaaactgttcttctcagccaggcatggtggctcacacctgtaattccagcactttgggaggccgaggcaggtagatcacctgaggcaggaattc

SEQ ID NO: 22278 - DNA, 871 bp, Homo sapiens
ccagaggttacatggccaagattgaaacttagaggagtatagttacataaaagaaggcaaaacgatgtataaatgaaagaaattgagatggtgcacgatgcacagttgaagtgaacttgcggggtttttcagtatctacgattcatagatctggaattcgcggccgcgtcgactctccatcctcatacaaccaattttcagtatcttccagtttcaaagtaaaactgttacgatcatcttcactcacaaacttctcatattcaccactaagcttgtctctcatttcatacacatattcctccactgcgttcttagcatcattccgctccttctccagtttatcctgcatgatcatcttaccctcattttcaatgtacaagttgagcatctctctgtctatctgccataatagctgattctcgattggcaggtccacagtactggtcttcacttttgccttcttggcttggggtggttggtccatctttttatccttggatccagcttgagaggtctccatttcttcagactctgccttattttctgctggtgtctgctgctgttgctcttcaacatgtggttcctcctggtccacttgcatcttctcttcctcctttgcattctgatctgtttccattggctcctcattttcctcagacttgtgaacctccactaaagatgcactggacacactgaaaatgccatggacatttactcgaactttgactttcacttttgaactggagccatcagactgaggagtgactttctgaactgaaaactgagctatagcaggatctggatagggcaaatcctgaggagagctgtagtaggcctcaagagtgaaaggttcctttctataaaatgtaag

SEQ ID NO: 22279 - DNA, 420 bp, Homo sapiens
gagtctgtcctcggagcaggcggagtaaagggacttgagcgagccagttgccggattattctatttcccctccctctctcccgccccgtatctcttttcacccttctcccaccctcgctcgcgtagccatggcggagccgtcggcggccactcagtcccattccatctcctcgtcgtccttcggagccgagccgtccgcgcccggcggcggcgggagcccaggagcctgccccgccctggggacgaagagctgcagctcctcctgtgcggtgcacgatctgattttctggagagatgtgaagaagactgggtttgtctttggcaccacgctgatcatgctgctttccctggcagctttcagtgtcatcagtgtggtttcttacctcatcctggctcttctctctgtcaccatcagcttcg

SEQ ID NO: 22280 - DNA, 589 bp, Homo sapiens
ttgaaacctattgatgactacgaatttaatacgactcactatagggaatttggccctcgaggccaagaattcggcacgagcagagggttaaaatatatccattcagctaacgttctgcaccgtgacctcaagccttccaacctgctgctcaacaccacctgtgatctcaagatctgtgactttggcctggcccgtgttgcagatccagaccatgatcacacagggttcctgacagaatatgtggccacacgttggtacagggctccagaaattatgttgaattccaagggctacaccaagtccattgatatttggtctgtaggctgcattctggcagaaatgctttctaacaggcccatctttccagggaagcattatcttgaccagctgaaccacattttgggtattcttggatccccatcacaagaagacctgaattgtataataaatttaaaagctaggaactatttgctttctcttccacacaaaaataaggtgccatggaacaggctgttcccaaatgctgactccaaagctctggacttattggacaaaatgttgacattcaacccacacaagaggattgaag

SEQ ID NO: 22281 - DNA, 422 bp, Homo sapiens
gtgacgctctgtatattggcatcaggtggcagctgaatatcttttgaattactcgaaggtaaagccagatgccagaatgaaggtgtagccagtgtttcccatatgcccctggagccccacttattgaggccagcagaataggtgcagagatgaagtgagcttagagatgttgcaaatgctctttatcccttcagctctctgatctgctctttcttcatgatacttagtctgcagggcatattaagatcatcccagaggttcaggcagttcctgtcatctctgaaaagactgggggatatgaaatcttccccctaccccacttaatgcgttggatatgatttttcaaagaatgcttcatgcccaaaataccagcctgtttagcagtgttacactgtttgatctgcgggcacttgttgcattgc

SEQ ID NO: 22282 - DNA, 526 bp, Homo sapiens
  misc_feature (1)...(526): n = a,t,c or g
aacagctatgacatgattacgaatttaatacgactcactatagggaatttggccctcgaggccaagaattcggcacgagccggagctgaagaatgacacattcctgcgagcagcctggggagaggaaacagactacactcccgtttggtgcatgcgccaggcaggccgttacttaccagagtttagggaaacccgggctgcccaggactttttcagcacgtgtcgctctcctgaggcctgctgtgaactgactctgcagccactgcgtcgcttccctctggatgctgccatcattttctccgacatccttgttgtaccccaggcactgggcatggaggtgaccatggtacctggcaaaggacccagcttcccagagccattaagagaagagcaggacctagaacgcctacgggatccanaagtggtagcctctgagctaggctatgtgttccaagccatcacccttacccgacaacgactggctggacgtgtgccgctgaatggctntgctggngcccatggacct

SEQ ID NO: 22283 - DNA, 882 bp, Homo sapiens
gaggattcctgagttgaacaaagtggcacgagcagctgcagaggtcgctggtcagttcgtgattaaactaacccatgatgttgaattgaacctggactatgagaggtacaacagccaactgctttcatttgtgagggatctgaaccaatacagagcagacataaaggaaatgggcctgagtttacagtggctgtattctgctcgtggagacttcttccgtgctacttccagactaacaacagatttcgggaatgctgagaaaacagacagatttgtcatgaagaaactcaatgatcgtgtcatgagagtggagtatcacttcctctctccctacgtatctccaaaagagtctcctttccgacatgtcttctggggctccggctctcacacgctgccagctttactggagaacttgaaactgcgtaaacaaaataacggtgcttttaatgaaacgctgttcagaaaccagttggctctagctacttggactattcagggagctgcaaatgccctctctggtgacgtttgggacattgacaatgagttttaaatgtgatacccatagcttccatgagaacagcagggtagtctggtttctagacttgtgctgatcgtgctaaattttcagtagggctacaaaacctgatgttaaaattccatcccatcatcttggtactactagatgtctttaggcagcagccttaaaaaatgtccatgatggaatattcccctatctctagaattttaagtgctttgtaatgggaactgcctctttcctgttgttgttaatgaaaatgtcagaaaccagttatgtgaatgatctctctgaatcctaagggctggtctctgctgaaggttgtaagtggtcgcttactttgagtg

SEQ ID NO: 22284 - DNA, 480 bp, Homo sapiens
cccacgcgtccgcatggagctgccgtagcggacccagcacagccaggagcgtccgggatgagctcagccgcggccgaccactgggcgtggttgctggtgctcagcttcgtgtttggatgcaatgttcttaggatcctcctcccgtccttctcatccttcatgtccagggtgctgcagaaggacgcggagcaggagtcacagatgagagcggagatccaggacatgaagcaggagctctccacagtcaacatgatggacgagtttgccagatatgccaggctggaaagaaagatcaacaagatgacggataagctcaaaacccatgtgaaagctcggacagctcaattagccaagataaaatgggtgataagtgtcgctttctacgtattgcaggctgccctgatgatctcactcatttggaagtattattctgtccctgtggctgtcgtgccgagtaaatggataacccctctagaccgc

SEQ ID NO: 22285 - DNA, 345 bp, Homo sapiens
gggctgttgatgatgggttaaaaatgttcatttaagggctacccccgtgtttaatagatgaacaccacttctacacaaccctccttggtactgggggagggagagatctgacaaatactgcccattcccctaggctgactggatttgagaacaaatacccacccatttccaccatggtatggtaacttctctgagcttcagtttccaagtgaatttccatgtaataggacattcccattaaatacaagctgtttttactttttcgcctcccagggcctgtgggatctggtcccccagcctctcttgggctttcttacactaactctgtacctaccatctcctgcc

SEQ ID NO: 22286 - DNA, 770 bp, Homo sapiens
  misc_feature (1)...(770): n = a,t,c or g
gaactgttgattattagccaggtaatgtgaataaattctataggaacatatgaaaatacaacttaaataataaacagtggaatataaggaaagcaataaatgaatgggctgagctgcctgtaacttgagagtagatggtttgagcctgagcagagacatgactcagcctgttccatgaaggcagagccatggaccacgcaggaagggcctacagcccatttctccatacgcactggtatgtgtggatgatgctgccagggcgccatcgccaagtaagaaagtgaagcaaatcagaaacttgtgaagtggaaatgttctaaaggtggtgaggcaataaaaatcatagtactctttgtagcaaaattcttaagtatgttattttctgttgaagtttacaatcaaaggaaaatagtaatgttttatactgtttactgaaagaaaaagacctatgagcacataggactctagacggcatccagccggaggccanagctgagcactcagcccgggaggcaggctccaggcctcagcaggtgcggagccgtcactgcaccaagtctcactggctgtcagtatgacatttcacgggagatttcttgttgctcaaaaaatgagctcgcatttgtcaatgacagtttcttttttcttactagacctgtaacttttgtaaatacacatagcatgtaatggnacctaangtgngttccaagggnaaatttggnaaattgtaatttccattttattccantnncatccaancttaaattaaa

SEQ ID NO: 22287 - DNA, 418 bp, Homo sapiens
  misc_feature (1)...(418): n = a,t,c or g
nnaccgctntgacatgattacgaatttaatacgactcactatagggaatttggccctcgaggccaagaattcggcacgagggaaacagactacactcccgtttggggcatgcgccaggcaggccgttacttaccagagtttagggaaacccgggctgcccaggactttttcagcacgtgtcgctctcctgaggcctgctgtgaactgactctgcagccactgcgtcgcttccctctggatgctgccatcattttctccgacatccttgttgtaccccagatgttttctccccctccaggcactgggcatggaggtgaccatggtacctggcaaaggacccagcttcccagagccattaagagaagagcaggacctagaacgcctacgggatccagaagtggtagcctctgagctaggc

SEQ ID NO: 22288 - DNA, 639 bp, Homo sapiens
gtgaatcctgctgaaaacttccgtgttctagtgaaacagaagaaggccagctttgaggaagcgagtaaccagctcataaatcacatcgaacagtttttggatactaatgaaacaccgtattttatgaagagcatagactgcatccgagccttccgggaagaagccattaagttttcagaagagcagcgctttaacaacttcctgaaagcccttcaagagaaagtggaaattaaacaattaaatcatttctgggaaattgttgtccaggatggaattactctgatcaccaaagaggaagcctctggaagttctgtcacagctgaggaagccaaaaagtttctggcccccaaagacaaaccaagtggagacacagcagctgtatttgaagaaggtggtgatgtggacgatttattggacatgatataggtcgtggatgtatggggaatctaagagagctgccatcgctgtgatgctgggagttctaacaaaacaagttggatgcggccattcaaggggagccaaaatctcaagaaattcccagcaggttacctggaggcggatcatctaattctctgtggaatgaatacacacatatatattacaagggataatttagaccccatacaagtttataaagag

SEQ ID NO: 22289 - DNA, 663 bp, Homo sapiens
  misc_feature (1)...(663): n = a,t,c or g
acagctatgacatgattacgaatttaatacgactcactatagggaatttggccctcgaggccaagaattcggcacgaggacacctggagctccctcccctggtggctacaacccacacacgccaggctcaggcatcgagcagaactccagcgactgggtaaccactgacattcaggtgaaggtgcgggacacctacctggatacacaggtggtgggacagacaggtgtcatccgcagtgtcacggggggcatgtgctctgtgtacctgaaggacagtgagaaggttgtcagcatttccagtgagcacctggagcctatcacccccaccaagaacaacaaggtgaaagtgatcctgggcgaggatcgggaagccacgggcgtcctactgagcattgatggtgaggatggcattgtccgtatggaccttgatgagcagctcaagatcctcaacctccgcttcctggggaagctcctggaagcctgaagcaggcagggcccggtggacttcgtcnagatgaagagtgatcctccttccttccctggcccttggctgtgacacaagatcctcctgcagggctaggcggnttgttctggatttccttttgtttttccttttagttttccatcttttccctccctggtgctcattggaatctgactaga

SEQ ID NO: 22290 - DNA, 443 bp, Homo sapiens
attttaacttggacatttaaagatcagtcttagtgtttgttcagtcctgttacaaaatagataactgagcacctatcgcataacattttgcggtggcttttagccatgctggggttagatgtgtttgagagtcaaatgaaagctatggatcttctcagcaattaaaaaaaatgcatatattcacattcacagaaacattggcagaacccagttttaatggtacagaggagtagtttatagtgttgatttcaccaaaatcagagggctgaaagagacacttctatagactgcatcctgagcctagtgcagggcttgtctagctaatgtgggcagccaccacccactgtgtatgaacaagtctgaagcaagttggccttgcccttgagagtatatggggaccagtcttcatgtcttggagtaatttgtcaaatgttacccttttt

SEQ ID NO: 22291 - DNA, 327 bp, Homo sapiens
gacatgacatcgtttcaggccacaaaaagaaaggcgatgaccagagccggcaaggcggggctcctgatgctggccaggagtgagtgctaggcaaggctacttcaatgcacagaaccagcagagtctccccttttcctgagccagagtgccaggaacactgtggacgtctttgttcagaagggatcaggttggggggcagcccccagtccctttctgtcccagctcagttttccaaaagacactgacatgtaattcttctctattgtaaggtttccatttagtttgcttccgatgattaaatctaagtcatttgaaaaaaaaaaaaaa

SEQ ID NO: 22292 - DNA, 304 bp, Homo sapiens
cccatatctggtaggacaagtggtggctggtgcccaggcattgcagctgtttgagtcccatgcagggcatcttggcccacagctcttcaacaagtttgcactgccttacatccgtgatgtggccaagcaagtgaaggccaggttgcgggaggcaggcctggcaccagtgcccatgatcatctttgctaaggatgggcattttgccctggaggagctggcccaagctggctatgaggtggttgggatgactttggaccacatcgctacattgccaacctgggccatgggctttatcctgacatgg

SEQ ID NO: 22293 - DNA, 590 bp, Homo sapiens
gaaacgatcccagtgtcggttgcgggatccgcctcctctcagtttgcccctttagccctccacctttcccttctcctctctcgcatttccgccagtcggcttacccgctggccgcctcctgacaagcgggagggatccgcggtggacccagggaagcggaggagcctggcggccaccccctcttcctcacttccctgtactctcatcgctctcggcctccgacacgttccaagatgagatgggattctccaacatggaagatgatggcccagaagaggaggagcgtgtggctgagcctcaagctaactttaacacccctcaagctctacggtttgaggaactactggccaacctactaaatgaacaacatcagatagcgaaggaactatttgaacagctgaagatgaagaaaccttcagccaaacagcagaaggaggtagagaaggttaaaccccagtgtaaggaagttcatcagaccctgattctggacccagcacaaaggaagagactccagcagcagatgcagcagcatgttcagctcttgacacaaatccaccttcttgccacctgcaaccccaatctcaatccgg

SEQ ID NO: 22294 - DNA, 502 bp, Homo sapiens
ggacgtggatatgatggatatctgtaaagagaatggagcctatgatgcaaaacactttttatgttactattattatggagggatgatctatactgggctgaagaactttgaaagagctctctacttttatgaacaggctataactactcctgccatggcggtcagtcatatcatgttggaatcatataaaaagtatattttagtgtctttgatattacttggcaaagtacaacagctaccaaaatatacatctcaaattgtgggtagattcattaagcctcttagcaatgcataccacgagttagcacaagtgtattcaaccaacaacccctcagaactccgaaacctggtgaataagcacagtgaaaccttcactcgcgataacaacatggggctggtgaagcaatgcttgtcatctctttataagaagaatattcagaggctaacaaagacctttttaactctatcattacaagatatggaaatcctgtgaattttccgg

SEQ ID NO: 22295 - DNA, 386 bp, Homo sapiens
gctttgctgtccatgagacccgagtacaaaatgtgtgtgcacaaggagaagacatcctaaataaggtgttgcaggaggaaagtcagaacaaagagatttcttccaagatagaggctctgaatgaaaagaccccttctctggctaaggcaatagctgcttggaagttgcaattggaagacgattatgcctttcaggaattcaactggaaggctgatgtggtagaggcttggatagctgataaggaaacaagcctaaagaccaatggcaatggtgcagaccttggtgacttcctcactcttctggcaaaacaggacactctggatgccagtctgcagagtttccagcaagagagacttcctgagatcactgacctgaaggacaaactg

SEQ ID NO: 22296 - DNA, 483 bp, Homo sapiens
gggatatgtttacagagcaaaggtggaaaatgaggttgatcgcagcattcagaaagtgtataagacctacaatggaaccaaccctgatgctgctagccgggctattgattatgtacagagacagctgcattgttgtggaattcacaactactcagactgggaaaatacagattggttcaaagaaaccaaaaaccagagtgtccctcttagctgctgcagagagactgccagcaattgtaatggcagcctggcccacccttccgacctctatgctgaggggtgtgaggctctagttgtgaagaagctacaagaaatcatgatgcatgtgatctgggccgcactggcatttgcagctattcagctgctgggcatgctgtgtgcttgcatcgtgttgtgcagaaggagtagagatcctgcttacgagctcctcatcactggcggaacctatgcatagttgacaactcaagcctgactttttggctt

SEQ ID NO: 22297 - DNA, 1260 bp, Homo sapiens
ttaaagccatgacatgattacgaatttaatacgactcactatagggaatttggccctcgaggccaagaattcggcacgagggtaagcgaatgggttgggacctcagggttttccggagctgaagaatgacacattcctgcgagcagcctggggagaggaaacagactacactcccgtttggtgcatgcgccaggcaggccgttacttaccagagtttagggaaacccgggctgcccaggactttttcagcacgtgtcgctctcctgaggcctgctgtgaactgactctgcagccactgcgtcgcttccctctggatgctgccatcattttctccgacatccttgttgtaccccaggcactgggcatggaggtgaccatggtacctggcaaaggacccagcttcccagagccattaagagaagagcaggacctagaacgcctacgggatccagaagtggtagcctctgagctagggctatgtgttccaagccatcacccttacccgacaacgactggctggacgtgtgccgctgattggctttgctggtgccccatggaccctgatgacatacatggttgaaggtggtggctcaagcaccatggctcaggccaagcgctggctctatcaagagacctcaggctagtcaccagctgcttcgcatcctcactgatgctctggtcccatatctggtaggacaagtggtggctggtgcccaggcattgcagctgtttgagtcccatgcagggcatcttggcccacagctcttcaacaagtttgcactgccttacatccgtgatgtggccaagcaagtgaaggccaggttgcgggaggcaggcctggcaccagtgcccatgatcatctttgctaaggatgggcattttgccctggaggagctggcccaagctggctatgaggtggttgggcttgactggacagtggccccaaagaaagcccgggagtgtgtggggaagacggtgacattgcagggcaacctggacccctgtgccttgtatgcatctgaggaggagatcgggcagttggtgaagcagatgctggatgactttggaccacatcgctacattgccaacctgggccatgggctttatcctgacatggacccagaacatgtgggcgcctttgtggatgctgtgcataaacactcacgtctgcttcgacagaactgagtgtatacctttaccctcaagtaccactaacacagatgattgatcgtttccaggacaataaaagtttcggagttg

SEQ ID NO: 22298 - DNA, 646 bp, Homo sapiens
  misc_feature (1)...(646): n = a,t,c or g
cagataagtgggtgaacttattgttcttggccatgaggctgggagcctagtcacggagtttagctatagggagaatgtttgtaacttaatcagaaaaaaaatatctgcaaaatgtactccatcattttgatgtctgccaaacccaggttgggagttttaaactttttgttctgcttcagccatggttcacacatatgacacactcccgtcaggaatttctctccttacacgcactgattttcaagtgggagggaattaggggcttatgtatattggataccacctcttgagagtccttcttgcacaggcctgccccttggttgagaaccattgttccaagtgaaggcacaaactctcaatatctaaaataagtgcaaggaagcagtctctttggtcagtaacaagtgcaatggaaagaaaacgatcccttccttcttccactttcacagcttttctctgaactaggagaacctgggggtggatttgggtgggtggggccaaagaggaggcttctattgataaatccagagcctcaaggggcccagccacgtcaaacttctctccctcagggactctccagcaccaaaaggcagaaggtggaagccgttttttccccanangcctggggttttttgaaaaggcctca

SEQ ID NO: 22299 - DNA, 655 bp, Homo sapiens
gatttatgattgagctagatgggaccgagaataagtccaagtttggtgcgaacgccattctgggggtgtcccttgccgtctgcaaagctggtgccgttgagaagggggtccccctgtaccgccacatcgctgacttggctggcaactctgaagtcatcctgccagtcccggcgttcaatgtcatcaatggcggttctcatgctggcaacaagctggccatgcaggagttcatgatcctcccagtcggtgcctgaagaatgtcatcaaggagaaatatgggaaagatgccaccaatgtgggggatgaaggcgggtttgctcccaacatcctggagaataaagaaggcctggagctgctgaagactgctattgggaaagctggctacactgataaggtggtcatcggcatggacgtagcggcctccgagttcttcaggtctgggaagtatgacctggacttcaagtctcccgatgaccccagcaggtacatctcgcctgaccagctggctgacctgtacaagtccttcatcaaggactacccagtggtgtctatcgaagatccctttgaccaggatgactggggagcttggcagaagttcacagccagtgcaggaatccaggtagtgggggatgatctcacagtgaccaacccaaag

SEQ ID NO: 22300 - DNA, 507 bp, Homo sapiens
gccttgctggcaatgggttcctggggcagaggaccaggaggctggttgtgggggagtccatcctgatgtttgggactggggaggggcacaaaggaggcagggcccagctctagctctcttcccttctctggccaggacaagtggcagcacctggcctcagagggcagcagttgtctggacatgtttgagcacatcagcctcatgaccttggacagtctacagaaatgcatcttcagctttgacagccattgtcaggagaggcccagtgaatatattgccaccatcttggagctcagtgcccttgtagagaaaagaagccagcatatcctccagcacatggactttctgtattacctctcccatgacgggcggcgcttccacagggcctgccgcctggtgcatgacttcacagacgctgtcatccgggagcggcgtcgcaccctccccactcagggtattgatgattttttcaaagacaaagccaagtccaagactttggatttcatt

SEQ ID NO: 22301 - DNA, 502 bp, Homo sapiens
  misc_feature (1)...(502): n = a,t,c or g
tttgaantccattagcctatgacatgattacgaatttaatacgactcactatagggaatttggccctcgaggccaagaattcggcacgaggcagacatggccaagtccaagaaccacaccacacacaaccagtcccgaaaatggcacagaaatggtatcaagaaaccccgatcacaaagatacgaatctcttaagggggtggaccccaagttcctgaggaacatgcgctttgccaagaagcacaacaaaaagggcctaaagaagatgcaggccaacaatgccaaggccatgagtgcacgtgccgaggctatcaaggccctcgtaaagcccaaggaggttaagcccaagatcccaaagggtgtcagccgcaagctcgatcgacttgcctacattgcccaccccaagcttgggaagcgtgctcgtgcccgtattgccaaggggctcangctgtgccggccaaaggccaangccataggccaangccaaggatcaaaccaaggcc

SEQ ID NO: 22302 - DNA, 721 bp, Homo sapiens
  misc_feature (1)...(721): n = a,t,c or g
ggccttattaatgatatggtcagatttaatgtactacaatatgttgtcccagaagtgaaagacctttacaattggcttgaagtagaatttaacccattaaaactctgtgagcgagtcacaaaggttctaaattgggttagggaacaacctgaaaaggaaccggaattgcagcagtatgtgccacaactgcaaaacaacaccatcctccgccttctgcagcaggtgtcacagatttatcagagcattgagttttctcgtttgacttctttggttccttttgttgatgctttccaactggaacgggccatagtagatgcagccaggcattgcgacttgcaggttcgtattgatcacacttctcggaccctgagttttggatctgatttgaattatgctactcgagaagatgctccgattggtcctcatttgcaaagcatgccttcagagcagataagaaaccagctgacagccatgtcctcagtacttgcaaaagcacctgaagtcattaaaccagctcatatactgcaagagaaagaagaacagcatcagttggctgtcactgcataccttaaaaattcacgaaaagagcaccagcggatcctggctcgccgccagacaattgaggagagaaaagagcgccttgagagtctgaatattcagcgtgagaaagaagaattggaacagagggaagctgaactccagaagtgcggaagntnaggaa

SEQ ID NO: 22303 - DNA, 637 bp, Homo sapiens
caaaacaaaactctcttggaaaggtattctctctgaaagcagttcccctgtccagaagatgcttatggcccacgtatcttcttccaactggtcaagacagttaaatacttcaaaatgccccaagaggtcccaaaatttagtcaaggcaagtatcaatcaggctacatactttctaggtgtgacaaatatcagagttttgagaaagacattaaaatcatcatggaatccttggaggcctgagatactaaagcaccaatgcagacagtcttataggaagtctggaaccaatacttcttccgtcagtaacataggcctttctagactttggtctagaagaagatgatttttttgtgcttcgagttagggatctgtccttttgactttaaccttctaacggcttccctcatatgtttgggttgtagtggtggcatttctccccacttctcacacacatccagtgcttcttctaccacctccccgacgaaaaccttggaaataccagacatagcaataacaacattctgagacacagaggtgccagtgatggactggatcagccttttgatggctgccttagggaaagctgagcggcgatacatttcataacggttcagctgctcctcagaataagaagaaa

SEQ ID NO: 22304 - DNA, 668 bp, Homo sapiens
gaccttttccccaatgatgaagacgacccagggcaaggaatccagcagcagcacagcagtgcagccgcggctgcccagcagggcggctacgagatccccgcgcggctgcggacgctccacaacctggtgatccagtacgcctcgcaggggcgctacgaggtagctgtgcccctctgcaagcaggccctggaggacctggagaagacttcaggacacgaccacccggacgtggccaccatgctcaacatcctggccttggtgtacagggatcagaataaatacaaagatgcagctaacctactgaatgatgccttggctattcgtgagaaaactttgggcaaagatcatcctgcggtggcggcgactttgaataaccttgcagtcctttatggtaaaagagggaagtacaaagaagcagagccgttgtgtaaaagagctctggaaatccgagaaaaggttttggggaaggatcaccccgatgttgccaagcagttaaataacttggccttactgtgccagaaccagggcaagtatgaagaagtagaatattattatcaaagagccctcgagatctaccagacaaaactgggacctgatgaccccaacgtggctaagacgaaaaataacctggcatcctgctatttgaaacaaggaaagttcaagcaagc

SEQ ID NO: 22305 - DNA, 458 bp, Homo sapiens
gaacccttatgacatgattacgaatttaatacgactcactatagggaatttggccctcgaggccaagaattcggcacgagggaactcctccgtaccctcaaccagccagacagccagctccagctgaccaccggcaatggcctgttcctcagcgagggcctgaagctagtggataagtttttggaggatgttaaaaagttgtaccactcagaagccttcactgtcaacttcggggacaccgaagaggccaagaaacagatcaacgattacgtggagaagggtactcaagggaaaattgtggatttggtcaaggagcttgacagagacacagtttttgctctggtgaattacatcttctttaaaggcaaatgggagagaccctttgaagtcaaggacaccgaggaagaggacttccacgtggaccaggcgaccaccgtgaaggtgcctatgatgaagcg

SEQ ID NO: 22306 - DNA, 723 bp, Homo sapiens
ctatgacatgattacgaatttaatacgactcactatagggaatttggccctcgaggccaagaattcggcacgagggcgcttcgggagccgcggcttatggtgcagacatggccaagtccaagaaccacaccacacacaaccagtcccgaaaatggcacagaaatggtatcaagaaaccccgatcacaaagatacgaatctcttaagggggtggaccccaagttcctgaggaacatgcgctttgccaagaagcacaacaaaaagggcctaaagaagatgcaggccaacaatgccaaggccatgagtgcacgtgccgaggctatcaaggccctcgtaaagcccaaggaggttaagcccaagatcccaaagggtgtcagccgcaagctcgatcgacttgcctacattgcccaccccaagcttgggaagcgtgctcgtgcccgtattgccaaggggctcaggctgtgccggccaaaggccaaggccaaggccaaggccaaggatcaaaccaaggcccaggctgcagccccagcttcagttccagctcaggctcccaaactttacccaggcccctacaaaggcttcagagtagatatctctgccaacatgaggacagaaggactggtgcgaccccccacccccgcccctgggctaccatctgcatggggctggggtcctcctgtgctatttgtacaaataaacccgaaggcaggaaaaaaaaaaaaaa

SEQ ID NO: 22307 - DNA, 718 bp, Homo sapiens
  misc_feature (1)...(718): n = a,t,c or g
cggacgcgtgggctgtaaaggagatatataatgaaaaggaattattacaaggtaaattggaccttcttagtgataccaacatggtagactttgctatggatgtatacaaaaacctttattctgatgatattcctcatgctttgagagagaaaagaaccacagtggttgcacaactgaaacagcttcaggcagaaacagaaccaattgtgaagatgtttgaagatccagaaactacaaggcaaatgcagtcaaccagggatggtaggatgctctttgactacctggcggacaagcatggttttaggcaggaatatttagatacactctacagatatgcaaaattccagtacgaatgtgggaattactcaggagcagcagaatatctttatttttttagagtgctggttccagcaacagatagaaatgctttaagttcactctggggaaagctggcctctgaaatcttaatgcagaattgggatgcagccatggaagaccttacacggttaaaagagaccatagataataattctgtgagttctccacttcagtctcttcagcagagaacatggctcattcactggctctgttggtttcttcaatcaccccaaaggtcgcgataatattattgcctcttcctttatcagccncaatatcttaatgcaattcagacaatgnggccccccatcttcgctatttgctaccggnggcataacca

SEQ ID NO: 22308 - DNA, 825 bp, Homo sapiens
  misc_feature (1)...(825): n = a,t,c or g
gggctggagtacagtggcatgatctctgctcactgccaacctccacttctcagttttaagtgatttcttctgtctcagcttcctgagtagctgggattacagatgtgcatcacaaaaaccagctaatttttgaatttttttttgtagaggtggggttttgctgtgtgttccaggctggtcttgaacatctggccttaagtgatttgcctaccccagcctcccaaagtgctggaattacaggcatgagccaccacgcccagccctttctagctttttgatgtggacattagtgctataaatttccctcttttcttggtttcctgtgattactttattctatcttggggagtcatcagggaaataatcttaaatttacaatcaacatatangtttaaatccatataattgtgtgagaataaccctttgtcaattgaaggtgatgtttgaaaggtttctaactgtgccttttagttagtcttaaatttctaattgtagttaaaaacatgccattgtcatttctgaaattttaagtatatggtttagaagtggttagtatagttctattgttttgcagtagcttttagataatttttgtcttacaaaagtaaaagtgaatactcattacttgtgaaagaagttagttagcttgccttaggtagatagcaagagaagagtccctggaaagtccctggtcagtgcctcatccctgcataacatataaagaagcctggaaaaaatcaagctgcagacactaacaagggaactaacatatgttgttgtgcttggagacatgcccgtggctgcagagatagaaaaaacctctgg

SEQ ID NO: 22309 - DNA, 545 bp, Homo sapiens
accagctatgacatgattacgaatttaatacgactcactatagggaatttggccctcgaggccaagaattcggcacgagagaagctaccatgagcttcaataccctgttatgttttgcatttgcttttgtttggatgtcgagcttatcagggagtttatcttattccctagtgcagtgggcttgcatcagcagatgtctttttgtgttgagtgattcaagttccaggccagtagatggttctatgggaaagaactggctatggctgatacagatgtgtatatattggatccctgttaactgagagaagctatctgtgtaataagacattgatctgacctgtggaaggcacagccatctaatcttcctgcttagccaagtagaaggcccgcttacaggttacacaatggcagacacaagcaccagcaggaggaagaagtttcagcgggcaaatatcaagttcctagaggtatgccgaacatgaagctgggaaacctctgctcttcacccagtttaacagaggttatttggggttgttgttgttgtt

SEQ ID NO: 22310 - DNA, 599 bp, Homo sapiens
caaagctgaagtcggctaggtttgcaaagctgtgggctgagcactcaggcaatcacactctcagaaactgcggcggctctggactgcagcctcccaaggctccatgccagacaaagcatgcgtgtcacacttgctacaatagcctggatggtttcttttgtctccaattattcacacacagcaaatattttgccagatatcgaaaatgaagatttcatcaaagactgcgttcgaatccataacaagttccgatcagaggtgaaaccaacagccagtgatatgctatacatgacttgggacccagcactagcccaaattgcaaaagcatgggccagcaattgccagttttcacataatacacggctgaagccaccccacaagctgcacccaaacttcacttcactgggagagaacatctggactgggtctgtgcccattttttctgtgtcttccgccatcacaaactggtatgacgaaatccaggactatgacttcaagactcggatatgcaaaaaagtctgtggccactacactcaggttgtttgggcagatagttacaaagttggctgcgcagttcaattttgccctaaagtttctgg

SEQ ID NO: 22311 - DNA, 427 bp, Homo sapiens
cacgcgtccgctccctcgctctcccacaccactggcaccaggccccggacacccgctcctgctgcaggagaatggctactcatcacacgctgtggatgggactggccctgctgggggtgctgggcgacctgcaggcagcaccggaggcccaggtctccgtgcagcccaacttccagcaggacaagttcctggggcgctggttcagcgcgggcctcgcctccaactcgagctggctccgggagaagaaggcggcgttgtccatgtgcaagtctgtggtggcccctgccacggatggtggcctcaacctgacctccaccttcctcaggaaaaaccagtgtgagacccgaaccatgctgctgcagcccgcggggtccctcggctcctacagctaccggagtccccactggggcaagcacctactccgtgt

SEQ ID NO: 22312 - DNA, 443 bp, Homo sapiens
gagaaacccaacccggctcctcaggagccagtggcatcctgggcactgcagggaaagatgctttggtaagtccaggagcatctgaccacctgagactccccttggccaagcaagttcaagtgtggcaccgcacccttgcctggcgtcccgtggcctcctgtgttgcggcacagggtcgtgatgatactcgtcaatcatgccatcattttgtcttcatggcaaagagaccttgggtttctctttatcccttcttgagtttttcttaagttttaatatagaccatgaggcttttatttttggtttgctctttccccaggaaattgttgatgttcctcttcctcctttcaggggaggtgtctgcaggtgtgctgcttcaggtgccatgcgggatcggctggccctgccgctgcggcaggagtcttgccacttgccccacacctgaa

SEQ ID NO: 22313 - DNA, 524 bp, Homo sapiens
  misc_feature (1)...(524): n = a,t,c or g
anaccgtttgacatgattacgaatttaatacgactcctatagggaatttggccctcgaggccaagaattcggcacgagtcgtgtgtttgaagtgagtcttgctgatttgcagaatgatgaagttgcatttagaaaattcaagctgattactgaagatgttcagggtaaaaactgcctgactaacttccatggcatggatcttacccgtgacaaaatgtgttccatggtcaaaaaatggcagacaatgattgaagctcacgttgatgtcaagactaccgatggttacttgcttcgtctgttctgtgttggttttactaaaaaacgcaacaatcagatacggaagacctcttatgctcagcaccaacaggtccgccaaatccggaagaagatgatggaaatcatgacccgagaggtgcagacaaatgacttgaaagaagtggtcaataaattgattccagacagcattggaaaagacatagaaaaggcttgccaatctatttatcctctccatgatgncttcgtta

SEQ ID NO: 22314 - DNA, 451 bp, Homo sapiens
ggtgatttttgaatttgattcaaagggaaattattgcagaagaatgcctttccctcattttataactttaaaaacttggattaaccactcaatgtccactttctttgacttacagtataaccatgtagccaattgtggcccactaaaatctacagaagttaatgtgggtcaccattttggtcagaagcatacattcctgtcagacaactagttgtctgacagaaatgttaggcttcatgtatgttaccccagtactgttagaaacatttgtactaggttataagatctttctgtgacaggtaacaaatttggggaagacagcacaatcttcttgaatgtagctcttgggaatgcattattacatccatttctgtaacataataatatgttgcatgcagttatattttctatttagtctgtatattttgttcttcatagtctgttttttcta

SEQ ID NO: 22315 - DNA, 619 bp, Homo sapiens
cttaccaataatgtaagagaggaaagactgccatactgaaatacattttgctgctgccaaagacggtcctattgtgaagaaatgagaaaaaaatagcaagcgccagggccaattaagcatccctctccccgtttttctgaatacaacacagtgatcctcaccgtaacccctacacatgttaatggattgttagagtatcaaattattttcaatgtgctttcttgttgtataaacctttacctgcactttctatttaaggggcaaaaaagggaatgtgagtgtaaaacacctgctcagtgtgtgtctgttggactttggagcaattcaacaaacaagcctgctctgtttaatctatttagtgagtgcaaggcttctaaatcttccccctcagctacctatataaaagacaagactgaaaaggacagccactcctggatggctggagaagcatttggatttagaccgggtttaattggcatatgaaaaagcaaaacgtcagctcttcagtcaggctctgagaagctctctttatgtgggggggacataggctaaaggccctgaggcaaagcctggggtcacttacattccagctactctcaatccaagtagcaatttccct

SEQ ID NO: 22316 - DNA, 695 bp, Homo sapiens
  misc_feature (1)...(695): n = a,t,c or g
taaccnacatatctatancagggaacccggtttctgaggttaagaacctggtatgagctcttcctagactcccggaaagaggacccagtggtacccgccgaagaatcggacaaagcggaactctaagaatgagaagacgcctcggtcggaacgctcggaaaagtaaccaaaggcaaagccggtaaattcaaggcgaagaaatcttaagccggaagagataacgtttctattccacggtagaagaacaaccttcgaaaccatagttacgaaggtagacgttaagtaaaaagccgtcgaagaagaagaagggcgactccgacatcgtagtagcaaaagcggaacccgacgaagaacctagcggagtattangcagaaggcgtaggagaagaggtaccgatcttactanccttcaaaaacaaaggntttaaattcaaaagggggaaaaaagngttnggngnttaagcgcgaaaaaantncaatctttggggnaatttcagggaaaaaaagcgaaaattggaantccggntancgacgaanttanctanaaagcgcccggaaaaaatanattcgcggcacctaaaaaaactnccgtcnagaaagtaatagttgaagattcaacatatacccgacccttanaaaaaaggcgacgacntcacacgacacacgtacaacggccnaaggancgaagccaattt

SEQ ID NO: 22317 - DNA, 384 bp, Homo sapiens
gccggtacatcggggatttctggctctttcctcttcgccttaaattcgggtgtcttttatgaataatcaaaagcagcaaaagccaacgctatcaggccagcgttttaaaactagaaaaagagatgaaaaagagaggtttgaccctactcagtttcaagactgtattattcaaggcttaactgaaaccggtactgatttggaagcagtagctaagtttcttgatgcttctggagcaaaacttgattaccgtcgatatgcagaaacactctttgacattctggtggctggtggaatgctggccccaggtggtacactggcagatgacatgatgcgtacagatgtctgcgtgtttgcagcccacgaagatctagagaccatgcaagc

SEQ ID NO: 22318 - DNA, 657 bp, Homo sapiens
ctttggaatgtgaaattttatgaataagcatcagaagccagtgctaacaggccagcggttcaaaactcggaaaagggatgaaaaagagaaattcgaacccacagtcttcagggatacacttgtccaggggcttaatgaggctggtgatgaccttgaagctgtagccaaatttctggactctacaggctcaagattagattatcgtcgctatgcagacacactcttcgatatcctggtggctggcagtatgcttgcccctggaggaacgcgcatagatgatggtgacaagaccaagatgaccaaccactgtgtgttttcagcaaatgaagatcatgaaaccatccgaaactatgctcaggtcttcaataaactcatcaggagatataagtatttggagaaggcatttgaagatgaaatgaaaaagcttctcctcttccttaaagccttttccgaaacagagcagacaaagttggcgatgctgtccggggattctgctgggcaatggcaccctgcccgccaccatcctcaccagtctcttcaccgacagcttagtcaaagaaggcattgcggcctcatttgctgtcaagcttttcaaagcatggatggcagaaaaagatgccaactctgttacctcgtctttgagaaaagccaacttag

SEQ ID NO: 22319 - DNA, 452 bp, Homo sapiens
  misc_feature (1)...(452): n = a,t,c or g
gnnnnnnngnntnnnttnnnctttgatacctttngacacgattacgaatttaatacgactcactatagggaatttggccctcgaggccaagaattcggcacgagcaagaagaaagtggttgatccattttctaagaaagattggtatgatgtgaaagcacctgctatgttcaatataagaaatattggaaagacgctcgtcaccaggacccaaggaaccaaaattgcatctgatggtctcaagggtcgtgtgtttgaagtgagtcttgctgatttgcagaatgatgaagttgcatttagaaaattcaagctgattactgaagatgttcagggtaaaaactgcctgactaacttccatggcatggatcttacccgtgacaaaatgtgttccatggtcaaaaaatggcagacaatgattgaagctcacgttggaaaagccactggggacgagac

SEQ ID NO: 22320 - DNA, 432 bp, Homo sapiens
gatcttccgtaacgtggaagttttgatttacgtgtttgacgtggagagccgcgaactggaaaaggacatgcattattaccagtcgtgtctggaggccatcctccagaactctcctgacgccaaaatcttctgcctggtgcacaaaatggatctggttcaggaggatcagcgtgacctgatttttaaagagcgagaggaagacctgaggcgtctgtctcgcccgctggagtgtgcttgttttcgaacgtccatctgggatgagacgctctacaaagcctggtccagcatcgtctaccagctgattcccaacgttcagcagctggagatgaacctcaggaattttgcccaaatcattgaggccgatgaagttctgctgttcgaaagagctacattcttggttatttcccactaccagtgcaaagagcagcgcga

SEQ ID NO: 22321 - DNA, 904 bp, Homo sapiens
  misc_feature (1)...(904): n = a,t,c or g
gcttaaacaaaagtttgaaattatccatatcatctcagtgaacctactggtggactcccaattgacaagattgagcaatagaaaaaaattcctttcctttgaatgatagctgtgattcaccccaccccattttcttgtttctggtccatccgatgagacggatgctctgatgctctgaggcttctgggaggctgggccctggaggcaacgtgctgcaggcgcactctgtcagagtgaacagcaccgcgagacaggccaggctcgtggctcggaagacaaaccccacacacactcaaggggtcgaaaacaaaccccacacgagggctctcacctccttctcctaggtagtatttattttcagcacctgtttgatgcagtttttaatcctctacctattgcactgttgtgactcgttggccattatttgatttttgtacgaaaaaaagctttgttatagaaatcagcatactatttttttaaatctggagagaagatattctggtgactgaaagtatggtcgggtgtcagatataaatgtgcaaatgccttcttgctgtcctgtcggtctcagtacgttcactttatagctgctggcaatatcgaaggttccttttttgtttgtgtaaactctaatttctatcaaggtgtcatggatttttaaaattagtatttcattacaaatgtctcagcattggttaactaatttttgccaggaccattattgatcaagcaaataaattcaacagccatttgggaaaaagaaaagcttctagtttttttgtacacattctttctgtgaggagattgagtactctgcagctggcgaggagttggttgaggcacttcttcaaggccaagggggaacacagtggtttgtttccagctcactttgnacccctnacct

SEQ ID NO: 22322 - DNA, 415 bp, Homo sapiens
accgttatgacatgattacgaatttaatacgactcactatagggaatttggccctcgaggccaagaattcggcacgagctgaagaataaataaatactgatcgtcatggattatctgtgtaataaatatgtagatataaatctgtacagtaatatccatgagtctgctaaattaaataattgaaaaacaagttggaggttgggcacagtggctcaggctgggattacaggcatgagccaccgtgcccagcctattgtagtagaattctaattagtacatatggaaggaatgatggaaataatttgtcagtagttacttacaagtagtcatttttgtaggtaagcactaccaatggatgctattataaaattagtgataatatgagaaacggtatttatatagtctgaaaatatct

SEQ ID NO: 22323 - DNA, 725 bp, Homo sapiens
agggccttcagcctttggtgttcaatccagatactggactccaatctgaactcctcagttttgtgatggatcacgtttttattgaccaagacgaggagaaccagagcatggagggtgatgaagaagatgaagctaataaaattgaggccttacataaaagaaggaatctacttgctgctttcagcaaacttatcatttatgacattgttgacatgcatgcagctgcagacatcttcaaacactacatgaagtattacaatgactatggtgatattattaaggaaacactgagtaaaaccaggcagattgataaaattcagtgtgccaagactctcattctcagtttgcaacaggtatttaatgaacttgttcaagagcaaggtcccaacctagataggacatctgcccatgtcagtggcattaaagaactggcacgtcgctttgcccttacatttggattggaccagattaagacacgagaagcagttgccacacttcacaaggatggcatagagtttgcatttaaataccaaaatcagaaaggacaagagtatccacctcctaatctggcttttcttgaagtactaagtgaattttcttctaaacttcttcgacaggacaaaaagacagttcattcatacctagagaaattccttaccgagcagatgatggaaaggagggaggatgtatggcttccactcatctcctatagaaattcattagtc

SEQ ID NO: 22324 - DNA, 683 bp, Homo sapiens
ggaaacaccctgaccttcttctgtcaggggcactttccaggctatgggtgtctgatgtctccacgtggaagaggtgggggaaagaggagtttctgaagagaactttttgctcctctgtctcaaaatgccagactcttggcttctaccctgtgtcaccgtgggcagtggcaggtggcctggcactgcatggagccagcacgttgacctccctctcagctccctgctcagggacggtggacaggttgcctactgggacactctaggttgctgggtccatggggaggattgtgggaggagaagcagtgccttccctctcgtgtggggtgggggctctctcttcttggtgcctgctgtctttctactttttaatttaaatacccaacctctccatcacagctgcatccctgagagtgggagggggctgtagtggtagctggggctcccaagaacgactcgggaatgtcatctccatcttcacccttcagagagcagtcctttctctgtgcagctggagacgctggtgaggagagccgggtccaggttcttaagaatgaggtgcggaggggctctccggtgctgctgggctgggttgagcaagcctacgcagacaagtgtgtgtgtggaccatccgcacctccagcccccccccccaccctctttgtctcagcgtgttatgtgcaatg

SEQ ID NO: 22325 - DNA, 865 bp, Homo sapiens
gctgaccagcaccatggcggttggcaagaacaagcgccttacgaaaggcggcaaaaagggagccaagaagaaagtggttgatccattttctaagaaagattggtatgatgtgaaagcacctgctatgttcaatataagaaatattggaaagacgctcgtcaccaggacccaaggaaccaaaattgcatctgatggtctcaagggtcgtgtgtttgaagtgagtcttgctgatttgcagaatgatgaagttgcatttagaaaattcaagctgattactgaagatgttcagggtaaaaactgcctgactaacttccatggcatggatcttacccgtgacaaaatgtgttccatggtcaaaaaatggcagacaatgattgaagctcacgttgatgtcaagactaccgatggttacttgcttcgtctgttctgtgttggttttactaaaaaacgcaacaatcagatacggaagacctcttatgctcagcaccaacaggtccgccaaatccggaagaagatgatggaaatcatgacccgagaggtgcagacaaatgacttgaaagaagtggtcaataaattgattccagacagcattggaaaagacatagaaaaggcttgccaatctatttatcctctccatgatgtcttcgttagaaaagtaaaaatgctgaagaagcccaagtttgaattgggaaagctcatggagcttcatggtgaaggcagtagttctggaaaagccactggggacgagacaggtgctaaagttgaacgagctgatggatatgaaccaccagtccaagaatctgtttaaagttcagacttcaaatagtggcaaataaaaagtgctatttgtgaaaaaaaaaaaaaa

SEQ ID NO: 22326 - DNA, 442 bp, Homo sapiens
gtgaggtcatcatcagatttgaaatatttaaagtggatacaaaactatttcagcaatgcagacaattaagtgtgttgttgtgggcgatggtgctgttggtaaaacatgtctcctgatatcctacacaacaaacaaatttccatcggaatatgtaccgactgtttttgacaactatgcagtcacagttatgattggtggagaaccatatactcttggactttttgatactgcagggcaagaggattatgacagattacgaccgctgagttatccacaaacagatgtatttctagtctgtttttcagtggtctctccatcttcatttgaaaacgtgaaagaaaagtgggtgcctgagataactcaccactgtccaaagactcctttcttgcttgttgggactcaaattgatctcagagatgacccctctactattgagaaactt

SEQ ID NO: 22327 - DNA, 324 bp, Homo sapiens
tgacaattgggcggcaatatttactgaagaagaagacagggacaattgtggaagaaagagtaaatcgtcctggatggaatgaagatgatgatgtatctgtttcagatgagagtgagctccccacaagtaccaccctgaaggcctccgagaagtctacaatggaacagttggtggaaaaagcttgtttcagagactatcagcgtttaggtttaggaaccataagtggcagctcttcccgttcaagacccgagagtcgacgcggccgcgaattccagatctatgaatcgtagatactgaaaaaccccgcaagttcacttcaactgt

SEQ ID NO: 22328 - DNA, 312 bp, Homo sapiens
  misc_feature (1)...(312): n = a,t,c or g
ggaaattttgtccaaaaacatggtgaatattggctgggcaataaaaatcttcacttcttgaccactcaagaagactacactttaaaaatcgaccttgcagattttgaaaaaaatagccgttatgcacaatataagaatttcaaagttggagatgaaaagaatttctacgagttgaatattggggaatattctggaacagctggagattcccttgcggggaattttcatcctgaggtgcagtggtgggctagtcaccaaagaatgaaattcacncgtgggacaganatcatgacnctatgangggaactgcca

SEQ ID NO: 22329 - DNA, 534 bp, Homo sapiens
  misc_feature (1)...(534): n = a,t,c or g
annnnnnnannnnnnnnnnnannannannntnnnnntnnttgnnnnnnnnnnngnnnnnnnnnngnnnnccttgaaccctttaagatacgaattatacgactcatatagggaatttggccctcgaggccaagaattcggcacgaggcctatgctgctgcgggccctggcccaggctgcacgtgcaggacctcctggtggccggagcctccacagcagtgcagtggcagccacctacaagtatgtgaacatgcaggatcctgagatggacatgaagtcagtgactgaccgggcagcccgcaccctgctgtggactgagctcttccgaggcctgggcatgaccctgagctacctgttccgggaaccggccaccatcaactacccgttcgagaagggcccgctgagccctcgcttccgtggggagcatgcgctgcgccggtacccatccggggaggagcgttgcattgcctgcaagctctgcgaggccatctgccccgcccaggccatcaccatcgaggctgaccaagagctgatgg

SEQ ID NO: 22330 - DNA, 659 bp, Homo sapiens
  misc_feature (1)...(659): n = a,t,c or g
tatgacatgattacgaatttaatacgactcactatagggaatttggccctcgaggccaagaattcggcacgagctggcctgcttggcaaggcaagtagcggcggcgcttcaagatgcgctgcctgaccacgcctatgctgctgcgggccctggcccaggctgcacgtgcaggacctcctggtggccggagcctccacagcagtgcagtggcagccacctacaagtatgtgaacatgcaggatcccgagatggacatgaagtcagtgactgaccgggcagcccgcaccctgctgtggactgagctcttccgaggcctgggcatgaccctgagctacctgttccgggaaccggccaccatcaactacccgttcgagaagggcccgctgagccctcgcttccgtggggagcatgcgctgcgccggtacccatccggggaggagcgttgcattgcctgcaagctctgcgaggccatctgccccgcccaggccatcaccatcgaggctgagccaanagctgatggcagccgccggaccacccgctatgacatccacatgaccaagtgcatctactgcggttctgcaagaggctgtcccttgatgcatntccaagggccaaatttanttcccaacgggaaccatgaggagctgcgttnaanaagg

SEQ ID NO: 22331 - DNA, 494 bp, Homo sapiens
tgacatgattacgaatttaatacgactcactatagggaatttggccctcgaggccaagaattcggcacgagcggcacgagctctccctgctgatctgagtgaagagcgtgggagtttagtccagcgggcagggctgcattttggggtactaatagcacacaaatgcctgggttagcaggttgcacagtcaggtattttacttctgtgtttgtgtctggagcaaaccctgacatctcagttctcattgctgtgtgtattggttcccagacacttcatttttagatcccctttaaattaggagggaaaaacaacataagcataagagcatccccagcagcgatgttcattcagtgcctctgaaggctggagggctgcttgttgctgggtgagactcggaggggaaccgactcagggtcaggaatgatgacatcccacggtgggtccacagtgaagaatctttcccgcttcactgggggacgccttaacagccctta

SEQ ID NO: 22332 - DNA, 455 bp, Homo sapiens
  misc_feature (1)...(455): n = a,t,c or g
ngcttgacatgattacgaatttaatacgactcactatagggaatttggccctcgaggccaagaattcggcacgagctgcaaagctgaaaatgcagttgaatgcttccaaacaaaggcagcaacagttacaaaagaattaagagaaagcagcttgttaaatcaacatgcatgtgcagtaatgaaaaattttgggacccgaactttccaagccataactgttactaaactgagtcanaagtttaccaaagttaattttactgaaatccagaaactagtcctggatgtggcccatgtacatgagcactgttgcagagganatgtgctggattgtctgcaggatggggaaaaaatcatgtcctacatatgttctcaacaagacactntgtcaaacaaaataacagaatgctgcaaactgaccacgctggaacgtggtcaatggataattcatgcagaaa

SEQ ID NO: 22333 - DNA, 500 bp, Homo sapiens
gtcctatttctcattttgttgataatttctgcatttaatggtctgtgctttaaatggtaacgctacggccccaggtcactgcgaggcacttaccatgtagatacgggctcaaaagtcacctctcagagacctacgtcatccactcaggaattcgcgcctctcatacttgcctgtctcattttatcttccttctagcagctgtctgaaattggttcgtctgttttcttgtttatggtattctcaagcccttgacagaccggctagtgtggttttcccgtgcatcttcagcctggcacattatggacacttaaatactacgtattgatctaatattgttgggttaatttttccatcccacccttttcttaatcgcttccgtggatggatgaagggtgctgttcatttccattagatgtatgtgaaggcacagtgaaaatggaaatgttcttggagctacttcctcaaaatgtatccttagtcacctcagtgcaacagctggg

SEQ ID NO: 22334 - DNA, 564 bp, Homo sapiens
atatcctgtctatctcagagtctccagcacctaccacaatgcctggcacttactagatgttcagtagatcctcaatggataagtattccagagatggagtgcgggtaatgacaagatgcaggatacgggccaggcacagtggctcacgcctgtaatcccagcactttgggaggtcaaggcaggtggatcatctgaggtcaggagtttgagaccagcctgaccaacatggagaaaccccgtctctactaaaaatacaaaattagccaggcatggtggcgcatgcctgtaatccaagctactcgggaggctgaggcagcagaatcacttgaagctgggaggcagagtttgtggtgagccgagatcacaccattgcattccagcctgggcaacaagagcgaaactccgtctcaaaaaaaataaaataaaataaaataaagttagaaaaaataagaggagaaaacagagatgaagaataaaaaggggagacctccatggttggcctatttacttaatcaaatggctcttattgagagtgtcacttctgcccttgagctttttgatgga

SEQ ID NO: 22335 - DNA, 464 bp, Homo sapiens
  misc_feature (1)...(464): n = a,t,c or g
gnttgacatgattacgaatttaatacgactcactatagggaatttggccctcgaggccaagaattcggcacgaggcagtggaaaaaaagcccacatttgaggtggctcatctagacctggcaagaatgtatatagaagcaggcaatcacagaaaagctgaagagaattttcaaaaattgttatgcatgaaaccagtggtagaagaaacaatgcaagacatacatttccactatggtcggtttcaggaatttcaaaagaaatctgacgtcaatgcaattatccattatttaaaagctataaaaatagaacaggcatcattaacaagggataaaagtatcaattctttgaagaaattggttttaaggaaacttcggagaaaggcattagatctggaaagcttgagcctccttgggttcgtctacaaattggaaggaaatatgaatgaagccctggagtctatgagc

SEQ ID NO: 22336 - DNA, 391 bp, Homo sapiens
agctcttgagttattaaaaaaggccttgcaggaaacacccacttctgtcttactgcatcaccagatagggctttgctacaaggcacaaatgatccaaatcaaggaggctacaaaagggcagcctagagggcagaacagagaaaagctagacaaaatgataagatcagccatatttcattttgaatctgcagtggaaaaaaagcccacatttgaggtggctcatctagacctggcaagaatgtatatagaagcaggcaatcacagaaaagctgaagagaattttcaaaaattgttatgcatgaaaccagtggtagaagaaacaatgcaagacatacatttccactatggtcggtttcaggaatttcaaaagaaatctgacgtcaatgcaatt

SEQ ID NO: 22337 - DNA, 523 bp, Homo sapiens
  misc_feature (1)...(523): n = a,t,c or g
ggnnnngtnnnttntnttnnttgntacngaatacncttatgacatgnntacgaatttaatacgactcactatagggaatttggccctcgaggccaagaattcggcacgagcttttttgggctgctcgctatgacaaaataattccatcttgctgcaaagctgaaaatgcagttgaatgcttccaaacaaaggcagcaacagttacaaaagaattaagagaaagcagcttgttaaatcaacatgcatgtgcagtaatgaaaaattttgggacccgaactttccaagccataactgttactaaactgagtcagaagtttaccaaagttaattttactgaaatccagaaactagtcctggatgtggcccatgtacatgagcactgttgcagaggagatgtgctggattgtctgcaggatggggaaaaaatcatgtcctacatatgttctcaacaagacactctgtcaaacaaaataacagaatgctgcaaactgaccacgctggaacgtggtcaatgnataattca

SEQ ID NO: 22338 - DNA, 442 bp, Homo sapiens
gctggaacgtgtttgccatggaagctgaagcaggtggtgacgttcaggcagttcacaggctgctgtccgtcgtgacactgaggcgctgtgatgttgatggagcccgggaggaagatggagacatccaccgtaatgacaggccttgctctgagaagaaccacgctgtcggacatgaaggctccaacagtgacatcaggatagccatttccatccatatcaatgcctcccgatatggactgaccaaacatccggagcactggatttatcttctgcccagacagtttcattgagtactgagggactatcccaccggcatcaccatgatagatatagaccgcccctgcgaagtcatcctccttgggtgcaccaatggccacatctgggaacccatcattgtccaaatcgtccaagctgcaatgctcttttcaaaatgcgcattgta

SEQ ID NO: 22339 - DNA, 338 bp, Homo sapiens
gactggaagaattaactaaaaatacaaaattagccgagtagctgggactacaggcatgcgccaccacgcctgactaatttttgtatttttagtagagatgggatttcattatgttggccagctggtcttgaacttctgagctcaggtgatccacccgccttagcctcccagagtgctaggataacaggcatgagccgccgcgcctggccaaaatagcataatgttttaagaaagtttacgaatttgtcttgggccacattcaaaaccatcatgggccaagggttggacaagctagccttaggtcatgtccagaatgcaatttaacaggaatttcaagc

SEQ ID NO: 22340 - DNA, 415 bp, Homo sapiens
aattcggcacgagcactgcactccagcctaagcgacagagtgaaactccatctaaaataaataaataaataaataaattagtcagtcgtggtagccatgcctgtattccagctacttggggaagctgagttgggaggatcgcttgagcccgggaagtcaagggtgcagtgagccgtgatcaggccactgcactcaagcctgggtgacaaagcgagatcccttctctacaaagaaaacaaaagaagaaaaggaagaaaaaaagactttaagagtcatccaccgtgggcactgagtctgataaccacatactttcctcagcataagtctcccagtagagttgcttttagaaaatagaagtcatcctggcacagtaggtcatgcctgtattccccagcactttgggaggcctagattg

SEQ ID NO: 22341 - DNA, 437 bp, Homo sapiens
  misc_feature (1)...(437): n = a,t,c or g
naccagntatgacatgattacgaatttaatacgactcactatagggaatttggccctcgaggccaagaattcggcacgagcgatccaccagctgagaattcgtccgctcccgaggctgagcagggcggggctgagtaaatgccggcttaccatctctaccatcatccggtttagtcatccaacaagaagaaatatgaaattccagcaataagaaatgaacaaaagattggagctgaagacctaaagtgcttgctttttgcccgttgaccagataaatagaactatctgcattatctatgcagcatggggtttttattatttttacctaaagacgtctctttttggtaataacaaacgtgttttttaaaaaagcctggtttttctcaatacgcctttaaaggnttttaaattggttcatatctggcaagttgagattt

SEQ ID NO: 22342 - DNA, 807 bp, Homo sapiens
ggaaaagaacgagggatcggagagtgctcccgaaggccaggcccaacaacgccggccctaccgcaggcgaaggttcccaccttactacatgcggagaccctatgggcgtcgaccacagtattccaaccctcctgtgcagggagaagtgatggagggtgctgacaaccagggtgcaggagaacaaggtagaccagtgaggcagaatatgtatcggggatatagaccacgattccgcaggggccctcctcgccaaagacagcctagagaggacggcaatgaagaagataaagaaaatcaaggagatgagacccaaggtcagcagccacctcaacgtcggtaccgccgcaacttcaattaccgacgcagacgcccagaaaaccctaaaccacaagatggcaaagagacaaaagcagccgatccaccagctgagaattcgtccgctcccgaggctgagcagggcggggctgagtaaatgccggcttaccatctctaccatcatccggtttagtcatccaacaagaagaaatatgaaattccagcaataagaaatgaacaaaagattggagctgaagacctaaagtgcttgctttttgcccgttgaccagataaatagaactatctgcattatctatgcagcatggggtttttattatttttacctaaagacgtctctttttggtaataacaaacgtgttttttaaaaaagcctggtttttctcaatacgcctttaaaggttttttaaattgtttcatatctggtcaagttgagatttttaagaacttcatttttaatttgtaataaaagtt

SEQ ID NO: 22343 - DNA, 345 bp, Homo sapiens
atgagatgaaccatcttcctgcacacagccaaagtctgcaaaggctgttcacggaagaccaggatgtagatgagggacttgtctatgacactgtattcaagcacttcaaaagacataagctggagatatcaaatgcaataaaaaagacatttccattccttgagggcctccgcgatcgggaactcatcacaaataaaatgtttgaagattctgaagattcttgtagaaacctggtccctgtacaaagagtggtgtacaatgttctcagtgaactggagaagacatttaacctgtcagttttggaagcactgttcagcgaggtcaacatgcaggaataccccgaag

SEQ ID NO: 22344 - DNA, 456 bp, Homo sapiens
  misc_feature (1)...(456): n = a,t,c or g
natcagctatgacatgattacgaatttaatacgactcactatagggaatttggccctcgaggccaagaattcggcacgaggatagcaagaaggcatcccttcctgtatgcacctacaattcttctttgggctgctcgctatgacaaaataattccatcttgctgcaaagctgaaaatgcagttgaatgcttccaaacaaaggcagcaacagttacaaaagaattaagagaaagcagcttgttaaatcaacatgcatgtgcagtaatgaaaaattttgggacccgaactttccaagccataactgttactaaactgagtcagaagtttaccaaagttaattttactgaaatccagaaactagtcctggatgtggcccatgtacatgagcactgttgcagaggagatgtgctggattgnctgcaggatggggaaaaaatcatgtctacatatgnctca

SEQ ID NO: 22345 - DNA, 469 bp, Homo sapiens
  misc_feature (1)...(469): n = a,t,c or g
gaactggccttggcctcccaaagtgctaggattacaggcatgagccactgcgcccagcaaaataaacacattttataatttgtatgtggaaacatgttactatagaaagcattttaaaggtacgttttaaaggtccactgttaaatagtaaagaatgaatccgctagcgaaaatgtttttagggagaacagctggatcaaaagggcttctttggaattaggttgttttagtaacttctgttccaaagaaacacaggtctgatattgctaagaactgaaatcggaggagccagaggcccttttcagtccaggccaacattgtgcacggccactgtgggactgacaaccgggatagctcaagttcgaaagaccaggtttcaaacattataagttccaggctttgcaagtctttattctcctggggtaatatccagtctttctgttaatgtcncctaaaattccctccatgg

SEQ ID NO: 22346 - DNA, 650 bp, Homo sapiens
gcaagaatctcagtacaagtgaaggtgtcagtaaagaaatgcatcaccttcagcgcatgttcttacagaattgctgggaaattcctacttatggagcagcatttttcacaggacagatatttacaaaggcaagccccagcaatcataaagtcatccctgtgtatgtaggagtgaatataaaaggacttcatctcctcaacatggaaactaaggctttactcatcagtcttaagtatggttgttttatgtggcaattgggagatactgatacttgttttcagatccatagcatggaaaataaaatgagctttatagtacatacaaaacaggctggtctcgtggtaaaactgttaatgaagctaaatggacagttaatgcccactgaaagaaattcatgaaagagaagtaactgttactcaagccaccacattttgtaatgcagagttttttttccgtgaaagatttcttaaaatattacttttggccgagcatggtggctcacccctgtaattccagcactttgggaggctggggcaggcggatcacctgaagtcagagttcaagaccagcctggccaacatggtgaaaccctgtctctacaaaaatacaaaaattagctgggtgtggtggcgggcgcctataatcctagc

SEQ ID NO: 22347 - DNA, 472 bp, Homo sapiens
gagcgcggttcctctgggtgcttccgcctccccttctcctgcttctccagcctcttcggcctcctcgcccgccgcgggaacccgagaccccagtgtatgccccacccctgaccccgctcgcgacatgtccaccccggctcggcggcgcctcatgcgggacttcaagaggttgcaggaggatcctccagccggagtcagcggggctccgtccgagaacaacataatggtgtggaacgcggtcattttcgggcctgaagggaccccgtttgaggatggaacatttaaacttacaatagaattcactgaagaatatccaaataaaccaccaactgttaggtttttatccaaaatgtttcatccaaatgtgtatgctgatggtagcatatgtttagatatccttcagaatcgatggagtccaacatatgatgtatcttctatcttaacatcaattcagtctctgctggatgaaccg

SEQ ID NO: 22348 - DNA, 571 bp, Homo sapiens
cccacgcgtccgggagctgcttggcagtgccagagcccaggccccagagccctgctggagaggaggcagactgaggcagcaggccccgccagcaggcgaagcagggagatgtcagactgctacacggagctggagaaggcagtcattgtcctggtggaaaacttctacaaatatgtgtctaagtacagcctggtcaagaacaagatcagcaagagcagcttccgcgagatgctccagaaagagctgaaccacatgctgtcggacacagggaaccggaaggctgcggataagctcatccagaacctggatgccaatcatgatgggcgcatcagcttcgatgagtactggaccttgataggcggcatcaccggccccatcgccaaactcatccatgagcaggagcagcagagcagcagctagagacccctttggccacaccttccaggcactggcctgatgccccgccctggtgctctccccaggctccctcctcagcctcctgcccacccagggccctttactctcttctccctccagaccttcctctgacccttgctgaactggggtccct

SEQ ID NO: 22349 - DNA, 347 bp, Homo sapiens
gcttgagagcttctcattagcctttgcctctgtacagaaacaggctaatgagaaaagggcactccggaaaaagaggaaggccctggagtttgtaactaatcctgatattgctgccaagaaaaaaatgaagaaacacaaaaataaaagtgaagcaaagaagagaaagatagagttcctgcgtccaggatataaggccaagagacaaaaaagccatagcctgaaagatttagcaatggtggagtaatgtctccctgtgctgatacaagcatgaactttctggaatattctgctagtctgaaattacagcaggttgtctggggtaggggggaggcgtttttttttttttt

SEQ ID NO: 22350 - DNA, 393 bp, Homo sapiens
cagaacataagctccaatgccaacatgttacgcaagggaccagctgaggacatgtcttccaaactcaaccaagcccgaagcatgagtgggcatcctgaggcagcccagatggtccgccgagaattccagctggatctagatgagattgagaatgacaatggtacagtccgatgtgaaatgccagaacttgttcagcacaaactggatgacatttttgagccagtccttattcctgaacccaagatccgggctgtttctccacacttcgatgacatgcacagtaatacagcatccacaatcaatttcattatctcccaagtagccagtggtgacatcaacacaagtatccaagctctgacacagctgtttcagatagagagccttgcccgggag

SEQ ID NO: 22351 - DNA, 960 bp, Homo sapiens
ctgctgcaccaataaaacaggtggaagagaaacctcagcgtgcacagaacataagctccaatgccaacatgttacgcaagggaccagctgaggacatgtcttccaaactcaaccaagcccgaagcatgagtgggcatcctgaggcagcccagatggtccgccgagaattccagctggatctagatgagattgagaatgacaatggtacagtccgatgtgaaatgccagaacttgttcagcacaaactggatgacatttttgagccagtccttattcctgaacccaagatccgggctgtttctccacacttcgatgacatgcacagtaatacagcatccacaatcaatttcattatctcccaagtagccagtggtgacatcaacacaagtatccaagctctgacacagatcgatgaggtcctgagacaggaagacaaagctgaagccatgtccggccatattgatcagtttctgatagccacttttatgcagctaagactcatctacaacacacacatggcagatgagaaattggagaaggacgagatcatcaagttgtatagctgtatcattggcaacatgatttcgctgtttcagatagagagccttgcccgggaggcctccactggagtactaaaagacctaatgcatggcctcatcaccttaatgctggattctcggattgaagatcttgaggaaggacaacaggtcatccgctctgtgaacctcttggtggtgaaggttctggagaagtcagaccagaccaacatcctgagtgccctacttgttttgctccaagacagcctgctagcaacagccagttctcccaaattctcagagcttgttatgaagtgtctctggagaatggttcgactgttgcctgataccatcaatagcattaacctagacagaattcttctggatatccacattttcatgaaggtcttccccaaagagaaac

SEQ ID NO: 22352 - DNA, 429 bp, Homo sapiens
  misc_feature (1)...(429): n = a,t,c or g
gcgaggaaaaagcagatgtgagaactcaaggttcagggctgctcttctaagaaacaagtctgccataatctccatctgtgttggaatctgttaactaatgaactggtctctgtgcaaatcctgagtgctaaagcttccaacaagactgatgctagctcgtgtcaccaggaagatgctacgtcatgccaagtgttttcagcgcctagcaatttttggttctgtgagggcactgcataaagataatagaacagcaacccctcagaatttctccaactatgaatccatgaaacaggacttcaaactggggattccagagtatttcaactttgctaaagatgtcctggaccaatggactgataaggaaaaggctggaaagaaaccttcaaatccagccttctggtggatcaacagaaatggagaaaanatcga

SEQ ID NO: 22353 - DNA, 720 bp, Homo sapiens
acatctatgacatgattacgaatttaatacgactcactatagggaatttggccctcgaggccaagaattcggcacgagattcatgaacaaattcatttatgagatagcaagaaggcatcccttcctgtatgcacctacaattcttctttgggctgctcgctatgacaaaataattccatcttgctgcaaagctgaaaatgcagttgaatgcttccaaacaaaggcagcaacagttacaaaagaattaagagaaagcagcttgttaaatcaacatgcatgtgcagtaatgaaaaattttgggacccgaactttccaagccataactgttactaaactgagtcagaagtttaccaaagttaattttactgaaatccagaaactagtcctggatgtggcccatgtacatgagcactgttgcagaggagatgtgctggattgtctgcaggatggggaaaaaatcatgtcctacatatgttctcaacaagacactctgtcaaacaaaataacagaatgctgcaaactgaccacgctggaacgtggtcaatgtataattcatgcagaaaatgatgaaaaacctgaaggtctatctccaaatctaaacaggtttttaggagatagagattttaaccaattttcttcaggggaaaaaaatatcttcttggcaagttttgttcatgaatattcaagaaagacatcctcagcttgctgtctcagtaattc

SEQ ID NO: 22354 - DNA, 552 bp, Homo sapiens
gcacctatgccttcagtgggacccactactggcgtctggacaccagccgggatggctggcatagctggcccattgctcatcagtggccccagggtccttcagcagtggatgctgccttttcctgggaagaaaaactctatctggtccagggcacccaggtatatgtcttcctgacaaagggaggctataccctagtaagcggttatccgaagcggctggagaaagaagtcgggacccctcatgggattatcctggactctgtggatgcggcctttatctgccctgggtcttctcggctccatatcatggcaggacggcggctgtggtggctggacctgaagtcaggagcccaagccacgtggacagagcttccttggccccatgagaaggtagacggagccttgtgtatggaaaagtcccttggccctaactcatgttccgccaatggtcccggcttgtacctcatccatggtcccaatttgtactgctacagtgatgtggagaaactgaatgcagccaaggcccttccgcaaccccagaatgtgaccagtc

SEQ ID NO: 22355 - DNA, 958 bp, Homo sapiens
ggaatcatcacatgccaccacactgataccatggggggaagccgtgactagcctttcatcagtgtcctgcctgatcactgaataaagaactgagatggaggggagtgaacagtgcctattgttgaaaagttaaaaacaaccaagtgccaagatgttgagtgggttagctccgagaacaatttataactgtgttttcatggttgcgaagacctaacctcaaatgcatctgctagaaagcgtacatcacacattcgcaatgcatcaggaagaaaaggcttgcccaaaaggctggagagggcagggagcggcaggatggaaggagacacggggcagggagaactctcttctgctaaatcgataggagtcagttttgtcttaaatgctgactacagccactgacatggttggctggaatttctttcttttaattgtggcatataggtttgtgacacaagaagtcatactttggtggctaagttttactaaggaaaataactgaaaagattaaaagtgagagttgaaaagagaaatgataatgcttccaaactgtagctgtcacagggcaatttctttatttataacatgaagcacaatggatttacagctctaggaacttagtactttggagcttttgcctctcacactgacaacataacaggatgtgattgccttctctgggattcagacaggctctgtcaatgtggagcacaaaaggagattttcatataacttgttaaaaacatgttctaagtcatgtataggctaagattttaagaagatctgggggaataaaaagccaacagtaagccccaggaaagggttttttgagaccatatgtatgctattaaaatatattgagattaatacatgaaaatgcttaaaagtgataggaattattgagaaacttatgatggtggcattgcctttttataaacatggagtgaaagccaaaaaaaaa

SEQ ID NO: 22356 - DNA, 616 bp, Homo sapiens
gaaccaccaaagatcagttataggataaaatggcatctctaaccataacacaggagaattggaaggagccctaagttgtcactcagtttaatttcttttaatggttagtttagcctaaagatttatctgcatattctttttcccatgtggctctactcatttgcaactgaatttaatgttataactcatctagtgagaccaacttactaaatttttagtatgcactgaaagtttttatccaacaattatgttcattttaagcaaaattttaagaaagttttgaaattcataaagcatttggttttaaactattttaagaatatagtactcggtcaggtatgacggctcacgcctgtaatcccagcactttgggaggccgaaacaggcgaatcacttgagcccaggagttcaagaccaacatgggcaatgtggcgaaactccatctctacaaaaaatgcaaaaataaaaaatatagtactcaagtattcttgatcctgtgtttcaaaactagaatttgtaatgcaaatggagctcagtctaataaaaaagaggttttggtattaaaagttcatacattagacagtatcagccaaaatttgagttagcaacactgttt

SEQ ID NO: 22357 - DNA, 335 bp, Homo sapiens
aaataatatgagagctgtggctatactaatatcagacaaaacagactttaagtcaattctgtctgttaaatactgttacaagagacgaaggacataatgataaaagggtcaattcaccaagaagatataataactataaatatatatgcaccacacattagagctcctaaatataggaaacaacccctgacagaactgaaggtagaaaccaacagcaacacaataatagaaggagatttcaacactgctatttcaatgatggatggaacaaccagacagaagataaataaggaaaacagaggatctgaacaacactatggactaagtgggctgaa

SEQ ID NO: 22358 - DNA, 441 bp, Homo sapiens
ggagagtaaacttcatagaaatttgctatttcaagattgtgaaaaagagcaagacaacaaaacaaaagatccaacccatgatgttaaaacccccaatacagaaacgaggacaagttgcttaattaaatataatgtgtctactacgccatacttgcaaagtgtgaaaaaaaaggtgcagtttgatggaacaaattccgcatttaaagagctgaagtttttaacaccagtgagacgttctcgacgtcttcaagagaaaacttctaaattgccagatatgttaaaagatcattatccttgtgtgtcttcattggaacagctaacggagttgggaagagaaactgatgcttttgtatgccgccctaatgcagcactgtgccgggtgtactatgaggctgatacaacataagagaaataaagctctgttagggaatggggttttta

SEQ ID NO: 22359 - DNA, 386 bp, Homo sapiens
gcggcacgaggggctggatgagcgtgagaagtcgctgcagatgatccgccagctggcagggccactgtttagtgagaacaccctgcagttctacaatgagagggtggtgatcatgaactcgatcctggagcgcatgtgtgccgacgtgctgcagcagacagccacgcagatcaagtttccctccaccggggtggacacaatgccctactggaacctgctgccccccaagcggcccatcaaagaggtgctgacggacatttttgccaaggtgctggagaagggctgggtggacagccgctccatccacatctttgacaccctgctgcacatgggcggcgtctactggttctgcaacaacctgattaaggagctgctgaaggagacgc

SEQ ID NO: 22360 - DNA, 410 bp, Homo sapiens
gcaaacttatatcctttaattccagatgggggcaaagtatgtccaggggtgaggaacaattgaaacatttgggctggagtaggttttgaaagtcagctctctgtgtgtgtgtgtgtgtgagtgtgcgcgtgtgtttgtgtgtgtgtgagagcgtgtgtttcttttaacgttttcagcctacagcatacagggttcatggtggcaagaagataacaagatttaaattatggccagtgactagtgctgcaagaagaacaactacctgcatttaatgggaaagcaaaatctcaggctttgagggaagttaacataggcttgattctgggtggaatcttggtgtgtaattatctggaggccaggctggagctctcagctcactatgggttcatctttatggctcctttcatctc

SEQ ID NO: 22361 - DNA, 1444 bp, Homo sapiens
ctatgacatgattacgaatttaatacgactcactatagggaatttggccctcgaggccaagaattcggcacgagcgacaatgccgtcttctgtctcgtggggcatcctcctgctggcaggcctgtgctgcctggtccctgtctccctggctgaggatccccagggagatgctgcccagaagacagatacatcccaccatgatcaggatcacccaaccttcaacaagatcacccccaacctggctgagttcgccttcagcctataccgccagctggcacaccagtccaacagcaccaatatcttcttctccccagtgagcatcgctacagcctttgcaatgctctccctggggaccaaggctgacactcacgatgaaatcctggagggcctgaatttcaacctcacggagattccggaggctcagatccatgaaggcttccaggaactcctccgtaccctcaaccagccagacagccagctccagctgaccaccggcaatggcctgttcctcagcgagggcctgaagctagtggataagtttttggaggatgttaaaaagttgtaccactcagaagccttcactgtcaacttcggggacaccgaagaggccaagaaacagatcaacgattacgtggagaagggtactcaagggaaaattgtggatttggtcaaggagcttgacagagacacagtttttgctctggtgaattacatcttctttaaaggcaaatgggacaagaaaaagtgggtaatggtgcccatgatgagtttgcatcacctgactataccttacttccgggacgaggagctgtcctgcaccgtggtggagctgaagtacacaggcaatgccagcgcactcttcatcctccctgatcaagacaagatggaggaagtggaagccatgctgctcccagagaccctgaagcggtggagagactctctggagttcagagagataggtgagctctacctgccaaagttttccatctcgagggactataacctgaacgacatacttctccagctgggcattgaggaagccttcaccagcaaggctgacctgtcagggatcacaggggccaggaacctagcagtctcccaggtggtccataaggctgtgcttgatgtatttgaggagggcacagaagcatctgctgccacagcagtcaaaatcaccctcctttctgcattagtggagacaaggaccattgtgcgtttcaacaggcccttcctgatgatcattgtccctacagacacccagaacatcttcttcatgagcaaagtcaccaatcccaagcaagcctagagcttgccatcaagcagtggggctctcagtaaggaacttggaatgcaagctggatgcctgggtctctgggcacagcctggcccctgtgcaccgagtggccatggcatgtgtggccctgtctgcttatccttggaaggg

SEQ ID NO: 22362 - DNA, 397 bp, Homo sapiens
gtcaagacagaaagttaactttctgaaaatattcaggacctgaactcagccctggataaagtgaccttatagatagctacagaactgtccccccaaaaacaacagaatataaattcttctcatcaccacatggcactttgtctaaaactgatcacataatcggaagcaaaacactcctcagcaaatgcaaaagaactgaaatcataacaaacagtctcttacaccacagcacaatcaaattagaactcaagatttaaacattcactgaaaaccacacaactatatggaaattgaacaacctgctcctgaatgactcttgggtaaataatgaaattaaggtagaaatcaagaattatttgaaactaatgagaactaagagataacatatcagaatctg

SEQ ID NO: 22363 - DNA, 772 bp, Homo sapiens
  misc_feature (1)...(772): n = a,t,c or g
aaggaagtataagcggtgattccagatcactgtatctttgccagtacacatctgctctcccaatcagtgaaatcgctgctgtcagcaaaagacctgagaaggtgattggcatgcactacttctctcccgtggacaagatgcagctgctggagattatcacgaccgagaaaacttccaaagacaccagtgcttcagctgtagcagttggtctcaagcaggggaaggtcatcattgtggttaaggatggacctggcttctatactaccaggtgtcttgcgcccatgatgtctgaagtcatccgaatcctccaggaaggagttgacccgaagaagctggattccctgaccacaagctttggctttcctgtgggtgccgccacactggtggatgaagttggtgtggatgtagcgaaacatgtggcggaagatctgggcaaagtctttggggaacggtttggaggtggaaacccagaactgctgacacagatggtgtccaagggcttcctaggtcgtaaatctgggaagggcttttacatctatcaggagggtggaagctgcctcctaagtctgaagtctcatcagacnaanacatccagttccgcctggtgacaanatttgtgaatgaggcantcatgtgcctgcaagaggggatcttggncacacctgcanagggagacatcngagccgtctttgggcttggntcccgccttgtctgggaagggctttccgcttttgggtccggttggngccaanaaaantttgannggctcaaa

SEQ ID NO: 22364 - DNA, 459 bp, Homo sapiens
  misc_feature (1)...(459): n = a,t,c or g
gaagttttgtgctttggagaatgactcgtgagcacatctttagggaccaagagtgactttctgtaaggagtgactcgtggcttgccttggtctcttgggaatacttttctaactagggttgctctcacctgagacattctccacccgcggaatctcagggtcccaggctgtgggccatcacgacctcaaactggctcctaatctccagctttcctgtcattgaaagcttcggaagtttactggctctgctcccgcctgttttctttctgactctatctggcagcccgatgccacccagtacaggaagtgacaccagtactctgtaaagcatcatcatccttggagagactgagcactcagcaccttcagccacgatttcaggatcgcttccttgtgagccgctgcctccgaaatctcctttgaagcccagacatctttctcagcttcagacttgnagat

SEQ ID NO: 22365 - DNA, 348 bp, Homo sapiens
gagataatgctcccaaatcagtcctgggcaaagtcaaaatatttgagaagatggatcacaaggccaggttacagagaatgcaggagctccaggaagcacagaatgcaaggatcgaaattgcccagaagcatcctgatatctatgcagttccaatcaaaacgcacaagccagaccctggcacgccccagcacacgagttccagaccccctgagccacagaaagctccttccagaccttatcaggataccagaggaagttatggcagtgatgccgaggaggaggagtaccgccagcagctgtcagaacactccaagcgcggttactatggccagtctgcccgataccggg

SEQ ID NO: 22366 - DNA, 345 bp, Homo sapiens
  misc_feature (1)...(345): n = a,t,c or g
gttctcggccagatggtgattgatgaggagcttctgggagatggacacagctatagtcctagagctattcattcatggctgaccagggccatgtacagccggcgctcgaagatgaaccctttgtggaacaccatggtcatcggaggctatgctgatggagagagcttcctcggttatgtggacatgcttggtgtagcctatgaagccccttcgctggccactggttatggtgcatacttggctcagcctctgctgcgagaagttctggagaagcagccagtgctaagccagaccgaggcccgcgacttagtanaacgctgcatgcgagtgctgtactaccgagat

SEQ ID NO: 22367 - DNA, 449 bp, Homo sapiens
gcacactaaagaaatgagagatgcagaattctaaggctaaatagctaggaagtattcattcaaacttgaatattcttcaaagagagtgtgggggcaactctaatcagaggaagaaactaaaggaagtaaaaccagatgttttccaccaaagccctccttttggctggtctgatttctaccgcactggcagggccatgggctaatatatgtgctggcaagtcttccaatgagatccggacgtgtgaccgccatggctgtggacagtactctgctcaaagaagtcagaggcctcaccagggtgtggacgtcttgtgctctgctggatctactgtgtacgcaccattcactggaatgattgtgggccaggagaaaccttatcaaaacaagaatgctatcaataatggtgttcgaatatctggaagaagtttttgtgtcaaaatgttctacat

SEQ ID NO: 22368 - DNA, 438 bp, Homo sapiens
  misc_feature (1)...(438): n = a,t,c or g
ttgatacctgtgttgggattncgagcggaatacgactcactatagggaatttggccctcgaggccaagaattcggcacgagaccacccctcctcattccagaacgaacagcctgacacatacgcacggggccgccgtccccagtagttggtcttgtacatgcgcagtgtcctagtgcccatcgtctgtttccccggccttgcccccgcccgccccgtgccgtggacatctgggcccactcatcgcccctccaggcccccggcgccccaccccctagagtgcctatcaagttaaatatcagaattaaaattactttgttaaaaaaattttttagaacataaattcaaagtaaacttttccaggctagcatatttaacaaagtaagtaagtagaggaggaggaggatctggccgggcactgtggctcaggtctctaatct

SEQ ID NO: 22369 - DNA, 649 bp, Homo sapiens
  misc_feature (1)...(649): n = a,t,c or g
accnttatgacatgactacgaatttaatacgactcactatagggaatttggccctcgaggccaagaattcggcacgagcaagagcttcctccagctgggcgccggcctgagcgtgggcctgagcggcctggcagccggctttgccatcggcatcgtgggggacgctggcgtgcggggcaccgcccagcagccccgactattcgtgggcatgatcctgattctcatcttcgccgaggtgctcggcctctacggtctcatcgtcgccctcatcctctccacaaagtagaccctctccgagcccaccagccacagaatattatgtaaagaccacccctcctcattccagaacgaacagcctgacacatacgcacggggccgccgcccccagtagttggtcttgtacatgcgcagtgtcctagtgcccatcgtctgtttccccggccttgcccccgcccgccccgtgccgtggacatctgggcccactcatcgcccctccaggcccccggcgccccaccccctagagtgctctgtgtatgcggatgatttagaattgtcatttctctttactggatgtttatttataaagatctggcctgttcctgcgtctgcggagcggccttgtctcccagctatctataaccttagctag

SEQ ID NO: 22370 - DNA, 630 bp, Homo sapiens
gttatatggtaacacggtgatcttctaagcagttaagtgactgactgttctggcaacaacgacttctccgtgactgaagggccctgttcatttcctgatcctgaagctcgtctctcttttgagcctccgcttgctttggtcgatggtttccctcagctttttctttgctgttcttcatcctcgttgttgctgtcatcatgttcactgtggcttttacaatacagcctgtaaattccttatgacatagttcagtgcatttggctttatcgcctgctccacagttctttacctttacttggcttagagaaactgtatctttgttgcttcatataacctttccccaaccccactaagctggacataacttattagtggtcctcccgtcactttatttgtagaaatctctctttcacatgagcaggggttctttcatgtggtttagctgacagcagaactagtgattctagacattttgcatggccctcattcagtggctcacaaacatgagggagcatcagaactacttgaggggcttgttaaaacccagtgcgttagaagtcggatgcggtggctcacacctgtaatcccagcactttgggaggcccaggcaggccggatcacttgaggtta

SEQ ID NO: 22371 - DNA, 438 bp, Homo sapiens
  misc_feature (1)...(438): n = a,t,c or g
gnnanttgggnaccngctatgacatgattacgaatttaatacgactcactatagggaatttggccctcgaggccaagaattcggcacgagggaagccgtgcagcagctatggctttgaaggttaccggaaaaacacgcgtggagctggaggtggcagttcaccgaaattgaatcactctaacgagccgcaacataaaatccctggaaaaggtgtgtgctgacttcatcagaggagcagaggcaaagaatctccaagtgaaaggaccagttcgaatacctaccaagactttgagaatcactacagaaaaagtccttgtggtgaaggttctaagacgtgggatcctttccagatgagaatccacaagcgactcattgacttgcacagtccttctgagattgttaagcagattgcttccatcagtttgagccgggagttga

SEQ ID NO: 22372 - DNA, 531 bp, Homo sapiens
tttgaaaaccgttatgacatgattacgaatttaatacgactcactatagggaatttggccctcgaggccaagaattcggcacgagctgtgttctgtttagttgcaacaatctcttgtgactaatgtcactcaaagcatcttgtaaatcctagggcttcctggaagttagttgccaaagtcatgcaagcatcacctgtcattcttgtgttggagttatagaattctacatcttataaaacctaactggcatttaaaaaatactgtggccgggcgtggtggctcatgcctgtaatcccagcactttgggaggccgaggtgggaggattgcttgagtccaggaatttgagaccagcctggacaacacagtgagacctcatctctatcaaaaaataaaaattagctagatgtggtggcatgagcctgtgttcccagctgcttaggaggctgaagcaggaggattgattgagcctgcgaggccaaggctgcagcaggctgtgattgcaccactgcacttcagcttgggcaacagag

SEQ ID NO: 22373 - DNA, 452 bp, Homo sapiens
gagggaggtgaggtatatttattaaatgggaccgagtgggacggggacggggcagccctaagggtagggaagcattgtcaatttctggggatagaatgagacccaggcatagctggagtttgaagctttgaagcaaaaatatctgtagaacatcttaaacgtgaccaaaatatgatgttaaaatcagcaactctttatacgttaaaaactttgaaacctgtggccgggcatggtggctcgcgcctgtaatcccagcactttgggaggccaaggcaggtggatcacctgaggtcaggagctcaagaccagcctgaccaacatggtgaaaccccgtctctactaaaaatacaaaaattagctgggcatggtggcgcatgcctataatcccagctactcgggaggctgaggcaggataatcgctttgaaaccgggagacagaggttgtggtgacc

SEQ ID NO: 22374 - DNA, 994 bp, Homo sapiens
cggacgcgtgggcggacgcgtgggttcgtggagctcggctgggccaggcagtattgagcgatgtgttacaagctggctgtgtcccggttgtcattgcagactcctatattttgcctttctctgaagttcttgactggaagagagcatctgtggttgtaccagaagaaaagatgtcagatgtgtacagtattttgcagagcatcccccaaagacagattgaagaaatgcagagacaggcccggtggttctgggaagcgtacttccagtcaattaaagccattgccctggccaccctgcagattatcaatgaccggatctatccatatgctgccatctcctatgaagaatggaatgaccctcctgctgtgaagtggggcagcgtgagcaatccactcttcctcccgctgatcccaccacagtctcaagggttcaccgccatagtcctcacctacgaccgagtagagagcctcttccgggtcatcactgaagtgtccaaggtgcccagtctatccaaactacttgtcgtctggaataatcagaataaaaaccctccagaagattctctctggcccaaaatccgggttccattaaaagttgtgaggactgctgaaaacaagttaagtaaccgtttcttcccttatgatgaaatcgagacagaagctgttctggccattgatgatgatatcattatgctgacctctgacgagctgcaatttggttatgaggtctggcgggaatttcctgaccggttggtgggttacccgggtcgtctgcatctctgggaccatgagatgaataagtggaagtatgagtctgagtggacgaatgaagtgtccatggtgctcactggggcagctttttatcacaagtattttaattacctgtatacctacaaaatgcctggggatatcaagaactgggtagatgctcatatgaactgtgaagatattgccatgaacttcctggtggccaacgtcacgggaaaagcagttat

SEQ ID NO: 22375 - DNA, 484 bp, Homo sapiens
cgcaggcaaggaccctcaaaataaacagcctctaccttgcgagccgtcttccccaggcctgcgtccgagtctccgccgctgcgggcccgctccgacgcggaagatctgactgcagccatgagcagcaatgagtgcttcaagtgtggacgatctggccactgggcccgggaatgtcctactggtggaggccgtggtcgtggaatgagaagccgtggcagaggtggttttacctcggatagaggtttccagtttgtttcctcgtctcttccagacatttgttatcgctgtggtgagtctggtcatcttgccaaggattgtgatcttcaggaggatgcctgctataactgcggtagaggtggccacattgccaaggactgcaaggagcccaagagagagcgagagcaatgctgctacaactgtggcaaaccaggccatctggctcgtgactgcgaccatgcagatgagcagaaatgctattcttgtg

SEQ ID NO: 22376 - DNA, 348 bp, Homo sapiens
gggacacggacaggattgacagattgatagctctttctcgattccgtgggtggtggtgcatggccgttcttagttggtggagcgatttgtctggttaattccgataacgaacgagactctggcatgctaactagttacgcgacccccgagcaacgtctgaggttatcaataagctcctagtccagacgccatgggtcatttcacagaggaggacaaggctactatcacaagcctgtggggcaaggtgaatgtggaagatgctggaggagaaaccctgggaaggctcctggttgtctacccatggacccagaggttctttgacagctttggcaacctgtcctctgcctc

SEQ ID NO: 22377 - DNA, 824 bp, Homo sapiens
  misc_feature (1)...(824): n = a,t,c or g
aacagctatgacatgattacgaatttaataccgactcactatagggaatttggccctcgaggccaagaattcggcacgagcgcggtcgtaagggctgaggatttttggtccgcacgctcctgctcctgactcaccgctgttcgctctcgccgaggaacaagtcggtcaggaagcccgcgcgcaacagccatggcttttaaggataccggaaaaacacccgtggagccggaggtggcaattcaccgaattcgaatcaccctaacaagccgcaacgtaaaatccttggaaaaggtgtgtgctgacttgataagaggcgcaaaagaaaagaatctcaaagtgaaaggaccagttcgaatgcctaccaagactttgagaatcactacaagaaaaactccttagcgactcattgacttgcacagtccttctgagattgttaagcagattacttccatcagtattgagccaggagttgaggtggaagtcaccattgcagatgcttaagtcaactattttaataaattgattaccggttgttggtttttttttaaaaaaagcaagcttctatagctatacccataacaaaatgtaaaaaggggttcttcttaatgataaaagattccatttacctacagatataataaatctaagtttttgtatgtacctaatttggcctcaaaacatataaaacagaaactgacagaactacaaagatgcagacaaatccatatacagaaatttttttaacctcgtgccgaattcttggcctcgagggccaaattccctataggagtcgtattaaattcgngtcatgtaaagggnttcaa

SEQ ID NO: 22378 - DNA, 624 bp, Homo sapiens
gagatcttctctgaggtgacgcccaagtgtgaagactgtcagagcctggtgaagcctgatatcgtcttttttggtgagagcctcccagcgcgtttcttctcctgtatgcagtcagacttcctgaaggtggacctcctcctggtcatgggtacctccttgcaggtgcagccctttgcctccctcatcagcaaggcacccctctccacccctcgcctgctcatcaacaaggagaaagctggccagtcggaccctttcctggggatgattatgggcctcggaggaggcatggactttgactccaagaaggcctacagggacgtggcctggctgggtgaatgcgaccagggctgcctggcccttgctgagctccttggatggaagaaggagctggaggaaccttgtccggagggagcacgccagcatagatgcccagtcgggggcgggggtccccaaccccagcacttcagcttcccccaagaagtccccgccacctgccaaggacgaggccaggacaacagagagggagaaaccccagtgacagctgcatctcccaggcgggatgccgagctcctcagggacagctgagccccaaccgggcctggccccctcttaaccagcagttct

SEQ ID NO: 22379 - DNA, 341 bp, Homo sapiens
ggtcaaggccgtgacccgtgtattattgtccgagtggccggaacgggagccaacatggcagcggggttcgggcgatgctgcaggagttcaccgaacagcagaaagaatttcaagctactgctcgtaaatttgccagagaggaaatcatcccagtggctgcagaatatgataaaactggtgaatatccagtccccctaattagaagagcctgggaacttggtttaatgaacacacacattccagagaactgtgcaaatgcctattattattgctggaaatgatcatcaccgaagaagtatttggggagaatgactgaggagccattgatgtgtgcttattgc

SEQ ID NO: 22380 - DNA, 492 bp, Homo sapiens
ggaataatagcagttctaccgtacaaccctaacataaccattcttaatttaactatttatattatcctaactactaccgcattcctactactcaacttaaactccagcaccacgaccctactactatctcgcacctgaaacaagctaacatgactaacacccttaattccatccaccctcctctccctaggaggcctgcccccgctaaccggctttttgcccaaatgggccattatcgaagaattcacaaaaaacaatagcctcatcatccccaccatcatagccaccatcaccctccttaacctctacttctacctacgcctaatctactccacctcaatcacactactccccatatctaacaacgtaaaaataaaatgacagtttgaacatacaaaacccaccccattcctccccacactcatcgcccttaccacgctactcctacctatctccccttttatactaataatcttataaaaaaaaaaaaaa

SEQ ID NO: 22381 - DNA, 729 bp, Homo sapiens
  misc_feature (1)...(729): n = a,t,c or g
gtgggatatgagtgactttgtggaggatggcgcctaaatgaggcatgccaatttccgcaccagggtgacgaacataagggctcctaaaaggctagcccaatgtatctgtatttccttggggattaaaacccatgatcttcagttcctcagagaactgaaagttgcaaggagaaatccagtaattcctgttatctgcaggctttataagtcagtggagcctgcggaagtggccagaatccagcactccaagcactgctgtcttctcacagagtcttgaagccagagcagcgccaggatgtcacgggagctggccccactgctgcttctcctcctctccatccacagcgccctggccatgaggatctgctccttcaacgtcaggtcctttggggaaagcaagcaggaagacaagaatgccatggatgtcattgtgaaggtcatcaaacgctgtgacatcatactcgtgatggaaatcaaggacagcaacaacaggatctgccccatactgatggagaagctgaacagaaattcaaggagaggcataacgtacaactatgtgattagctctcggcttggaagaaacacatataaagaacaatatgcctttctctacaaggaaaagctggtgtctgtgaagagggttatcactaccananatcaagntgggnacncanatnttttttcagggaaccctttgtgggccngggtcaatcccccanaatgggtgtc

SEQ ID NO: 22382 - DNA, 309 bp, Homo sapiens
gattaacaacaataactaataatagaacaattataacaatatattgttataattgttctattattagttattgttgttaatctcttactgtgcctcatttagaaattaaactttctcatagatatgtatagatgggaataaacacagtacgtaatacgggtttagtactatctgtagtttcaggcatcccctgggggtcttggaacatatctcctccagataagggggggactactgtatccctttatttaattactggagagactaaacctttttaaaaatgctttgcagacattggtaattattttg

SEQ ID NO: 22383 - DNA, 484 bp, Homo sapiens
  misc_feature (1)...(484): n = a,t,c or g
gnngnnnnnntnnnntnnnnccnctgagacccttatgacatgattacgaatttaatacgactcactatagggaatttggccctcgaggccaagaattcggcacgagctgcattctcgcttcctggagggtgtccgcaatgttgccagtgtctgtctgcagattggctacccaactgttgcatcagtaccccattctatcatcaacgggtacaaacgagtcctggccttgtctgtggagacggattacaccttcccacttgctgaaaaggtcaaggccttcttggctgatccatctgcctttgtggctgctgcccctgtggctgctgccaccacagctgctcctgctgctgctgcagccccagctaaggttgaagccaaggaagagtcggaggagtcggacgaggatatgggatttggctctttgactaatcaccaaaaagcaaccaacttagccagttttatttgcaaaacaaggaaataaagg

SEQ ID NO: 22384 - DNA, 632 bp, Homo sapiens
ggaaaaaataaaatatacttggggaagttgtacctgccagaattagcaagagctttctttaagaagacatttgtcaaactcaacaaattgaaggttaacaccttaagagttgtagttactgaccagaaatatggacagacttcttagacttggaggaggtatgcctggactgggccaggggccacctacagatgctcctgcagtggacacagcagaacaagtctatatctcttccctggcactgttaaaaatgttaaaacatggccgtgctggagttccaatggaagttatgggtttgatgcttggagaatttgttgatgattataccgtcagagtgattgatgtgtttgctatgccacagtcaggaacaggtgtcagtgtggaggcagttgatccagtgttccaagctaaaatgttggatatgttgaagcagacaggaaggccggagatggttgttggttggtatcacagtcaccctggctttggttgttggctttctggtgtggatatcaacactcagcagagctttgaagccttgtcggagagagctgtggcagtggttgtggatcccattcagagtgtaaaaggaaaggttgttattgatgccttcagattgatcaatgctaatatga

SEQ ID NO: 22385 - DNA, 542 bp, Homo sapiens
ggaccaatttgacatatggaattctgcctccgtttatatggacgctgttgatgccggcaatattgctacttcgcttttttgcaaatgcattcactttgacaccatataatggaacagaagctctggtatggcttttccaccaaaagcctgaatctctcaatcctctgatcaaatatctgagtgccaccactggctttggaagaaattacattatgacccagaagatggacctagatgaagacactgctgaaaaattttatcaaaagttactggaactggaaaagcacattagggtcactattcaaaaaacagataatcaggccaggctcagtggctcatgcctataattccagcactttgggaggccaaggcagaaggatcacttgagaccaggagttcaagaccagcctgagaaacatagtgagcccttgtctctacaaaaagaaataaaaataatagctgggtgtggtgggcatgcgcatgtagtcccagctactcagaaggatgaggtgggaggatctcttgaggctgggaggcagagg

SEQ ID NO: 22386 - DNA, 400 bp, Homo sapiens
gctacaagcagaaccccgagcagtctgcggatgaagatgctgagaaaaatgaggaggattcagaaggctcttcagatgaggatgaggatgaggacggagtcagtgctgcaactttcttgaagaagaaatcagaagctccttctggggagagtcgcaagttcctcaaaaagatggatgatgaagatgaggactcagaagattccgaagatgatgaagactgggacacaggttccacatcttccgattccgactcagaggaggaagaagggaaacaaaccgcgctggcctcaagatttcttaaaaaggcacccaccacagatgaggacaagaaggcagccgagaagaaacgggaggacaaagctaagaagaagcacgacaggaaatccaagcgcctggatga

SEQ ID NO: 22387 - DNA, 535 bp, Homo sapiens
  misc_feature (1)...(535): n = a,t,c or g
ggttacatttaagtgtttcactgagttccggcagagaagaagctaaagattcaaaacaaaatggaggactgattccagttcattctttaaatcttttgctgaagagtattggtgccacactgacagatgtacaagatgtagtttttaagcttgcattttttgaactcaactatcagttccatacaacatccgatctacagtctgaagtcataagacactattcaaaacaggccattaagcagatgtatgtactcattcttggacttgatgttttgggaaatccatttggcttaattagagaattttctgaaggtgtagaagcatttttttatgaaccttaccagggagccatccagggtcctgaagagtttgtggaaggaatggcactaggacttaaggcactagttggtggagctgttggtggattggctggtgctgcctccaaaatcaccggtgctatggctaagggggtagcagctatgaccatggatgaagactaccaacagangagaataaaaaccntgaatttagcccc

SEQ ID NO: 22388 - DNA, 492 bp, Homo sapiens
  misc_feature (1)...(492): n = a,t,c or g
cccacgcgtccgacaccttgtactttttgtgcatgacctggacctgctaaggaaaaaaaaatcttgtggattgattgctttgccatccccacagcagcttttgcaaattgctttccaaactcacttgaatgatgacattgctgtggacctgggttctggacctgatctgccacttcaagctgtgtaatttttggcaagttgctttctttgcctggtcctcagtttgcccatcaatataatgggtggattggatgatttttttttttttaattgaaatggagtcttgcactgtcacccaggctggagtgcagtggcccgatcttggctcactgcaacccccgccacctaggttcaagtgattctcatgcctcagcctcccaagtagctgggactacaggngtgcaccactactcctggatatttttttgggtttttagtaaaaatggggtttccccatgttggccaagctggtcttgaactcctgactcaggg

SEQ ID NO: 22389 - DNA, 383 bp, Homo sapiens
  misc_feature (1)...(383): n = a,t,c or g
tttgaaaaccnntatgacatgattacgaatttaatacgactcactatagggaatttggccctcgaggccaagaattcggcacgagaacgagtcctggccttgtctgtggagacggattacaccttcccacttgctgaaaaggtcaaggccttcttggctgatccatctgcctttgtggctgctgcccctgtggctgctgccaccacagctgctcctgctgctgctgcagccccagctaaggttgaagccaaggaagagtcggaggagtcggacgaggatatgggatttggtctctttgactaatcaccaaaaagcaaccaacttagccagttttatttgcaaaacaaggaaataaaggcttacttctttaaaaaaaaaaaaaa

SEQ ID NO: 22390 - DNA, 697 bp, Homo sapiens
aagaaggcaaaacgatgtataaatgaaagaaattgagatggtgcacgatgcacagttgaagtgaacttgcggggtttttcagtatctacgattcatagatctggaattcgcggccgcgtcgaccaaagacctaatgtccaaagctgagaagaatggtgtgaagattaccttgcctattgactttgtcactgctgagaaatttgatgagaatgccaagactggccaagccactgtggcttctggcatacctgctggctgaatgggcttggactgtggtcctgaaagcagcaagaagtatgctgaggctgtcactcgggctaagcagattgtgtggaatggtcctgtgggggtatttgaatgggaagcttttgcccggggaaccaaagctctcatggatgaggtggtgaaagccacttctaggggctgcatcaccatcataggtggtggagacactgccacttgctgtgccaaatggaacacggaggataaagtcagccatgtgagcactgggggtggtgccagtttggagctcctggaaggtaaagtccttcctggggtggatgctctcagcaatatttagtactttcctgccttttagttcctgtgcacagcccctaagtcaacttagcattttctgcatctccacttggcattagctaaaaccttccatgtcaagattcagctagtggccaagaag

SEQ ID NO: 22391 - DNA, 407 bp, Homo sapiens
gccggagctgccgcgccagtcgcctagcaggtcctctaccggcttattcctgtgccggatcttcatcggcacaggggccactgagacgtttctgcctccctctttcttcctccgctctttctcttccctctcgtttagtttgcctgggagcttgaaaggagaaagcacggggtcgccccaaaccccttctgcttctgcccatcacaagtgccactaccgccatgggcctcactatctcctccctcttctcccgactatttggcaagaagcagatgcgcattttgatggttggattggatgctgctggcaagacaaccattctgtataaactgaagttaggggagatagtcaccaccattcctaccattggttttaatgtggaaacagtagaatataagaacatttgt

SEQ ID NO: 22392 - DNA, 944 bp, Homo sapiens
gtgtcaaggagtcaaaacagattaaaattaatttcatgtgtatatggtggaaatttgtggctagtgtgatttttgtttgtttccttttaagtactgttgatcagttgtgacacttactggttaaacttacgttgctaaagatttctctataataagccacacattatatttagactatattaagggaccttggttttcttctagatagcagctgtcccaaagaaaatatttcttctttgtctgttaagatttagctattatctgccagttgttaagaggttttggttccaaactcaaccagcaatgttgagagctgaacttaagatagctgttgtactttttgctttccatctgttactgtccttcattcttggctccctactatctataaacagctgctgtgaagaagaaaagttgaataagagttggcttaaattttaaaaaagaaaaagaaaattgaggttttaggattttcatggtaacaagctctggtataagctaaggctggcaagttcagatactaaaatattatttgatcgtatcttggatccttttgaaaaagttaagactatatgaaggtaaattagaaataagtatgaatattaataaaatagcatttatcttatttctctattttatgttgtgacttaacctaattttatttttttaacattttcttatttcttataatatgaatgctgatatttaaaggtagatctatgtggtattctttgtgtttcttaattgtttaactcttaagattatttgtgatctggatttatgtatttgttagatacatatgaattgttaaaatggaatgcaagtttttcaaaagcccaggtctaaatgtaatggttggtttattgttctataaccgcagcccatcattttctgtgtaaatcataaacaataaacagaatatactcggtgaaaaaaaaaaaaaa

SEQ ID NO: 22393 - DNA, 505 bp, Homo sapiens
  misc_feature (1)...(505): n = a,t,c or g
ggtgcagttcgtgtttgacgccgtcaccgatgtcatcatcaagaacaacctgaaggactgcggcctcttctgaggggcagcggggcctggcgggatgggccaccgccgactttgtaccccccaacccctgaggaagatgggggcaagaagatcacgctccccgcctgttcccccgccgcttttctcctctttcctctctttgttctcagctccccctgtcccctcagctccagacgtaggggaggggttgccacaggcctccctgtttgaagcctgcccttgtctgagatgctggtaatggccatggtacccccttctgggcatctgttctggtttttaaccattgtcttgttctgtgatgaggggaggggggcacatgctgagtctcccaaggctgcgtctggaggggcccctgcttctccagcctggacccccagctttgccaacaccagcccctgcccagccaagtccaaatgttacaggagcctctgcccagncccccaac

SEQ ID NO: 22394 - DNA, 530 bp, Homo sapiens
gatcaccaactttcctgctgccaagtccttggacatccaggtgcccaacttcccagctgatgagaccaaaggcttccatcaggttccctttgcacccattgtcttcattgagaggactgacttcaaggaggagccagagccaggatttaagcgcctggcttggggccagcctgtgggcctgaggcatacaggctacgtcattgagctgcagcatgttgtcaagggccccagtggttgtgtagagagtctggaggtgacctgcagacgggcagatgctggagagaagccaaaggcctttattcactgggtgtcacagcctttgatgtgtgaggttcgcctctatgagcgactattccagcacaagaaccctgaagatcctactgaggtgcctggtggatttttaagtgacctgaacctggcatcactacacgtggtggatgcagcattagtggactgctctgtggccctggcaaaacccttcgacaagttccagtttgagcgtcttggatatttctccgtggatccagaca

SEQ ID NO: 22395 - DNA, 907 bp, Homo sapiens
gccgcatgtcccttcgcgggaaggctgtggtgctgatgggcaagaacaccatgatgcgcaaggccatccgagggcacctggaaaacaacccagctctggagaaactgctgcctcatatccgggggaatgtgggctttgtgttcaccaaggaggacctcactgagatcagggacatgttgctggccaataaggtgccagctgctgcccgtgctggtgccattgccccatgtgaagtcactgtgccagcccagaacactggtctcgggcccgagaagacctcctttttccaggctttaggtatcaccactaaaatctccaggggcaccattgaaatcctgagtgatgtgcagctgatcaagactggagacaaagtgggagccagcgaagccacgctgctgaacatgctcaacatctcccccttctcctttgggctggtcatccagcaggtgttcgacaatggcagcatctacaaccctgaagtgcttgatatcacagaggaaactctgcattctcgcttcctggagggtgtccgcaatgttgccagtgtctgtctgcagattggctacccaactgttgcatcagtaccccattctatcatcaacgggtacaaacgagtcctggccttgtctgtggagacggattacaccttcccacttgctgaaaaggtcaaggccttcttggctgatccatctgcctttgtggctgctgcccctgtggctgctgccaccacagctgctcctgctgctgctgcagccccagctaaggttgaagccaaggaagagtcggaggagtcggacgaggatatgggatttggtctctttgactaatcaccaaaaagcaaccaacttagccagttttatttgcaaaacaaggaaataaaggcttacttctttaaaaaaaaaaaaaa

SEQ ID NO: 22396 - DNA, 608 bp, Homo sapiens
  misc_feature (1)...(608): n = a,t,c or g
atggagtataagaaaactgatgcacctcaaccggatgtgaaggaagaggaagaagagaaggaagaggaaaaggacaagggagatgaggaggaggaaggagaagagaaacttgaagagaaacagaaaagtgatgctgaagaagatggtggcactgtcagtcaagaggaggaagacagaaaacctaaagcagaggaggatgaaattttgaacagatcaccaagaaacagaaagccacgaagagagtgaaacaatcttaagagcttgatctgtgatttcttctccctcctcccctgcaagagtggtcctaggagaggacctggcacaccttaggttgacattcagaaaacttcaagacatcaccatcagcaggctccagttgaacactagtctgtgtaactttaaacatctagcagtaaatacttgcagttgtgatataaaggaccctgtttctgtagaaaagaaaacatttaacataatggttgtgaaatgtaacatgaagcaaactaactttttttttttnancancttngtttttaaaannnanngatnnaantttgcccnctttaanancttggntnaatttaangnattaacctgttngggcaaac

SEQ ID NO: 22397 - DNA, 380 bp, Homo sapiens
gagagaacagaaccagcggtggtcttccatttactttttttactcttggctgcattcaggaagaaatttgataagtactctcatattacaagggttgagttgtctttgtagttttaatttgaggccaatatctgaggcctagaattgcacgagcagaggctagagggcatgtggcagaatttattgtggtgtgcagtttgcagttattgctttggtctttttcccagttggaagtcctaagcaataggatggcacatttgtggggaaagaacactgtcctggcattctcagggatcttcggggttttaaaatttggttcatatccactgctgttacttacgcaaaaggcaaatatttgtgctttgtaacaaagttgatct

SEQ ID NO: 22398 - DNA, 1046 bp, Homo sapiens
  misc_feature (1)...(1046): n = a,t,c or g
gcacagcggtccgcccttccagggtggcccgtgatgtagccgtggtggccggagggctaggtcgccagctgctacaaaaacagccagtatcacctgtgatccatcctcctgtgagttacaatgacaccgctccccggatcctgttctgggcccaaaacttctctgtggcgtacaaggaccagtgggaggacctgactcccctcacctttggggtgcaggaactcaacctgactggctccttctggaatgactcctttgccaggctctcactgacctatgaacgactctttggtaccacagtgacattcaagttcattctggccaaccgcctctacccagtgtctgcccggcactggtttaccatggagcgcctcgaagtccacagcaatggctccgtcgcctacttcaatgcttcccaggtcacagggcccagcatctactccttccactgcgagtatgtcagcagcctgagcannaagggtagtctcctcgtggcccgcacgcagccctctccctggcagatgatgcttcaggacttccagatccaggctttcaacgtaatgggggagcagttctcctacgccagcgactgtgccagcttcttctcccccggcatctggatggggctgctcacctccctgttcatgctcttcatcttcacctaaggcctgcacatgatcctcagcctcaagacatggatcgctttgatgaccacaagggccccactatttctttgacccagattgtgtgaccctgtgccagtgggggggttgagggtgggacggtgtccgtgttgttgctttcccaccctgcagcgcactggactgaagagcttccctcttcctactgcagcatgaactgcaagctcccctcagcccatcttgctccctcttcagcccgctgaggagctttcttgggctgcccccatctctcccaacaaggtgtacatattctgcgtagatgctagaccaaccagcttcccagggttcgtcgctgtgaggcgtaagggacatgaattctagggtctcctttctccttatttattc

SEQ ID NO: 22399 - DNA, 694 bp, Homo sapiens
  misc_feature (1)...(694): n = a,t,c or g
ccccngctatgacatgattacgaatttaatacgactcactatagggaatttggccctcgaggccaagaattcggcacgaggggaactattgagaggaacaaagagcttataaatacattaggacctggaattcagttgtcgagccaggacggtgacagcgtttaacaaagcttagagaaacctccaggagactgctatcatggcagagaagcccaagctccactacttcaatgcacggggcagaatggagtccacccggtggctcctggctgcagctggagtagagtttgaagagaaatttataaaatctgcagaagatttggacaagttaagaaatgatggatatttgatgttccagcaagtgccaatggttgagattgatgggatgaagctggtgcagaccagagccattctcaactacattgccagcaaatacaacctctatgggaaagacataaaggagagagccctgattgatatgtatatagaaggtatagcagatttgggtgaaatgatcctccttctgcccgtatgtccacctgaggaaaaagatgccaagcttgccttgatcaaagagaaaataaaaaatcgctacttccctgcctttgaaaaagtcttaaagagccatgggcaagactaccttgttggaacaagctgagcgggctgacatcatctggtggacttctctactact

SEQ ID NO: 22400 - DNA, 674 bp, Homo sapiens
ggcaaacacgactcactgccgccttgacctcctggcctcaagcaattctcccacctcagcttcctgaatagtttggactacagaatgtcatacccaggctatcccccaacaggctacccacctttccctggatatcctcctgcaggtcaggagtcatcttttcccccttctggtcagtatccttatcctagtggctttcctccaatgggaggaggtgcctacccacaagtgccaagtagtggctacccaggagctggaggctaccctgcgcctggaggttatccagcccctggaggctatcctggtgccccacagccagggggagctccatcctatcccggagttcctccaggccaaggatttggagtcccaccaggtggagcaggcttttctgggtatccacagccaccttcacagtcttatggaggtggtccagcacaggttccactacctggtggctttcctggaggacagatgccttctcagtatcctggaggacaacctacttaccctagtcagcctgccacagtgactcaggtcactcaaggaactatccgaccagctgccaacttcgatgctataagagatgcagaaattcttcgtaaggcaatgaagggttttgggacagatgagcaggcaattgtggatgtggtggccaaccgttccaatgatcg

SEQ ID NO: 22401 - DNA, 405 bp, Homo sapiens
gtcaattcattctttttctcctatcacatctgggaaagtagctaacttttaactatttatgttcccataagtaacccttcttttgtgtgtatacatttccttttctctgacttgagatgtcaaatttggatttctagaacagtttctcagttaaattcttgatgacttaacaacttttactatcagaatacaattagaaatccttggtcaggcacaggggctcacgcctgtaatcccagcactttgggaagccaaggcagacagatcacctgaggtcaggagttcgagaccagcctgaccaacatggagaaaccctgtctctactaaaaatacaaaaattagccgggcgtggtgctactcgtgaggctgaggcaggagaatcgcttgaacccgggaggtggaggt

SEQ ID NO: 22402 - DNA, 381 bp, Homo sapiens
ggtttagacaacctgatatactcaactgtgggacactttgagagttcttaaaaatacagctaatggccagacacggtggcccacacctgtaatcccagcactttgggatgccgaggtgggcgaaatcacctgaggtcgggagttcgagaccagcctgaccaacatggagaaaccctgtctctactaaaaatacaaaattagccaggcatggtggcacatgcctgtaatcccagctactcgggagactgaggcaggagaatcgcttgaacccaggaggtagatgttgcagtgagcttagattgtgtcattgcactccagcctgggcaacaagagtgaaactctgtctcaaacaaacaaacaaagatatccaattcagtcatc

SEQ ID NO: 22403 - DNA, 422 bp, Homo sapiens
acttgatgacctgattacgaatttaatacgactcactatagggaatttggccctcgaggccaagaattcggcacgagtgggtaggacagagtgagatggcacaagatttcatcacattactcagaacagtatgaaactgaaaacttaatgagttgtttatttctggaattttctgtttgctatgtttggaccgcagttgaccatgggtaactgaaactgtgaatatgggaggactattgtagttagattttcctgccttcaaattatgaaggttcatcagaaagttgatggcaaaactatctaatggctttaaaatgcttgctcaatctactggcaatcgcaagagctctaacaggtattctgcagatgagtgttaagctgtagacactctgcaccccattttgagtagaatgttggaacta

SEQ ID NO: 22404 - DNA, 526 bp, Homo sapiens
gaatttaatacgactcactatagggaatttggccctcgaggccaagaattcggcacgagatttgttccaccttggccaggcctcctcggagaagcttgtcccccgtgtgggagggacggagccggactggacatggtcactcagtaccgcctgcagtgtcgccatgactgatcatggctcttgcatttttgggtaaatggagacttccggatcctgtcagggtgtcccccatgcctggaagaggagctggtggctgccagccctggggcccggcacaggcctgggccttccccttccctcaagccagggctcctcctcctgtcgtgggctcattgtgaccactggcctctctacagcacggcctgtggcctgttcaaggcagaaccacgacccttgactcccgggtggggaggtggccaaggatgctggagctgaatcagacgctgacagttcttcaggcatttctatttcacaatcgaattgaacacattggccaaataaagttgaaattttaccaccaaaaaaa

SEQ ID NO: 22405 - DNA, 644 bp, Homo sapiens
atgcatcccccagaagcaagactaatggaaatgtggagagaattgaagaaagcgcactttcactcttaatgggagagctataaatggcagagctatgtgtaaatattttaagagcatgcagccatcttggtgtgtgcatgagtattgtctcttttgatatcaggattatttattgctaacgtaaatagatagcattgtaaataatcatcacaatgatcaaatcactgaaccatgtctccgcacatttccctaaaagtacaatgtttagactgctatggtaatacatattttaaattctaaaagcatacacaatgtgtaactgaatggtttgtgaaaaatatattgatatatatactagttgctatgaaaatatcatggaataatagggattttagggtggatactttattttcttttatgtttctatatgttgcgttgtgatgacattatcttttaaattaaaaagagatttggctagttggtgtgtgtaatgttactttacagtccgactctcctgatgtacctcttttcatgatctttttctttccttcccaagaaactgaggaatgtttaatatgaaaacatacatcggatatgtgaaaagcacaacaaaattcttaatgtacacagtaaaaaagtaaata

SEQ ID NO: 22406 - DNA, 477 bp, Homo sapiens
  misc_feature (1)...(477): n = a,t,c or g
gngnnccnctttganacngntatgncatgattacgaatttaataccgactcactatagggaatttggccctcgaggccaagaattcggcacgagcgagaagtgggtccccgaggtgaagcacttctgtcccaatgtgcccatcatcctggtggccaacaaaaaagacctgcgcagcgacgagcatgtccgcacagagctggcccgcatgaagcaggaacccgtgcgcacggatgacggccgcgccatggccgtgcgcatccaagcctacgactacctcgagtgctctgccaagaccaaggaaggcgtgcgcgaggtcttcgagacggccacgcgcgccgcgctgcagaagcgctacggctcccagaacggctgcatcaactgctgcaaggtgctatgagggccgcgcccgtcgcgcctgcccctgccggcacggctccccctcctggaccagtcccccgcgagcccggagaanggga

SEQ ID NO: 22407 - DNA, 385 bp, Homo sapiens
cgctgacgtgcctggcacgtggcttcagccccaaggatgtgctggttcgctggctgcaggggtcacaggagctgccccgcgagaagtacctgacttgggcatcccggcaggagcccagccagggcaccaccaccttcgctgtgaccagcatactgcgcgtggcagccgaggactggaagaagggggacaccttctcctgcatggtgggccacgaggccctgccgctggccttcacacagaagaccatcgaccgcttggcgggtaaacccacccatgtcaatgtgtctgttgtcatggcggaggtggacggcacctgctactgagccgcccgcctgtccccacccctgaataaactccatgctcccccaagcaaaaaaaaaaaaaa

SEQ ID NO: 22408 - DNA, 634 bp, Homo sapiens
gtctcaagagtgttgttgccacagagtcacatcagtatgttgttggtgataccattacgatgcagctgatgaagagggagaaaggggtgttggtggctttgcccaaatccaaatggatgaatgtagaccatcccattcatctaggagatgaacagcacagccagtactccaagttgctgctggcctctaaggagcaggtgctgcaccgggtagttctggaggagaaagtagcactagagcagcagctggcagaggagaagcacactcccgagtcctgctttattgaggcagctatccaggagctcaagactcgggaagaggctctgtcgggattggccggaagcagaagggaggtcactggtgttgtggctgctctggaacaactggtgctgatggctcccttggcgaaggagtctgtttttcaacccaggaagggtgtgctggagtatctgtctgccttcgatgaagaaaccacggaagtttgttctctggacactccttctagacctcttgctctccctctggtagaagaggaggaagcagtgtctgaaccagagcctgaggggttgccagaggcctgtgatgacttggagttagcagatgacaatcttaaagaggggaccatttgcactga

SEQ ID NO: 22409 - DNA, 421 bp, Homo sapiens
gacgggcggcacaccctgggggagaacatcgccgacaacgggggtctcaaggcggcctatcgggcttaccagaactgggtgaagaagaacggggctgagcactcgctccccaccctgggcctcaccaaaaaaaaagaaaagagaaacagctgtcacctcccgcaggacccaaatcctctctctgagcaccgtcatccaccacatggctgggcctggctcccaggaccagtccagtcctctagtgccttatctgaggctgcagccgccagtctccaccccaaggagacagcccctgctcctagatgcccttggcctccgcagtgcagcccccaggtgtcctgactgaagcacaggccatagccccatttccccggtgcctgcagggctaaccttcacgggagcccaggagctctggccggca

SEQ ID NO: 22410 - DNA, 459 bp, Homo sapiens
aggcaggccatcaagtgtgtggtggtgggagacggagctgtaggtaaaacttgcctactgatcagttacacaaccaatgcatttcctggagaatatatccctactgtctttgacaattattctgccaatgttatggtagatggaaaaccggtgaatctgggcttatgggatacagctggacaagaagattatgacagattacgccccctatcctatccgcaaacagatgtgttcttaatttgcttttcccttgtgagtcctgcatcatttgaaaatgtccgtgcaaagtggtatcctgaggtgcggcaccactgtcccaacactcccatcatcctagtgggaactaaacttgatcttagggatgataaagacacgatcgagaaactgaaggagaagaagctgactcccatcaactatccgcagggtctagccatggctaaagaaaatggtgctgtaaaa

SEQ ID NO: 22411 - DNA, 444 bp, Homo sapiens
gttaaaaccgagggcccgcaggggtccccgcggccgccgcgatgcagaaatacgagaaactggaaaagattggggaaggcacctacggaactgtgttcaaggccaaaaaccgggagactcatgagatcgtggctctgaaacgggtgaggctggatgacgatgatgagggtgtgccgagttccgccctccgggagatctgcctactcaaggagctgaagcacaagaacatcgtcaggcttcatgacgtcctgcacagcgacaagaagctgactttggtttttgaattctgtgaccaggacctgaagaagtattttgacagttgcaatggtgacctcgatcctgagattgtaaagtcattcctcttccagctactaaaagggctgggattctgtcatagccgcaatgtgctacacagggacctgaagccccagaacctgctaataa

SEQ ID NO: 22412 - DNA, 530 bp, Homo sapiens
ggaagccagaataaagaccaacagatttgttcccgacaaggagttttctggttcagaccgtagacagagaggccgagaaggaccagttcagtttgaggaagatccttttggtttggacaagtttttggaagaagccaaacagcatggtggctctaaaagaccctcagatagcagccgccccaaggaacacgagcatgaaggcaagaagaggaggaaggaataggcacaggtctctccaaagtgaatgaactcttacccataaccctaatgatgcaagtcatatgggggaacactttgtaaatggtcaggataaaaaccaaatctgggtgccagatcccagcactactttttattactggagaaatggggggggatagaaaattctactttgaattatttagttttttttaaagagtgggttgtgtttgtgcttctcccacctttcagcatttatagaacatgctgccccacatacaaaagtcaagacaacttacttttatgtgacactagtagtttggggttaatgtttt

SEQ ID NO: 22413 - DNA, 847 bp, Homo sapiens
gggagaatttgcctagaggtctattgacttttcattggtaccaaaattagtcttttagttatttacacatttcaggaaacctggttgctttgcacaccatcacaattggttttgctcgtaaaaggaatgaaattctcttttgtttttcaacaggcattgcggcctcatttgctgtcaagcttttcaaagcatggatggcagaaaaagatgccaactctgttacctcgtctttgagaaaagccaacttagacaagaggctgcttgaactctttccagttaacagacagagtgtggatcattttgctaaatacttcactgacgcaggtcttaaggagctttccgacttcctccgagtccagcagtccctgggcaccaggaaggaactgcagaaggagctccaggagccgctttctcaggaatgcccgatcaaggaggtgggctttatgtcaaagaagaaatgaagaggaatgatcttccagaaacagcagtgattggtcttctgtggacatgtataatgaacgctgttgagtggaacaagaaggaagaacttgttgcagagcaggctctgaagcacctgaagcaatatgctcccctgctggccgtgttcagctcccaaggccagtcagagctgatcctcctccagaaggttcaggaatactgctacgacaacatccatttcatgaaagcctttcagaagattgtggttctcttttataaagctgatgttctgagcgaagaagcaatactgaaatggtataaggaagcacatgttgctaaaggcaaaagtgtttttcttgaccagatgaagaaatttgttgagtggtacaaaatgcagaaaaaaatccga

SEQ ID NO: 22414 - DNA, 527 bp, Homo sapiens
gctcgtctacagaggactggtctttcaatagcaagttttcacttcatcgacaacatcacgaaggtggtaacaaacaaatgctttatcaggctggacttcatttcaaactcccccaaagcacagatccattacgcacatttaaagataccatctaccttactcaggtgatgcaggcccagtgtgtcaaaacagaaactgaattctaccgccgtagtcgcagcgagatagtggatcagcaagggcacacgatgggggcactttattggcagttgaatgacatctggcaagctccttcctgggcttctcttgagtacggaggaaagtggaaaatgcttcattactttgctcagaatttctttgctccactgttgccagtaggctttgagaatgaaaacatgttctatatctatggtgtgtcagatcttcactcggattattcgatgacactcagtgtgagagtccatacatggagctccctggagcccgtgtgctctcgtgtgactgaacgttttgtgatgaaaggagga

SEQ ID NO: 22415 - DNA, 408 bp, Homo sapiens
gatcatgggttggggtgctcaggtgagccctctctatagtgcttccctgggccaagctgacaccagcccctgagggtggggtgggacgggtggtgcttaaaagaggaaggggaccagtgtagcaacttgccagggaccccacccctccctctctgggcctgtgcagtgagcatggggattcccatcaaggggcctggcacctgtgctagttacgtagccgctgctcacgcgctcactcctgaccacatgcacgttccctagatgcagactgctttgaactttaaagctgtacaatttggttatgtttgtgctgacttaaaatatattttaatgaggaaaaaataatggagaaccctgggaaggacctggttcttttgcttctcggggaactgtaagccctcgcgttct

SEQ ID NO: 22416 - DNA, 622 bp, Homo sapiens
ttgaaaccctatgacatgattacgaatttaatacgactcactatagggaatttggccctcgaggccaagaattcggcacgagcacacactcgcttctggaacgtctgaggttatcaataagctcctagtccagaccgccatgggtcatttcacagaggaggacaaggctactatcacaagcctgtggggcaaggtgaatgtggaagatgctggaggagaaaccctgggaaggctccctggttgtctacccatggacccagaggttctttgacagctttggcaacctgtcctctgcctctgccatcatgggcaaccccaaagtcaaggcacatggcaagaaggtgctgacttccttgggagatgccacaaagcacctggatgatctcaagggcacctttgcccagctgagtgaactgcactgtgacaagctgcatgtggatcctgagaatttggcaatccatttcggcaaagaattcacccctgagcagtggccagtgccctgtcctccagataccactgagctcactgcccatgattcagagctttcaaggataggctttattctgcaagcaatacaaataataaatctattctgctgagagatcaccaaaaaaaaaaaaaa

SEQ ID NO: 22417 - DNA, 522 bp, Homo sapiens
  misc_feature (1)...(522): n = a,t,c or g
tgnnnnatnnnantnnnnnnnttnntgntgnnngnntnngtttgaaccttatgactgatacgaatttaatacgactcactatagggaatttggccctcgaggccaagaattcggcacgagaaacagtatattccaacgcatccctgctgatccagaatgtcacccggaaggatgcaggaacctacaccttacacatcataaagcgaggtgatgagactagagaagaaattcgacatttcaccttcaccttatacttggagactcccaagccctacatctccagcagcaacttaaaccccagggaggccatggaggctgtgcgcttaatctgtgatcctgagactctggacgcaagctacctatggtggatgaatggtcagagcctccctgtgactcacaggttgcagctgtccaaaaccaacaggaccctctatctatttggtgtcacaaagtatattgcaggaccctatgaatgtgaaatacggaacccagtgagtgccagntcgcagtgacccagtcacc

SEQ ID NO: 22418 - DNA, 932 bp, Homo sapiens
  misc_feature (1)...(932): n = a,t,c or g
tctcgcgctaccctcccgccgcccgcggtcctccgtcggttctctcgttagtccacggtctggtcttcagctacccgccttcgtctccgagtttgcgactcgcggaccggcgtccccggcgcgaagaggctggactcggattcgttgcctgagcaatggctgccatccggaagaaactggtgattgttggtgatggagcctgtggaaagacatgcttgctcatagtcttcagcaaggaccagttcccagaggtgtatgtgcccacagtgtttgagaactatgtggcagatatcgaggtggatggaaagcaggtagagttggctttgtgggacacagctgggcaggaagattatgatcgcctgaggcccctctcctacccagataccgatgttatactgatgtgtttttccatcgacagccctgatagtttagaaaacatcccagaaaagtggaccccagaagtcaagcatttctgtcccaacgtgcccatcatcctggttgggaataagaaggatcttcggaatgatgagcacacaaggcgggagctagccaagatgaagcaggagccggtgaaacctgaagaaggcagagatatggcaaacaggattggcgcttttgggtacatggagtgttcagcaaagaccaaagatggagtgagagaggtttttgaaatggctacgagagctgctctgcaagctagacgtgggaagaaaaaatctgggtgccttgtcttgtgaaaccttgctgcaagcacagcccttatgcggttaattttgaagtgctgtttattaatcttagtgtatgattactggcctttttcatttatctataatttacctaagattacaaatcagaagtcatcttgctaccagtatttagaagccaactatgattattaatgatgtccaacccgtctggcccaccanggtcct

SEQ ID NO: 22419 - DNA, 497 bp, Homo sapiens
gactgaaagaaggtcataagggagcatgataggatttggggcagagggacaggctcctctggggaaaccccccagagctctttaccaaggatgaaagaggagccaggccttgggctcctgatgaggagaaaggggccccaccggggtctaatggtgacagtccaaaccactccactggcctcctggcagaagccgagtgtgctggggtctccgaagagggtccctcctttttgggggaaggtcagcccagcccctccaaaggtctgatgtctccactttcacccgcaggccttaccgctctgtttatagtgacccaccctagatcttccccaagagggactggggtttctggggtccattctctgagtcagtggttatttgaaaatttgattttgattttattttttctctgtaaacttccaagctggcttttcccatttcaattcctgtgatttatgccaataaagtttgcccatgattttcaaaaaaaaaaaaaa

SEQ ID NO: 22420 - DNA, 513 bp, Homo sapiens
aaaccagattccagtgtactagtcatggatctttctctccctggcatgtgaaagtcagtcttagaggaagagattccacttgcacggcaacagagccttacgttaaattttcagtccagttatgaacagcaagtgttgaactctttctgcttgttttgattcaaagtgcagttactgatgttgttttgattatgcaactaagtaggcctccagagcctctctagtggcagagcagctcacactccctccgctgggaacgatggcttctgcctagtacctatccttgtgtttctgatgcagtggtagcattggttcaagttctctcctgctgtggtcagagttgcttcgatgttggccaagtgcttttcttcttgggctcccttctgacctgcaggacagttttcctggagccatttggtatgaggtattaatttagcttaactaaattacaggggactcagaggccgtgctcctgaccgatccagacactattactggctttttttttttttt

SEQ ID NO: 22421 - DNA, 382 bp, Homo sapiens
ggcgtcgggacgcagcaaagagaggagaggccaccatggcggagctgcaggaggtgcagatcacagaggagaagccactgttgccaggacagacgcctgaggcggccaaggaggctgagttagctgcccgaatcctcctggaccagggacagactcactctgtggagacaccatacggctctgtcactttcactgtctatggcacccccaaacccaaacgcccagcgatccttacctaccacgatgtgggactcaactataaatcttgcttccagccactgtttcagttcgaggacatgcaggaaatcattcagaactttgtgcgggttcatgtggatgcccctggaatggaagagggagcccctgtgttccctttgggata

SEQ ID NO: 22422 - DNA, 662 bp, Homo sapiens
gcatccaaacattatcactctaaaggatgtatatgatgatggaaagtatgtgtatgtagtaacagaacttatgaaaggaggtgaattgctggataaaattcttagacaaaaatttttctctgaacgagaggccagtgctgtcctgttcactataactaaaaccgttgaatatcttcacgcacaaggggtggttcatagagacttgaaacctagcaacattctttatgtggatgaatctggtaatccggaatctattcgaatttgtgattttggctttgcaaaacagctgagagcggaaaatggtcttctcatgactccttgttacactgcaaattttgttgcaccagaggttttaaaaagacaaggctatgatgctgcttgtgatatatggagtcttggtgtcctactctatacaatgcttaccggttacactccatttgcaaatggtcctgatgatacaccagaggaaatattggcacgaataggtagcggaaaattctcactcagtggtggttactggaattctgtttcagacacagcaaaggacctggtgtcaaagatgcttcatgtagaccctcatcagagactgactgctgctcttgtgctcagacatccttggatcgtccactgggaccaactgccacaataccaactaaacagac

SEQ ID NO: 22423 - DNA, 333 bp, Homo sapiens
gactgttggcccgggccgagaagaaggctgctggcaaaggggacgtcccaacgaagagaccacctgtccttcgagcaggagttaacaccgtcaccaccttggtggagaacaagaaagctcagctggtggtgattgcacacgacgtggatcccatcgagctggttgtcttcttgcctgccctgtgtcgtaaaatgggggtcccttactgcattatcaagggaaaggcaagactgggacgtctagtccacaggaagacctgcaccactgtcgccttcacacaggtgaactgtcgacgcggccgcgaattccagatctatgaatcgtagatactga

SEQ ID NO: 22424 - DNA, 475 bp, Homo sapiens
  misc_feature (1)...(475): n = a,t,c or g
gcctggacaagctggatgtggtgcgcagcttcttgcatgctcggctccggacagctacgcttcggcatgacgcagacgggcaggccaccctgttgaacctcctgctgcggaattacctacactacagcttgtacgaccaggctgagaagctggtgtccaagtctgtgttcccagagcaggccaacaacaatgagtgggccaggtacctctactacacagggcgaatcaaagccatccagctggagtactcagaggcccggagaacgatgaccaacgcccttcgcaaggcccctcagcacacagctgtcggcttcaaacagacggtgcacaagcttctcatcgtggtggagctgttgctgggggagatccctgaccggctgcagttccgccagccctccctcaagcgctcactcatgccctatttccttctgactcaagctgtcaggacaggaaacctanccaagttcaaccaggg

SEQ ID NO: 22425 - DNA, 303 bp, Homo sapiens
ttgaatccatcagctatgacatgattacgaatttaatacgactcactatagggaatttggccctcgaggccaagaattcggcacgagcagcattccagatgtccagcacatttttaataggaaagtattgggaacagatgtcattattttcagcctaggttttaaaacattttagtatgtcatgaattatcttcaaaaggatcataaatcttttttaaaggtccattttatttaaaatatataaaaataatcactgcactgcagcctgggtgacagagagtctgtttccaaaaaaaaaaaaaa

SEQ ID NO: 22426 - DNA, 480 bp, Homo sapiens
  misc_feature (1)...(480): n = a,t,c or g
gnnnnnnnnnnnntttggatnccctnnccngaaaccctttgacatgatcacgaatttaatacgactcactatagggaatttggccctcgaggccaagaattcggcacgagcggcacgagcagctcggaccctgcccagcccatggatgagaatgagtttatcgatgcttcccgcctggtatatgatggcatccgggacatcaggaaagcagtgctgatgataaggacccctgaggagttggatgactctgactttgagacagaagattttgatgtcagaagcaggacgagcgtccagacagaagacgatcagctgatagctggccagagtgcccgggcgatcatggctcagcttccccaggagcaaaaagcgaagattgcggaacaggtggccagcttccaggaagaatagagcaagctggatgctgaagtgtccaaatgggacgacagtggcaatgacatcattgtgctggccaagcag

SEQ ID NO: 22427 - DNA, 604 bp, Homo sapiens
  misc_feature (1)...(604): n = a,t,c or g
catgacaacgaatttaatacgactcactatagggaatttggccctcgaggccaagaattcggcacgagggaagccactaagctgctctccaacacagtcatgccacgttttactgagcaagtagaagcagccgtggaagccctcagctcggaccctgcccagcccatggatgagaatgagtttatcgatgcttcccgcctggtatatgatggcatccgggacatcaggaaagcagtgctgatgataaggacccctgaggagttggatgactctgactttgagacagaagattttgatgtcagaagcaggacgagcgtccagacagaagacgatcagctgatagctggccagagtgcccgggcgatcatggctcagcttccccaggagcaaaaagcgaagattgcggaacaggtggccagcttccaggaagaaaagagcaagctggatgctgaagtgtccaaatgggacgacagtggcaatgacatcattgtgctggccaagcagatgtgcatgattatgatggagatgacagactttanccgaggtanaggaccactcannaatacatcggatgtcntcagtgctggcnangaaattgtgaggg

SEQ ID NO: 22428 - DNA, 408 bp, Homo sapiens
  misc_feature (1)...(408): n = a,t,c or g
ttgannnccngctatgactgattacgaatttaatacgactcactatagggaatttggccctcgaggccaagaattcggcacgagggtccacgccgtggccggagccgtgggaagtgtgacagcaatgacagtgttttttcccctggatacagctagacttcgacttcaggttgatgagaaaagaaaatccaaaactacacacatggtgctcctggagatcattaaagaagaaggactcctggcaccatatcgagggtggtttccagtgatttccagtctctgctgctccaattttgtctatttctacacttttaatagcctcaaagcactctgggtcaaaggtcaacattctaccactggaaaagatctggtagttgggtttgttgcaggagtggttaatgtgttgct

SEQ ID NO: 22429 - DNA, 345 bp, Homo sapiens
agaaagctcagctggtggtgattgcacacgacgtggatcccatcgagctggttgtcttcttgcctgccctgtgtcgtaaaatgggggtcccttactgcattatcaagggaaaggcaagactgggacgtctagtccacaggaagacctgcaccactgtcgccttcacacaggtgaactcggaagacaaaggcgctttggctaagctggtgggtcgacgcggccgcgaattccagatctatgaatcgtagatactgaaaaaccccgcaagttcacttcaactgtgcatcgtgcaccatctcaatttctttcatttatacatcgttttgccttcttttatgtaactat

SEQ ID NO: 22430 - DNA, 470 bp, Homo sapiens
ttgaaccctgattacgaacttaatacgactcactatagggaatttggccctcgaggccaagaattcggcacgaggggaaaagtgtggctgggtcttcgaggagccgcaccaatggcttccgtgctgtcctacgaaagcctggtccacgccgtggccggagccgtgggaagtgtgacagcaatgacagtgttttttcccctggatacagctagacttcgacttcaggttgatgagaaaagaaaatccaaaactacacacatggtgctcctggagatcattaaagaagaaggactcctggcaccatatcgagggtggtttccagtgatttccagtctctgctgctccaattttgtctatttctacacttttaatagcctcaaagcactctgggtcaaaggtcaacattctaccactggaaaagatctggtagttgggtttgttgcaggagtggttaatgtgttgctaacaac

SEQ ID NO: 22431 - DNA, 446 bp, Homo sapiens
  misc_feature (1)...(446): n = a,t,c or g
gggagggaggcggttagcgggctttagcgccttttctggcggcggtagatttgaagcgcttcaaaggaccggacccagagaagaggaaaactctaccggtgcaggagcacagggatcagttgtccttgtttttttttggtcttttcttcatttgaagattaagtattggagccatgggaataaaggttcaacgtcctcgatgtttttttgacattgccattaacaatcaacctgctggaaaagttgtctttgaattattttctgatgtgtgccccaaaacatgcgaaaactttcgttgtctttgtacaggtgaaaaggggaccgggaaatcaactcagaaaccattacattataagagttgtctctttcacagagttgtcaaggattttatggttcaaggtggtgacttcagtgaaggaaatggacnaagaggggaatctatcttt

SEQ ID NO: 22432 - DNA, 667 bp, Homo sapiens
  misc_feature (1)...(667): n = a,t,c or g
gaccgatcacgaatttaatacgactcactatagggaatttggccctcgaggccaagaattcggcacgaggtctggcacttcatataaagacctgatgccacatgatttggctagagcagcgcttacgggtttgttgcatcggaccagtgtccctaaggaagtagttgattatatcatctttggtacagttattcaggaagtgaaaacaagcaatgtggctagagaggctgcccttggagctggcttctctgacaagactcctgctcacactgtcaccatggcttgtatctctgccaaccaagccatgaccacaggtgttggcttgattgcttctggccagtgtgatgtgatcgtggcaggtggtgttgagttgatgtccgatgtccctattcgtcactcaaggaaaatgagaaaactgatgcttgatctcaataaggccaaatctatgggccagcgactgtctttaatctctaaattccgatttaatttcctagcacctgagctccctgcggtttctgagttctccaccagtgagaccatgggccactctgcagaccgactggccgctgcctttgctgtttctcggctggaacaggatgaatatgcactgcgctctcacagtctagccaagaaggccaggaatnaaggctcctttttgaaggggccc

SEQ ID NO: 22433 - DNA, 398 bp, Homo sapiens
gcagccttcccatagtgaacctcaagggccaagtactttttaataattgggactcaattttttctggccacggaggtcagttcaatatgcatattccaatatactcctttgatggtcgagacataatgacagatccttcttggccccagaaagtcatttggcatggctccagcccccatggcatccgccttgtggataactactgtgaagcatggcgaaccgcggacacagcggtcacgggacttgcctccccgctgagcacggggaagattctggaccagaaagcatacagctgtgctaatcggctaattgtcctatgtatcgaaaacagtttcatgacagacgctaggaagtaatggccttctgatgattcttaaagagttttcaattttttctta

SEQ ID NO: 22434 - DNA, 379 bp, Homo sapiens
gtacatgcttgggttgcaaatgtgctgtttaggccaaaattatcacacgttgaacatccccaaaaagggctttggaaacaaggataggatgcctgccctgatcaaaccatggtatgtttacatgtggcatactgttggacattctgcacaccacactttaactcctaagaggtctttttcattaaagaccagcctgggcaacaaaaagagaccctggctgggcacagtggctcatgcctgtaatccaagcactttgggagaccaagacaggtggatcacttaggggtcaggggttcaagaccaacctggccaacatggtgaaaccctcttaaaaaaaattcaaaaattagcctggggtggtggcacacgcctgtaatcc

SEQ ID NO: 22435 - DNA, 259 bp, Homo sapiens
  misc_feature (1)...(259): n = a,t,c or g
gaggaaagagcgccaagctgctagacaggcctccagaagcactgcgtatgaagattattactaccaccctcctcctcgcatgccacctccaattagaggtcggggtcgtggtgggggaggaggtggatatggctaccctccagattactacggctatgaagattactatgatgattactatggttatgattatcacgactatcgtggaggctatgaagatccctactacggntatgatgatggctatgcnnnannagga

SEQ ID NO: 22436 - DNA, 467 bp, Homo sapiens
cgagatggtgctgtcaaggctatggaagaaatgaatggcaaagacttggagggagaaaatattgaaattgtttttgccaagccaccagatcagaaaaggaaagaaagaaaagctcagaggcaagcagcaaaaaatcaaatgtatgacgattactactattatggtccacctcatatgccccctccaacaagaggtcgagggccgtggaggtagaggtggttatggatatcctccagattattatggatatgaagattattatgattattatggttatgattaccataactatcgtggtggatatgaagatccatactatggttatgaagattttcaagttggagctagaggaaggggtggtagaggagcaaggggtgctgctccatccagaggtcgtggggctgctcctcccgcggtagaaccggttattcacagagaggaggtcctggatcagcaagaagcgttca

SEQ ID NO: 22437 - DNA, 1044 bp, Homo sapiens
aaccgctatgacatgattacgaatttaatacgactcactatagggaatttggccctcgaggccaagaattcggcacgagaagatgccgaaaggaaagaaggccaagggaaagaaggtggctccggccccagctgtcgtgaagaagcaggaggctaagaaagtggtgaatcccctgtttgagaaaaggcctaagaattttggcattggacaggacatccagcccaaaagagacctcacccgctttgtgaaatggccccgctatatcaggttgcagcggcagagagccatcctctataagcggctgaaagtgcctcctgcgattaaccagttcacccaggccctggaccgccaaacagctactcagctgcttaagctggcccacaagtacagaccagagacaaagcaagagaagaagcagagactgttggcccgggccgagaagaaggctgctggcaaaggggacgtcccaacgaagagaccacctgtccttcgagcaggagttaacaccgtcaccaccttggtggagaacaagaaagctcagctggtggtgattgcacacgacgtggatcccatcgagctggttgtcttcttgcctgccctgtgtcgtaaaatgggggtcccttactgcattatcaagggaaaggcaagactgggacgtctagtccacaggaagacctgcaccactgtcgccttcacacaggtgaactcggaagacaaaggcgctttggctaagctggtggaagctatcaggaccaattacaatgacagatacgatgagatccgccgtcactggggtggcaatgtcctgggtcctaagtctgtggctcgtatcgccaagctcgaaaaggcaaaggctaaagaacttgccacgtcgacgcggccgcgaattccagatctatgaatcgtagatactgaaaaaccccgcaagttcacttcaactgtgcatcgtgcaccatctcaatttctttcatttatacatcgttttgccttcttttatgtaactatactcctctaagtttcaatcttggccatgtaacctctgat

SEQ ID NO: 22438 - DNA, 403 bp, Homo sapiens
ggacacagggaggggaacatcacacactggggcctgtcagggggtgggggacaaggggacggagagcattaagagaaacacctaatgtagatgacgggttgatgggtagagcaaaccaccatggcatgtgtatacctatgtaacaaacctgcacgttccacacacgtgttccagaacttaaagtataatttaaaaaaagaaagaaaaagaaaaggtcaggttgccctaaactcacttgtgctacttttcctgctttggaactttgcaagttgaatggataggcttatgtatcttcagagagaaaatgaaatgtttttaactatgattacacaatgcctccagttgctgacgctaagaaaacaccatccttaatatgcaattctagcttttcaagcggttgttg

SEQ ID NO: 22439 - DNA, 513 bp, Homo sapiens
gctatgacatgattacgaatttaataccgactcactatagggaatttggccctcgaggccaagaattcggcacgaggagaaaataagtcttatttctaaaaataggaggcttcccccccccaccccccaatggctgtagacctgagggcttttagtaagtaataatgaacttttacagtaactgtaatttgagtcagatagtttttctctgatttatgctaccagagtgactcatgagggcacagcattttagaggctctttctgagacagaaaatgtctctgacttttgtcaagtaagtaattattgatgtagcgtgaggatcttataatctagaagaaaaaattatttattttcatatgcctattaattttccatctgttgaactgaagccagggagagatgaatgcacaaagctgcttcacccttctgcttcctcccaggctgagtctctacttcgtgtgtcccctctcgctcctggagtccccagtcagctcttagaggaatccttggg

SEQ ID NO: 22440 - DNA, 347 bp, Homo sapiens
ggttgtttcttttctcctccttcttccagaagcagaaagagatttttcctctggtattcactgtgaagctctgatacaactcttggaagtaaaactcacagaagtgtgaggatccccttaagattaggtccccctaaagtttttatctttcagacttgtccacactgatccttcagcaattcatcagttaaaagtttatgttttcctacctcatgatggttcagaggaggtttctgctcgtggatttctgctctgataaattgtgacactctatcctaacctgtcttactctccaattttaggggcagcagtttgcactgtaaactcacttctatggcagatctaag

SEQ ID NO: 22441 - DNA, 601 bp, Homo sapiens
gtgagtatttgagaatgagtggcatctattggggtctgacagtaatggatctcatgggacaacttcatcgcatgaatagagaagagattctggcatttattaagtcttgccaacatgaatgtggtggaataagtgctagtatcggacatgatcctcatcttttatacactcttagtgctgtccagattcttacgctgtatgacagtattaatgttattgacgtaaataaagttgtggaatatgttaaaggtctacagaaagaagatggttcttttgctggagatatttggggagaaattgacacaagattctctttttgtgcggtggcaactttggctttgttggggaagcttgatgctattaatgtggaaaaggcaatcgaatttgttttatcctgtatgaactttgacggtggatttggttgcagaccaggttctgaatcccatgctgggcagatctattgttgcacaggatttctggctattacaagtcagttgcatcaagtaaattctgatttacttggctggtggctttgtgaacgacaattaccctcaggcgggctcaatggaaggccggagaagttccagatgtatgctactct

SEQ ID NO: 22442 - DNA, 312 bp, Homo sapiens
aattcggcacgaggtgagtgacttggtatagggtgccatatgcctttttgcctttccccagtttcccctactgttaacatctcacatttatgtggtgtatttattataattaatgagccaaaatggcaaaaccccgtctctactaaaaatacaaaaattagctgggcctaatggcacgtgcctgtagtctcagcttctcaggaggctgaggcaggagaatcgcttgaacccaggagggggaggtttcagtaagccgagattaccacactgcagcctggatgacaaaataagagtccgtttcaaaaaaaaaaa

SEQ ID NO: 22443 - DNA, 643 bp, Homo sapiens
cccctttgaaaaccctatgacatgattacgaatttaatacgactcactatagggaatttggccctcgaggccaagaattcggcacgagaacagcgtcttgaacccttgtacaaccgctatgaggaacccaatgcctggagaatatctcgagctttccgacggcgctgaaaggcaagattgttcctttgcctctccagcagcagtagccagggcttggacttatcgatgacaggctggtcctgaggatacagctgtcccgtgactgactgtcttaactgagcattttctcaactcgactctcatttcttccctgctggtaaaatagaaacagggatttaaacctggctttggcaagagcctgcagcctccatcaccccaagtccttgggcccagttgggagctcatatctaacacagagacacattgcatcaacttcaagaaagggacaatttgtgcagctccaggatgggaaggtggagtgggtgagcatcttgtgcagggacatggtgagtgccctgatgccccagctagcaggagctactgtgctcatctaaagtgtttgccccacttcccaccccgtctccagcccctgtactttggcttgacctcgtggaaatatttattttcttaaaaaaaaaaaaaa

SEQ ID NO: 22444 - DNA, 624 bp, Homo sapiens
gcggcacgaggcagagaatgccagaaggtaatcactcagatacacttgggaccaagagacagtgaaaaatagatgaactaagagaaaaagaatcggatggtctttgtaactgattctggacatatgcatcattgatgttgcagtgttgaaactacaagagctagaaaactgaagatgtcgtctgcttacggaagcgctgaaagactaggatgtgatttattaacgaccaacttctgttattgtgtgttaagtttttcatctgtgcatcaaatcacaaaaagaataaatagagctttttcctttatcagtcccttgggcacagcaggtcctgaacaccctgctctacaatgttgcatcaagagttcaaacaacaaaataaaaaatattaagaggaaatccccatcctgtgacttgagtcccttaagtctacaggggctggtgacctctttttgctaataggaaaatcacattactacaaaatggagagaaaactgtttgcctgtggtagacacctgcacgcataggattgaagacagtacaggctgctgtacagagaagcgcctctcacatctgaactgcatactgagcgggcaagtcggttgtaagttcagtaaaaccctctga

SEQ ID NO: 22445 - DNA, 446 bp, Homo sapiens
gggcatggtggcgcatgcctgtagtcccagctactcggcaggctgagccaggagaatcgcttgaacccaggagatggaggctgcagtgagctgaaatcgtgccactgcactccagcttgggtgacagagcgagactctgtctcaaaaaaggagtttacaaacaagcttaaaatacaatttatcatcagtattaggtaatcaatatttgaaaagttaaactgacgagcccagtgttttaatggaggtaacagatttgctattttcaataaagctcagttatttccagaacttcttttccattatgcctgttttcttagttacatgaattttcatattgtttcagctgcttttcaaaatgaccagcagtacattttagtgtgatgggaaatggaataagccagccatactttaggaaatgtgatgatttaatttttgaaaatatgaac

SEQ ID NO: 22446 - DNA, 428 bp, Homo sapiens
gtgctttgtcaatctctgccccggtctgatgtttcctacagggagatgccttggatccaggttcagggactaaatacacttggcagctgaagatgaattggaatggtcacgtgttttaggctggacagcgtcccgccacagctactacctgacactgagctcatgcagagagatgatggctgatgttccttctcccttgggacatgggtctggcacctgtgggctgtcgatagtgccctctgagcagagggtcacggtcatgtcagtttgggggaattctctgttgtgcctcacagactcccccctttctttcctccctccccttctcattttgatgtctaaagcatcaagtccctcttcctcggagtttctctagctgcagtggaagattctgttttcctgtggggaaaatgctcacttgagatttg

SEQ ID NO: 22447 - DNA, 490 bp, Homo sapiens
  misc_feature (1)...(490): n = a,t,c or g
tnnnnntnnnnnttntgaancctataagcnatgacatgattacgaatttaatacgactcactatagggaatttggccctcgaggccaagaattcggcacgagagcctctgtcgctgtccctgaagcccgaccccctggcccacctgtccatgatgcctccgccacccgccctcctgctcgctgaggccacccacaaggcctccgccctctgtcccaacggggccctggacctgcccccagccgctttgcagcctgccgccccctcctcatcaattgcacagccgtcgacttcttccttacattcccacagctccctggccgggacccagccccagccgctgtcgctcgtcaccaagtctttagaatagctttagcgtcgtgaaccccgctgctttgtttatggntttgnttcacttttcttaatttgcccccacccccaccttgaaaggttttgttttgtactctcttaattttgtgccatgtggctaca

SEQ ID NO: 22448 - DNA, 655 bp, Homo sapiens
aatttaatacgactcactatagggaatttggccctcgaggccaagaattcggcacgagcggcacgaggaagaggaaaagggacaagcagccgggagagaccaatggagaaaaaaaaagtgcgttcgctacatacaaggtgaaggcagctgcctcagcccaccctcttcagatggaagcttactagattcgcctcccccctccccgaacctgctaggctcccctccccgagacgccaagtcacagactgagcagacccagcctctgtcgctgtccctgaagcccgaccccctggcccacctgtccatgatgcctccgccacccgccctcctgctcgctgaggccacccacaaggcctccgccctctgtcccaacggggccctggacctgcccccagccgctttgcagcctgccgccccctcctcatcaattgcacagccgtcgacttcttccttacattcccacagctccctggccgggacccagccccagccgctgtcgctcgtcaccaagtctttagaatagctttagcgtcgtgaaccccgctgctttgtttatggttttgtttcacttttcttaatttgccccccacccccaccttgaaaggttttgttttgtactctcttaattttgtgccatgtggctacattagttgat

SEQ ID NO: 22449 - DNA, 411 bp, Homo sapiens
ggaccatctagggcactaagtggcaggttcacagaagatatgatctttaacccgtggcactttaggcaagggagccaacatgtgcaaaggcaaaattagcatgaaagggcatgacatattctaacaacagggagaagttagttctacgtgactgaagctcagggcactttttatgggggaggacaggagttaatacccaaaaaggaggttgggggcagatatgaaggattctatatgtgggcctgaagttggaactttttccctgattggaaagcaatcaggtctttaaacatgcatgtggcctgattgattttgggttttacaaacacctctggtgggaacttgaagcggtatataaattagcccaggagcccagacagaggagtgcctgacctaaagcaatgggctgca

SEQ ID NO: 22450 - DNA, 407 bp, Homo sapiens
gagcctctcctctggccgccgcgcgggagagaggccgagatggcagatgagattgccaaggctcaggtcgctcggcctggtggcgacacgatctttgggaagatcatccgcaaggaaataccagccaaaatcatttttgaggatgaccggtgccttgctttccatgacatttcccctcaagcaccaacacattttctggtgatacccaagaaacatatatcccagatttctgtggcagaagatgatgatgaaagtcttcttggacacttaatgattgttggcaagaaatgtgctgctgatctgggcctgaataagggttatcgaatggtggtgaatgaaggttcagatggtggacagtctgtctatcacgttcatctccatgttcttggaggtcgcaaatgcattgg

SEQ ID NO: 22451 - DNA, 350 bp, Homo sapiens
atataaacttcatgaatgcctagaccttgtctgtggtagtcactatatttctagaatctagaaaaatatatggcacatgagtccaaggtatatctaattacttgtctcttgaaagatttgtattatacaagttctgagtagggtgggagccatgtgtttgtataggctaggcatttacgtggagcaacttcaagcagatactttaaagattaattggatatgggtggtaatgggaggaattgaaaacatctgagatgtctgtttatggaagtagttcctcagtcacctggaggtgggggctaggaggggagagaaacagaaattatattcttctaaaggtagaccggggc

SEQ ID NO: 22452 - DNA, 387 bp, Homo sapiens
gagttcagatggtcagttgagtctatcctagttttttgcttcacttgttcaatcatggaactttctacaacgctgccactcttcaaaggcttctcaatttcaaatttgaaaacttaattctctccctcttagtttcaaagttgttacagtgttatctatgtgaagtatgtggaaagttgggggctggggattttcctccaggcagattaagaaacagctctccgggtcgggcgctgtggctcaggcctgtaatcccagcactttgggaggctgaggcaggagaatcgctcgaacccgggaggcggaggttgcagtgagctgagatcatgccattgcactccggggcctgggcgacagagccagacgctgtctcaaaaaaaaaaaaaa

SEQ ID NO: 22453 - DNA, 461 bp, Homo sapiens
gggtcactgtagcggaacttcttttggttttctttctctttggggcacctctggactcactccgcagcatgaaggcgctgagcccggtgcgcggctgctacgaggcggtgtgctgcctgtcggaacgcagtctggccatcgcccggggccgagggaagggcccggcagctgaggagccgctgagcttgctggacgacatgaaccactgctactcccgcctgcgggaactggtacccggagtcccgagaggcactcagcttagccaggtggaaatcctacagcgcgtcatcgactacattctcgacctgcaggtagtcctggccgagccagcccctggaccccctgatggcccccaccttcccatccagacagccgagctcgctccggaacttgtcatcgccaacgacaaaaggagcttttgcactgactcggccgtgtcctgacacctccagaacgcaggt

SEQ ID NO: 22454 - DNA, 492 bp, Homo sapiens
gctatgacatgattacgaatttaatacgactcactatagggaatttggccctcgaggccaagaattcggcacgagaagtactgaaattataggcgtgagccaccgcgcccggccctggtgtttgtatttatagtagatgaaaaaggagtcatgcaagatgttggcgtgctgagactgagcaaaggcagtcctgttaccaggatagcttcctggaggaggtagactggctcagaaggcgcccccactgtaagactgaagactgtaaagaacaatcttccaggtggtaggaagaaatgagtagatagaggaattctgagctcttaaggcagagtggggacttaggactgcaaaatgttgtagccatgaccccagatatgtgacaagtcagacacttcaaggtagcctgagggtgtgctccgccctgtacctcatgtggttcctatgaaccggagcctctgggcgcttccaggctggaccaaatctgtgaacacc

SEQ ID NO: 22455 - DNA, 428 bp, Homo sapiens
  misc_feature (1)...(428): n = a,t,c or g
ggtttaaaaagtgtataccagaagagttattgagtgataggggtttgaaataggcaaagctgtaggaaagggggctggaaggaatattaggaggaacactaaatatacttctgaggtctacctcctggtctgtgaacataaaggagctgaaagagtaatggctgaagttctttagtttagctaaagttttttagctaaagctagaattgttgaaagttgtatttgaggaaaaaaagttaaggatacagttgaccgttcgataatgtagcccactgttgaccagaagccctacccacaacataaacaggcaataacacatattttgtatgtgtattatatagtatattcttaacaataaagtaaactagagaaaagaacatgtatcatgaaaatcatnaggaagagaaaacccatttacngtctgtctg

SEQ ID NO: 22456 - DNA, 356 bp, Homo sapiens
ggattttaatgccgcacatttgcatactatatgcttgttacagtgatccccacagtaactcatgaagcagccactcattgtacaaatgaacgtctccatataatagtttagctattatacagtacatggcagaaacacaattcaaactcaagtttatacgaatactttcaagtctccttacctgagagcagaaagtgacatttaaatttaaaggagttcccagcctttgttttcagtgcagtttgtttcatggtgtaggcagaagtcagggctgtgtgattgtgtggctgggctctctggatttggctctttgggttgcaggagtcatggctcatacgctacatgaggcaccagct

SEQ ID NO: 22457 - DNA, 440 bp, Homo sapiens
gaagagagatctggccaaagacataacctcagacacatctggagattttcggaacgctttgctttctcttgctaagggtgaccgatctgaggactttggtgtgaatgaagacttggctgattcagatgccagggccttgtatgaagcaggagaaaggagaaaggggacagacgtaaacgtgttcaataccatccttaccaccagaagctatccacaacttcgcagagtgtttcagaaatacaccaagtacagtaagcatgacatgaacaaagttctggacctggagttgaaaggtgacattgagaaatgcctcacagctatcgtgaagtgcgccacaagcaaaccagctttctttgcagagaagcttcatcaagccatgaaaggtgttggaactcgccataaggcattgatcaggattatggtttcccgttctgaaattg

SEQ ID NO: 22458 - DNA, 356 bp, Homo sapiens
  misc_feature (1)...(356): n = a,t,c or g
ttttgacttcttttgctcaacataatgtgtggtttgacttttaattgttcttttgatagatgtatgggcttatttatcttggtatgtgctatatgctcaggaatgaatttactggtcgacgcggccgcgaattccagatctatgaatcgtagatactgaaaaaccccgcaagttcacttcaactgtgcatcgtgcaccatctcaatttctttcattaatacatcgttttgccttcttttatgtaactatactcctctaagtttcaatcttggccatgtaacctctgatctatagaattttttaagggctaganttaatgcccatcttttttttggacctaaattnttnatgaaatt

SEQ ID NO: 22459 - DNA, 619 bp, Homo sapiens
ggcagagctgctgcattcccccacatggggatttctgtgtctgcttggcgacctccctgcgtgcacggcctaggaggtgcacgggccaccatagtcacactggcactgaaaagaaagcgttgccctggtgattctttcccccccgtttgtaatgttaactgatcaggaagtgcagtttgggtgggatgccgaatcgtcgtgctgacattgagtcacggatgaggaaggtacaagtcctttaagatcaaaactcaaacgggccgttctttctaaggtgtcggtatgtggggagtggtacaaaatggtctgatgctccttcaaaaacattcactttttacaacgtcaaggaattaagcataaaaaagattggttaaaagctttggtttctagtaaaggttagtgtgtgtggtttttttaagaagctgttttgctaaattatttttacttggaatgtttcaaacagatttcaggctgcaaacttgttttataatcgtttgcttctccaagtgaagctcagaaatacctaaaaatagctgtaacgttcgcgttaggaaagatggtgtttattccagtttgcatttttatggtgaaataaaatccttttccaatgaaccaaaaa

SEQ ID NO: 22460 - DNA, 576 bp, Homo sapiens
gcacgtccatccgagcgctgcctcagggatcgataaagtttcactgcagaaagtctccactgcggtatgctgacatctgccctgaaccttcaccctacagcattacaggctttaatcagattctgctggaaagacacaggctgatccacgtgacctcttctgccttcactgggctggggtgatccttggtgcctttgtttccacaaggccttttcctgccccctgccttgccaaagacatttaatcagcacacagctgccagactattcccacagtgctccaaatgcacatgaacaacagtgacggctccagccttcgacccagagccccgtgcccagtgcgtcagtgggcctggggttccaggctacatcaagcactgatggtgtcagggctggtagttaccaaatcagggttaagaaacatcagggccacatttcactaccttcacagatcaaactcagcagcagcatgactgctgcactacactggggatccaattcacataagcacttttggaagaaacagccaagttggctaaaattgggctgaattggctggaaaaacttggggtattct

SEQ ID NO: 22461 - DNA, 441 bp, Homo sapiens
ggaaaagctgacagttgctgaaaatgaggcagagactaaacttcaagctattttggaagacatccaggtcacccttttcacaagggcttctgaagaccttaagactcatatggttgtggctaatacaatggaagactttcagaagatactagattctggaaagattgttcagattccattctgtggggaaattgactgtgaggactggatcaaaaagaccactgccagggatcaagatcttgaacctggtgctccatccatgggagctaaaagcctttgcatccccttcaaaccactctgtgaactgcagcctggagccaaatgtgtctgtggcaagaaccctgccaagtactacaccttatttggtcgcagctactgagggatgaacgaaagccccctcttcaactcctctcactttttaaagcattgatattagtatct

SEQ ID NO: 22462 - DNA, 476 bp, Homo sapiens
  misc_feature (1)...(476): n = a,t,c or g
ctttggcatacatcctcttcaagttttctacgtgctgaatcatcacttcaactgctttactaacccggctttcctgattgatggctcccaacatctcagccctactggccactcgtgctgcacactggctaagaaactttatactcttctccagcttcttaatgatttcctgtgcctggttgtcatcttcacacagaggtgttaaagactctaatagttttaaagagttagtgatttctttcttcaaattttcttctgccaagtcacgggacctctcttcaagcttcactctcttctccaaggtaaaccagtcacacttaaatcccaaagataatctgagaaattctgctccacctccttctcattagcagaagtgttctcactttgctaaggntaaccgatttcacagtggttacaggaagaggggaaaccacagagctctgaagcatgtcnttttatggcctcnatggtctggg

SEQ ID NO: 22463 - DNA, 397 bp, Homo sapiens
gtcactgcccacctcacccctcccctagcctgaggggcaccctcctgtacctctcttccttccctccaaggccgtctttgagccccttatcttgatgctggctgaggggaggcccaagaggaagacacgccttattttcctattgctgcctgcagctggctcccaacattcagctcacattgtagcccaagagatggggagcacagactggaatgagtaatgggagagtagcctccagtctgcccggatttgaatcctaactcttcctcttagaagctgtgtgatctgggaagatgacgtaaccctgagcccgattttcttatcggtgaaatggggtcgttatgacatcccgctctttgggcttgcctgtgggctgcctgtgatagacccggtgtgt

SEQ ID NO: 22464 - DNA, 362 bp, Homo sapiens
gagaaccttgtcatcgtggaaactgccagacatgctggcaagccagttttgatgaattaacctgccattgtggtgcatcagtgatttaccctccagttccctgtggtactaggccccctgaatgtacccaaacctgcgctagagtccatgagtgtgaccatccagtatatcattcttgtcatagtgaggagaagtgtcccccttgcactttcctaactcagaagtggtgcatgggcaagcatgagcagtcccactactggggcgtctacccagaagaaaagaagtcattatatgaaaaagatacctgcacacgcatgtttatagcagcacaattcacaattgcaaaaatgtggaaccagccc

SEQ ID NO: 22465 - DNA, 530 bp, Homo sapiens
  misc_feature (1)...(530): n = a,t,c or g
gggnngnnnnntnnnnntttgnnattgaanacngttatgacatgattacgaatttaatacgactcactatagggaatttggccctcgaggccaagaattcggcacgagggggaaggaggttcttctccttgtccacaatctgccccagcaactttttggctacagctggtacaaaggggaaagagtggatggcaaccgtcaaattgtaggatatgtaataggaactcaacaagctaccccagggcccgcaaacagcggtcgagagacaatataccccaatgcatccctgctgatccagaacgtcacccagaatgacacaggattctacaccctacacgtcataaagtcagatcttgtgaatgaagaagcaactggacagttccatgtatacccggagctgccaagccctccatctccagcaacaactccaaccctgtggaggacaaggatgctgtggccttcacctgtgaacctgagactcaggacacaacctactgtggtggataaacaatagagccttccgggcagtc

SEQ ID NO: 22466 - DNA, 569 bp, Homo sapiens
  misc_feature (1)...(569): n = a,t,c or g
aaatccgtatgacatgattacgaatttaatacgactcactatagggaatttggccctcgaggccaagaattcggcacgagcagatcttcccaaccgtgaatggactgtttagatggtttaaggatcactaccaggatcctgtaccaggcatcacccctagcagcagcagcaggacccggacacctgcctctatcaatgctaccccagccaacatcaaccttgcagatctgacacgggctgtgaatgccctgcctcagaacatgacttcacagatgttcagtgccattgctgcggtgacaggccaaggacagaaccctaatgccaccccagcccagtgggcctccagccagtacggctatggcggcagtggaggcggcagcagtgcttaccacgtattcccaacgccagcccagcagccagtggccacaccactaatgacccctagctactcctacacgaccccaagccgagccctatgcagtctctcgtgccgaattcttggcctcgagggccaaattccctatagtgagtcggtattaaattcgtaatcatgtcatancngntntcaa

SEQ ID NO: 22467 - DNA, 450 bp, Homo sapiens
ggtggcttctggtgctctagggtgagctctgcccggctgcagggatggcggggaggggtaagctcatcgcagtgatcggagacgaggacacggtgactggtttcctgctgggcggcataggggagcttaacaagaaccgccatcccaatttcctggtggtggagaaggatacaaccatcaatgagatcgaagacactttccggcaatttctaaaccgggatgacattggcatcatcctcatcaaccagtacatcgcagagatggtgcggcatgccctggacgcccaccagcagtccatccccgctgtcctggagatcccctccaaggagcacccatatgacgccgccaaggactccatcctgcgcagggccaggggcatgttcactggcgaagacctgcgctaggggactcctcatagccctcacccttcctcgtttcaggctctcccag

SEQ ID NO: 22468 - DNA, 417 bp, Homo sapiens
  misc_feature (1)...(417): n = a,t,c or g
gcccagctgcctgggaggctgaagcagagaattgcttgaacccaggaggcagaggtttcagtgagccgagatcgcaccactgaactccagcctgggtgacagagcgagactccatctcaaaaaataaaaaaagactctttataaatatttttcaaagaaccaacttttggctttaattttgtgtattttttttctcttttccattgccttcagctcacatcttcaattaatttcctccgtttcttctcaatttgggtctaattatttctctttaacttcttgtgatgctagatgaactcaaatgattaattttaagctttctttttcccttacataaacagcacaaaagatgatggggggctttaaatgaactgttacaaaggncttacattttacatgaaataatacnatagcatc

SEQ ID NO: 22469 - DNA, 529 bp, Homo sapiens
gcgtcactcctcctcaggccctcaggttcacttctgtaactaaggcttcaggatgggtcattcagcaaccccagagctgccctgcccgtcaagcttgaactctttaaggaaataacatttatagtggactgtgcccccagcagcccccaagggccaattcctgtccccccagcagcatggcatcgtgtgctgaaccctctgagccctctgccccactgcccgccggggtcccaccgctcgaggacttcgaggtactggatggggttgaggatgcagagggtgaggaggaagaggaggaggaagaggaggaagaggatgacctgagtgagctgccaccgctggaggacatgggacaacccccggcggaggaggctgagcagcctggggccctggcccgagagttccttgctgccatggagcccgagcccgccccagccccggccccagaagagtggctggacattctggggaacgggctgttgaggaagaagacgctggcccttgaccgggcggctcgaacctggcggcc

SEQ ID NO: 22470 - DNA, 327 bp, Homo sapiens
gcgaggtggagctgctccgtttcctcgagagcctgcctgaggaggagcagcagcgggtcttgggggaagagaagatgctgaacatcaacaagaagcaggccaccagccccgcctccaagaagccagcccaggaagggggcaagggcggctccgagaagcccaagcggcccgtgtcggccatgttcatcttctcggaggagaaacggcggcagctgcaggaggagcggcctgagctctccgagagcgagctgacccgcctgctggcccgaatgtggaacgacctgtctgagaagaagaaggccaagtacaaggcccgagaggcggcgc

SEQ ID NO: 22471 - DNA, 459 bp, Homo sapiens
  misc_feature (1)...(459): n = a,t,c or g
gnnggnnncnttgacncctctttganacctttgacatgacacgaatttaatacgactcctatagggaatttggccctcgaggccaagaattcggcacgagaaaatcatgtcctacatatgttctcaacaagacactctgtcaaacaaaataacagaatgctgcaaactgaccacgctggaacgtggtcaatgtataattcatgcagaaaatgatgaaaaacctgaaggtctatctccaaatctaaacaggtttttaggagatagacattttaaccaattttcttcaggggaaaaaaatatcttcttggcaagttttgttcatgaatattcaagaagacatcctcagcttgctgtctcagtaattctaagagttgctaaaggataccaggagttattggagaagtgtttccagactgatnnccctcttgaatgccaagatnaaggagaagaagaattacc

SEQ ID NO: 22472 - DNA, 630 bp, Homo sapiens
ggggactctggtggcactacacggggtgctggattcaaatctcacctctatggatgatgtctggcatcgtctggcccctccttttccaaagtgaccagaagattgtacttcctagagatgccagacttgcctcacacccaggagctgcccctgctgtgcctggtatgctggcagtggtgatggtgacaacacaatgaggccaagtagcaatgctcccaggtcctgcagcttgtgctctgcccagcagtgcccctggcccagcacctcagcctgctcttctctctggtggctccaccccaacccctacttcttttcctttatttctctcccaacctggctgcaaaggaggttcatattccccagatgtgtccacaaacctgtccaggagttgtgtcttaaaattgatttcctgtccctcttcctaaggacaggggtaacagtcaaagtgaaggaatgatgggttcttgcctgtcttgctttggtccgtatttcccaagccctcctcttttagccaaggctacagggcacttgtcttccctggtggctctcccctttggagagagctagtggcagagcaacctaactaggtcctccttgggctttgaatgcaggagcacccagtgccccagg

SEQ ID NO: 22473 - DNA, 454 bp, Homo sapiens
ggatcctgtctctggttaaggaaaaatcgaggtcagatgtgtcctccctctgaatgttggtgtgtgaatgagggttcctcagaaaaaaacagaaccaataggggcttgtgtgtgtgtgcacgtgtgcacgtgtgtgtacatagacaaatttttaggaactggatcatgccattgtgggggctggcaagtgtgatgtcttcagggcatggcagcaatctggagaagcagggaagagttgaggttgcagctccagcctgaagacagcatggaggcaaaattcctttcttgggggacagcagatatttcctcataaggttttcatctgatcgcatgaggcccactcacattttggagggtaatctgctttagtcaaagtctatagattgaatgttaatcacatctaaaaaatactttcacagcaacatccagattggtatggacaaacatctgccac

SEQ ID NO: 22474 - DNA, 542 bp, Homo sapiens
ggccctcgaggccaagaattcggcacgagtcgcgttctgcgataccagagcagataatcagctcaacactgtcctcaccatcaagtaatgccccagacccatgtgcaaaggagactgtactgagtgccctcaaagagaagaagaagaaaaggacagtggaggaagaagaccaaatattccttgatggccaggaaaataaaagaagctgtcttgtcgacggtctcactgatgcctcttctgcattcaaagttcctcgacccgggccagatacactccagttcacagtggatgtcttccactttgctaatgactccagaaacatgatatacatcacctgccacctgaaggtcaccctagctgagcaggacccagatgaactcaacaaggcctgttccttcagcaagccttccaacagctggttcccagtggaaggcccggctgacatctgtcaatgctgtaacaaaggtgactgtggcactccaagccattccaggaggaacctcgtgtcgtgagccagtggtccacgtctgcttcccgtaacc

SEQ ID NO: 22475 - DNA, 489 bp, Homo sapiens
gaatgcaaactgcagcgcctttaagcataaagtaacacaacagcattgcacggggccggcactgccgctgccttcactgaaggctgcagtgctgttctgagagcttggaggaggcaccagcgaggatgacgtttagtggagctctttctgttgaaaagagctcacgttatcaacaccttgtaaggaaaatacagtgtctgagttttcatcggtcttcacatgctgctatatattccacagagttccttgcatgtactgagcttttgttttagatggaatagcacaaggagaaaaatctttaaacttagtgctttgtctattctttatttctctcagggtggccagtattttgacttatttatcctgcttgaaagctacttgagatgtgtactgctattctaaacacgtgatctagtttctttcatctctggcataagattatataacttaatgttaagtgtcttgaggcataaaagacaaaatgtggct

SEQ ID NO: 22476 - DNA, 451 bp, Homo sapiens
ccaagacgtccacgtccggatctgtaaccaagagattgtcaaatttgacctggaggtgaaggcgcttattcaggatatccgtgattgttcaggacccttaagtgctcttactgaactgaatactaaagtaaaagagaaatttcaacagttgcgtcacagaatacaggacctggagcagttggctaaagagcaagacaaagaatcagagaaacaacttctactccaggaagtggagaatcacaaaaagcagatgctcagcaatcaggcctcatggaggaaagctaatctcacctgcaaaattgcaatcgacaatctagagaaagcagaacttcttcagggaggagatctcttaaggcaaaggaaaaccaccaaagagagcctggcccagacatccagtaccatcactgagagcctcatggggatcagcaggatgatggcccagcaggtccag

SEQ ID NO: 22477 - DNA, 427 bp, Homo sapiens
acccgctatgacatgattacgattttaatacgactcactatagggaatttggccctcgaggccaagaattcggcacgaggtgtggagtttttttcccacaccagccaattctccaattctctggttaccacatgggtgtcctacaattcaattatgacactacttggagttagtgcggactccagaggttaagagctcagtcacgcaagactgctctccacttcagataccagtgacatgtagcgggtcctcagattatccacacttctatccgacttggctacaaattgggagttcccacgacccctcctcaggtttgataatttgccatgatggctcatggaactcagggaaacacttgcttgactggtttattacaaaggatacagatgaacagtcagatgaaaaggtagaacaaggatctttt

SEQ ID NO: 22478 - DNA, 482 bp, Homo sapiens
  misc_feature (1)...(482): n = a,t,c or g
ttnnnttntnnnttngaancccctncgttgacatgattacgaatttaatacgactcactatagggaatttggccctcgaggccaagaattcggcacgaggcaaactgaccacgctggaacgtggtcaatgtataattcatgcagaaaatgatgaaaaacctgaaggtctatctccaaatctaaacaggtttttaggagatagagattttaaccaattttcttcaggggaaaaaaatatcttcttggcaagttttgttcatgaatattcaagaagacatcctcagcttgctgtctcagtaattctaagagttgctaaaggataccaggagttattggagaannggttccnnacnngaaaccctnttggatggccagnataanggagaanaanattccggaattccntccnggananccaancntggcaaagcgaacctggggcctnttccnaacctaggnaaatttacttacaaaangcgttt

SEQ ID NO: 22479 - DNA, 621 bp, Homo sapiens
gtggggttagctgcatcccactcctggctgaaacctattttagagacaggcctgcatcagggaccctgggtaacggaaagtacctttttccttgcaggccacagagatgctggttcacaatgcccagaacctcatgcagtctgtgaaggagactgtgcgggaagctgaagctgcttcaatcaaaattcgaacagatgctggatttacactgcgctgggttagaaagactccctggtaccagtaggcacctggctgagcctggctggcacagaaacctctactaaaaagaaggaaaatgatctgagtcccaggagctgcccagagttgctgggagctgaaaaatcacatcctggcctggcacatcagaaaggaatgggggcctcttcaaattagaagacatttatactcttttttcatggacactttgaaatgtgtttctgtataaagcctgtattctcaaacacagttacacttgtgcaccctctatcccaataggcagactgggtttctagcccatggacttcacataagctcagaatccaagtgaacactagccagacactctgctctgcccttgttccctaagggacacttccctctgattctctttccttgggtcca

SEQ ID NO: 22480 - DNA, 616 bp, Homo sapiens
gaacagggtctcactatgttgcccaggctggtctcaaactcttggcctcaaacaatcctcctgcctcggcctgccaaagtggtaggattatagtcatgagccactgcgtccagctagaaatagcaatttttctaacacatatatttcattggtttatgtatgaatttagaatatcaaagtggcatgaacaggttcaagatccaacaaaagggaatcttgattctgcctcacctaataaaagcagaagtgcgtgggcgcactaaaaagtaatctagctgtgggcatgcagcatgccatgggtgtcaggtgatgtcatttcaaggagaatccggttgtgggtagtatggaagaaacacaattcagcacatatgaataactgttgaagctgggtgatggttacattagattcattatgatgaaacaaattgttttgagaagagttaatgaaaacaagttgcaaaaaaaaatactgtccgcttaaatgtgggtaagatgactatacaagatacgtggaaaaaatataaaaatctaaaagagttttattttattttattttattttattttttgagatggagtctcgctcttttgcccaggctggagtgcagtggcgtgat

SEQ ID NO: 22481 - DNA, 458 bp, Homo sapiens
  misc_feature (1)...(458): n = a,t,c or g
tttgagaccgctatgacatgattacgaatttaatacgactcactatagggaatttggccctcgaggccaagaattcggcacgaggagctagcaccatgagcttcaataccctgtacgtttctgtccgataaaatcttgctgtaagggacgcaactctcttcaaaacaaaatatatgatctgtcattacagaatttcccccctgccaccctgagacaaaatcttgctctgtcacccaggctggagtgtagtggcacgatctctgctccctgcaacctccacctcccgggttcaagtgattctcctgcctcggcctcccgagtagctgggaatgcaggcatgcactgccataacagactaatttttgtatttttagtagagacggggtttcaccatgttgcccaggctggtctcgaactcctgaccttgtgatctgcccncttggnccccccaaagtgct

SEQ ID NO: 22482 - DNA, 393 bp, Homo sapiens
  misc_feature (1)...(393): n = a,t,c or g
gaatttaatacgactcctatagggaatttggccctcgaggccnagaattcggcacgaggtcaaacaaaataacagaatgctgcaaactgaccacgctggaacgtggtcaatgtataattcatgcagaaaatgatgaaaaacctgaaggtctatctccaaatctaaacaggtttttaggagatagagattttaaccaattttcttcaggggaaaaaaatatcttcttggcaagttttgttcatgaatattcaagaagacatcctcagcttgctgtctcagtaattctaagagttgctaaaggataccaggagttattggagaagtgtttccagactgaaaaccctcttgaatgccaagataaaggagaagaagaattcagaaatncatccagga

SEQ ID NO: 22483 - DNA, 421 bp, Homo sapiens
cgctttccttcctgtgtgcttgtggttggttctttcttctcaggctttctcattctgatgctgagatagttctgttcacttagcttaacttgggacagtgacacagggtttgttctgtactttcttttccaccccaccccccaccgcaatcctcagtccccttcctaggaccatttgctactcctagcattagagggctcatcgttatatacttggaaatggtccagttctgatagagtcccctggaagactcaattctacgtcaccctcatgatttcctgttaattccactacggctaatgttctaggaagacacccttatctctgggctcagatgggaacacctcccttagactatcctggactaccctgctatttctcagccatgctttcattggtcccactgaattctctagatccc

SEQ ID NO: 22484 - DNA, 362 bp, Homo sapiens
gcaacgacaaaatgcacttctccctcaaggagtgaggcttggtccaatacatggctctgccccccagaacttaaggctctcactgccccttcgccatcctagagtgaggctctgtccaatacatggctctgccctccagaacttcaggctctcagtgacccttcgacatcctgcttgctccctgactcccagggccccgtagttagcaattctggaaaagttaagccatctcctcctctggcccttccttctggaatcttcagatgcctgttaggccttcttattgtcctcctcctcctggctcggcctccctcacactgaccaagggcctgtgctgcccactgggtaacttctacagttct

SEQ ID NO: 22485 - DNA, 414 bp, Homo sapiens
cactctgtaagttttgtgtgtctgtgcggagggtgcgggacattgtgcccaccctgagggccgcgatggctgccgcccagtcgggcaccccaggtccggtgtttgtggagctgcccgttgacgtgctgtacccctacttcatggtccagaaggagatggtgccagccaagccacccaagggcctcgtgggccgagtggtctcctggtatttagagaattacctggccaacctctttgcaggagcctgggagcctcagcccgagggaccgctgcccctggacatcccccaggcttccccgcagcaggttcagcgctgtgtggagatcctgagccgggccaagaggcctctgatggtgctggggagtcaggccctgctcaccccaacgtctgccgacaagcttcgggctgccgtgg

SEQ ID NO: 22486 - DNA, 891 bp, Homo sapiens
attacgaatttaatacgactcactatagggaatttggccctcgaggccaagaattcggcacgagaccaaagttaattttactgaaatccagaaactagtcctggatgtggcccatgtacatgagcactgttgcagaggagatgtgctggattgtctgcaggatggggaaaaaatcatgtcctacatatgttctcaacaagacactctgtcaaacaaaataacagaatgctgcaaactgaccacgctggaacgtggtcaatgtataattcatgcagaaaatgatgaaaaacctgaaggtctatctccaaatctaaacaggtttttaggagatagagattttaaccaattttcttcaggggaaaaaaatatcttcttggcaagttttgttcatgaatattcaagaagacatcctcagcttgctgtctcagtaattctaagagttgctaaaggataccaggagttattggagaagtgtttccagactgaaaaccctcttgaatgccaagataaaggagaagaagaattacagaaatacatccaggagagatattacttacaaaatgcgtttctcgttgcttacacaaagaaagccccccagctgacctcgtcggagctgatggccatcaccagaaaaatggcagccacagcagccacttgttgccaactcagtgaggacaaactattggcctgtggcgagggagcggctgacattattatcggacacttatgtatcagacatgaaatgactccagtaaaccctggtgttggccagtgctgcacttcttcatatgccaacaggaggccatgcttcagcagcttggtggtggatgaaacatatgtccctcctgcattctctgatgacaagtttcattttccataaggatctgtgca

SEQ ID NO: 22487 - DNA, 455 bp, Homo sapiens
ggtgtggtggctctctcgtgtctgagcagtgggtgctgtcagctgctcactgcttccccagcgagcaccacaaggaagcctatgaggtcaagctgggggcccaccagctagactcctactccgaggacgccaaggtcagcaccctgaaggacatcatcccccaccccagctacctccaggagggctcccagggcgacattgcactcctccaactcagcagacccatcaccttctcccgctacatccggcccatctgcctccctgcagccaacgcctccttccccaacggcctccactgcactgtcactggctggggtcatgtggccccctcagtgagcctcctgacgcccaagccactgcagcaactcgaggtgcctctgatcaagtcgtgagacgtgtaactgcctgtacaacatcgacgccaagcctgaggagccgactttgtccaagaggac

SEQ ID NO: 22488 - DNA, 435 bp, Homo sapiens
ggagtccaccccggagaagcgcacagacaagatcttcaggcagatggacaccaacaatgacggcaaactgtccttggaagaattcatcagaggtgccaagagcgacccctccatcgtccgcctgctgcagtgcgaccccagcagtgccagtcagttctgagcgagcggcccctggacagttgcagagaaacacaggcttgtcgtgccgtttaagctttgcttgcaagagtggatgccccgcaatcgttcctgctctcctgggccccgggcctggggcatgcgttgcacctgcccggcccggtggctgcgcctccctcctccacctgaccaacgcgacattcctcccctcacgcctggcccggtcccttccagggcaactcccagggatgtggtgacatgcagggttcaagtgttcttggttccaggcacctccgg

SEQ ID NO: 22489 - DNA, 875 bp, Homo sapiens
  misc_feature (1)...(875): n = a,t,c or g
gtttggattacaacacacattattgtgtgtcgagaggcagcattggaaagagcctgattttctaaaatatgcatcaagtgcataaattacaaatcagagctgagtggggaggtgcttcagcagcagcgggatcaatacgatttccactgggaagagacaggaattctacctacacataggaaggccaaggttgatccacttaaccttgttattgtaattttaaagctggtatcggtagctgggaagctttatgtgtgtgtatgtcagctcagcatcttttaatcgtgtctgattttactctcgttacttctcgctgttggaagcatctctgggtttcttgtggcgtctggtgtggaatggccttcctctctaggtgcctgaggtgtccgctgacgggtggcctctcacccccctctagagaaacctgacatttacaatggattgtatttgtccggcaaaaaaggcggattcattcatagagcagaaagaacctgttggcgtaaggtcttccactagttaagatgggttcttttggggaaatgtttaaatttggtaacttctagaaaagccagaaaatggactctgatttcatagcattttgataaaatgccacaaaataagggctatagagagatttttacaagtcagattttttgttccccaaatcttttaaatgaagccagtgactcccagttctcaacacatggccccaatcaagacagaacaccatggaaaaaaccctgtaagtattatggaatcnccgaatcctcctgaaggaattcctccananacataatgttacaggaantaaatgcaaatgngcaaattttttaaaggactttaacaaantataaaaattgggttnnaaaacaatt

SEQ ID NO: 22490 - DNA, 590 bp, Homo sapiens
ggagacagcggtgacaggagcagcggccgggagcccttagggaggcagacagagcctgcagccaatgccccaggagccctcggttccaaccaactgatgcccctgtgcccactggcccacgccatgcagccccagtccgttctgcacagcggctacttccacccactacttcgggcctggcagacagccaccaccaccctcaatgcctccaacctcatctaccccatctttgtcacggatgttcctgatgacatacagcctatcaccagcctcccaggagtggccaggtatggtgtgaagcggctggaagagatgctgaggcccttggtggaagagggcctacgctgtgtcttgatctttggcgtccccagcagagttcccaaggacgagcggggttccgcagctgactccgaggagtccccagctattgaggcaatccatctgttgaggaagaccttccccaacctcctggtggcctgtgatgtctgcctgtgtccctacacctcccatggtcactgcgggctcctgagtgaaaacggagcattccgggctgaggagagccgcagcggctggctgaggtggcattgcgt

SEQ ID NO: 22491 - DNA, 567 bp, Homo sapiens
tttgataccttttactcctacgaatttaatacgactcactatagggaatttggccctcgaggccaagaattcggcacgagggcggcagccatcaggtaagccaagatgggtgcatacaagtacatccaggagctatggagaaagaagcagtctgatgtcatgcgctttcttctgagggtccgctgctggcagtaccgccagctctctgctctccacagggctccccgccccacccggcctgataaagcgcgccgactgggctacaaggccaagcaaggttacgttatatataggattcgtgttcgccgtggtggccgaaaacgcccagttcctaagggtgcaacttacggcaagcctgtccatcatggtgttaaccagctaaagtttgctcgaagccttcagtccgttgcagaggagcgagctggacgccactgtggggctctgagagtcctgaattcttactgggttggtgaagattccacatacaaattttttgaggttatcctcattgatccattccataaagctatcagaagaaatcctgacacccagtggatcaccaaacca

SEQ ID NO: 22492 - DNA, 379 bp, Homo sapiens
gggaacaggagccagaggaagagatagccatggaggacagccccactatggttagagtggacagccccactatggttaggggtgaaaaccaggtttcgccatgtcaagggagaaggtgcttccccaaagctcttggctatgtcaccggtgacatgaaagaacttgccaaccagcttaaagacaaacccgtggtgctccagttcattgactggattctccggggcatatcccaagtggtgttcgtcaacaaccccgtcagtggaatcctgattctggtaggacttcttgttcagaacccctggtgggctctcactggctggctgggaacagtggtctccactctgatggccctcttgctcagccaggacaggcattaata

SEQ ID NO: 22493 - DNA, 442 bp, Homo sapiens
ggctcacgcctgtaatcccagcactttgggaggccaaggcaggaggatcgctggagcccagtaggtcaagaccagccagggcaacatgatgagaccctgtctctgccaaaaaattttttaaactattagcctggcgtggtagcgcacgcctgtggtcccagctgctggggaggctgaagtaggaggatcatttatgcttgggaggtcgaggctgcagtgagtcatgattgtatgactgcactccagcctgggtgacagagcaagaccctgtttcaaaaagaaaaaccctgggaaaagtgaagtatggctgtaagtctcatggttcagtcctagcaagaagcgagaattctgagatcctccagaaagtcgagcagcacccacctccaacctcgggccagtgtcttcaggctttactggggacctgcgagctggcctaatgtgg

SEQ ID NO: 22494 - DNA, 438 bp, Homo sapiens
gggatgcagcagcaaatctcaccaagattgtggcctacctcggcacttacattggtggcgtcacctttagtgggtctctcattgcctatggaaaattgcagggtctcctgaaatctgcccctctcctactgcctggaaggcacttactcaatgcaggcttactggctgctagtgtgggcgggataatcccattcatggtggacccaagctttactactggcatcacctgtctgggttcagtgtctgctctctctgctgtcatgggtgtgactttgacagctgctattgggggtgctgacatgcccgtcgttatcactgtgctgaacagctactcaggctgggccctgtgtgcagagggcttcctgctcaacaacaatctgctgaccatcgtgggtgcactcataggctcgtctggtgctatcctgtcatacatcatgg

SEQ ID NO: 22495 - DNA, 393 bp, Homo sapiens
gcacaagtggatccacaggacttccaaagggagtcatgatctcacatagtaacattattgctggtataactgggatggcagaaaggattccagaactaggagaggaagatgtctacattggatatttgcctctggcccatgttctagaattaagtgctgagcttgtctgtctttctcacggatgccgcattggttactcttcaccacagactttagcagatcagtcttcaaaaattaaaaaaggaagcaaaggggatacatccatgttgaaaccaacactgatggcagcagttccggaaatcatggatcggatctacaaaaatgtcatgaataaagtcagtgaaatgagtagttttcaacgtaatctggttattctggcctataattacaaaa

SEQ ID NO: 22496 - DNA, 441 bp, Homo sapiens
ggcctattatcaacaaagttgcttctgtggcagaaaataaaggactgtttgaagaggcagcaaagctgtatgaccttgccaagaatgctgacaaggtactggagctgatgaacaaactgctgagccctgtcgtcccccagatcagtgccccgcaatccaacaaggagaggctgaagaacatggcactctccattgccgaacggtatagggctcaaggaataagcgcaaataaatttgtggactccacgttctatcttcttttggacttgatcaccttttttgacgagtatcatagtggtcatattgatagagcttttgatatcattgagcgcttgaagctggtgcccctgaatcaggaaagtgtggaagagagagtggctgccttcagaaatttcagtgatgaaatcaggcacaaccctctcagaagtgcttcttgccacc

SEQ ID NO: 22497 - DNA, 633 bp, Homo sapiens
ggaatggcctggaagatgaatcaagacctcaacggcgtaatcgcaaccgccgccgccgtaaccgtggtaatcggactgatggctctatcagtggagaccgccagccagtgactgtggctgactatatctcacgagcagagtctcagagccgccagaggccacccctggaacgcactaaaccctcagaagactctctttcaggacagaagggtgactctgtcagcaagcttcctaagggcccctcggagaatggggagctctccgcccccttggagttgggtagtatggtgaatggggtttcataaaacctccaacctgcacccctcccttctccatctcgcttgctgcccaacaccatggccctcacaggcccaactgacctgcgctggagctgctcttatctaggggggaggggggtggcacaacagcttgggtaccccccaacctccaggagctagtggaggggtgtgtaacagggtcataccccctccctcttgtccaccctacccccagggtaaggggagcctctctccttccccatcagactggatgtgcctttatcctctaatgccccaatctctctctgaacacccccattctccacctgttggtggggggtgctcctcgacccac

SEQ ID NO: 22498 - DNA, 449 bp, Homo sapiens
  misc_feature (1)...(449): n = a,t,c or g
gnttnnnttttnntctangattnnccntccgttatgacatgattacgaatttaatacgactcactatagggaatttggccctcgaggccaagaattcggcacgagggaaacatgtgtcgtggaggccgaatgtttgcaccaaccaaaacctggcgccgttggcatcgtagagtgaacacaacccaaaaacgatacgccatctgttctgccctggctgcctcagccctaccagcactggtcatgtctaaaggtcatcgtattgaggaagttcctgaacttcctttggtagttgaagataaagttgaaggctacaagaagaccaaggaagctgttttgctccttaagaaacttaaagcctggaatgatatcaaaaaggtctatgcctctcagcgaatgagagctggcaaaggcaaaatgagaaaccgtcgccgtatccagcgcaggggccc

SEQ ID NO: 22499 - DNA, 495 bp, Homo sapiens
  misc_feature (1)...(495): n = a,t,c or g
ttgacatgattacgaatttaatacgactcactatagggaatttggccctcgaggccaagaattcggcacgagcaggtgaagcacacaaatcgtgaattttcaccctgtcagtctccctcagtactctgggccctgcactaagatttctgatacatgtagacttaaaatttctggcctgatggtggttttgggggtgaaaaccaagcacttcgtagctaatgtgctttatgtgtctgggtctctgttggtaggctcccagctggggcactgttaaagagataggaatctgcagaacacgggccagcgccagcctccagcttgtttgcgctcaatatgtgggtcagcctcagagagaggatggtggcctctcctcctttcccttgtctgcttcattgcagccagttcacctctttcccttttctggtgctctctactttgcagctctttgcttttggtctttgccactttcttcttggttctttgnacttttctaat

SEQ ID NO: 22500 - DNA, 417 bp, Homo sapiens
gcagttcctgctttcagaagttgctagagtgtttctctttgaacttgaactgtggctcttttgatatccagaaagagagttctttggggggatggttaattcttgttttgggtgcttttcttcaccgctctaaggaactaccacagtcagaaggtgcattcttactgcgatctttttatttgctaccttgggcttaaggagcctgcctatatctactgaggtgaggttaggtcagtctctgtaaccgttcgtcacttaggccttgatgggtgacatggatggggatgacttcctgggctaactcttctcttgctaaaggatgatttttcaccaccttgaatgcccatgattaaaacataaacaagaaaatagatatctgaggtaagaataaacactgggactttctatggctggtgg

SEQ ID NO: 22501 - DNA, 339 bp, Homo sapiens
gcggcacgagcaccatgagcttccctgttgcctcccttgctgctgttgctttcatatcccaactccattggatatctcagatctcatccacggagataggtggctcaatgtttttaaaaagcagagcaaagtgggaaggggcactttgatcccactccccctaagacgcttgaggtttcttagatcattcgagattataaatcaggacgggaagccactcaggactaccaggggcttgtcaggtaaatatccaaagagagaggggaaacctgtatccactcataaatgcgagtcattctaaaatattttgcatcctgggcaacatggcaaaactctgtc

SEQ ID NO: 22502 - DNA, 424 bp, Homo sapiens
agaccatccaagaagacggtgcagccacctccgagagcctggatgtgatggcgttacatgaagagaccctcccagaggcacggatccaagtacctggccacagcaagtaccatggaccatgccaggcatggcttcctcccaaggcacagagacacgggcatccttgactccatcgggcgcttctttggcggtgacaggggtgcgcccaagcggggctctggcaaggactcacaccacccggcaagaactgctcactacggctccctgccccagaagtcacacggccggacccaagatgaaaaccccgtagtccacttcttcaagaacattgtgacgcctcgcacaccacccccgtcgcagggaaagggggcccgaaggccagagaccaggatttggctacggaggcagagcgtccgactataaa

SEQ ID NO: 22503 - DNA, 406 bp, Homo sapiens
aaaggatacagctggagtcagtttagtgatgtggaagagaacaggactgaggccccagaagggactgaatcggagatggagacccccagtgccatcaatggcaacccatcctggcacctggcagacagccccgcggtgaatggagccactggccacagcagcagtttggatgcccgggaggtgatccccatggcagcagtaaagcaagcgctgagggaggcaggcgacgagtttgaactgcggtaccggcgggcattcagtgacctgacatcccagctccacatcaccccagggacagcatatcagagctttgaacaggtagtgaatgaactcttccgggatggggtaaactggggtcgcattgtggcctttttctccttcggcggggcactgtgcgtggaaagcg

SEQ ID NO: 22504 - DNA, 357 bp, Homo sapiens
tttttttttcagattcttcatgtttttatttctcttcagaactttaaaatgtgaacattcgataatctagccagtctttacttccaggtaacttcttcactgggttgcaattcccttttaaataacatactcttgttccggaaggcagttagccgttcatcactctttctgtctaaataacatccaatgacaaatcccatagggacaagaacatgaacccagtggtcccgcacaatctgaagtaagttcaccatgatagctgcagcctcagcgcctacagcgaccccgagaccaagggcaacagtcgacgcggccgcgaattccagatctatgaatcgtagatactgaaaaaccccc

SEQ ID NO: 22505 - DNA, 930 bp, Homo sapiens
aattcggcacgaggcagcccgggctgagaggagcgtggctgtctcctctctccgccatggcgtgtgctcgcccactgatatcggtgtactccgaaaagggggagtcatctggcaaaaatgtcactttgcctgctgtattcaaggctcctattcgaccagatattgtgaactttgttcacaccaacttgcgcaaaaacaacagacagccctatgctgtcagtgaattagcaggtcatcagactagtgctgagtcttggggtactggcagagctgtggctcgaattcccagagttcgaggtggtgggactcaccgctctggccagggtgcttttggaaacatgtgtcgtggaggccgaatgtttgcaccaaccaaaacctggcgccgttggcatcgtagagtgaacacaacccaaaaacgatacgccatctgttctgccctggctgcctcagccctaccagcactggtcatgtctaaaggtcatcgtattgaggaagttcctgaacttcctttggtagttgaagataaagttgaaggctacaagaagaccaaggaagctgttttgctccttaagaaacttaaagcctggaatgatatcaaaaaggtctatgcctctcagcgaatgagagctggcaaaggcaaaatgagaaaccgtcgccgtatccagcgcaggggcccgtgcatcatctataatgaggataatggtatcatcaaggccttcagaaacatccctggaattactctgcttaatgtaagcaagctgaacattttgaagcttgctcctggtgggcatgtgggacgtttctgcatttggactgaaagtgctttccggaagttagatgaattgtacggcacttggcgtaaagccgcttccctcaagagtaactacaatcttcccatgcacaagatgattaatacagatcttagcagaa

SEQ ID NO: 22506 - DNA, 730 bp, Homo sapiens
ggtccaatacaggatctactagccatgtgtggttatttaaatttaattagaattaaataaactgaaaattaatttccttattcacactggccatattttgagtgctcagtagccacttatggctagtggctatttggtttaggtgagcacatataaaacatttttatcactgcagaaagttcggttgagtaacacagctctagattagtctctaactgctcagcttcttaaccttacagtgataagagccacctcttataggtaagattttctagagcaaagttgggcagaccttgggtacttgtttttgtatatgtagttttataggaatacagccacatcgatttgttgacctatactttggctgcttttgtgttacagtggcagagctgagttttgagtagttatgacagagaccatatgtggcctgcaaagcctaaaagtatttgaccctttacaaaaaggtttgcctaccgcttttatctagatcagggtttcttaacctcagcactgctgacattttggtctagataatcctttgttgtggggctgtcctgtgcattgtggtgtttagcagcttccctggccttcacccaccggatgccagtagcaccgcttagatatgacaaccaaaaatgtctctagacattgccaaattccatggggagcaaaatcacccttggctgagaaccacaaatctcaagcaatgtggcttggcaaagcattcatc

SEQ ID NO: 22507 - DNA, 450 bp, Homo sapiens
gcccacaaggttgcagccggagccgcccagctcaccgagagcctagttccggccagggtcgccccggcaaccacgagcccagccaatcagcgccccggactgcaccagagccatggtcggcagaagagcactgatcgtactggctcactcagagaggacgtccttcaactatgccatgaaggaggctgctgcagcggctttgaagaagaaaggatgggaggtggtggagtcggacctctatgccatgaacttcaatcccatcatttccagaaaggacatcacaggtaaactgaaggaccctgcgaactttcagtatcctgccgagtctgttctggcttataaagaaggccatctgagcccagatattgtggctgaacaaaagaagctggaagccgcagaccttgtgatattccagttcccctgcagtggtttggagtccctgcattctga

SEQ ID NO: 22508 - DNA, 441 bp, Homo sapiens
gtctttttgcttcttctgaactttagatctccataacacatgtactgtagaatgtgatggaaaagcattgatgagaatttattggcagttcagattgtgttttcccaacttaggctctttattaattggttaaggttttctccaaaaagggcatttcaacaatgggaattatttaatgtaacagtgggcacagattacttatcttccttctctgctttgtgactcaccagcagtaacacacacaatccacatcttgtgcacctcaaatgaacagacttggtttccttgctttcttgacatttccatgactgtttcacatacaaactattgggtgaggtttttcagctgttaccgacccacgtcctgctgctctgtgtggcctacaaaaactgccattcccaccccttgctttgccatttgcaagaactggaattgtcaggc

SEQ ID NO: 22509 - DNA, 413 bp, Homo sapiens
gcggcgtggtggctcacccctataatcccagcactttgggaggccgaggcaggtggatcacctgaggtcaggagttcaagatcagcctgaccaacatggtgaaactctgtctctactaaaatacaaaaaaattagccaggcgtggtggcacgcatctgtaaccccagctactcgtgaagctgaagcacgagaatctattgaacccaggaggcggaggttgcagtgagccaagatcgcgccactgcactccagcctgggtgacagagtgagaccctgtctcaaaaaaaatttttaaaaaagaattaaatcaattctacacaaactcttccagagcacagaaggaaaatttctcaattcattttataaaaggctatattaccctgatactgaaatcagatgaagacagttccaaa

SEQ ID NO: 22510 - DNA, 701 bp, Homo sapiens
ggttgtgagcgggtctccagtcggctcctctgggcgtctcatggcctctagcagctccctggtgcccgaccggctgcgcctgccgctctgcttcctgggtgtctttgtctgctatttttactatgggatcctgcaggaaaagataacaagaggaaagtatggggaaggagccaagcaggagacgttcacctttgccttaactttggtcttcattcaatgtgtgatcaatgctgtgtttgccaagatcttgatccagttttttgacactgccagggtggatcgtacccggagctggctctatgctgcctgttctatctcctatctgggtgccatggtctccagcaattcagcactacagtttgtcaactacccaactcaggtccttggtaaatcctgcaagccaatcccagtcatgctccttggggtgaccctcttgaagaagaagtacccgttggccaagtacctgtgtgtgctgttaattgtggctggagtggcccttttcatgtacaaacccaagaaagttgttgggatagaagaacacacagtcggctatggagagctactcttgctattatcgctgaccctggatggactgactggtgtttcccaggaccacatgcgggctcattaccaaacaggctccaaccacatgatgctgaacatcaacctttggtcgacattgctgctgggaatgggaatcc

SEQ ID NO: 22511 - DNA, 518 bp, Homo sapiens
  misc_feature (1)...(518): n = a,t,c or g
cagtttgaggatgagaaggcaaactgggaagctcaacaacatattttagaacaacagaactcttcaagaaccttggaaaagaacaagaagaaagggaagatcttttaaactctctattgaccaccagttaacgtattagttgccaatatgccagcttggacatcagtgtttgttggatccgtttgaccaatttgcaccagttttatccataatgatggatttaacagcatgacaaaaattattttttcttgtttttcttgatggagattaagatgccttgaattgtctagggggttctgtacttaaaaagtaacagctntaagtncctttcctacattttctttttttattaancagatatcttcagtttantgcaagagaacattttactgttgnacaatcnngttctggnggtttgattgttnacgggntattccaanataaaaggactntggaagattttcattgagganaantngccatagnatgatccaanctgngcttctntatgataatta

SEQ ID NO: 22512 - DNA, 460 bp, Homo sapiens
  misc_feature (1)...(460): n = a,t,c or g
gnnnnnnttnnnntttgaantncgtnaccnttatgactgattacgaatttaatacgactcactatagggaatttggccctcgaggccaagaattcggcacgagtaaagactttattttggatgaatgtgataagatgcttgaacagctcgacatgcgtcgggatgtccaggaaatttttcgcatgaccccccacgagaagcaggtcatgatgttcagtgctaccttgagcaaagagatccgtccagtctgccgcaagttcatgcaagatccaatggagatcttcgtggatgatgagacgaagttgacgctgcatgggttgcagcagtactacgtgaaactgaaggacaacgagaagaaccggaagctctttgaccttctggatgtccttgagttcaaccaggtggtgatctttgtgaagtctgtgcagcggtgcattgccttggcccagctactagtgga

SEQ ID NO: 22513 - DNA, 522 bp, Homo sapiens
ggatccttccttaatggaagactcagatgacggtccttcgctacccaccaaacagaacgaggaattccgccccttcattcgaaggctcccagagtttaaattttggcatgcggctaccaagggcatccttgtggctatggtctgtactttcttcgacgctttcaacgtcccggtgttctggccgattctggtgatgtacttcatcatgctcttctgtatcacgatgaagaggcaaatcaagcacatgattaagtaccggtacatcccgttcacacatgggaagagaaggtacagaggcaaggaggatgccggcaaggccttcgccagctagaagcgggactgaggctgcctcacgtgttgcaagaacagttttgagccattgttaacaatgccttttttcttcacataaagtagttgattacgagggagtcaaattttctttttaaaaaggagcttcaatgatttgtaactgaaatatcaggttctagaagaaactggcgcttaaaccaaatcgcatggatt

SEQ ID NO: 22514 - DNA, 503 bp, Homo sapiens
gctatgacatgattacgaatttaatacgactcactatagggaatttggccctcgaggccaagaattcggcacgaggactagggcgaacttggctgatctcttagttctttgactgcctaactgtataagtgcagatcaaatgtttaatctctctgagtctcagtttttccatctataaaatggtcataaggccagtatgctggctcacgcctgtaatcccagcactttgagaggctgaggcaggaggattgcgtgaagccaggagttcaaaaccagcctgggcaacatagtgagaccctgtctctataaaaataaaaattaaaaaagtagccaggcgtggtggtgcatgcctgtagtcccagctacttcagaggctgaggcaggagggttgtttgagcccaggagtttgatgatgtagtgagctatgattgcaccaatgcattccagcttgggcaatggagcaagatcctgctctaaaagaaatttaagaagaataataaata

SEQ ID NO: 22515 - DNA, 1288 bp, Homo sapiens
ggcagagaacgatgtggacaatgagctcttggactatgaagatgatgaggtggagacagcagctgggggagatggggctgaggcccctgccaagaaggatgtcaagggctcctatgtctccatccacagctctggctttcgtgacttcctgctcaagccagagttgctccgggccattgtcgactgtggctttgagcatccgtcagaagtccagcatgagtgcatccctcaggccattctgggaatggatgtcctgtgccaggccaagtcgggcatgggaaagacagcagtgtttgtcttggccacactgcaacagctggagccagttactgggcaggtgtctgtactggtgatgtgtcacactcgggagttggcttttcagatcagcaaggaatatgagcgcttctctaaatacatgcccaatgtcaaggttgctgttttttttggtggtctgtctatcaagaaggatgaagaggtgctgaagaagaactgcccgcatatcgtcgtggggactccaggccgtatcctagccctggctcgaaataagagcctcaacctcaaacacattaaacactttattttggatgaatgtgataagatgcttgaacagctcgacatgcgtcgggatgtccaggaaatttttcgcatgaccccccacgagaagcaggtcatgatgttcagtgctaccttgagcaaagagatccgtccagtctgccgcaagttcatgcaagatccaatggagatcttcgtggatgatgagacgaagttgacgctgcatgggttgcagcagtactacgtgaaactgaaggacaacgagaagaaccggaagctctttgaccttctggatgtccttgagttcaaccaggtggtgatctttgtgaagtctgtgcagcggtgcattgccttggcccagctactagtggagcagaacttcccagccattgccatccaccgtgggatgccccaggaggagaggctttctcggtatcagcagtttaaagattttcaacgacgaattcttgtggctaccaacctatttggccgaggcatggacatcgagcgggtgaacattgcttttaattatgacatgcctgaggattctgacacctacctgcatcgggtggccagagcaggccggtttggcaccaagggcttggctatcacatttgtgtccgatgagaatgatgccaagatcctcaatgatgtgcaggatcgctttgaggtcaatattagtgagctgcctgatgagatagacatctcctcctacattgaacagacacggtagaag

SEQ ID NO: 22516 - DNA, 903 bp, Homo sapiens
  misc_feature (1)...(903): n = a,t,c or g
gtcgcgtctgagggggcttgtaggtggctctggctgaaacaggcgcctgcgagagtctgtaggagggaaaccgccatggacgatcagggttgccctcggtgtaagaccaccaaatatcggaacccctccttgaagctgatggtgaatgtgtgcggacacactctctgtgaaagttgtgtagatttactgtttgtgagaggagctggaaactgccctgagtgtggtactccactcagaaagagcaacttcagggtacaactctttgaagatcccactgttgacaaggaggttgagatcaggaaaaaagtgctaaagatatacaataaaagggaagaagattttcctagtctaagagaatacaatgatttcttggaagaagtggaagaaattgttttcaacttgaccaacaatgtggatttggacaacaccaaaaagaaaatggagatataccaaaaggaaaacaaagatgttattcagaaaaataaattaaagctgactcgagaacaggaagaactggaagaagctttagaagtggaacgacaggaaaatgaacaaagaagattatttatacanaaagaagaacaactgcagcagattctaaaagggagataancaggcttttttaatgacctggganttccggaccccccggtgccccggcttttgggcaacaaaaagntngacctncccatttgaaaggcccnttgnaaaccnaaccgttaaacnatggcgtttcccaagggccccaaangggcccananttcccgggaccaatccaancctnnaaaaccccttgnaancaanccagggcnttagcanattggccaaattcccngcctngaagcnnnnnaaantgnngtttaccnttttnaaggcccnccaaggncctngggggggnnatct

SEQ ID NO: 22517 - DNA, 537 bp, Homo sapiens
tgttttttatgcaataaaataacaaactaaccacagatctgtcagtattttcaggactattctacaaaaaggaagtctcccttattgcaggggtactttatagttggtcattggtagttggtaccagtatcatccacaacatgtgcctagtcatctgaaaatcctgaaatagtggaaatatgtgcatcctgactcttttcaactcaaatcccagttttaaaagacctcaaactttgtctacataaagcatatcataaacaaaccccatatccatatctagttattttacatactccatactggcattccctactttcctactctttctgaaactctgcacctttctgattattacagccatagcagctagttttattcagcatgcttagtttgtgtcttttgttttcaaacatgcttggggactaatggaaccaggcaagtggttagagggtgggcactgctacgccctagtcctgacagtttgaatgtcttgtggttgcccctgtttatcttctacttcccattttcaatggaagg

SEQ ID NO: 22518 - DNA, 568 bp, Homo sapiens
  misc_feature (1)...(568): n = a,t,c or g
cacatgatctatcacagggaacccggtttctgaggttaagaacctggtatgagagaaaatcaacacccccaagtagagaactccggtaacgagcgagagacgccaaccctatagaagtataatctttaatttaatttccaggaaaagtttctccttactgccatagcgtctagcgaacaccaacccagcctcgtccaagcggccgtcacataaatcccgaacagttattcaacaaacaaattccgtacgataaattcgtaaaacaccccactagtcgccaccggaaagcgaccccaagtaaccgtccttctagcgctagggtatacgcgaacccttatattaaatagagtacgaggaattagccgatacgtcgggccgcgatcggtagtcccagtagttctggcatcgaagttatattagcgcttggacggaagctcgtactcgaggccgtctagcgtttggtacctacccatataccccaatccgtaccaaagatcggctccccncgngggtcaaanctccccttcgngtctaaaanaaannggggnccccccaaaaaaaaaaaaaa

SEQ ID NO: 22519 - DNA, 374 bp, Homo sapiens
ggtggcaagctttggacaaaggacacagcaagacccatggctggaccgtagcattcgtgatgagtggggctggctagtaggggaacatgtagtagcccaagcccaggcattgcagtgcacagagcaacattggggtaacaggatgggtacctgtcacggcctgtgcaaacataacatgtgtcaccacactgaaggtatggtggaacaagtggcctcaccaaggtcggaccccaatggactttttgcctcttgggagcttatgggtctatgaggacacagtagcctttcctatcagcaaactggagtggatgttgtatctgggggtggccttatgtacctgctactggtcttcccacattgccaaatgcctgtat

SEQ ID NO: 22520 - DNA, 566 bp, Homo sapiens
gtgaggttcagaacaagcagaaggagcagcgagaactgatgaaaaagaggcggaaagagaaagggctgagcctgcagagcagccggatagagaagggaaaccagatgcctctcaagcgcttcagcatggaaggcatctccaacattctgcagagtggcatccgccagacctttggctcctcaggaactgacaaacagtatctgaacacagtcattccttacgagaagaaagcctctcctccctcagtggaagacctgcagatgctgacaaacattctctttgccatgaaggaggataatgagaaggtgcctactttgctaacggactacattttaaaagtgctctgccctacctaaccttgccctttggagcagcctcgctgcaggaggtcactgagcaagagtcattccatcacagggactgcatgagaccatgtaacctccgacatgtatttaaaccgtgtatagcttaacctggattaaacacgagcaagcgcgcggggtcctttgccgttggcttctagtgctagtaatcattggatgcatgatgggggaagggccggtgat

SEQ ID NO: 22521 - DNA, 668 bp, Homo sapiens
gcatctttgaggggggtgctacggagctgtactatgttcttaagcaccccaaggaggcattccacagcaactttgtgtccctcgactgtgaccagggcagcatggtgacccagcatggcaagcccatgttcacccaggtgtgtgtggagggccggttgtacctggagttcatgtttgacgacatgatgcggataaagacgtggcacttcagcatccggcagcaccgagagctcatcccccgcagcatccttgccatgcatgcccaagacccccagatgttggatcagctctccaaaaacatcactcggtgtgggctgtccaattccactctcaactacctccgactctgtgtgatactcgagcccatgcaagagctcatgtcacgccacaagacctacagcctcagcccccgcgactgcctcaagacctgccttttccagaagtggcagcgcatggtagcaccccctgcggagcccacacgtcagcagcccagcaaacggcggaaacggaagatgtcagggggcagcaccatgagctctggtggtggcaacaccaacaacagcaacagcaagaagaagagcccagctagcaccttcgccctctccagccaggtacctgatgtgatggtggtgggggagcccaccctgatgggcggggagttcggggat

SEQ ID NO: 22522 - DNA, 505 bp, Homo sapiens
ttgaatttgaatccattgctatgacatgattacgaatttaatacgactcactatagggaatttggccctcgaggccaagaattcggcacgaggtcagttttaagaaatcttattccttacgtacttaaaaagaaaatagaactataattatgtggaaaaagagcaaagcagcaaactaaaaaagaacaaattaataaagattgttatataaactggccgggcgtggtggcttgcacctgtccagcactttgggaggctgagacaggtggatcacgaggtcaggagatcaagaccatcctggctaacatgatgaaaccccgtctctactaaaaatacaaaaaattagccgggcgtggttgcgggcgcctgtagtcccagctactcaggaggctgaggcaggagaatggcgtgaacccagaaggcggaggttgcagtgagctgagatcgcgccactgctccagcctgggtgacagagcgagactctgctcaaaaaatatatataata

SEQ ID NO: 22523 - DNA, 1520 bp, Homo sapiens
acagctatgacatgattacgaatttaatacgactcactatagggaatttggccctcgaggccaagaattcggcacgaggcacagctgacagccgtgctcagagagtttctggatcctaggcttatctccacagaggagaacacacaagcagcagagaccatgggaaccctctcagcccctccctgcacacagcgcatcaaatggaaggggctcctgctcacagcatcacttttaaacttctggaacctgcccaccactgcccaagtcacgattgaagccgagccaaccaaagtttccgaggggaaggatgttcttctacttgtccacaatttgccccagaatcttaccggctacatctggtacaaagggcaaatgagggacctctaccattacattacatcatatgtagtacacggtgaaataattatatatgggcctgcatatagtggacgagaaacagcatattccaatgcatccctgctgatccagaatgtcacccggaaggatgcaggaacctacaccttacacatcataaagcgaggtgatgagactagagaagaaattcgacatttcaccttcaccttatacttggagactcccaagccctacatctccagcagcaacttaaaccccagggaggccatggaggctgtgcgcttaatctgtgatcctgagactctggacgcaagctacctatggtggatgaatggtcagagcctccctgtgactcacaggttgagtatattgcaggaccctatgaatgtgaaatacggaacccagtgagtgccagccgcagtgacccagtcaccctgaatctcctcccgaagctgcccaagccctacatcaccatcaacaacttaaaccccagggagaataaggatgtcttagccttcacctgtgaacctaagagtgagaactacacctacatttggtggctaaatggtcagagcctcccggtcagtcccagggtaaagcgacccattgaaaacaggatcctcattctacccagtgtcacgagaaatgaaacaggaccctatcaatgtgaaatacaggaccgatatggtggcatccgcagttacccagtcaccctgaatgtcctctatggtccagacctccccagaatttacccttcattcacctattaccattcaggagaaaacctctacttgtcctgcttcgcggactctaacccaccagcagaatattcttggacaattaatgggaagtttcagctatcaggacaaaagctctttatcccccagattactacaaagcatagcgggctctatgcttgctctgttcgtaactcagccactggcatggaaagctccaaatccatgacagtcaaagtctctgactggacagttccctgaattctactagtacctccaattccattttctcccatggaatcactaagagcaagacccactctgttccagaagccctataagctggaggtggacaactcaatgtaaatttcatgggaaaacccttgtacgtgaagcatgagccactcg

SEQ ID NO: 22524 - DNA, 538 bp, Homo sapiens
  misc_feature (1)...(538): n = a,t,c or g
gnnnnttnnnntnnnnncctctgnannccntngctatcgacatgattacgaatttaatacgactcactatagggaatttggccctcgaggccaagaattcggcacgaggtgcaaaggaataacattgctatggctttggaagttacttaccgggaacgactgtatagagtatataaggaagtaaagaatcgcctggactatcatatatctgtgcagaacatgatgcgtcgaaaggaacaagaacacatgataaattgggtggagaagcacgtggtgcaaagcatctccacacagcaggaaaaggagacaattgccaagtgcattgcggacctaaagctgctggcaaagaaggctcaagcacagccagttatgtaaatgtatctatcccaattgagacagctagaaacagttgactgactaaatggaaactagtctatttgacaaagtctttctgtgttggtgtctactgaagttatagtttacccttcctaaaaatgaaaagtttgtttcatatagtgagagaacgaaatctctatcg

SEQ ID NO: 22525 - DNA, 441 bp, Homo sapiens
gagctaaggggttatatgggtcagcttacacactggcttgcaaatcagttttctcaaaatgagttgggccagacaagaatgttaatttatttgagcagacctatgtcactattgatcataaacaaaggtgctggtgtggtgcatcatgccagcacacaccaacacggagaaaggtctgctcccgacaaacaaccaggtgaatacattcaccatgataggtcccaacctccctggaatcacgtctctttcatcagcacatttgggttgatggtatcgtcataccccaccccctaaaaatgttatatgctccttattcattaaattaaaacaaaagtttattttgtcctaagaatgccatggcattactggagacagtgctgatattgacaatctgggttgagtatcatggttaacgtgatgtcagaagaccagttttatatg

SEQ ID NO: 22526 - DNA, 450 bp, Homo sapiens
ggaaaatcaaggtggtctccttgtggcttcaccaggatgtttgtgtcaggctgtctcagcagggtggggaatgaccagccagggagcacagtgagccttactcagcactggggagcgcactggtgaggcaaacccatgaacctcaagaactgggagtatgttccttcagggagaagttctggcccattgcacaaacacttggaaattaacttttccctaaattcaagatagtgtggtgtcggaaggaaatgggacagtaaattaggagacgcgggctccacctttaccttactacgtggcctttgatgagctggcttaacatccctgagtgattccatgatagagatctatactccaaactttattcctggtatctagttggcttcactgccacagacactgtactctctctttttagaatttttttccttttttttccccctcaattgg

SEQ ID NO: 22527 - DNA, 1170 bp, Homo sapiens
accgctatgactgattacgaatttaatacgactcactatagggaatttggccctcgaggccaagaattcggcacgaggccatcttggttctgccctgacagattctcctatcggggtcacagggacgctaagattgctacctggactttcgttgaccatgctgtcccgggtggtactttccgccgccgccacagcggccccctctctgaagaatgcagccttcctaggtccaggggtattgcaggcaacaaggacctttcatacagggcagccacaccttgtccctgtaccacctcttcctgaatacggaggaaaagttcgttatggactgatccctgaggaattcttccagtttctttatcctaaaactggtgtaacaggaccctatgtactcggaactgggcttatcttgtacgctttatccaaagaaatatatgtgattagcgcagagaccttcactgccctatcagtactaggtgtaatggtctatggaattaaaaaatatggtccctttgttgcagactttgctgataaactcaatgagcaaaaacttgcccaactagaagaggcgaagcaggcttccatccaacacatccagaatgcaattgatacggagaagtcacaacaggcactggttcagaagcgccattacctttttgatgtgcaaaggaataacattgctatggctttggaagttacttaccgggaacgactgtatagagtatataaggaagtaaagaatcgcctggactatcatatatctgtgcagaacatgatgcgtcgaaaggaacaagaacacatgataaattgggtggagaagcacgtggtgcaaagcatctccacacagcaggaaaaggagacaattgccaagtgcattgcggacctaaagctgctggcaaagaaggctcaagcacagccagttatgtaaatgtatctatcccaattgagacagctagaaacagttgactgactaaatggaaactagtctatttgacaaagtctttctgtgtggtgtctactgaagttatagtttacccttcctaaaaatgaaaagtttgtttcatatagtgagagaacgaaatctctatcggccagtcagatgtttctcatccttcttgctctgcctttgagttgttccgtgatcacttctgaattagcagtttgccttta

SEQ ID NO: 22528 - DNA, 460 bp, Homo sapiens
gagagtttccatatacccgctagccctacccaccccacacatacacagacttttgtccacaatcaacatcgccaccagagtggtccatggttagagctgatgagctacattgacacatcgttatcggagtggtccatggttataactgatgagccacattgacacatcgttatccctcgaggtctgtagtttacatgagggctcactctttgcattgtacattctgtcagttttaacaaacatacattgacatgcatgtacctttatggtagcctccagagtcctttcactgcctgggaaatctctgtgctttgcctagtcattcctccctcccctctaacctccagtaaccactgatctttttgctttctccaaaagtttttccttttccagaatatatatagttggaatcatactgtatgtagccttttcagatttgcttctttcacttaacaatatg

SEQ ID NO: 22529 - DNA, 420 bp, Homo sapiens
gaaaaaaataatgatcatatttaaagggttactgtaggtaggtgagaataaatttgttctcagtagcctcaggggacacttagacaatgggtggcagtaagaagagacatattttaactcttaagattctatgattccaatcctgaataggctaaatttcctttattaagctctcacaaagtatatattatttcaaaagcagtgtttcaaaacaccatatttaatatctcatttaaggccaacattttaacattaattttagaaagaagattaacaaaaacaaatgggtttatccctttccaggaatcattattggtacgtgaaaaaaaaaaatccatacttcccagccaggtcagtggctcacgccactttgggaaaccaaggcaggcggatcacctgaggcccggagttcaaaaccac

SEQ ID NO: 22530 - DNA, 477 bp, Homo sapiens
gcaaggaactgtaccagttgtccaaggagaaggcagacttcactgtagtggctggagatgaggggagctccactacagggggtagcagtgaagagaataagggtccctcagggtctgctgtgtcccgcaaggcccccagcaagccctcagccagtaccaagaaagcagaagggaagctgagtaactccaacagcaaagatggcaacatgcagactgcaaagccttccgctatgaaggtgggggagaagctggccacaaagtcttctccagtgaaagtaggggagaagcggaaagctgctgatgagacgctgtgccaaacaaaggtattgctggacatcttcactggggtgcggctttacttgccaccctccacaccagacttcagccgtctcagacgctactttgtggcattcgacggggacctggtacaggaatttgatatgacttcagccacgcacgtgctgggtagcagggact

SEQ ID NO: 22531 - DNA, 465 bp, Homo sapiens
aacatgaccttctgggcactgaggcttggcttgaagcctaccacgatgtcaatgtcactggcatgcagtcgtctcccctgcagggccgagctggggccattcaggcagccgtggccctggagctgagcagtgatgtggtcaccagcctcgatgtggccgtggaggggcttaacgggcagctgcccaaccttgacctgctcaatctcttccagaccttctgccagaaagggggcctgttgtgcacgcttcagggcaagctgcagcccgaggactggacatcattggatggaccgctgcagggcctgcagacactgctgctcatggttctgcggcaggcctccggccgcccccacggctcccatggcctcttcctgcgctaccgtgtggaggccctaaccctgcgtggcatcaatagcttccgccagtacaagtatgacctggtggcagtgggcaaaggctttggag

SEQ ID NO: 22532 - DNA, 416 bp, Homo sapiens
ggaactaattcgttttgaccacatatataccaagcccctagtcttagagataccctctgagacagagagccaagctaatgtggtagtgaaaatcgaggaagcacctctcagcccctcagagaatgatcaccctgaattcattgtctcagtgaaggaagaacctgtagaagatgacctcgttccggagctgggtatctcaaatctgctttcatccagccactgcccaaagccatcttcctgcctactggatgcttacagtgactgtggatacgggggttccctttccccattcagtgacatgtcctctctgcttggtgtaaaccattcttgggaggacacttttgccaatgaactctttccccagctgattagtgtctaaggaatgatccaatactgttgcccttttccttgactat

SEQ ID NO: 22533 - DNA, 502 bp, Homo sapiens
  misc_feature (1)...(502): n = a,t,c or g
agctatgacatgattacgaatttaatacgactcactatagggaatttggccctcgaggccaagaattcggcacgagggccttgcacccccacgatcccgtacgatggccgtcaagaagatcgcgatcttcggcgccactggccagaccgggctcaccaccctggcgcaggcggtgcaagcaggttacgaagtgacagtgctggtgcgggactcctccaggctgccatcagaggggccccggccggcccacgtggtagtgggagatgttctgcaggcagccgatgtggacaagaccgtggctgggcaggacgctgtcatcgtgctgctgggcacccgcaatgacctcagtcccacgacagtgatgtccgagggcgcccggaacattgtggcacccatgaaggctcatggtgtggacaaggncgtggctgcacctcngtttctgtctggnaccctaccaangtgcccncannantgcnnctgngactgannaccntncnnatgc

SEQ ID NO: 22534 - DNA, 463 bp, Homo sapiens
ggattgaagccattgactgattacgaatttaatacgactcactatagggaatttggccctcgaggccaagaattcggcacgagactaaaaatacaaaaaattagccagtcatggtggcaggcgcctgtagtcccagctactgggttcaagcaattctcctgctttagcctcccaagtagctggattacaggtgtgcaccaccacacctagttaatttttgctttgttttgttttgttttgtttttgagacagagtctcgttctgtcgtcaggctaaagtgcagtggtgtgatctcactggaacctccagcaaaaagagaatgtttagatattaaagttttggggccaggaatggtggctcccacctgtaatcccagcaccttggcctcctaaaagtgctgggactacaggcgcctgccaacacaggcgtgagccacctcgcccggttatttttaatttttttt

SEQ ID NO: 22535 - DNA, 577 bp, Homo sapiens
gggagaggcagcagccgcgatggacgtgttcctcatgatccggcgccacaagaccaccatcttcacggacgccaaggagtccagcacggtgttcgaactgaagcgcatcgtcgagggcatcctcaagcggcctcctgacgagcagcggctgtacaaggatgaccaactcttggatgatggcaagacactgggcgagtgtggcttcaccagtcaaacagcacggccacaggccccagccacagtggggctggccttccgggcagatgacacctttgaggccctgtgcatcgagccgttttccagcccgccagagctgcccgatgtgatgaagccccaggactcgggaagcagtgccaatgaacaagccgtgcagtgaggacccccaagaggcccatttcccccaataaaagagatttgggagtctgcctggttgctgcctctttttcccgccctccctgggatgggtcccactccctgtgggctccttttggggcttgtgcttggcagttcctgtgctgtcctgtctcccagatcctgagaccctggctgagaacttggcccagcctgctgcttaaag

SEQ ID NO: 22536 - DNA, 1125 bp, Homo sapiens
  misc_feature (1)...(1125): n = a,t,c or g
gccctttggggtcccggttcagacccctgcctggacttaagcgaagtctttgccttctctgctcccttgcaggggtcccccctcaagagtacagaagctttagcaagtgtgcactccagcttcggagggcccctgcgtgggggccagtcaggctgcagaggcacctcaacattgcatggtgctagtgggccctctctctgggcccaggggctgtggccgtctcctccctcagctctctgggacctccttagccctgtctgctaggcgctggggagactgataacttggggaggcaagagactgggagccacttctccccagaaagtgtttaacggttttagctttttataatacccttgtgagagcccattcccaccattctacctgaggccaggacgtctggggtgtggggattggtgggtctatgttccccaggattcagctattctggaagatcagcaccctaagagatgggactaggacctgagcctggtcctggccgtccctaagcatgtgtcccaggagcaggacctactaggagaggggggccaaggtcctgctcaactctacccctgctcccattcctccctccggccatactgcctttgcagttggactctcagggattctgggcttggggtgtggggtggggtggagtcgcagaccagagctgtctgaactcacgtgtcagaagcctccaagcctgcctcccaaggtcctctcagttctctcccttcctctctccttatagacacttgctcccaacccattcactacaggtgaaggctctcacccccatccctgggggccttgggtgantggcctgctaaggntcctccttgcccagactacanggcttaagacttggnttgttatttcanggaaaanggagtnnggaatttcatctggaagggtctaaattgggaanaaagggctatcaaacaccacttaggaatcccaaaaggtgggaatcctccctcaanggctcctggnaaaantgtantccanggggttttccattgggggaactggtnaananttnaaatccggttccccnaacctccatggtcctcaacctngtcnaagtcnctnnnggnggggggtaaaaatgcctncccnattggg

SEQ ID NO: 22537 - DNA, 778 bp, Homo sapiens
  misc_feature (1)...(778): n = a,t,c or g
acgagcttagggagtagcgaaataggatgttagtggttttattcctttaaatcacatctcaaaaggccaccaatggctagtttgggatcttattccgaaaatagattgatcctcatgcagtcttcgtgaggacagagcgatttccttgttgcctaccctgtccatagtggcctggcacataggcactgaaacactgcatgttaatccacaccccaccccacctatgagtgtagtcaaagctggtaagtgacaagggctttcgtggaaacttggcctgacctaatgttgggcatcaggttacccaaagagcttcagggaaatgagaaaggacttgcaggtcttgatgacaatggaggggtaactgccaatgagggctttggctttagcgaaagtctgaaagggaagccataggaacttaaacgtaccgactataaagctctgagaaaagctgatgttttagaaagaccatacattctaggtacaaatacctaaaaactaaaaaataagtacgttggccaggcgggcggatcacnaagtcaggagattgagaccatcctggccaacatggtgaaaccccacctctattaaaaatacaaaaattagctgggcgtggtggcgcttgcctgtaatctcaagctactctagaggctgaggcaggagaatcgcttgaaccccggagggcggaggctgcaatnagccgagatcgtgccactgcactccaacctggtgacancganacncttgtctcaaaaaaaaaaagttcctttnctaaannaaa

SEQ ID NO: 22538 - DNA, 647 bp, Homo sapiens
  misc_feature (1)...(647): n = a,t,c or g
gctggggaggtgaaggacctggggctcagcgagagtggggaggatgtcaatgccgccatcctggacgagagtgggaagaagttcgccatggagccagaggagtttgactctgacaccctccgcgagtttgtcactgctttcaaaaaaggaaaactgaagccagtcatcaaatcccagccagtgcccaagaacaacaagggacccgtcaacgtcgtgactgggaaanantttgactccattgtgatggaccccaanaaggacgtcctcatcgagttctacgcgccatggtgcgggcactgcaagcagctagagcccgtgtacaacagcctggccaagaagtacaagggccaaaagggcctggtcatcgccaagatggacgccactgccaacgacgtccccagcgaccgctataaggtggagggcttccccaccatctacttcgcccccagtggggacaaaaagaacccagttaaatttgagggtggagacagagatctggagcatttgagcaagtttatagaagaacatgccacaaaactgagcaggaccaaggaagagctttgaaggcctgaggtctgcggaaggtgggaggaggcagacgccctgcgtggcccatggtcggggcgtccacgccgaggccggcaaca

SEQ ID NO: 22539 - DNA, 735 bp, Homo sapiens
  misc_feature (1)...(735): n = a,t,c or g
tgacacgattcgaatttaatacgactcactatagggaatttggccctcgaggccaagaattcggcacgagtagaaatgcctactaaatatttagttcagttttagagtggaagcaaaacacaaaaaagtcctttatcctcaaagtttaggtatacatcttatgttagcccattctcactctgttacccacatgccattacagactttatccatatgaacgagcatttgcattggagagtgacgtctttgtgcatcaatcatctaagaacgtgcaatgatattaacaacacatgttgtgtgaatatatgatatacctataaatgtagaaattgctttcacatctgttatttcattttaaatgtccagcaatccttaggaacataataaagtggcttatcttttagcagctaaagtaactgaggaacaaagatgtcaaaggtctactttatgttactacttcattagtgacagtcacaactagaactaaggactatgggttactaaattgtgtcttatatggatattttaatagaaaatttggatgttattactgatgctttatacatctatgcagatgttagatttttttgatgcaattacacttgacccttgaacaaaatgggggaagggacactgtaccatcacagttgaaaaatctatgtatacttttgacactccaaaattaactactaatactactatcntggaagcctaccatacataaccggtggatac

SEQ ID NO: 22540 - DNA, 606 bp, Homo sapiens
  misc_feature (1)...(606): n = a,t,c or g
cagctatgacatgattacgaatgtaatacgactcactatagggaatttggccctcgaggccaagaattcggcacgagccgcgcgtgccgagactctgaggccttgcacccccacgatcccgtacgatggccgtcaagaagatcgcgatcttcggcgccactggccagaccgggctcaccaccctggcgcaggcggtgcaagcaggttactgaagtgacagtgctggtgcgggactcctccaggctgccatcagaggggccccggccggcccacgtggtagtgggagatgttctgcaggcagccgatgtggacaagaccgtggctgggcaggacgctgtcatcgtgctgctgggcaccccgcaatgacctcagtcccacgacagtgatgtccgagggccgcccggaacattgtggcagccatgaaggctcatggtgtggacaaggtccgtggcctgcacctcggctttcctgctctgggaccctaccaaggtgcccccacgactgcaggctgtgactgatgaccacatccggatgcacaaggtgctgcgggaataagcctgaagtacgtggctgtgatcccgcacacataggagaccagcncttact

SEQ ID NO: 22541 - DNA, 807 bp, Homo sapiens
ggcaatttgatccgcatcgagggggacccacagggcgtgcagcaggccaagcgagagctgctggagcttgcatctcgcatggaaaatgagcgtaccaaggatctaatcattgagcaaagatttcatcgcacaatcattgggcagaagggtgaacggatccgtgaaattcgtgacaaattcccagaggtcatcattaactttccagacccagcacaaaaaagtgacattgtccagctcagaggacctaagaatgaggtggaaaaatgcacaaaatacatgcagaagatggtggcagatctggtggaaaatagctattcaatttctgttccgatcttcaaacagtttcacaagaatatcattgggaaaggaggcgcaaacattaaaaagattcgtgaagaaagcaacaccaaaatcgaccttccagcagagaatagcaattcagagaccattatcatcacaggcaagcgagccaactgcgaagctgcccggagcaggattctgtctattcagaaagacctggccaacatagccgaggtagaggtctccatccctgccaagctgcacaactccctcattggcaccaagggccgtctgatccgctccatcatggaggagtgcggcggggtccacattcactttcccgtggaaggttcaggaagcgacaccgttgttatcaggggcccttcctcggatgtggagaaggccaagaagcagctcctgcatctggcggaggagaagcaaaccaagagtttcactgttgacatccgcgccaagccagaataccacaaattcctcatcggcaagggg

SEQ ID NO: 22542 - DNA, 310 bp, Homo sapiens
gatccactgacgttgatgagcccttagaagtcttcatctcagcaccgagaagtgagcctgtgatcaataatgacaaccctttagaatcaaatgatgaaaaggagggccaagaagccacttgctcacgaccccagattgtaccagagcccatggatttcagaaaattatctacattcagagaaagttttaagaaaagagtgataggacaagaccacgacttttcagaatccagtgaggaggaggcgcccgcagaagcctcaagcggggcactgagaagcaagcatggtgagaaggctcctatgacttctag

SEQ ID NO: 22543 - DNA, 491 bp, Homo sapiens
cccacagctttgacatcattacgaatttaatacgactcactatagggaatttggccctcgaggccaagaattcggcacgagcagcgccgtaatggcgttcttggcgtcgggaccctacctgacccatcagcaaaaggtgttgcggctttataagcgggcgctacgccacctcgagtcgtggtgcgtccagagagacaaataccgatactttgcttgtttgatgagagcccggtttgaagaacataagaatgaaaaggatatggcgaaggccacccagctgctgaaggaggccgaggaagaattctggtaccgtcagcatccacagccatacatcttccctgactctcctgggggcacctcctatgagagatacgattgctacaaggtcccagaatggtgcttagatgactggcatccttctgagaaggcaatgtatcctgattactttgccaagagagaacagtggaagaaactgcggagggaaagctggg

SEQ ID NO: 22544 - DNA, 679 bp, Homo sapiens
agctcctctggacaacaaattcttagtctataatattaggagacatcttctgttttgcaaatgtctgtgaatctgagcaacctggcattctgcttactggccagaaagctggcgggtgacatttgtaacatttcctctttgagactctgagttcacctagagaagtctaagcataacagctttctttcccagcacgagcctttatagctctctttagctcaaccactctgtccatccagccaatggatgtcccttcccctgtaccccaatttcaagcttattttaggaagccttgaactaccatgtatcctggctcctagctgagtttattagaggtatggagcagtgcaacttaaactcaagttgcacttacattttgaattttaaaatgatggttttatctgttgtgtgaagtggatcacccttgaggaccaggagcctccatatcctgactgaaaaccttttctgagacttagagtaacagtacttttggttccttgagttctcctgtctccagataccaaatgaccttgacttttctgccttgtgaattcgtagtccaatcagctgaaattaaatcacttgggagggacgcatagaaggagctctaggaacacagtgccagtgcagaagtttctccaggtggcctccctttccaacaatgtacataataaagtgt

SEQ ID NO: 22545 - DNA, 192 bp, Homo sapiens
gcatctaatcactgtatcaggaaaggcagtcaggacagtctagcatgatttatccttaacgaatcctgactggttcttataatcatcacttcctttttaaaatgtttcatctcatcatttgaatcatgcattctacagttctttgtcaagattaacatgaagctcagtggtcagtaattcccagactccacc

SEQ ID NO: 22546 - DNA, 1127 bp, Homo sapiens
tacgactcactatagggaatttggccctcgaggccaagaattcggcacgagcgagttcaagaacacccgcaccaacgagaaggtggagctgcaggagctgaatgaccgcttcgccaactacatcgacaaggtgcgcttcctggagcagcagaataagatcctgctggccgagctcgagcagctcaagggccaaggcaagtcgcgcctgggggacctctacgaggaggagatgcgggagctgcgccggcaggtggaccagctaaccaacgacaaagcccgcgtcgaggtggagcgcgacaacctggccgaggacatcatgcgcctccgggagaaattgcaggaggagatgcttcagagagaggaagccgaaaacaccctgcaatctttcagacaggatgttgacaatgcgtctctggcacgtcttgaccttgaacgcaaagtggaatctttgcaagaagagattgcctttttgaagaaactccacgaagaggaaatccaggagctgcaggctcagattcaggaacagcatgtccaaatcgatgtggatgtttccaagcctgacctcacggctgccctgcgtgatgtacgtcagcaatatgaaagtgtggctgccaagaacctgcaggaggcagaagaatggtacaaatccaagtttgctgacctctctgaggctgccaaccggaacaatgacgccctgcgccaggcaaagcaggagtccactgagtaccggagacaggtgcagtccctcacctgtgaagtggatgcccttaaaggaaccaatgagtccctggaacgccagatgcgtgaaatggaagagaactttgccgttgaagctgctaactaccaagacactattggccgcctgcaggatgagattcagaatatgaaggaggaaatggctcgtcaccttcgtgaataccaagacctgctcaatgtcaagctggccctggacatcgagatcgccacctacaggaagctgctagagggcgaggagaaccggatcaccattcccgtgcagaccttctccaacctgcagattcgagaaaccagcctggacaccaagtctgtgtcagaaggccacctcaagaggaacatcgtggtgaagaccgtggagatgcgggatggag

SEQ ID NO: 22547 - DNA, 657 bp, Homo sapiens
atttgaaccccttgactgattacgaatttaatacgactcactatagggaatttggccctcgaggccaagaattcggcacgaggaaaaagatactctaacaaaattaaaaggccattgtcagctgggacagaaacaatcaggatctgaatgcatttgtatgtctccagaagaagactgtagccatcattcagaagatctctgtgtgtttgacacagactccaacgattactttacttcacccgcttgtaagtttttggctgagaaatgtttaaataatcaagcaactccattttctacatattggttcctgccaagacggccgccagttagaatggggtcttgaaaggacaagactttcatccaacagcacaaagaaagaatcctgtggctatgacacctgctatgactgggaaaaatgttcagcctccacttccaaatgtgtctgcctattgcccccacagtgcttcaagggtggaaaccaactctactgtgtcaaaatgggatcatcaacaagtgagaaaacattgaacatctgtgaagtgggaactataagatgtgcaaacaggaagatggaaatactgcatcctggaaagtgtttggcctagcacaattactgctaggcccagcacaatgaacagatttaccatcccgaagaac

SEQ ID NO: 22548 - DNA, 473 bp, Homo sapiens
caacagctatgacatgattacgaatttaatacgactcactatagggaatttggccctcgaggccaagaattcggcacgaggcatgagcttcaaccctgtctctactaaaaatatgaaaataaaaaatatgaaaattagctaggcatggtggcacgtgcctgtaatcccagctacttgggaggctgaggcaggagaattgcttgaacccaggaggcagaggttggagtgagccaagattgcgccatcagaaaagaaaacacaatggtaaagaaaaaaactaaggcaaagatctactggttgataacaaaatgtccacagtggtgcctgaaactgaatccaaatacgtaaagttaaagtccagtgccctatttacaatgggcaaccactcttgcctctctaaagccaaatatttacagcacagtttttagaacagcatcataatttcttttttttttcttttggttacaaaggaa

SEQ ID NO: 22549 - DNA, 381 bp, Homo sapiens
gcacgcgccttcagccgcttcccatccttccttaaggccaaggtgatccgtgacaagcgcacaggcaagaccaagggctacggcttcgtcagcttcaaggaccccagcgactacgtgcgcgccatgcgtgagatgaatgggaagtatgtgggctcgcgccccatcaagcttcgcaagagcatgtggaaggaccggaatctggacgtggtccgcaagaagcagaaggaaaagaagaagctgggcctgagatagggtctgtggccaggcacccgctcccacctggccgggcgctggctcctccctcagttctctttggaaaacccccagctgtccacccatcccctgccccaaaaccagtttcaataaaatttacgttcattt

SEQ ID NO: 22550 - DNA, 571 bp, Homo sapiens
  misc_feature (1)...(571): n = a,t,c or g
ggagagagcccatgagcttcaataccctgctgtaaagttaactcatattttcctgcctagtaatgtcttacctgttcaccatccagctacacctagcagatgcccatcatcaagataacaattaccaacggtaaagttaaacatctgcttcttccagactcatctcctgcaagccatgtcccgggatagcagcagaggcttccccatctctccccccgtccacgttggccaagggcagggccaatgcccccctctacagggatcccaccagccagggagggagatgcagggctaacgcaaaagctgattgttcagagtaactagaagctgagccctactgacttcggacctttgggggaaaatccgttttaaatcccgagcccactttcttctgggtaagctaaggctatggaacaggttggaaaggagccaaggncttaaaanttggtgtgggacgcagcactctggacaggggcctgcaaacccanggacaaatatcagnttggntantncccccanttgggactcangaaagcanctacctntgaccctggtttnntnatntgaaaag

SEQ ID NO: 22551 - DNA, 534 bp, Homo sapiens
  misc_feature (1)...(534): n = a,t,c or g
ccaacagctatgacatgattacgaatttaatacgactcactatagggaatttggccctcgaggccaagaattcggcacgagatttgataaagagagcaaattgtaagtgacccatggtcactatgggtggtggtgttgattgtgttaatttgactgtggtagtcagtacataatgtgtatatatataccaaatcatcattttatataccttgaatgttatatatatattttttcaattacatgttttaaaattaaaaagttggccgggaccgggtgtgggggctcgtgcctgtaacccccgcactttgggaggctgaggcgtgtagatcatcttgaggtcaggagttcaggaccagcctggccaatatggtgaaaccctgtctgtactaaaaatacaaaaattagccaggtgtggtggtggtggagggggggccgctgtaattccagcgactcgggagactgaggcaggagagtcacttgaaccccgctggggtgaangntgcnantgagccaanattgngccntnnactccac

SEQ ID NO: 22552 - DNA, 536 bp, Homo sapiens
gctgctgtcccagcagatggcagacggaggctggggggaggactttgagtcctgcgaggagcggcgttatgtgcagagtgcccagtcccagatccataacacatgctgggccatgatggggctgatggccgttcggcatcctgacatcgaggcccaggagagaggagtccggtgtctacttgagaaacagctccccaatggcgactggccgcaggaaaacattgctggggtcttcaacaagtcctgtgccatctcctacacgagctacaggaacatcttccccatctgggccctcggccgcttctcccagctgtaccctgagagagcccttgctggccacccctgagaacatgcctacctgctgggtgccgtctgtgcgttccagtgaggccaaggggtcctggccgggttggggagccctcccataaccctgtcttgggctccaacccctcaacctctatctcatagatgtgaatctgggggccagaaagtgggaggagtcactgagagcttcgttacccctgctgcttgcccag

SEQ ID NO: 22553 - DNA, 368 bp, Homo sapiens
ggaaagtagctccagcagcacccgagagggtcaggagaaaagcggaggaagctgggtaggccctgaggggcctcggtaagccatcatgaccacccggcaagccacgaaggatcccctcctccggggtgtatctcctacccctagcaagattccggtacgctctcagaaacgcacgcctttccccactgttacatcgtgcgccgtggaccaggagaaccaagatccacggagatgggtgcagaaaccaccgctcaatattcaacgccccctcgttgattcagcaggccccaggccgaaagccaggcaccaggcagagacatcacaaagattggtggggatcagtcagcctcggaaccccttggaagagc

SEQ ID NO: 22554 - DNA, 502 bp, Homo sapiens
cataagtgaaccaaaggtttttgtcctttccttcactgatttgctttaaaaaaaataaaagataatgatttattgcagaattatgattctattttctcaatatgttaacttggaaaaaaattttagccttatcttaatctgtcccaacagcaatgtgacggatttttgcagattcaaaatctgcaatggttatttacaagtcaatctactgaattccttttttaaataatcttttgaaactaagaaaatgtgtcaaattgtgtgcattcattctgtaggtaaaattcttaaggattgccatgtcagtccttcagttgtacagtgaactgttgtacactggttcaatgaaaggaagttaaaagtaccttttacatattgtaaaagtggatacagttgatttgtgagtaggcactctttaatccattacctggcactagcaacattagaattttaaaataaaataattgggaaagaaggtgggtcatgtattaatcagtgaaca

SEQ ID NO: 22555 - DNA, 406 bp, Homo sapiens
gtgtttgtgtgcatattacatttattgtaggatcttaaaaaatctcaagggtgggagatagaaaggttaatagagttggaggagtggaagctattttgtatgcaactagtcactgctgaggggtgtcaaagtttctatttttatttgttctgttttgcacgtctttatcattttgctttattccgattatagaataaagtaattctttttaaaaatattttttggggcaaagagtacaggcaaatgtggaagataaagatggcctcgtgtgtgtgtgtgtgtgtgtgtgtgtgtgtgtgcttgtgtttgtgtgcatattacatttattgtaggatcttaaaaaatctcaagggtgggagatagaaaggttaatagagttggaggagtggaagctattttgtatgca

SEQ ID NO: 22556 - DNA, 663 bp, Homo sapiens
gactcagcaggacatctatgcaggttcagtgcagcccatcctaaggcacttgctggaagggcagaatgccagtgtgcttgcctatggacccacaggagctgggaagacgcacacaatgctgggcagcccagagcaacctggggtgatcccgcgggctctcatggacctcctgcagctcacaagggaggagggtgccgagggccggccatgggccctttctgtcaccatgtcttacctagagatctaccaggagaaggtattagacctcctggaccctgcttcgggagacctggtaatccgagaagactgccgggggaatatcctgattccgggtctctcccagaagcccatcagtagctttgctgattttgagcggcacttcctgccagccagtcgaaatcggactgtaggagccacccggctcaaccagcgctcctcccgcagtcatgctgtgctcctggtcaaggtggaccagcgggaacgtttggccccatttcgccagcgagagggaaaactctacctgattgacttggctgggtcagaggacaaccggcgcacaggcaacaagggccttcggctaaaagagagtggagccatcaacacctccctgtttgtcctgggcaaagtggtagatgcgctgaatcagggcctccctcgtgtacc

SEQ ID NO: 22557 - DNA, 451 bp, Homo sapiens
gcatttaatcatcgttgacaataatgctcactcctctgtggtttcagaggactcctggagtggatggagacacatgccactaatgtgggatgcatttcagtctgtcttccaggcctcgtttggaggtctccctctcttacccacctatcacacatccatgtcttcccttccctccccagagccaaacctgtccccgactttttattctcactaaagttcaaatgacagaaatcagctagattagtacttgccttagtcctgaaggaaagggaagtgctcattagcttcttaaattggaacaggtctgcaggtgaaaatgaagatgtgctcatctctggcaggaaggttgggagtgaggggtctagtcataatgagcagcgtttatttggtgtgtgcctctcacttgccactttctacccagctgcctgaatatcactccagttagctgagc

SEQ ID NO: 22558 - DNA, 442 bp, Homo sapiens
  misc_feature (1)...(442): n = a,t,c or g
tttgnanncccngcttttgacatgattacgaatttaatacgactcactatagggaatttggccctcgaggccaagaattcggcacgagtcaacattcacaagcgcatccatggagtgggcttcaagaagcgtgcacctcgggcactcaaagagattcggaaatttgccatgaaggagatgggaactccagatgtgcgcattgacaccaggctcaacaaagctgtctgggccaaaggaataaggaatgtgccataccgaatccgtgtgcggctgtccagaaaacgtannnnnnatgaagattcnccaantaagctntatactttggtaacctatgnncctgttacnnttttcaaaattttcccgncaggccattggggttgaaaacnatcgnttganggccganncaattaaggtttaaaatggccttnaaaaaaaaaaaaaa

SEQ ID NO: 22559 - DNA, 552 bp, Homo sapiens
gtgtcatttacaaaaggaagaaattcctgccatcagaagggacagaaggagatggaatgatcaaatcacagagaaacactaaaattactaaatctacaacagctcgccttatttttcttggacccaaactgtcagggtataaacactatttgtttcttttttaaaacatcgatagttttgctgtaaataataacactgtataaattctaacagaaaaatagaataaaatgttgataaggcactgcctcttagaacacaaacagaatattgcaaatgcatttaacaaataggggtctcaagtgacttcaccctagaagaggagggagggattctgggtgggggtgactcttcactgattcttgtatattagcaattataatgtttgtatatgcaaaactgctagcttgattttaaaaaaaaacaaatctttaaaatctgctgcaaatttaaataattcccaaaatgaggaattctgtagttctgtgaaaaatttttttcttcagaatactaatatttcgatgcatgtgtatcaccttattttgattaaatctt

SEQ ID NO: 22560 - DNA, 564 bp, Homo sapiens
  misc_feature (1)...(564): n = a,t,c or g
gactgaaccacatgactatcacagggaacccggtttctgaggttaagaacctggtatgagagcaaacataatttacgactctagcaactcgggccatatcgaagaacgcccttgaccacggcgacatcgccaaaacacccgaaacacccaagagcattcaacgctccagaggactagatatccggaacccaacctaaaacgtccaaaggaacccgaaaccagactcgcggccccaaccccaaaacactcaagaaaacccaataagccgaggttcgagttattgcgtttggtttcgtataccctccacaaacgaaactacgtaacgcgcggttccaagcgttcggtcgtccttgtccagtgctacgccccggggcctacttgcggcgcggtacgcggagcgtcgtcccttcccccgcagtcgagtaggttcttatggcgtgggcgtatcgtacgtcggccccttgtgttctcgcggacgggttctcgggtcggcggtcngcccgnccccaaagggggtttccccaatttttccctttacaattccccggcccccaatttgttcgt

SEQ ID NO: 22561 - DNA, 448 bp, Homo sapiens
  misc_feature (1)...(448): n = a,t,c or g
ggtctttggaggaggaagagggatggaaagagccttcggtgtggaattaccttggttttgagttaagaaagacccacctgggttcgaaccctaatgcttcagctagcgaaggcaggctagtatgggagctcggcgctgtttcagattttgtaattttaaggcttatgcctaccttttaaattgttgtggggagtaaagcgagacaatatatatgaagcacttagctttggtacaaaacgtattcgtgattccgctaccttttcccatcatatgtaggcatgtacttgccgttttcttttctgtatgtctgagaaatgttgtttgcaagaggtaatgcatctcacgagaacataatgcaacgagaacgttagcttgggatcgatctcttattttgaataacgaaggcctgaaatattnngccttttttttgggggnggggnaattccca

SEQ ID NO: 22562 - DNA, 430 bp, Homo sapiens
  misc_feature (1)...(430): n = a,t,c or g
gggccagtgtatatgcaaactgggggactctcctcccttctctccccagttctggtcctggccaggccatgctacactaacccctgcccccactctcctcccctcctttccttccttcctacccccttctccctctcccttcccctgactgttccacccaggaggaggaaacttcacatagccgtgctcacagttttttattttaaaggaatttggctggggagctgaacagggctccctgtgatctgaagaaagcttttggtgcttgtcctcacaaccacctcagtcctccctccctgtcctcccctgtctcctttcctcctcctgggttcatgttgtaataaaagaagattgttggtgtgtaattaatttgttcaaaagaaaaaaaaaagcanaacaanaaacttggttccaactgaggcctatttta

SEQ ID NO: 22563 - DNA, 422 bp, Homo sapiens
gttatgacatgattacgaatttaatacgactcactatagggaatttggccctcgaggccaagaattcggcacgagactagatccaaaagtttgtagtatatgtgtggtggggggggctttccctcatagggaagaaaaagtattagctttttcccacctgtcactaggttcgtggctgagtcacctttaacagactacagattaagaagagaaaataacacaaatttatttaataaaagtttcacatgacatgaagttttcagaaatgaagacccagagatacagggaaacctgtgtatttcagtgcttggatttgatgaagaatagacagtggtggggaaatgtgattggccaaagcatgtacgatctaatggtaataaactggaggggagcttaacaaggcctgtttgtgcagattctta

SEQ ID NO: 22564 - DNA, 509 bp, Homo sapiens
tttaacagctatgacatgattacgaatttaatacgactcactatagggaatttggccctcgaggccaagaattcggcacgagggctcccgcaaagaagggtggcgagaagaaaaagggccgttctgccatcaacgaagtggtaacccgagaatacaccatcaacattcacaagcgcatccatggagtgggcttcaagaagcgtgcacctcgggcactcaaagagattcggaaatttgccatgaaggagatgggaactccagatgtgcgcattgacaccaggctcaacaaagctgtctgggccaaaggaataaggaatgtgccataccgaatccgtgtgcggctgtccagaaaacgtaatgaggatgaagattcaccaaataagctatatactttggttacctatgtacctgttaccactttcaaaaatctacagacagtcaatgtggatgagaactaatcgctgatcgtcagatcaaataaagttataaaattgcaaaaaaaaaaaaaa

SEQ ID NO: 22565 - DNA, 460 bp, Homo sapiens
gcagggggacagcaagggacgctcaggcggggaccatggcggacggcggctcggagcgggctgacgggcgcatcgtcaagatggaggtggactacagcgccacggtggatcagcgcctacccgagtgtgcgaagctagccaaggaaggaagacttcaagaagtcattgaaacccttctctctctggaaaagcagactcgtactgcttccgatatggtatcgacatcccgtatcttagttgcagtagtgaagatgtgctatgaggctaaagaatgggatttacttaatgaaaatattatgcttttgtccaaaaggcggagtcagttaaaacaagctgttgccaaaatggttcaacagtgctgtacttatgttgaggaaatcacagaccttcctatcaaacttcgattaattgatactctacgaatggttaccgaaggcaagatttatgttgaaattgagcg

SEQ ID NO: 22566 - DNA, 887 bp, Homo sapiens
  misc_feature (1)...(887): n = a,t,c or g
gctgcctgtgtccctgtgatgctcagcaatggatgggagttgccattctctgaagtgattaattggaaccaagctgccgtcataggcgatgagagattgttattacagattccttctacaatcaggtctattcatcaggataaaatcctagcacttagacagcagacacaattcttgtgggaggcttatttttcttcagttgagaagattgtattaactacactagagattattcaggacagaatattcaagcacatatcacgtaacagtttaatatggaacaaacatcctggaggattgttcgtactaccacagtattcatcttatctgggagattttccttactactatgctaatttaggtttaaagcccccctccaaattcactgcagtcatccatgcggtgacccccctggtctctcagtcccagccagtgttgaagcttctcgtggctgcagccaagtcccagtactgtgcccagatcatagttctatggaattgtgacaagcccctaccagccaaacaccgctggcctgccactgctgtgcctgtcgtcgtcattgaaggagagagcaaggttatgagcagccgttttctgccctacgacaacatcatcacagacgccgtgctcagccttgacgaggacacggtgctttcaacaacagaggtggatttcgccttcacagtgtggcagagcttccctgagaggattgtggggtaccccgcgcgcagccacttctgggataactcctaaggaacggtggggatacncatcaanagtggangaacgactactccatgggggtgacaggagctgcnattacacaaatattatcactacctnagtcccattacctggcaancaacccngaanaaaatggggncaat

SEQ ID NO: 22567 - DNA, 393 bp, Homo sapiens
aggaacggcagtgatcacacgtcggctgctgggaagatctggattctcgtttcaggtcaccatcagaaaagctaagtttgctgtatagtgaggatcaggagatctgatcctgattgcagaaccttccctgattacagaatcttggtggttggaataaaaacagggttgaatgagttccagaaagcagggttctcaacctcgtggacagcaatctgcagaagaagagaacttcaaaaaaccaactagaagcaacatgcagagaagtaaaatgagaggggcctcctcaggaaagaagacagctggtccacagcagaaaaatcttgaaccagctctcccaggaagatggggtggtcgctctgcagagaaccccccttcaggatccgtgaggaagac

SEQ ID NO: 22568 - DNA, 447 bp, Homo sapiens
  misc_feature (1)...(447): n = a,t,c or g
gnnnnnnnnnnttggnnnnccnnnnnntttgaaacacctatgactgattacgaatttaatacgactcactatagggaatttggccctcgaggccaagaattcggcacgaggctgaagcccagtcccgccgcctggaggagcagagggccaccttctacaccccccaaaacccctcaagcctagcccctgccccactccgtcctctcgaggacagagaacagctttacagcactatcctcagtcaccagtgccagcggatggaagcccagcggtcagagcctcccctccctccaggggggcaagagctcctggagttgctgctgagagttcagggtgggggtcgaatggaggagcaaaggtcccggncccccacacacacctgctgagacttgagccccaaccagcccttcttgccactggtctcaaagctgggcagcccattgcatg

SEQ ID NO: 22569 - DNA, 747 bp, Homo sapiens
tctatgacatgattacgaatttaatacgactcactatagggaatttggccctcgaggccaagaattcggcacgaggccacacagccctgggaccccgctcggcctccctgctctccctgcagactgaactccttctggacctggtggctgaagcccagtcccgccgcctggaggagcagagggccaccttctacaccccccaaaacccctcaagcctagcccctgccccactccgtcctctcgaggacagagaacagctttacagcactatcctcagtcaccagtgccagcggatggaagcccagcggtcagagcctcccctccctccaggggggcaagagctcctggagttgctgctgagagttcagggtgggggtcgaatggaggagcaaaggtcccggccccccacacacacctgctgagacttgagccccaaccagcccttccttgccactggtctcaaagctgggcagcccattgcatgccctcaactcttgcttggcaggggtaccagagactgaaagacacggcacaaatctcaatattcatctcccacatcaccttccctgggaactggacagggtgaaagtcctcaaactctgggaacaggcgagatggaacagggatttaactccccgcccacaggtccatgggagcttgaggcagtaagggggatcccaggcacccatctcaaggagtggctgggagtcttttccctaacttgtggggacaccaccagttgtcaag

SEQ ID NO: 22570 - DNA, 663 bp, Homo sapiens
  misc_feature (1)...(663): n = a,t,c or g
ggacacactgagtgaccttgggtagaactgcatgtccgcctagacggatccatcaagcctgaaaccatcttatactatggcaggaggagagggatcgccctcccagctaacacagcagaggggctgctgaacgtcattggcatggacaagccgctcacccttccagacttcctggccaagtttgactactacatgcctgctatcgcgggctgccgggaggctatcaaaaggatcgcctatgagtttgtagagatgaaggccaaagagggcgtggtgtatgtggaggtgcggtacagtccgcacctgctggccaactccaaagtggagccaatcccctggaaccaggctgaaggggacctcaccccagacgaggtggtggccctagtgggccagggcctgcaggagggggagcgagacttcggggtcaaggcccggtccatcctgtgctgcatgcgccaccagcccaactggtcccccaaggtggtggagctgtgtaagaagtaccagcagcagaccgtggtagccattgacctggctggagatgagaccatcccaggaagcagcctcttgcctggacatgtccaggcctaccaggaggctgtgaagagcggcattcaccgtacttgtccacgccggngaggtggctcggcccaaataataaaa

SEQ ID NO: 22571 - DNA, 398 bp, Homo sapiens
gactgttcgagcccttccgctgggacccgggccctggctccggccccgcgatgggagctgctctccgcgggctgagcctgtcagcatcctcgacgcaccctggtccctgaagtcggagaagagcccctacccacccacacccccttgccccattttgggtcgcctgggtcctcagtcctagcggatcctcagtcctagcggccaccgggtctgaaaggagcaagacgatgatcctggcgtcggtgctgaggagcggtcccgggggcgggcttccgctccggcccctcctgggacccgcactcgcgctccgggcccgctcgacgtcggccaccgacacacaccacgtggagatggctcgggagcgctccaagaccgtcacctccttttacaaccagtcg

SEQ ID NO: 22572 - DNA, 314 bp, Homo sapiens
gggacccacccacttcgtctaagcctcaagtggagaactgagtgatggagggcaaaatgtataaatggatgcagcaaaggggcctggggccttttgtctgagaagtttctgcaaacaaagaaagtgagaccaaagtcaaatgggtccctccatgatcctttgtggtcagtctgtttagctcagttctctgcctttggcagagcacaggggagcaggatccatcatccatgggaaggagacaaggactatgcagggtggctgtgccccagctgatcttcaggcaggagcctagcacccacgtaaactagagagag

SEQ ID NO: 22573 - DNA, 434 bp, Homo sapiens
gaataccctgttatcttttcattgttttcttcaaccctatctttcaaaacacacatacaacaagagctgagatactttgagtatctttgaaaaattttgtctgaagcaagaagaaatctgcatttaggtatcactgatgaggtaatcagaattcttgtttgacttctccaaaagatccctgatgcattcaatttacatatgtgcttcctctcagccatatcctggtctgaataccagcaatgtcacttactagacagactttgctcatgtgcttttacaagataatacaaacttctgaatgtgtcatgtcctgatcatttaggctaaggatcaatgaactcaaatgtataaggaggccaaagtagctttgtcaaagagcaaagccggctctgtggaaaaaacgacagccttgaggacaatgacaaattgcagtc

SEQ ID NO: 22574 - DNA, 372 bp, Homo sapiens
gaggacaggtcttgagaggggcaggtgcccctgatggcgggaccaatatggcccaagtgtgaactggaggacgctgagcccaccttctgcaagtgctggtggggaccgccagcccctgagccttcctcactgagaagccgtgatccctccgtgggctggatcccaggtgttaggaagactggctgtgctgtggaacgccctccagggctccggggctgggggaccctgaccccctcccaggccatgccaggtgctgtgtgtgattgggcgctggtgctgactcagtggccagatggcctggactgatgagctgccagccccccaggagtcaccatgaatctcagggagggtggacatgagggcttgggctcc

SEQ ID NO: 22575 - DNA, 475 bp, Homo sapiens
gatttatttcttttatccctactacagtgcctggcttatgatgtacataaaataaatattagtggataggaaaatttttttataaagaatcaattttttgccacagtgcattttttcatggttgacatttattcaagaagcatttattgagcaactcttatgtggaaagcattatactggctgctttgagatatataaaagaactataacatctaaacatttaatgttagaatgaaatgtaatttctatttagtataaggtatactacaaattataggatgaaggtgggtaatcactagaggtttcagatggatcataggtaaaaaatactggaaaaacagtttagtctgatgacaaaggaaatcactttttagtagctatggtattcaaaataatcatagtttaaaatgtcatttaacagtttctggaatttttataaaatcattctccttgctgtcataatggtagatccaga

SEQ ID NO: 22576 - DNA, 718 bp, Homo sapiens
  misc_feature (1)...(718): n = a,t,c or g
ggaacggcagtgatcacacgtcggctgctgggaagatctggattctcgtttcaggtcaccatcagaaaagctaagtttgctgtatagtgaggatcaggagatctgatcctgattgcagaaccttccctgattacagaatcttggatgatttcacaaaagttcatcttcattgcagatacctgcctttctttctaggttgtatctcccacttcacccttctagaccatcccagaagatctataagatttcatctgggaaatcactaggagttcttggaagggaaagaaggaagattgttggttggaataaaaacagggttgaatgagttccagaaagcagggttctcaacctcgtggacagcaatctgcagaagaagagaacttcaaaaaaccaactagaagcaacatgcagagaagtaaaatgagaggggcctcctcaggaaagaagacagctggtccacagcagaaaaatcttgaaccagctctcccaggaagatggggtggtcgctctgcagagaaccccccttcaggatccgtgaggaagaccagaaagaacaagcagaagactcctggaaacggagatggtggcagtaccagcgaagcacctcagccccctcggaagaaaagggcccgggcanaccccactgttgaaagtgaggaggcgtttaagaatagaatggangttaaagtgaagattcctgaagaattaaaaccatgct

SEQ ID NO: 22577 - DNA, 352 bp, Homo sapiens
  misc_feature (1)...(352): n = a,t,c or g
gaggtgcagtggctcacgcctatgatcccagcactttgggaggctgaggcgggtggatcacctgaggttaggagttcgagaccagcctggccaacatggtaaaaccccatctctactaaaaatacagaaattagccgggcgtggtggcgggcacctatagtcccagctactcagaagcctgaggctgggaaatcgtttgaacccgggaagcggaggttgcagggagccgagatcacgccactgcactccagcctgggcgacagagcgagagtctgtctcaaaagaaaaaaaaaagcaccgcctccaaatgccaacttgccttttgtaccatggtgtgaaagtcanatgccca

SEQ ID NO: 22578 - DNA, 685 bp, Homo sapiens
  misc_feature (1)...(685): n = a,t,c or g
gaagatttccaccatatccagcgtcaggaatttaaccataaggagcagctctttttcagacaccctggaagaatcgagccccattgcagccatctttgacacagaaaacctggagaaaatctccattacagaaggtatagagcggggcatcgttgacagcatcacgggtcagaggcttctggaggctcaggcctgcacaggtggcatcatccacccaaccacgggccagaagctgtcacttcaggacgcagtctcccagggtgtgattgaccaagacatggccaccaggctgaagcctgctcagaaagccttcataggcttcgagggtgtgaagggaaagaagaagatgtcagcagcataggcagtgaaagaaaaatggctcccgtatgaggctggccagcgcttcctggagttccagtacctcacgggaggtcttgttgacccggaagtgcatgggaggataagcaccgaagaagccatccggaaggggttcatagatggccgctccgcacagaggctgcaagacaccagcagctatgccaaaatcctgacctgccccaaaaccaaattaaaaatatcctataaggatgccataaatcgctccatggtagaagatatcactgggctgcgccttctggaanccgcctccgtgtcgtcaagggcttacccagcccttacaacatgt

SEQ ID NO: 22579 - DNA, 445 bp, Homo sapiens
ccgtaacagctatgacatgattacgaatttaatacgactcactatagggaatttggccctcgaggccaagaattcggcacgagcagcattctgtataaccatagaatgttaatgcaaaaaggccccacggaatgtctctcattttttaaatgtgaaaattaattccttgaaaaatgatcaaagctctgatcctttcagtgctaagaagggaaaataactcaggttttagtacctttttcatcgtatcaccttacctctagcattcaggtatatattactttgtttattactctttgggtgtctatatctaattttaccaagtagtttgtaaacccctttaggcagtttttatactttctgttcttaaaagagctattacataagctgcttaacaatgaatttaattggtacatactgattggttggttgatttctttgatttgga

SEQ ID NO: 22580 - DNA, 427 bp, Homo sapiens
  misc_feature (1)...(427): n = a,t,c or g
ttttgaaaccctntgactgattacgaatntntgacgaccnnctatagggaatttggccctcgaggccaagaattcggcacgagcagagcccaaagtcctcatgtctgtcctgaacgacaactcccgggatatgactgaggtgatcagcagcctggaaaatgccaactataaagatcatgaaaatggaactgggactaacacctatgcggccttaaacagtgtctatctcatgatgaacaaccaaatgcgactcctcggcatggaaacgatggcctggcaggaaatccgacatgccatcatccttctgacagatggaaagtccaatatgggtggctctcccaagacagctgttgaccatatcagagagatcctgaacatcaaccagaagaggaatgactatctggacatctatgccatcggggtgggc

SEQ ID NO: 22581 - DNA, 639 bp, Homo sapiens
gaggagtatagttacataaaagaaggcaaaacgatgtataaatgaaagaaattgagatggtgcacgatgcacagttgaagtgaacttgcggggtttttcagtatctacgattcatagatctggaattcgcggccgcgtcgacgccagaacacaggtgtcgtgaaaactacccctaaaagccaaaatgggaaaggaaaagactcatatcaacattgtcgtcattggacacgtagattcgggcaagtccaccactactggccatctgatctataaatgcggtggcatcgacaaaagaaccattgaaaaatttgagaaggaggctgctgagatgggaaagggctccttcaagtatgcctgggtcttggataaactgaaagctgagcgtgaacgtggtatcaccattgatatctccttgtggaaatttgagaccagcaagtactatgtgactatcattgatgccccaggacacagagactttatcaaaaacatgattacagggacatctcaggctgactgtgctgtcctgattggtgctgctggtgttggtgaatttgaagctggtatctccaagaatgggcagacccgagagcatgcccttctgggcttacacactgggtgtgaaacaactaattgcggggg

SEQ ID NO: 22582 - DNA, 432 bp, Homo sapiens
  misc_feature (1)...(432): n = a,t,c or g
tnntnnnnnnnntttgganacctntntgactgcttacgaatttaatacgactcactatagggaatttggccctcgaggccaagaattcggcacgagcggcacgagtggctacaaaagccgctcgcaagagtgcgccctctactggaggggtgaagaaacctcatcgttacaggcctggtactgtggcgctccgtgaaattagacgttatcagaagtccactgaacttctgattcgcaaacttcccttccagcgtctggtgcgagaaattgctcaggactttaaaacagatctgcgcttccagagcgcagctatcggtgctttgcaggaggcaagtgaggcctatctggttggcctttttgaagacaccaacctgtgtgctatccatgccaaacgtgtaacaattatgccaaaagacatccagctagcacgcc

SEQ ID NO: 22583 - DNA, 640 bp, Homo sapiens
tacgactcactatagggaatttggccctcgaggccaagaattcggcacgagatccaaatccagcgctctggtcatctgaacctctacctgctcctggactgttcgcagagtgtgtcggaaaatgactttctcatcttcaaggagagcgcctccctcatggtggacaggatcttcagctttgagatcaatgtgagcgttgccattatcacctttgcctcagagcccaaagtcctcatgtctgtcctgaacgacaactcccgggatatgactgaggtgatcagcagcctggaaaatgccaactataaagatcatgaaaatggaactgggactaacacctatgcggccttaaacagtgtctatctcatgatgaacaaccaaatgcgactcctcggcatggaaacgatggcctggcaggaaatccgacatgccatcatccttctgacagatggaaagtccaatatgggtggctctcccaagacagctgttgaccatatcagagagatcctgaacatcaaccagaagaggaatgactatctggacatctatgccatcggggtgggcaagctggatgtggactggagagaactgaatgagctagggtccaagaaggatggtgagaggcatgccttcattctgcagg

SEQ ID NO: 22584 - DNA, 453 bp, Homo sapiens
  misc_feature (1)...(453): n = a,t,c or g
tnnnttcccccctttgacnccccttgcatgaccacgaatttaatacgactcactatagggaatttggccctcgaggccaagaattcggcacgagcggcacgagtaaaggaccaagaggctacggaaaagcagcagacatctggtctctgggctgtacaatcattgaaatggccacaggaaaacccccattttatgaactgggagaaccacaagcagctatgttcaaggtgggaatgtttaaagtccaccctgagatcccagagtccatgtctgcagaggccaaggcattcatactgaaatgttttgaaccagatcctgacaagagagcctgtgctaacgacttgcttgttgatgagtttttaaaagtttcaagcaaaaagaaaaagacacaacctaagctttcaggtatgtggttgcattgaagaggatatagtctgagtccttcaatcctaa

SEQ ID NO: 22585 - DNA, 631 bp, Homo sapiens
ccatcagctatgacatgattacgaatttaatacgactcactatagggaatttggccctcgaggccaagaattcggcacgagcaatgtgttgattaatacctacagtggtgttctcaagatctctgacttcggaacatcaaagaggcttgctggcataaacccctgtactgaaacttttactggtaccctccagtatatggcaccagaaataatagataaaggaccaagaggctacggaaaagcagcagacatctggtctctgggctgtacaatcattgaaatggccacaggaaaacccccattttatgaactgggagaaccacaagcagctatgttcaaggtgggaatgtttaaagtccaccctgagatcccagagtccatgtctgcagaggccaaggcattcatactgaaatgttttgaaccagatcctgacaagagagcctgtgctaacgacttgcttgttgatgagtttttaaaagtttcaagcaaaaagaaaaagacacaacctaagctttcagctctttcagctggatcaaatgaatatctcaggagtatatccttgccggtacctgtgctggtggaggacaccagcagcagcagtgagtacggctcagtttcacccgacacggag

SEQ ID NO: 22586 - DNA, 366 bp, Homo sapiens
gcaggcataagccaccatgctcagcctaaatgaatctttccctgaccttgaggtaccgcacaaaaaaccctccttcattcttattttgagacataccaggttaggagggggtgaaatgggctggccctgtcacttcccactaagcactggttttttaaatatcttaacctagtctaactcaggagactcataaattaaaaatctctcccataggtctcttcctataccaactctaacctttgtactcaacatacagtgtttgtccggctagcacagtgattttttgttatcaccatcacatatgccccattcaagaattataggaggtgcccaggtgcggtggctcatgcctgtaatcccagcact

SEQ ID NO: 22587 - DNA, 626 bp, Homo sapiens
tgacatgattacgaatttaatacgactcactatagggaatttggccctcgaggccaagaattcggcacgagctggtttttcgctcgtcgactgcggctcttcctcgggcagcggaagcggcgcggcggtcggagaagtggcctaaaacttcggcgttgggtgaaagaaaatggcccgaaccaagcagactgctcgtaagtccaccggtgggaaagccccccgcaaacagctggccacgaaagccgccaggaaaagcgctccctctactggcggggtgaagaagcctcatcgctacaggcccgggaccgtggcgcttcgagagattcgtcgttatcagaagtcgaccgagctgctcatccggaagctgcccttccagaggttggtgagggagatcgcgcaggatttcaaaaccgacctgaggtttcagagcgcagccatcggtgcgctgcaggaggctagcgaagcgtacctggtgggtctgttcgaagataccaacctgtgtgccatccacgctaagagagtcaccatcatgcccaaagacatccagctagcacgccgcatacgtggagaacgtgcttaagaatccactatgatgggaaacatttcattctcaaaaaaaaaaaaaa

SEQ ID NO: 22588 - DNA, 566 bp, Homo sapiens
ggcctatacatccttgggaaccaggttcctttagagttggtcttattgccttgaagctgggcatgatgcctttatggaccaaggatggtcaaaagcatgtggtcatattacttcaggtacaagactgtcatgtcttaaaatatacgtcaaaggaaaactgtaatggaaaaatggcaaccctgtctgtaggaggaaaaactgtatcacgttttcgtaaagctacatccatattggaattttaccgggaacttggattgccgccgaaacagacagttaaaatctttaatataacagataatgctgcaattaaaccaggcactcctctttatgctgctcactttcgtccaggacagtatgtggatgtcacagccaaaactattggtaaaggttttcaaggtgtcatgaaaagatggggatttaaaggccagcctgctacgcatggtcaaacgaaaacccacaggagacctggagctgttgcaactggtgatattggcagagtctgcctggaactaaaatgcctggaaaaatgggaaacatatacaggacagaatatggactggaagggg

SEQ ID NO: 22589 - DNA, 469 bp, Homo sapiens
  misc_feature (1)...(469): n = a,t,c or g
tcnnnaatccctttgganctaccngctatgacatgattacgaatttaatacgactcactatagggaatttggccctcgaggccaagaattcggcacgagaagcatcacgaaggcttcacaaactggccgagtcctgtgtcttggaactggaactccaaagacgtggggcctcatcgggatttggttggtgaattgggaacagctctccggaagaggaacatccgctatggactataccactcactcttagagtggttccatccactctatctacttgataagaaaaatggcttcaaaacacagcattttgtcagtgcaaaaacaatgccagagctgtacgaccttgttaacagctataaacctgatctgatctggnnnnnnggggagtgggaatgttctgatcttantngaacnncncanangcnnnntattgacncnannnnnaccnngnntnnngnnnanannagga

SEQ ID NO: 22590 - DNA, 419 bp, Homo sapiens
  misc_feature (1)...(419): n = a,t,c or g
ttggccctttgantaccagctatgacatgattacgaatttaatacgactcactatagggaatttggccctcgaggccaanaattcggcacgagggttggtgaattgggaacagctctccggaagaggaacatccgctatggactataccactcactcttagagtggttccatccactctatctacttgataagaaaaatggcttcaaaacacagcattttgtcagtgcaaaaacaatgccagagctgtacgaccttgttaacagctataaacctgatctgatctggtctgatggggagtgggaatgtcctgatacttactggaactccacaaattttctttcatggctctacaatgacagccctgtcaaggatgaggtggtagtaaatgaccgatggggtcanaactgntcctgtcacc

SEQ ID NO: 22591 - DNA, 787 bp, Homo sapiens
  misc_feature (1)...(787): n = a,t,c or g
atacgcatttaatacgactcactatagggaatttggccctcgaggccaagaattcggcacgagccaagttcggggtgttcatccactggggccgtgttctcggtgcccgcctggggcagcgagtggttctggtggcactggcagggcgaggggcggccgcagtaccagcgcttcatgcgcgacaactacccgcccggcttcagctacgccgacttcggaccgcagttcactgcgcgcttcttccacccggaggagtgggccgacctcttccaggccgcgggcgccaagtatgtagttttgacgacaaagcatcacgaaggcttcacaaactggccgagtcctgtgtcttggaactggaactccaaagacgtggggcctcatcgggatttggttggtgaattgggaacagctctccggaagaggaacatccgctatngactatacnactcactcttagagtggttccatccactctatctacttgnnaaganaaatggnttcaanacacancattttgtcantgcaaaaacaatgccagagctgtannaccttgttaacagctataaacctgatctganctggtctgatgnggagtgggaatgtcctgatacttantggaactccacagnttttcnttcatggctctacaatgacagccctgtcaangatgangtggnagtaantgaccctggggncagaactgtcctgtcaccatggaggattnataatgtnaagaaaatcaagccacncngcntgcngntcaaaattggtgnntttttnttttttt

SEQ ID NO: 22592 - DNA, 360 bp, Homo sapiens
  misc_feature (1)...(360): n = a,t,c or g
gcttcaataccctgcaagatctggcctttctatatgatgtgtcctgccatgatttctttcatttttttctgctctagacacacagaacttcttgttcctgactcaaagcctttgcacttaactgttctctctgcctggaatgcctgtgccccatgaatctgtacagcatcctccttcctttcttgcatttcttagctcaaaagccacctttcccaatcaccttatcttaaattatactctcttccccaacacactccctatccctgttatatttttctctatatcacttatcactctctcacatactttacattttatttaacttgnttattgcctatccttctctccataaaataaagc

SEQ ID NO: 22593 - DNA, 690 bp, Homo sapiens
acatctatgacatgattacgaatttaatacgactcactatagggaatttggccctcgaggccaagaattcggcacgagaccactgccaataacaaaataactagcaaccatgaagtgggtggaatcaatttttttaattttcctactaaattttactgaatccagaacactgcatagaaatgaatatggaatagcttccatattggattcttaccaatgtactgcagagataagtttagctgacctggctaccatattttttgcccagtttgttcaagaagccacttacaaggaagtaagcaaaatggtgaaagatgcattgactgcaattgagaaacccactggagatgaacagtcttcagggtgtttagaaaaccagctacctgcctttctggaagaactttgccatgagaaagaaattttggagaagtacggacattcagactgctgcagccaaagtgaagagggaagacataactgttttcttgcacacaaaaagcccactccagcatcgatcccacttttccaagttccagaacctgtcacaagctgtgaagcatatgaagaagacagggagacattcatgaaccaattcctttatgagatagcaagaaggcatcccttccctgtatgcacctaaattcttctttgggctgctcgctaatgacaaaataattccatcttgctgca

SEQ ID NO: 22594 - DNA, 409 bp, Homo sapiens
ggtttgaaactgctcgcacttggcttcaaagctggctcttggaaattgagcggagagcgacgcggttgttgtagctgccgctgcggccgccgcggaataataagccgggatctaccatacccattgactaactatggaagattataccaaaatagagaaaattggagaaggtacctatggagttgtgtataagggtagacacaaaactacaggtcaagtggtagccatgaaaaaaatcagactagaaagtgaagaggaaggggttcctagtactgcaattcgggaaatttctctattaaaggaacttcgtcatccaaatatagtcagtcttcaggatgtgcttatgcaggattccaggttatatctcatctttgagtttctttccatggatctgaagaaatacttggat

SEQ ID NO: 22595 - DNA, 347 bp, Homo sapiens
gcaaactgaaaacaattttttttcaaattaaaaacatcatataaaaggcccttcttttaggtctggaactgaaaattctttgaatattaccataaaggaatgtagtcaaatttcttcatttgattaaaaataaaaaggtatatcagccggatgcggtggctcacgcctgtaatcccagtgctttgggaggcaggggccggtggatcacttgaggtcagcagttcgagaccagcctggccaatatggtgaaaccccatctctactaaaaatacaaaaattagctgggtgtggtggcgggcatctgtagtcccagctacttgggaggctgagacaggagaatcacttga

SEQ ID NO: 22596 - DNA, 325 bp, Homo sapiens
cctcattctgcacgacgatgaggtgacagtcacggccctggccaacgtcaacattgggagcctcatctgcaatgtaggggccggtggacctgctccagcagctggtgctgcaccagcaggaggtcctgccccctccactgctgctgctccagctgaggagaagaaagtggaagcaaagaaagaagaatccgaggagtctgatgatgacatgggctttggtctttttgactaaacctcttttataacatgttcaataaaaagcgtcgacgcggccgcgaattccagatctatgaatcgtagatactgaaaaaccccgcaagttcac

SEQ ID NO: 22597 - DNA, 411 bp, Homo sapiens
gagaaagaaagaaatggtttgttaaactcaactgaggtggccttgaagatggggagattgcatcagcagaggctagagatggaaggacttccaggcagtagaaccctgcaaaccaacaagtttctggcctggaaaatgcaagatgtctttagagaactggggagcagtccagttaggcagcagagttgggtgcaagatactaataacatcccatatttggggagtgtcattcccatttgcacactgacttcctgtatcttagaccatactcaggcctcacatacctgcttgatgcctgtctgggctgtgcctacagagattggaagattctgtaagagaaacctggatttctggcttttcttgaaagttccggggttcaaccccaagattcacaatttctgtggatggggc

SEQ ID NO: 22598 - DNA, 384 bp, Homo sapiens
cgtggatatatggtctgtgggatgcattatgggagaaatggttcgccacaaaatcctctttccaggaagggactatattgaccagtggaataaggtaattgaacaactaggaacaccatgtccagaattcatgaagaaattgcaacccacagtaagaaactatgtggagaatcggcccaagtatgcgggactcaccttccccaaactcttcccagattccctcttcccagcggactccgagcacaataaactcaaagccagccaagccagggacttgttgtcaaagatgctagtgattgacccagcaaaaagaatatcagtggacgacgccttacagcatccctacatcaacgtctggtatgacccagccgaagtggaggcgcc

SEQ ID NO: 22599 - DNA, 447 bp, Homo sapiens
gtccagctggggtcctccttgctggtcctcctggctgtgggaagactctgctggcgaaggctgttgcaaatgagtccggactaaattttatatctgtcaagggccccgaattactaaacatgtatgttggtgagagtgaacgtgctgtgcgacaagtttttcaacgagccaagaactcagcaccctgtgtgatattctttgatgaagtggatgctttatgtcctcgaagatcagaccgagagacaggggcaagtgtccgagtggtgaatcagctacttacagagatggatggtctggaagcacgccagcaggtttttattatggcagccactaacaggccagatataattgaccctgcaatcctgcgcccgggccgcctggacaaaacactgtttgtgggtttaccgccccctgcagatcgccttgccatcttaaaaactatcacaa

SEQ ID NO: 22600 - DNA, 483 bp, Homo sapiens
aattcggcacgagcggcacgaggaacgccctggagaagtacggacccctgaagcccctgccacagaccccgcacctggaggaggacttgaaggaggtgctgcgttctgaggctggcatcgaactcatcatcgaggacgacatcaggcccgagaagcagaagaggaagcctgggctgcggcggagccccatcaagaaagtccggaagtctctggctcttgacattgtggatgaggatgtgaagctgatgatgtccacactgcccaagtctctatccttgccgacaactgccccttcaaactcttccagcctcaccctgtcaggtatcaaagaagacaacagcttgctcaaccagggcttcttgcaggccaagcccgagaaggcagcagtggcccagaagccccgaagccacttcacgacacctgcccctatgtccagtgcctggaagacggtggcctgcggggggaccagggaccacttttcct

SEQ ID NO: 22601 - DNA, 404 bp, Homo sapiens
ggagactgcatagggctcggcgtgggtgcggatgccgtcattgtcagagtccaatagcaggatgatgtcccccgccatggcagataccatgtcccagcaggcctcctgtagctcgctaatgacccgtgactttaccatccactgccagcaggccaggaaggaatggaagagacacacaaagaggtgaagacaacgcatcaatcaccaacaccctctgccaatacccagagaaccatgaatgatgaatacattcatttggttaacagttactgagttccaactctgccccagcccagtgctcggtgatgctggagacaggactgagtagtggccaggcctcgccctgccctcatggggatgcagagagtgaccactcagtgtgatgaaggcacacatcttcaggg

SEQ ID NO: 22602 - DNA, 311 bp, Homo sapiens
ggcctgaagacaacagggccccggtgtcctccaaactccaattagagtgattatggaaaacaacctgactcacattgcctgggggcctgcagacatgatgaggggtgactcccatgaacacagaagccaagtagtgaataccacaagagatgttctggaaggcacatatgaaatagaggactctctggaatctgccgaagtgccccacgtggtcataaatcccctcgaagtggcgggaccccatggtgcgggtcgacgcggccgcgaattccagatctatgaatcgtagatactgaaaaaccccgcaagtt

SEQ ID NO: 22603 - DNA, 586 bp, Homo sapiens
tttatgagtttattacggccttaatacgactcactatagggaatttggccctcgaggccaagaattcggcacgagcgccaaggtgctcggtccttccgaggaagctaaggctgcgttggggtgaggccctcacttcatccggcgactagcaccgcgtccggcagcgccagccctacactcgcccgcgccatggcctctgtctccgagctcgcctgcatctactcggccctcattctgcacgacgatgaggtgacagtcacggaggataagatcaatgccctcattaaagcagccggtgtaaatgttgagcctttttggcctggcttgtttgcaaaggccctggccaacgtcaacattgggagcctcatctgcaatgtaggggccggtggacctgctccagcagctggtgctgcaccagcaggaggtcctgccccctccactgctgctgctccagctgaggagaagaaagtggaagcaaagaaagaagaatccgaggagtctgatgatgacatgggctttggtctttttgactaaacctcttttataacatgttcaataaaaagctgaactttaaaaaaaaaaaaaa

SEQ ID NO: 22604 - DNA, 409 bp, Homo sapiens
  misc_feature (1)...(409): n = a,t,c or g
gctttgcagtcaagaggctgaccccttcagttaaagatatttaaggaaaaatttggggtggtgataatatggcttttcacagaaagggtcatgaagccctggcccaacaggactgtggtactaggggctgggatgtggggttaccacatgtgatgagattattccattaagagagaaggacaaacatttctgagagtgtcagccattcttggtagacacctctccactcctcatcccacctctacccatctccatgccacaccttatccagttagacacatacataccaatcattagaagaacaagtttagaaggtgtggaacttgtgcctggctggctgggtagncagctgagcctgttgctgagcccggtggnctggattggagnatggccagggcaggagtacaca

SEQ ID NO: 22605 - DNA, 418 bp, Homo sapiens
gcagctctttactaagtcccaccaattcatgttttcacccttaaaatctttctcactgatactctctctggacagaaaaaaggtgaaataagcctactataaggaatatatgacatgctaaattttatttttaaacggttcttcaagtcagattaaagtaataatagcaaattatgtgattatccatgtcccagcctctctccaaaaaaatagtaaacaagatgtcttcttcttttcccaaagatacacatacacacatgtacaaatttttttatcagataataatagctaatatttaatgagtacttaccttagtttgtcccctttacaacagctttacatctgtgtgattgatacagttcatattcccattttataactgagaaaactggtgcacagagaggataagcaacttgcc

SEQ ID NO: 22606 - DNA, 432 bp, Homo sapiens
ggcgtaggcggccctgagggggtgtgttgcaggggtttccaagcccagcaccagcacccttgcccttttccatcaggggttcagcctagggtccccgctggtgggcggctcccgagtcttggagaagagcacgagaacctagaccgcccccgaagtgcggagaccccctgggcaggctgaaagatggcggcggcgtctgtctctgcggcttctggttctcacttgtcgaacagctttgctgagccatcaaggtctaatggaagcatggttcggcattcttcatctccatatgtagtatatccttcggataagcctttccttaatagtgatctacgacgctccccaagtaagcctacacttgcctatccagaaagcaacagcagagccatattttctgctcttaagaatcttcaagataagattcgacgcttg

SEQ ID NO: 22607 - DNA, 471 bp, Homo sapiens
caaaagaattaggtaaattaacaagtcatcatgagcctgaccaaaacaaaatttgaaattaacctattgggtctggtacttttaaaattgtacagatgtttgtgccttttctttactttgcttatattcttataagcattttttagcagtaatttgtacatattttagaatttgtgtatctgctttgtaataaatgtaatttctttccttttttggacacttggatctaaatgatgtaaagcaaaacagcatcaatatatatgtgaggttgcactaaaacatatttttatatgattaaaactgaacagcttttatgtacagctctgattctgtaatactaatatttatttactttgtttcataaattgtacattttttcttaatgttgtggattgcttttctatgtgaagcatgggatttactgttgcgtaactagaacaaaaatgtcattgtaaacaagatatttaaacg

SEQ ID NO: 22608 - DNA, 452 bp, Homo sapiens
  misc_feature (1)...(452): n = a,t,c or g
cccacgcgtccgcccacgcgtccgctcaccaggtgtatgtgctcaagaggccttatgtggatgagttcctgagacgcatgggggaactctttgaatgtgttctcttcactgccagcctggccaagtatgccgaccctgtgacagacctgctggaccggnngagtcttgcgtgttccaccagggctgctacgtcaaggacctcagccgcctggggagggacctganaaagaccctcntcctggacaactcgcctgcttcttacntattccaccccgagaatgcagngcctgtgcagtcctggtttgatgacatggcagacactgagttgctgaacctgatcccaatctttgaggagctgagctggagcagaggacgtctacaccagccttgggcagctgcgggccccttagcctgcctgcttccaagcgacggcatcncagtaggggactttc

SEQ ID NO: 22609 - DNA, 716 bp, Homo sapiens
  misc_feature (1)...(716): n = a,t,c or g
gagcaaacaccattgctaagtcggatctgctccagtgtctccagtaccagttctaccagatcccagggacctgcctgctcccagaggtgacagaggaagatcaaggaaggatctgtgtggtcattgacctcgatgaaacccttgtgcatagctcctttaagccaatcaacaatgctgacttcatagtgcctatagagattgaggggaccactcaccaggtgtatgtgctcaagaggccttatgtggatgagttcctgagacgcatgggggaactctttgaatgtgttctcttcactgccagcctggccaagtatgccgaccctgtgacagacctgctggaccggtgtggggtgttccggcccgcctattccgtgagtcttgcgtgttccaccagggctgctacgtcaaggacctcagccgcctggggagggacctgagaaagaccctcatcctggacaactcgcctgcttcttacatattccaccccgagaatgcagtgcctgtgcagtcctggtttgatgacatggcagacactgagttgctgaacctgatcccaatctttgaggagctgagcggagcagaggacgtctacaccagccttgggcagctgcgggccccttagcctgccctgcttccaagcgacggccatcccagtaggggactttcccacactgtgcctttacgatcagcgtgacagagtanaanctggagtgcct

SEQ ID NO: 22610 - DNA, 505 bp, Homo sapiens
ggtcgggccctctgcgtccagctgctccggaccgagctcgggtgtatggggccgtaggaaccggctccggggccccgataacgggccgcccccacagcaccccgggctggcgtgagggtctcccttgatctgagaatggctacctctcgatatgagccagtggctgaaattggtgtcggtgcctatgggacagtgtacaaggcccgtgatccccacagtggccactttgtggccctcaagagtgtgagagtccccaatggaggaggaggtggaggaggccttcccatcagcacagttcgtgaggtggctttactgaggcgactggaggcttttgagcatcccaatgttgtccggctgatggacgtctgtgccacatcccgaactgaccgggagatcaaggtaaccctggtgtttgagcatgtagaccaggacctaaggacatatctggacaaggaaccccacaggcttgcaccgaaacgatcaaggatctgatgcccagtttcta

SEQ ID NO: 22611 - DNA, 257 bp, Homo sapiens
ccggacaaactgcccatgacttgtccactgttctatagcaatatactgtattctgcaaatcagaaaaatatgtagttttaataccaaacctactaaaacatctcaaccttgtgctccaataatttatttttattttattttattttattttattttattttattttattttttgagatggagttttgctcttgttgcccaggctggagtgcaatggcgctatcttggctcactgcaacctctacctcccaggttcaa

SEQ ID NO: 22612 - DNA, 433 bp, Homo sapiens
  misc_feature (1)...(433): n = a,t,c or g
tttganacagnttgacatgattacgaatttaatacgactcactatagggaatttggccctcgaggccaagaattcggcacgagcgatccagagacaatggccccgatgggatggagcccgaaggcgtcatcgagagtaactggaatgagattgttgacagctttgatgacatgaacctctcggagtcccttctccgtggcatctacgcgtatggttttgagaagccctctgccatccagcagcgagccattctaccttgtatcaagggttatgatgtgattgctcaagcccaannnnnnnntnggaaaannanttnantcnacttttngnttnntngccngtttntnttnctncttnntgtttntnncntngnttcntnntnatcntttntnnttnnctnnacgnttttatnatgnntttnttgntntttact

SEQ ID NO: 22613 - DNA, 401 bp, Homo sapiens
gagaaaaacagctacagatatgatcattctgtttcaaatgacaaagccctgatggtgctaactgaagaaccattgctttacattcctccacctccttgtcagcccctaattaacacaacagagtctctcaggttaaatcatgaacttcgaggatgggttcatagacatgaagtagaaaggaccaagtcaagaagaatgacaaataatcaacagaaaacccgtattcttcagggtgctctggaacagggctcaaattctcagctgatggctgttcaatacacagaaaccactagtagtatcagcaggaactcagggagtgagctacaagtgtattatgcttcacccagaagttatcaagacttttttgaagccatccgcagaaggggagacacattttatgt

SEQ ID NO: 22614 - DNA, 388 bp, Homo sapiens
ttgacttcaacacctatgacatgattacgaatttaatacgactcactatagggaatttggccctcgaggccaagaattcggcacgagagtgcaggatattatccctattcagcttgtagcactcactgatggcgctgtagatgtcctggacaatgacttaagtagggaacagctaactgagggggaggagattgctcaagaaattgacggaaggttcacaagcatcccctgtagccaaccccagcataaacttgagatctttcacccattttttaaagatgtggtggaaaaaaagaacataatcgaggctactcatatgtacgataatgctgccgaggcctgtagcaccaccgaagaggtgtttaactccccccgggcaggatcaccg

SEQ ID NO: 22615 - DNA, 114 bp, Homo sapiens
tatgactgattacgaatttaatacgactcactatagggaatttggccctcgaggccaagaattcggcacgaggagactgcatagggctcggcgtggtttcctgagcttgaaggg

SEQ ID NO: 22616 - DNA, 566 bp, Homo sapiens
gtcaccatcagcatcttgtctaagacccccattataatattcatgcgctgctttttcatcaaaacctaccctgtcctagagatctatgggcatttggtggatgataatgagcagcccctcccagatagaatgtcaatatttgagcagtaggatattggcatttgttagttaaaggcttaaatcaaaagaatgtccaatggtaggaatttcaaggtgtaggtcagatatttgagaataggggatttttttgatgtgccttaaattataccaaagattactaattattcctctttgcccaaaatacttgcatccaaggttctagtctctgttgctgtgctggtctttagccccactgctggcactgatgtccctccttttcacggagacctatctgaggtacaggatggggctggcaccagatgatgtcccaccacagtccctcacctccggcctccacatgacagaaccaatttacactcaaccatgacctcacccctccttggtttctccctcgatctgtggccctttttggatgtattcttatctaacaacacaattccggaaag

SEQ ID NO: 22617 - DNA, 738 bp, Homo sapiens
  misc_feature (1)...(738): n = a,t,c or g
gatgtgagtacagggaagcagcggccgccatttcagggagcttgtcgacgctgtcgcaggggtggatcctgagctgccgaagccgccgtcctgctctcccgcgtgggcttctctaattccattgttttttttagattctctcgggcctagccgtccttggaacccgatattcgggctgggcggttccgcggcctgggcctaggggcttaacagtagcaacagaagcggcggcggcggcagcagcagcagcagcagcagcaatctcttcccgaacacgagcaccacaggcgcccgaaggccggaacaggcgtttagagaaaatggcagacgatattgatattgaagcaatgcttgaggctccttacaagaaggtgagaaaaaacatgtcggtgaggtttatatatttcttaatttagcattattcacgaaactactgctgaaatgtaaactaacctccccggagcctcttgatttatcttatcagagatgcattacgtgtaacttacaaaagtaaatatatgctattgatgtanaatattgtgcaatagttcactcaacggatgaataatgcaaccancncccttgaaactgcctaannaacccactcaatccaagaatcnctttgatcaatttgaanncaacnaaaagganaattggtngnnaaccggtcctgccccagnnaangncactanattcnccccantngttaaaaagggatntgntggaaaaccggcccaa

SEQ ID NO: 22618 - DNA, 458 bp, Homo sapiens
  misc_feature (1)...(458): n = a,t,c or g
gnngnnngnntnnngtnnnncctntgaanacccttttgaaatgcctacgaatttaatacgactcactatagggaatttggccctcgaggccaagaattcggcacgagatcctggtgctgctgaccgtgctcgcgctgctctcccaccgccgggctctgaagcagaagatctggcctggcatcccgagcccagagagcgagtttgaaggcctcttcaccacccacaagggtaacttccagctgtggctgtaccagaatgatggctgcctgtggtggagcccctgcacccccttcacggaggacccacctgcttccctggaagtcctctcagagcgctgctgggggacgatgcaggcagtggagccggggacagatgatgagggccccctgctggagccggaacccgccagtgaggacctccagggcctggtggcantgtggacattatgggccttggat

SEQ ID NO: 22619 - DNA, 373 bp, Homo sapiens
  misc_feature (1)...(373): n = a,t,c or g
gccttcacggaggacccacctgcttccctggaagtcctctcagagcgctgctgggggacgatgcaggcagccatcattctggtacagccacagctggaagttacccttgtgggtggtgaagaggccttcaaactcgctctctgggctcgggatgccaggccagatcttctgcttcagagcccggcggtgggagagcagcgcgagcacggtcagcagcaccaggatgaccacgaggatgagggagagcgtcaggatgagggggtccaggtcgctaggcgtcagcagcgacacaggctccgaccaggcgctccagaagccgccgaagctcgggtnaccatacgcgcccggacggcnaaggtgtancgccttccgc

SEQ ID NO: 22620 - DNA, 475 bp, Homo sapiens
  misc_feature (1)...(475): n = a,t,c or g
tgnatnccctttnnnnntactgaatccctntcagctatgacatgattacgaatttaatacgactcactatagggaatttggccctcgaggccaagaattcggcacgagatttaaaggagtctctccttcgtggcatctatgcttacggttttgagaagccttccgctattcagcagagagctattattccctgtattaaagatccaaaaggtaattctggcacttggagactatatgggagccacttgtcatgcctgcattggtggaacaaatgttcgaaatgaaatgcaaaaactgcaggctgaagcaccacatattgttgttggtacacccgggagagtgtttgatatgttaaacagaagatacctttctccaaaatggatcaaaatgtttgttttggatgaagcagatgaaatgttgagccgtggttttaaggatcaaatctatgagattttccaaaaactaaacacaagta

SEQ ID NO: 22621 - DNA, 451 bp, Homo sapiens
  misc_feature (1)...(451): n = a,t,c or g
ggaaatcaaaatatttaagggccttcccacccaaggccactccgtgacttcctggacaagaggggaagcccaacccactccccaccctgactactgaggttctgtgcacacgtctctaccttcctgctcaagacactgggtctttccacancctgaagatgaccatggacaagacgggtctcctgctgctcagtgacccagacaaagtgaccatcggcctgttgttctgggatggccgtggggaggggctccggctccttctgcgtgacactgaccgcttctccagccacgttggagggacccttggccagttttaccaggaggtgctctggggatctccagcagcatcagatgacggcagacgcacgctgagggttcagggcaatgaccactctgccaccagagagcgcaggctggattaccaggaggggcccccgggagtggagatttc

SEQ ID NO: 22622 - DNA, 440 bp, Homo sapiens
  misc_feature (1)...(440): n = a,t,c or g
gggagctcttgggcagagatatgggcctggagcctgctggttttcttgttaaccagtgtgacttctgctgggaagagcttctcatccttcaggaccaaaagtattcagtgaacaattggcctggtgcctctctttttgtaccgtgcatccctgtagtaacgtggcctgtcgtgactgaattcttacaaattgtagactggttctgcctaccagtagtcagcagtacagtggtgaccacagacactagcagggtctttgctcatggcaggttctgttcttagtttgttacatggctcgctaatttcttccattcagtccttggngagggaggcaccaatgttgttcttccttaagaacaacagtgcctccttagggcacccaggcatttccagagccatctctgttactattcnngcatggcaccccaaggancanancat

SEQ ID NO: 22623 - DNA, 344 bp, Homo sapiens
ggagagcggcggccgctcacaacatgcacagcctggcgacggctgcgcctgtgcctactacactggcacaagtggatagagaaaagatctatcagtggatcaatgagctgtccagtcctgagactagggaaaatgctttgctggagctaagtaagaagcgagaatctgttcctgaccttgcacccatgctgtggcattcatttggtactattgcagcacttttacaggaaattgtaaatatttatccatctatcaacccacccaccttgacagcacaccagtctaacagagtttgcaatgctctggcattactgcaatgtgtagcatcacatccagaaaccagg

SEQ ID NO: 22624 - DNA, 475 bp, Homo sapiens
gaggaattatctgaagcccagcgataaaatatcagaagctctgaaactcaaaattggtataatataatgggtaaaaactctgcctctggagtcaaaaagacctgagttcaaattaaataatagctgagtgactgagtaaggtacaccccaatctcagttttcttaccagtaaaacagaaatactaaaaggaggccaggtgcagtggctcacgcctataatcccagcactttgggaggctgaggtgagtcgatcacttgaggtcaggagtttgagaccagcctggccaacatggtgaaaccccgtctctactaaaaatacaaaaattagccaggcatggtggcatttgcctgtagtcccagctactcgggaggctgaggcaggagaatcacttgaacctgggaggcagaggttgcagtgagctgagattacaccactgcactccagcctgggtgacagagtgagactccatctcaa

SEQ ID NO: 22625 - DNA, 506 bp, Homo sapiens
accgaactcaatgaggcacttagagatgagaaacgatctgtactgggatttcccagcagaagagactttggtttttgtcatcctgaagttgccactccaccaccagttttatagagggatattcgcttttcactggtagtttattcaggtagctataggtcttgtctttttggatagggcagttaattccactcttacaaccatcaggctcaggaatgggaaagggaactgggacgcccatcaggatgccatgcaccacggccttgctgcttttagactgaatattgctggtgaaggtgacattgacgctgtaagactgtcctttgctcagctggcagggttgggtggggcatgggctcacattcacttcctttataactccatccacagaaccgcagtccttgaactgcaccggttcggcctgggcagcggtgctgagcgccaggagcaggaatgtagctgccaggaaacgcatcgcggataacgaagttccaagctcgggaaag

SEQ ID NO: 22626 - DNA, 719 bp, Homo sapiens
caagttgaatcatgtagctgctggtctcgtttcaccaagtctgaaatcggatacctctagtaaagaagtagaggaagctatgaaaagagtacgagaagcacagtccctaatttctgctgctatagaaccagataagaaagaagaaaaaagaaggcattcaagatcaagatcacgttctaggaggaggaggactccctcatcttctagacacaggcggtcaagaagcagatcgagacggcggtcacattctaagtctaggagtcggcgacgatccaaaagcccaaggcggagaagatctcattccagagaaagaggtagaaggtcaaggagcacatcaaaaacaagagacaaaaagaaagaagacaaagaaaagaaacgttctaaaacaccaccaaaaagttacagcacagccagacgttctagaagtgcaagcagagagagacgacgacgaagaagcaggagtggcacaagatctcctaaaaagcctcggtctcctaaaagaaaattgtcccgctcaccatcccctaggagacataaaaaggagaagaagaaagataaagacaaagaaagaagtagggatgaaagagaacgatcaacaagcaagaagaagaagagtaaagataaggaaaaggaccgggaaagaaaatcagagagtgataaagatgtaaaacaggttacacgggattatgatgaagaggaacaggggtatgacagtgaga

SEQ ID NO: 22627 - DNA, 354 bp, Homo sapiens
gcggcagcagcctggggggctctgactctcccgtcttcgaggcgggagtttttgcaccaccccagcccgtggcagccccccggcgactccccatcttcaatcgcatctctgtttctgagtgacaaagtgactgcccggtcagatcagctggatctcagcggggagccacgtctcttgcactgtggtctctgcatggaccccagggctgtggggacttgggggacagtaatcaagtaatccccttttccagaatgcattaacccactcccctgacctcacgctggggcaggtccccaagtgtgcaagctcagtattcatgatggtgggggatggagtgtcttccgaggttcttgg

SEQ ID NO: 22628 - DNA, 435 bp, Homo sapiens
gactgattacgaatttaatacgactcctatagggaatttggccctcgaggccaagaattcggcacgagagcaccatgagcttcaatactggtactgtcatcaaaggaaaaaagtcacttgttttttgtggagttaagcaggaaaactaagaccaacaagtaaaaaataacaggtaggtcagtttatcacaggccctttctaaggaacactgtcccaagacggactggaggagcttaaaaatccctctggactcaaatttaattattccagttttccccaacttgatcatcatatgaggacttttctttttactagaaatcccttcacctccatcattaaaacacagcctgttttcctaaactaatcaatatgacactattttcctccaatactggatgtacctaaaggctgcagaaggactaatggttaagaaag

SEQ ID NO: 22629 - DNA, 469 bp, Homo sapiens
gccggcggctcggaggaagcccccaccgtgggcagggagcagccggccagcccctggccccaggacctggctgccatactttcctgtatagttcacgtttcatgtaatcctcaagaaataaaaggaagccaaagatgtatttttttaaaagtttaaaacagaagcctgatgctgacattcacctgccccaactctcccctgacctgtgagcccagctgggtcaggcagggtgcagtatcatgccctgtgcaacctcttggcctgatcagaccacggctcgatttctccaggatttcctgctttgggaagccgtgctcgccccagcaggtgctgacttcatctcccacctagcaagcaccgttctgtgcacaaaacccagacctgttagcagacaggccccgtgaggcaatgggagctgaggccacactcagcacaaggccatctgggctcctccagggtgtgtgctcgc

SEQ ID NO: 22630 - DNA, 515 bp, Homo sapiens
aacagctatgacatgattacgaatttaatacgactcactatagggaatttggccctcgaggccaagaattcggcacgagtaacagaaaaagtcttcagtgagttgatgcagctacttagtaggccctttcccttttgtctcttctttattgcttgccttattccataaagtagaaattgtatacattgtgtatctcctgcatcacttttctatgggtgactgatttcccctgcttagaattatccagaggtctcctttatcttcaatgaggaaacatttacctgattttgtttatcacaacctctgcactgaatgagattttatgttcaatacacattcaacagtgtgcacccataagtctataaatgtcttaacagccctggctatacaaaatattttaagcaatgtgaagtcttgcagttgtgttttgcatttcactccccatcttcactttcaggattgttgctatcctttctttatattatacattgaaccgttgtaagtacaattttcct

SEQ ID NO: 22631 - DNA, 803 bp, Homo sapiens
gcatgccttggacacataggtttcctttaaagaggtggtattgtagccagcttatatttgcatctacagccatgtttctagtccagcttggtgtgcaatactagatgagttaataactggtccttgtttctgacctggttcccattgtgtaactgtgttgattgggaaggtagtttgtgagccatgaaatgcttggttcattggttgcttattgacctcattaacctaggacttgaatatcccaaagggtatgctctttaccacattcaactcctaatttatttgtttaggttatgatgtgattgctcaagcccaatctgggactgggaaaacggccacatttgctatttccatcctgcaacagttggagattgagttcaaggagacccaagcactagtattggcccccaccagagaactggctcaacagatccaaaaggtaattctggcacttggagactatatgggagccacttgtcatgcctgcattggtggaacaaatgttcgaaatgaaatgcaaaaactgcaggctgaagcaccacatattgttgttggtacacccgggagagtgtttgatatgttaaacagaagatacctttctccaaaatggatcaaaatgtttgttttggatgaagcagatgaaatgttgagccgtggttttaaggatcaaatctatgagattttccaaaaactaaacaggaagtgaccaaaaaattcatgagagatccaattcgaattctggtgaaaaaggaagaattgacccttgaaggaatcaaacagttttatattaatggtgagagaga

SEQ ID NO: 22632 - DNA, 311 bp, Homo sapiens
  misc_feature (1)...(311): n = a,t,c or g
tggtggcgggcgcccgtaatcccagctactcgggaggctgaggcaggagaatggcgtgaacccgggaggtggaggttgcagtgagccgagattgcgccactgcactccagcctgggagacagtctcgctctgtctcaaaaaaaaaaagaacggaatgtactggagatgtatttgataaccaaggttttaggtaaattttccccagtattagttntatttgcaaactgaaaaatgttgtaggcttaatgtaaaataaccacattagngaacattatatctnttaaaaaaaaggccntattttgctcctgctt

SEQ ID NO: 22633 - DNA, 437 bp, Homo sapiens
ggtgtgagccacggcacctgcccccaaacactcctgactcttcttatcctaaccggggtcatcttactctcctcaccaaaatctgatgtcacctgtatggaggaaagggtgggcctcatggaggggcaggccagggacaaggggactcctgggccccagctgagcccagcccgtttcccctcaagggctgtctccaggaggacacgttctgtaagtgtagtgttcagcagagggtgagtttctgggtcgccgaatccaggcacccttaggaatgggggcctaagagggccttctgacgtgggttctctgctgtgattgtgggcaggtctctcagtactgaagggccccacggtgtggagctcagcaggaaggctgaagttccctgcggtttcctcatggcttaggactcaaatgcaaatgtattctaaagaaaaagg

SEQ ID NO: 22634 - DNA, 464 bp, Homo sapiens
tcgaccttgcccagcttgagaaactacaagatgaagagctggaccccgaatttgtgcaacaagtagcagacttctgttcctacatctttagtaattccaaaactaaaactctttcaggaggcatccaggtcaacgggcctcgtctagagagcctggtgctgacctacgtcaatgccatcagcagtggggatctgccgtgcatggagaacgcagtcctggccttggcccagatagagaactcagctgcagtgcaaaaggctattgcccactatgaacagcagatgggccagaaggtgcagctgcccacagaaagcctccaggagctgctggacctgcacagggacagtgagagagaggccattgaagtcttcatcaggagttccttcaaagatgtggccatctatttcaaaaggagttagcggccagctagaaaaaaagcgggatgacttttgtaaacagaatca

SEQ ID NO: 22635 - DNA, 507 bp, Homo sapiens
  misc_feature (1)...(507): n = a,t,c or g
ggattggcagtgcaggaactggcaaatcatgtctccttcatcagttcattgagaataagttcaaacaggactccaaccacacaatcggcgtggagtttggatcccgggtggtcaacgtgggtgggaagactgtgaagctacagatttgggacacggctggccaggagcggtttcggtcantgacgcggagttattaccgaggggcggctggagccctgctggtgtacgacatcaccagccgggagacatacaactcactggctgcctggctgacggatgcccgcaccctggccagccccaacatcgtggtcatcctctgtggcaacaanaaggacctggaccctgagcgggaggtcactttcctggaggcctcccgctttgcccaggagaatgagctgatgttcctggagaccatcgctctcactggcgagaacgtggangaggcntcctcaagtnttgncgcactatcctcaacangattgaccaagcgagctanacccggngagg

SEQ ID NO: 22636 - DNA, 414 bp, Homo sapiens
gtgataatcaactcacgctttgtaaaaggagacatcagcactaaatttctctccgatgtgtatcctgatggcttcaaaggacacatgctaaccaagagtgagaagaaccagttattggcaatagcatcatcattgtttgtggcattccagttaagagcacaacattttcaagaaaattcaagaatgcctgttattaaaccagacatagccaactgggagctctcagtaaaattgcatgataaagttcataccgtagtagcatcaaacaatgggtcagtgttctcgaatatctttggaaggagccacaagaaactgggacccatggttgcctgtgagttggggagctggagggctgactccataacaagtgagaaggatacatctcttagatcgaaacttctgcagtgacttggc

SEQ ID NO: 22637 - DNA, 469 bp, Homo sapiens
gtgcgaaggtgatgtgatgttggcaaagtcatcaagctggacagagatggattgcatgatctcaatgtgcagtgtgactggcagcagaaagggggcatctactggtttaggtacattcatgtggaacttataggctatcctccaccaagaagttcttctcacatcaagattggtgataaagtgcgggtcaaagcctctgtcactacaccaaaatacaaatggggatctgtgactcatcagagtgtgggggttgtgaaaggtgtgatggatgtcagatgtttcctatcaatggatccagattcaaatgcagaaactgtgatgaccttgatttttgtgaaacgtgtttcaagaccaaaattcacaataccacgcatacatttggcagaataaatgaaccaggcttcagcagaagaaacacttcctataaatctcgcccaaacaggaaaggtaagtggcctaaaatttttct

SEQ ID NO: 22638 - DNA, 414 bp, Homo sapiens
ggtagaccctgcactcaatgtgcttaccctgtaggagcagagacagataagtcagatttcagtctggggcaggtggagccatgatgaagccttccccacacttgtgagaccactttgggagatgggaggcatccccgagctgggtcagcttgaacccaccagcaggggtgagcaggtcttctgcatacagggttttcagagacaccgggctggcccgagacacctgagctgcatcagagaacaataggttctggggcctgctgcggctgaggtgccgggtgggcacgcagctgggggcacccaacaatgaccaccagggcactagtgttcatcgggtaccaccccgtgtgccagggaatgtggactcagtgcctgcatgtcccttgctccgtgcaagcagaccacgtctgtgct

SEQ ID NO: 22639 - DNA, 546 bp, Homo sapiens
caaggtttgcagatctgctgacttatataaagctttttgattcctactaagctttaagatttaaaaaatgttcaatgttgaaatttctgtggggctctatttttgctttggctttctggtgagagagtgaggaagcattctttccttcactaagtttgtctttcttgtcttctggatagattgattttaagagactaagggaatttacaaactaaagattttagtcatctggtggaaaaggagactttaagattgtttagggctgggcggggtgactcacatctgtaatcccagcactttgggaggccaaggcaggcagaacacttgaaggagttcaagaccagcgtggccaacgtggtgaaaccctgtctctactaaaaatacaaaaattgtttagctctgtttttcataatagaaatagaaaaggtaaaattgcttttcttctgaaaagaacaagtattgttcatccaagaagggtttttgtgactgaatcagcagtgcctgccctagtcatagctgtgcttcaaaaacctcagcatgattagt

SEQ ID NO: 22640 - DNA, 421 bp, Homo sapiens
ggaagcaatggaagcattggcatcaactgaaaaaatgctgcaggacaaagtgaacaagacttccaaggaaaggcagcaacaggtggaagctgttgagttggaggctaaagaagttctcaaaaaattatttccaaaggtgtctgtcccttctaatttgagttatggtgaatggttgcatggatttgaaaaaaaggcaaaagaatgtatggctggaacttcagggtcagaggaggttaaggttctagagcacaagttgaaagaagctgatgaaatgcacacattgttacagctagagtgtgaaaaatacaaatccgtccttgcagaaacagaaggaattttacagaagctacagagaagtgttgagcaagaagaaaataaatggaaagttaaggtcgatgaatcacacaagactattaaacag

SEQ ID NO: 22641 - DNA, 1035 bp, Homo sapiens
agcgatagctgagtggcggcggctgctgattgtgttctaggggacggagtaggggaagacgtttgctctcccggaacagcctatctcattcctttctttcgattacccgtggcgcggagagtcagggcggcggctgcggcagcaagggcggcggtggcggcggcggcagctgcagtgacatgtccagcatgaaccccgaatatgactacctgtttaagctgcttttgattggcgactcaggcgtgggcaagtcatgcctgctcctgcggtttgctgatgacaacttcaacaacacttacatcagcacaattggtgtggatttcaaaataagaactatagagttagacgggaaaacaatcaagcttcaaatatgggacacagccggtcaggaacggtttcggacgatcacaacggcctactacaggggtgcaatgggcatcatgctggtctacgacatcaccaacgagaagtccttcgacaacatccggaactggatgaaaagcatcaaggagaatgcctcggctggggtggagcgcctcttgctggggaacaaatgtgacatggaggccaagaggaaggtgcagaaggagcaggccgataagttggctcgagagcatggaatccgatttttcgaaactagtgctaaatccagtatgaatgtggatgaggcttttagttccctggcccgggacatcttgctcaagtcaggaggccggagatcaggaaacggcaacaagcctcccagtactgacctgaaaacttgtgacaagaagaacaccaacaagtgctccctgggctgaggaccctttcttgcctccccaccccggaagctgaacctgagggagacaacggcaagagggatgagcaggggagaaatagcagaggggcttggagggtcacataggtagatggtaaagagaatgaggagaaaaaggagaaaagggaaaagcagaaaggaaaaaaaggaagagagaggaagggagaagggagaggaatgaattgaggaagtgaaagaaggcaaggaggtaggaagag

SEQ ID NO: 22642 - DNA, 437 bp, Homo sapiens
ggctggatttagcaaagatcatttttaaaaggcaagaaacattaagaagcacagctttatgctgcccaggcacatcttaaactcggagaagttagtgttgaatctgaaaactatgtgcaagctgtggaggagttccagtcctgccttaacctgcaggaacagtacctggaagcccacgaccgtctccttgcagagacccactaccagctgggcttggcttatgggtacaactctcagtatgatgaggcagtggcacagttcagcaaatctattgaagtcattgagaacagaatggctgtactaaacgagcaggtgaaggaggctgaaggatcgtctgctgaatacaagaaagaaattgaggaactaaaggaactgctacccgaaattagagagaagatagaagatgcaaaggagtctcagcgtagtgggaatgtagc

SEQ ID NO: 22643 - DNA, 432 bp, Homo sapiens
  misc_feature (1)...(432): n = a,t,c or g
ggcggcggcggaggctgccatggacgacgaggaggagacgtaccggctctggaaaatccgcaagaccatcatgcagctgtgccacgaccgtggctatctggtgacccaggacgagcttgaccagaccctggaggagttcaaagcccaatttggggacaagccgagtgaggggcggccacggcgcacggacctcaccgtgctggtggcccacaacgatgaccccaccgaccagatgtttgtgttctttccagaggagcccaaggtgggcatcaagaccatcaaggtgtactgccagcgcatgcaggaggagaacatcacacgggctctcatcgtggtgcagcagggcatgacaccctccgccaagcagtccctggtcgacatggcccccaagtacatcctggagcagtttctgcancaggagctgctcatcaa

SEQ ID NO: 22644 - DNA, 850 bp, Homo sapiens
  misc_feature (1)...(850): n = a,t,c or g
gtgaccgggtcatgacggtgtccttccacaaatacggaaattacttcttccctggcacaggtgacatgtatgaagtcggggcagagagtggccgctactactgtctgaacgtgcccctgcgggatggcattgatgaccagagttacaagcaccttttccagccggttatcaaccaggtagtggacttctaccaacccacgtgcattgtgctccagtgtggagctgactctctgggctgggatcgattgggctgctttaacctcagcatccgagggcatggggaatgcgttgaatatgtcaagagcttcaatatccctctactcgtgctgggtggtggtggttatactgtccgaaatgttgcccgctgctggacatatgagacatcgctgctggtacaanangcattantgaggacttccctatagtgaatacttcgagtactttgccccagacttcacacttcatccagatgtcagcacccgcatcgagaatcagaactcacgccagtatctggaccagatccgccagacaatctttgaaaacctgaagatgctgaaccatgcacctagtgtccagattcatgacgtgcctgcagacctcctgacctatgacaggactgatgaggctgatgcagaggagaggggtcctgaggagaactatagcaggccagaggcacccaatgagttctatgatggagaccatgacaatgacaaggaaagcgatgtggagatttaagagtggcttgggatgctgtgtcccaaggaatttcttttcacctcttggttgggctggagggaaaaggagtggctcctagagtcctgggggtcaccccagggcttttgctgactct

SEQ ID NO: 22645 - DNA, 330 bp, Homo sapiens
gagctttttaaaaaaatctccccagtagagaaacatttggaaaagacagaaaactaaaaaggaagaaaaaagatccctattagatacacttcttaaatacaatcacattaacattttgagctatttccttccagcctttttagggcagattttggttggtttttacatagttgagattgtactgttcatacagttttataccctttttcatttaactttataacttaaatattgctctatgttagtataagcttttcacaaacattagtatagtctcccttttataattaatgtttgtgggtatttcttggcatgcatctttaattcctt

SEQ ID NO: 22646 - DNA, 391 bp, Homo sapiens
  misc_feature (1)...(391): n = a,t,c or g
gaactggaagagacagaacacaggagacctacagaggggctcccttggagtatttagctgactactgggtaagggcatctgtgtgaggaaagagcctgaggctatgacccatttgaaagggttagaggtaactatacctggtgctcacacaaggccagggaatgtgcctgttcccacaaggcaaggttgaaactctcaattcatgggacactgttgagtacaggagacatcttgcctcncctagactgtgaattgtanggctgntaacccataataaattcngaccacnatnatnnactgtnccaaggnacttaactgtattccagaataaagcatggcaannttttaaggaattcnacnatttncaatggcancgagacaaaattccatt

SEQ ID NO: 22647 - DNA, 467 bp, Homo sapiens
ccttacatgattacgaatttaatacgactcactatagggaatttggccctcgaggccaagaattcggcacgagaactggaagagacagaacacaggagacctacagaggggctcccttggagtatttagctgactactgggtaagggcatctgtgtgaggaaagagcctgaggctaagacccatttgaaagggttagaggtaactatacctggtgctcacacaaggccagggaatgtgcctgttcccacaaggcaaggttgaaactctcaattcatgggacactgttgagtacaggagacatcttgcctcaaaagcatggaataattagtcctagactgtgaattgtagggctgcctaacaaataataaattcaagaccacaaaagataaaactgtttccaagtaacttaactgtatcccagaataaagcatgggaagtttttaaggaatacaaaaatatccaatgc

SEQ ID NO: 22648 - DNA, 680 bp, Homo sapiens
  misc_feature (1)...(680): n = a,t,c or g
ggtggcaaacaactgtaatccgagctactagggaggctgaggcagaagaatcgcttgaacccaggagacagaggttgcagtgagccaagattgcaccactgcactccagcctgggcgacagagtgagaccctgcctcaaaaactaaaaataaaaaatgaacagtgtccaacaccttgaaagcattccgcatgactgaacgatcactgttacgtgattaccaacatgacgaccccacttctcttggccaaactgagttctcttctcttgtaaaaacttctgcatatgaagtcacccattccatttgactctttagccctcatcctggcattcaagggcatggacgactcaaccccactctctagccagcctgacctctccattcccttctctggcgtagaggccactcncaccacctgcccttaccccctgcccacttttgtcagcctgtactgtgttgaagctcccaggagagacaactgcagtcatcactttccactgtgttcantgatgtcagttcggcccagctggaggtattcacatcatggaaacagaccatcagatttggtgtgtgtgtgttttattttgctttttcagagagccagctgttaaacactagccaacaccccattgatgctgttccttctacctgaaacacctcgcattgccgctgctccctcta

SEQ ID NO: 22649 - DNA, 456 bp, Homo sapiens
  misc_feature (1)...(456): n = a,t,c or g
tgganaccttgatgacctgattacgaatttaatacgactcactatagggaatttggccctcgaggccaagaattcggcacgaggaggttttgttcattccttttcattcttttttctctcaccttgtctgcctgtcttatttcagcaagatagtcttcaagccctgagattctttcctctgcttagtctcttcagctattgatatttgtggttgcattgtgaatttcacattgtgtttttcagctccatcacattgtttatgttcctttttaaacgggttattctggttaacagctcctataatgttttatcatggttcttggcttctttgcattgggttagaacattactccttttgctcagcaaagtttgttactgcccagcttctaaagcctacttctgtcagtgcatccatctcagcctcagcctcagcccagttctgtgcccttgctggaa

SEQ ID NO: 22650 - DNA, 422 bp, Homo sapiens
  misc_feature (1)...(422): n = a,t,c or g
ggngnntnnctttgancttgannaccgctatgacatgattacgaatttaatacgactcactatagggaatttggccctcgaggccaagaattcggcacgagctcaaatgaaagactgtctcctcgtgggagagcacctggggccatcagaaatgtcttttcatctttttctggaggagacgaatgatagggcctggtttacattcatttaactctttatgaccttcactcagctgtggatttgggggcactttgtgggagacttggcttttttttttcttctggttggaanaacctaaattagcgaangtttttcacaaaangtattgttcaggatgtgagcgtggcaaatttgtccgtgttctgtttaatgacctctttaaaggtactgngtactctttaatagggatatcatgtaccagg

SEQ ID NO: 22651 - DNA, 390 bp, Homo sapiens
  misc_feature (1)...(390): n = a,t,c or g
gtgcactcttggaagatcccgcatgggttcgaggtgaggccgcttcagaacctcaaatgaaagactgtctcctcgtgggagagcacctggggccatcagaaatgtcttttcatctttttctggaggagacgaatgatagggcctggtttacattcatttaactctttatgaccttcactcagctgtggatttgggggcactttgtgggagacttggcttttttttttcttctggttggaaaaacctaaattagcgaatgtttttcacaaaatgtattgttcaggatgtgagccgtggcaaatttgtccgtgttctgtttaangacctctttaaaggnactgggtactctttaatagggatatcatgtnccaggngcccaatanannctga

SEQ ID NO: 22652 - DNA, 638 bp, Homo sapiens
actaacttggcattcttgtccagaagatgaagctcaataattgttcacattgttcttttatatatatttatatatatatataaaaattgggtcttagattttgatttactagtgtgacaaaataactacatcctaatgaaaatcaagtttgatatgtttgttttgaaagtagcgttggaagagttgttgggggttttttgcatccatagcactgggtactttgaacaaataaataaaagctttctgtagttgcttcctttatcagaaaagaacatttgataccatggtatatcatttcctcttcattaaagaacagcttttctaaatgttgggggaaatgtccatagtcattactcagtcaaaacttgtgttctcatgagcctaaggaccattctagatttattacgtgttttgtgtgtgtgtgtgtgtgtgtgtgtgtgtgtgtatccataaaatgcatatgtaaatttttttttgtttttaagcattcacccaaacaaaaaaatcacaggtaaacccatgtttctgagatgccattattccaagcaaaataagagataatcccttcaagttaaattgaaaattttcctgaaaccatacatttcaagtgaaataagtaattctagataggacaattt

SEQ ID NO: 22653 - DNA, 462 bp, Homo sapiens
gagaaaaaataaagatgctgtaagaaggccccaggcagatccagctttattaaccccaaggtccccagttgttactataatgggccatgttgatcacgggaaaacgacattacttgacaaatttcgaaaaactcaagtggcagcagtggaaactggaggcatcactcagcacattggtgcctttcttgtctctctgccttctggggaaaagataacttttcttgatactccaggacatgctgctttctcagcaatgagagccagaggtgctcaggtcactgacattgtcgtattggttgtagctgcagatgatggagtgatgaaacaaactgtagaatctattcagcatgccaaagatgcacaggttcctattatccttgccgtaaataaatgtgacaaagctgaggctgatcctgagaaagtgaaaaaagagctgctggcttacgatgtggtatgtgaaga

SEQ ID NO: 22654 - DNA, 486 bp, Homo sapiens
  misc_feature (1)...(486): n = a,t,c or g
gnngnnnnnnnntttganaccctatgatttgattaccaatttaataccgactcactatagggaatttggccctcgaggccaagaattcggcacgagctttcttctacttgattgaatcagctattgaagcttgtgcatgcatcacgtagttctcatgccatggttttcagctccatcaggtcatttaaggtcttctctacgctgtttattctagttagtcattcgtctaaccttttttcaaggtttttagcttccttgtgatgggttagaacatgcttttttaactcggagaagtttattattaccgaccttctgaagcctacttctgtcaactcgtcaaactcattctccatccatctttgttccattactggcaaggagctgtgatcttttggtggagaagtggcgctctggtttttagaattttcagcttttctgctttggtttctccccatctttgnggttttatcttcctttggctttgat

SEQ ID NO: 22655 - DNA, 750 bp, Homo sapiens
ctgagatggagccattacattgagccagtaattgaaaataaggtggccagatgcgctggctcatgcccataatcccagcactgtgggaggcagaggtgggtggaatcacttgagcccagcaatttgagaccaacctgggcaacataagaagaccccatctgaataacatgttgcccagtcagtttctcttcctggattcagaagtctttcatggtaggtccagaatgaaaggtgatgtctggtgctcaggtgtgttgaggtccccatgcctggactatgggtgctgagtgggatttacttgtccatccattttctatattccagcactgggaaactagggacagtacttgttctcaagggaatcttcagcttaggtggctcttttaataacaaaaaaatcctttccttctaaagtaacatcctctcaaggccaggaattccattagtagaaagccttcctaaaaaacaaaattcctggcctggcatgggttcacatctgtaatctcagcactctgggaggccgaggcgggaagatcacttgacgtcaggagtttgagactggcctggccaacatggtgaaaccccatctccactaaaaatacaaaaattagcctggtgtggtggtgggcacctgtaatcccagcaacttgggaggctaaggcaggagaatttcttgaacccaggaggcagaggttgcagtgaccagcaaggttgcgccattgcaccccagcctgggcgataagagtgaaa

SEQ ID NO: 22656 - DNA, 331 bp, Homo sapiens
cgagggttatttatttgctttttagcccaatttaaagttttagtgtgaaaacttaatttttaaaagtttactcataagcttatcaaattaaagcatattttatagagaactacattatagtctagatttttctttctcaaatttctcaacctcatgccatctactgtatgtccacttgtaccaaaaaaggaagaaaatcccagctactcaggaggctaaggcaggagaatggcatgaacccaggaggcagagcttgcagtgagccaagatggcgccactgcactccagcctgggcgacagagcgagactccgtctcaaaaaaaacaccacc

SEQ ID NO: 22657 - DNA, 430 bp, Homo sapiens
gttctctgaagaatgtataatggacgtcattggatgtttagaatatgatcctgctttatcacaaccacgaaaacacagggaatttctaacaaaaacagccaagtttaaagaagtgattcccatatcagatcctgagctgaaacaaaaaattcatcagacatacagagttcagtatatacaagatatggttctaccaactccttcggtctttgaagaaaacatgttatcaacacttcactcttttatctttttcaataaggtagagattgttggcatgttgcaggaagatgaaaaatttctgacagatttgtttgcacaactaacagatgaagcaacagatgaggaaaaaagacaggaattggttaactttttaaaagaattttgtgcgttttcccaaacgctacagcctcaaaacagagatgcttttttc

SEQ ID NO: 22658 - DNA, 550 bp, Homo sapiens
  misc_feature (1)...(550): n = a,t,c or g
gtataaacccaaggcacagtcacatacccagggatacaagacactgcagactcccgagagacataacacagaattgcaccatgccaaactacaaactcacttattttaatatgagggggagagcagaaattattcgttacatatttgcttatttggacatacagtatgaagaccacagaatagaacaagctgactggcctgaaatcaaatcaactctcccatttggaaaaatccccattttggaagttgatggacttactcttcaccagagcctagcaatagcaagatatttgaccaaaaacacagatttggctggaaacacagaaatggaacaatgtcatgttgatgctattgtggacactctggatgatttcatgtcatgttttccttgggcagagaaaaagcaagatgtgaaagagcagatgttcaatgagctgctcacgtataatgcgcctcatcttatgcaagacttggacacatatttaggggggagagaatggcttattggtaactctgtaacttgggcagacttctactgggaganttgcag

SEQ ID NO: 22659 - DNA, 461 bp, Homo sapiens
gcctgcgtggctgggctgctcgggttagatcgtcaggaaaagcctaaagattagactgtaagaaaagaaaatagaagccatgtttcgaagacctgtattacaggtacttcgtcagtttgtaagacatgagtccgaaacaactaccagtttggttcttgaaagatccctgaatcgtgtgcacttacttgggcgagtgggtcaggaccctgtcttgagacaggtggaaggaaaaaatccagtcacaatattttctctagcaactaatgagatgtggcgatcaggggatagtgaagtttaccaactgggtgatgtcagtcaaaagacaacatggcacagaatatcagtattccggccaggcctcagagacgtggcatatcaatatgtgaaaaaggggtctcgaatttatttggaagggaaaatagactatggtgaatacatggataaaaataatgtgaggcgac

SEQ ID NO: 22660 - DNA, 421 bp, Homo sapiens
gattcattgcatgcaggtacataaagaaacaatagatgccgtaccaaatgcaatacctggaagaacagacatagagttggaaatatatggtatggaaggtattccagaaaaagacatggatgaaagacgacgacttcttgaacagaaaacacaagaaagtcaaaaaaagaagcaacaagatgattctgatgaatatgatgatgacgactctgcagcctcaacttcatttcagccacagcctgttcaacctcagcaaggttatattcctccaatggcacagccaggactgccaccagtaccaggagcaccaggaatgcctccaggcatacctccattaatgccaggtgttcctcctctgatgccaggaatgccaccagttatgccaggcatgccacctggaatgatgccaatgggtggaatg

SEQ ID NO: 22661 - DNA, 509 bp, Homo sapiens
  misc_feature (1)...(509): n = a,t,c or g
gctccaacagacctgcagctgagggtcctgtctgttagaaggaaaactaacaagcagaaaggacatccacaccaaaaacccatctgtacatcaccatcaaagaccaaaagtagataaaaccacaaagatggggaaaaggaaaaaacagagcagaaaaactggaaactctaaaaagcagagtgcctctcctcctccaatggaacgcagttcctcaccagcaacgtaacaaagctgggcagagaatgactttgacgagttgagagaagaaggcttcagacgatcaaactactccgagctacaggaggaaattcaaaccaaaggcaaacaagttgaaaattttgaaaataatttagacgaatgtataactagaataaccaatacagagaagtgcttaaaggagctgatggagctgagagccaaggtcgagaactacgtgnagaatgcanaagcctcaggagccgatgcatcaactggaagaaanggtatcantgtggangatgacatgatga

SEQ ID NO: 22662 - DNA, 529 bp, Homo sapiens
ataatcgtgaatcccttttatgacctgattacgaatttaatacgactcactatagggaatttggccctcgaggccaagaattcggcacgagccgatccctagtaatacctacaattcatgtcttccagtcaacagtttcacgctatttcactctcaattagagtcttattaaaaacttcagttctcatcttgacagttattggtctccttgatcaatctttttcttcaagccttcaagctccaaattgattgtggccacacttgcatgcacttttggagacagaatctctgtctcttaccccccaccctgcccacaccaagacggaatctcactctgtcgcccagtctggagtgcagtggcacaatctgggctcaccgcaagctccgcctcccaggttcacaccattctcctgcctcagccacccgaggagctgggactacagttgcccgccaccacgcctggctaattttttgtatttttagtaagagacggggtttcaccatgttagccaggatggctcatcttctg

SEQ ID NO: 22663 - DNA, 676 bp, Homo sapiens
cccatgcctcaggctctggtttgagatcgtgctggggaggaacatggccactaccccttatcccatcggccatgtgggaggtatgaccctggtgcctggcaggttctccctctgccctccactgggcccagtggctcagggacctggggaaaggagatggagcagctcttgggatcctttggggaaaaggaggccattctgggccccttggcaaacctcaccactcacagaggctcctggccttgatccctgcccctccaggtgtccagggtaaagtgtaactcagaccgacctgtggggcacagggggcaccagctggccttgccctctctggtctgggctgtctgccttcctcactgtatctttgcccagacccacctgggccagtaggcccctgtccccagccacacaccttagatgctggcatgccttactccaggtgcctgtgtttggccgaagcctgtgtgattcccggtctgcaccacatggcggggttggggggccgctggaggccacctgccaaggcgtgggatgggatggtcctgccggtttaggccgtgattctggaaaaccttggatgggccttcgtcctatgtcagccttccctttgatcctcaggccctacctgtagagacctccactcctagagccagtctcagggtctgggatttccctg

SEQ ID NO: 22664 - DNA, 413 bp, Homo sapiens
ctcattaaatcagttatggttcctttggtcgctgtgtcgtcctggggcacactgtctccttcactgtgaagctcacaggctttggcgtgtctgggtccccatacaccgcttcaccagcccgtccttcttgaagtcacaatcctctggtgactgctgtgtcgtcctggggcacactgtctccttcactgtgaagctcacaggctttggcgtgtctgggtccccatccatcgtgggcctggggtccaggtccaggaggcggtagaggttagcatccgaggaccgctggttgatgccatctatagcacgaagcacagcttccttgtagctgaggacctgggcaatgatggccagaggcatcaccaggcccagcagcaggagcaccagtgaccaccgccccagggagtggccatccc

SEQ ID NO: 22665 - DNA, 366 bp, Homo sapiens
  misc_feature (1)...(366): n = a,t,c or g
ggagctccataagaactgtgctgacttggaaggtgccctgtgctatgtcgtgcctgcagggacacgtcggatcccgtgggcctcacatgccaggtcaccaggtcaccgtctccttccacccctgcagtgtgctgttgtgcacgtcagggacgctgttctctatgcccactgccctcctccctctcctggcccagcagtattgctcacgggggctccagcagccggcgtggccctcatgagctacgcctgggtcttctgcagactcatgcagccctatggccgctcagaccaaggcgcagagcaactatcagggcagctctgcctcctcctcccatgangtggggagaggcaacagggcagccccca

SEQ ID NO: 22666 - DNA, 609 bp, Homo sapiens
tctatgacatgattacgaatttaatacgactcactatagggaatttggccctcgaggccaagaattcggcacgaggcacacttggcagcattgggcagtggggtggtaagtgctgctgagggaggactgtggggtgtgggggctgctagtagctgagtcttcgccttggccctgggctcactggtgttggggttatcctgtttggctgatgcctgggtatctgaatagggacaccccataggtgttgcttcttagttgtgctgagaacttcagaatagggttatactgagaagtttcaagacttcaatgcaaagaaaaggacagggatggaaaaccatctgagataagcagcagtgggtttagttgtacgtggtccctgcttaggtctcattaacgtgttttctgaggtacatacacacatatgactttgcttatcatccctgtgtcctgcatggagttctggaaagataactaatttggtatattagctggcagctacagcacagtcactgatttttcccctctttctttttcccagctgacaccttggtttcaccagttgctcattaaagctggaaagtggtgtctgcagaagttttttgtttttgg

SEQ ID NO: 22667 - DNA, 773 bp, Homo sapiens
gggtgttctctgtatttcctgaatttgaatgttggcttgtcttgctaggttggggaagttttcctggataatatcctgaagagtgttttccacttgtttcgattctccccgtcactttcaggtacatccatcaaacgtaggtttggtcttttcacatagtcccatatttcttggaggctttgttcattccttttcattcttttttctctaatcttgtcttcctactttatttcattaagttgatcttcaatctctgatatcttttcttctgcttgatcgattcagctattgaagcttgtgtatgcttcatgaagttctcatgctgtgtttttcagctccatcaggtcatttaaggtcctctctaaactggttattctagttagcagttcctgtaactttagctcagaggagtttgttattactgaccttctgaagcctacttctgtcaacttgtcaaactcattctctgtccagctttgtgcccttgctggcaaggagctgtgattctttggataagaggcactctggtttttggaattttcagcttttctgctctggtttctccccatctttgtggttttatctacctttggactttgatgttggtgacctacagatggggttttggtgtagatgtgctctttgttgatgttgatgctattcctttctgtttgttaattttccttctaagagtcaggtccctcagctgcaggtctgttggagtttgctgaaggtccactccagaccctgtttgcctgggtatcaccagtgga

SEQ ID NO: 22668 - DNA, 502 bp, Homo sapiens
gagcaaatctgaaccaggcagccaggtagaccaccactctgatggccccattcaagcttcttcccaccttatttagctccaagagttcagttgtgctctgtggaacactaggaataactgtatcctagacataaaccaagggcaagacatggttttagtttccatgagggcctttgcttaagagtcagaagggctgctacacatcttaattttgccactgaatagctatgtgataccaggcctttgacataagcagttaagttagaggactccagagggcctgtccagctcttacataagtctaaattccacctgtgatttcataggatccttaagtaagcattccacttctatgggcctcattttctgcccctattaaacaaagacatggctcttgagagcctgtttaaagcaggtttttgaaaagaaagtctcaagtcaaagaaattttgaaatggatttagattaaaaggtatttttgtgtgtgtggagaatgtgggat

SEQ ID NO: 22669 - DNA, 375 bp, Homo sapiens
ggcctatgtaactgtttgcaaccagtgtggcagagagtctaagcttttgtcaaaattttatgagctggagttaaatatccaaggccacaaacagttaacagattgtatctcggaatttttgaaggaagaaaaattataaggagacaatcgctatttttgcgagaactgtcaaagcaaacagaatgcaacaagaaagattcgacttcttagccttccttgcactctgaacttgcagctaatgcgttttgtctttgacaggcaaactggacataagaaaaagctgaatacctacattggcttctcagaaattttggatatggagccttatgtggaacataaaggtgggtcctacgtgtatgaactcagcgcagtcct

SEQ ID NO: 22670 - DNA, 452 bp, Homo sapiens
  misc_feature (1)...(452): n = a,t,c or g
tttggaaanccctatgacntnattacgnntttaatacgactcactatagggaatttggccctcgaggccaagaattcggcacgagccagcgactggacaagctgaggaagaatgccttcgccagtgtcatcctttttggaaccaacaatagcagctccatttctggagtctgggtcttccgaggccaggagcttgcctttccgctgagtccagattggcaggtggactacgagtcatacacatggcggaaactggatcctggcagcgaggagacccagacgctggttcgagagtacttttcctgggagggggccttccagcatgtgggcaaagccttcaatcagggcaagatcttcaagtgaacatctcttgccatcacctagctgcctgcacctgcccttcagggagatgggggtcattaaaggaaactgaacattgaaaaaaaaaaaaaa

SEQ ID NO: 22671 - DNA, 464 bp, Homo sapiens
  misc_feature (1)...(464): n = a,t,c or g
ttggaancctttgaaatccctntgacatgattacgaatttaatacgactcactatagggaatttggccctcgaggccaagaattcggcacgaggcgggccgctgaataagcttccaaaatgatgcccacaccagttatcctattgaaagaggggactgatagctcccaaggcatcccccagcttgtgagtaacatcagtgcctgccaggtgattgctgaggctgtaagaactaccctgggtccccgtggcatggacaagcttattgtagatggcagaggcaaagcaacaatttctaatgatggggccacaattctgaaacttcttgatgttgtccatcctgcagcaaagactttggtagacattgccaaatcccaagatgctgaggtgggtgatggcaccacctcagtgacttgctggctggcaaagtttttgaagcaggngaaaccctatgtggangaaggtt

SEQ ID NO: 22672 - DNA, 586 bp, Homo sapiens
tatgattgattaccaatttaatacgactcactatagggaatttggccctcgaggccaagaattcggcacgagcggtctcggagaagaggggagagtggagggccgctgaataagcttccaaaatgatgcccacaccagttatcctattgaaagaggggactgatagctcccaaggcatcccccagcttgtgagtaacatcagtgcctgccaggtgattgctgaggctgtaagaactaccctgggtccccgtggcatggacaagcttattgtagatggcagaggcaaagcaacaatttctaatgatggggccacaattctgaaacttcttgatgttgtccatcctgcagcaaagactttggtagacattgccaaatcccaagatgctgaggtgggtgatggcaccacctcagtgaccttgctggctgcagagtttctgaagcaggtgaaaccctatgtggaggaaggtttacacccccagatcatcattcgagctttccgcacagccacccagctggcagttaacaagatcaaagagattgctgtgaccgtgaagaagcagataaagtggagcagaggaagctgtga

SEQ ID NO: 22673 - DNA, 420 bp, Homo sapiens
  misc_feature (1)...(420): n = a,t,c or g
ttgnnnaacngctatgacatgattacgaatttaatacgactcactatagggaatttggccctcgaggccaagaattcggcacgaggccgcttccaccctcagcggatgataatctcaagacaccttccgagcgtcagctcactccccttccaccctcagctccaccctcagcagatgataatatcaagacacctgctgagcgtctgcgggggccgcttccaccctcagccgatgataatctcaagacacctcccttagctactcaggaggctgaggcagaaaaaccacgcaaacccaagaggcagagggcggctgagatggaaccacctcccgaacccaagaggcggagggtcggtgacgtggaaccgtcacgcaaacccaagaggcggagggccgctgacgtggaaccatcatcacccg

SEQ ID NO: 22674 - DNA, 413 bp, Homo sapiens
atgagattatcatccgctgagggtgaagcggcccccgcagacgctcggcaggtgtcttgatattatcatctgctgagggtggagctgagggtggaaggggagtgagctgacgctcggaaggtgtcttgagattatcatccgctgagggtggaagcggcccccgcagacgctcggcaggtgtcttgatattatcatctgctgagggtggagctgagggtggaaggggagtgagctgacgctcggaaggtgtcttgagattatcatccgctgagggtggaagcggcccccgcagacgctccccgcagacgctcggcaggtgtcttgatattatcatctgctgagggtggagctgagggtggaaagggagtgagctgacgctcggaaggtgtcttgatattatcatctgctgaggg

SEQ ID NO: 22675 - DNA, 417 bp, Homo sapiens
gctccatctcaaaaaagaaaaaaaaaaattaagggttttggctgggtgcagtggctcatgccggtaatcccagcactttgggaggccaaggtgggaggatcacttgaggtcaggagtttcagactggcctgggcaacgtaaaaaattaaaaaaatagccaggcatggacatggtagtgcatacctgtggtcccagccactcaagaggctgagacaggatgattgcttgagcccaggaggatgaggctgcagtgagccatgatgacgctactgcactccagcctggatgacagggcaagaccctgtctcaatattttaagtcaagggtttgtagtaatgtattcagtgccacttcttgccatcactttgcaattattgaaatgggaatactgagctcagaaagcaaatatgatgcttt

SEQ ID NO: 22676 - DNA, 830 bp, Homo sapiens
atgggaatgaggctgttggacgagaactgctcattttcttggcccagtacctatgcaacgaataccagaaggggaacgagacaattgtcaacctgatccacagtacccgcattcacatcatgccttccctgaacccagatggctttgagaaggcagcgtctcagcctggtgaactcaaggactggtttgtgggtcgaagcaatgcccagggaatagatctgaaccggaactttccagacctggataggatagtgtacgtgaatgagaaagaaggtggtccaaataatcatctgttgaaaaatatgaagaaaattgtggatcaaaacacaaagcttgctcctgagaccaaggctgtcattcattggattatggatattccttttgtgctttctgccaatctccatggaggagaccttggtggccaattatccatatgatgagacgcggagtggtagtgctcacgaatacagctcctccccagatgacgccattttccaaagcttggcccgggcatactcttctttcaacccggccatgtctgaccccaatcggccaccatgtcgcaagaatgatgatgacagcagctttgtagatggaaccaccaacggtggtgcttggtacagcgtacctggagggatgcaagacttcaattaccttagcagcaactgttttgagatcaccgtggagcttagctgtgagaagttcccacctgaagagactctgaagacctactgggaggataacaaaaactccctcattagctaccttgagcagatacaccgaggagttaaaggatttgtccgagaccttcaaggtaacccaattgcgaa

SEQ ID NO: 22677 - DNA, 391 bp, Homo sapiens
cccgcgctcgcccagcaggagagactgagcagccgccagctgggagcactggtgtgaactcaccctgggagccagtcctccactcgacccagaatggagcctgctctccgcgcctacccttcccgcctccctctcagaggcctgctgccagtgcagccactggcttggaacaccttggggtccctccaccccacagaaccttcaacccagtgggtctgggatatggctgcccaggagacagaccacttgccacgctgttgtaaaaacccaagtccctgtcatttgaacctggatccagcactggtgaactgagctgggcaggaagggagaacttgaaacagattcaggccagcccagccaggccaacagcacctccccgctgggaagagaa

SEQ ID NO: 22678 - DNA, 365 bp, Homo sapiens
gcggagataatgcgctgtaagcttctgctggggataggaattctggtgctcctgatcatcgtgattctgggggtgcccttgattatcttcaccatcaaggccaacagcgaggcctgccggtacggccttcgggcagtgatggagtgtcgcaatgtcacccatctcctgcaacaagagctgaccgaggcccagaagggctttcaggatgtggaggcccaggccgccacctgcaaccacactgtgatggccctaatggcttccctggatgcagagaaggcccaaggacaaaagaaagtggaggagcttgagggagagatcactacattaaaccataagcttcaggacgcgtctgcagaggtggagcg

SEQ ID NO: 22679 - DNA, 1063 bp, Homo sapiens
  misc_feature (1)...(1063): n = a,t,c or g
aacagctatgacatgattacgaatttaatacgactcactatagggaatttggccctcgaggccaagaattcggcacgagaaacaggccactgagaatgcaaaggaggaagtgaggcgaattctggggctgctggatgcttacttgaagacgaggacttttctggtgggcgaacgagtgacattggctgacatcacagttgtctgcaccctgttgtggctctataagcaggttctagagccttctttccgccaggcctttcccaataccaaccgctggttcctcacctgcattaaccagccccagttccgggctgtcttgggggaagtgaaactgtgtgagaagatggcccagtttgatgctaaaaagtttgcagagacccaacctaaaaaggacacaccacggaaagagaagggttcacgggaagagaagcagaagccccaggctgagcatgaatgtgagcaggcgctggctgctgagcccaaggccaaggaccccttcgctcacctgcccaagagtacctttgtgttggatgaatttaagcgcaagtactccaatgaggacacactctctgtggcactgccatatttctgggagcactttgataaggacggctggtccctgtggtactcagagtatcgcttccctgaagaactcactcagaccttcatgagctgcaatctcatcactggaatgttccagcgactggacaagctgaggaagaatgccttcgccagtgtcatcctttttggaaccaacaatagcagctccatttctggagtctgggtcttccgaggccaggagcttgcctttccgctgagtccagattggcaggtggactacgagtcatacacatggcggaaactggatcctggcagcgaggagacccagacgctggttcgagagtacttttcctgggagggggccttccagcatgtgggcaaagccttcaatcagggcaagatcttcaagtgaacatctcttgccatcacctagctgcctgcacctgcccttcaggganatgggggtcattaaaggaaactgaacattgaaaaaaaaaaaaaa

SEQ ID NO: 22680 - DNA, 631 bp, Homo sapiens
gaagccgcctagtgcagagaggttgtgaaaacagcagcaatgcaatgtggaaattgtagcgtttcctttcttccctcatgttctcatgtttgtgcatgtatattactgatttacaagactaacctttgttcgtatataaagttacaccgttgttgttttacatcttttgggaagccaggaaagcgtttggaaaacgtatcacctttcccagattctcggattctcgactctttgcaacagcacttgcttgcggaactcttcctggaatgcattcactcagcatccccaaccgtgcaacgtgtaacttgtgcttttgcaaaagaagttgatctgaaattcctctgtagaatttagcttatacaattcagagaatagcagtttcactgccaacttttagtgggtgagaaattttagtttaggtgtttgggatcggacctcagtttctgttgtttcttttatgtggtggtttctatacatgaatcatagccaaaaacttttttggaaactgttggttgagatagttggttcttttaccccacgaagacatcaagatacacttgtaaataaagctgatagcatatattcatacctgttgtacacttgggtgaaaagtatggcagtgggagactaa

SEQ ID NO: 22681 - DNA, 351 bp, Homo sapiens
gaatagccattgactgggttcagattgatgccaattcctcagtccttcatgatgaattcattgctcacaggcttggattaattcccctcattagtgatgacattgtggacaagctgcagtactctcgggactgcacatgtgaggagttctgccccgagtgctcggtggagttcaccctcgatgtgcggtgcaatgaagaccagacgcgacatgtcacgtctcgagacctcatctccaacagcccccgggtcattccggtgacatcccggaaccgagataatgaccccaatgactacgtggagcaggatgacatcctcatcggtcaagttgagaaagggccaggagctgaga

SEQ ID NO: 22682 - DNA, 475 bp, Homo sapiens
  misc_feature (1)...(475): n = a,t,c or g
ggtgtnnnnnttggactttggaaaaccttatgacatgattacgaatttaatacgactcactatagggaatttggccctcgaggccaagaattcggcacgaggccggcgtggctgctgctggcaatctgggtggtcctgccatcatggctgtcctctgcaaaggtttcctcgctcattgagagaatctctgaccccaaggacttgaaaaaactgctcagaacccggaataatgtactggtgctttactccaaatctgaggtggcagctgaaaatcatctcaggttactgtccacagtggcccaggcggtgaaaggacaagggaccatctgctgggtggactgtggtgatgcagagagtagaaaattgtgcaagaagatgaaagttgacctgagcccgaaggacaaaaaggttgaattattccattaccaggatggtgcatttcatactgaatataaccgagctgtgacatttaagt

SEQ ID NO: 22683 - DNA, 512 bp, Homo sapiens
  misc_feature (1)...(512): n = a,t,c or g
tgncttcaannccaangctatgacatgattacnaatttaatacgactcactatagggaatttggccctcgaggccaagaattcggcacgagggcagccacagcagccacttgttgccaactcagtgaggacaaactattggcctgtggcgagggagcggctgacattattatcggacacttatgtatcagacatgaaatgactccagtaaaccctggtgttggccagtgctgcacttcttcatatgccaacaggaggccatgcttcagcagcttggtggtggatgaaacatatgtccctcctgcattctctgatgacaagttcattttccataaggatctgtgccaagctcagggtgtagcgctgcaaacgatgaagcaagagtttctcattaaccttgtgaagcaaaagccacaaataacagaggaacaacttgagggtgtcattgcagatttctcaggcctgttggagaaatgctgccaaggccaggaacaggaagtctgctttgctgaa

SEQ ID NO: 22684 - DNA, 697 bp, Homo sapiens
tcctcattacgaatttaatacgactcactatagggaatttggccctcgaggccaagaattcggcacgagaaggagccagcggtgggcagcgctgctgggatggcgcgggccgggccggcgtggctgctgctggcaatctgggtggtcctgccatcatggctgtcctctgcaaaggtctcctcgctcattgagagaatctctgaccccaaggacttgaaaaaactgctcagaacccggaataatgtactggtgctttactccaaatctgaggtggcagctgaaaatcatctcaggttactgtccacagtggcccaggcggtgaaaggacaagggaccatctgctgggtggactgtggtgatgcagagagtagaaaattgtgcaagaagatgaaagttgacctgagcccgaaggacaaaaaggttgaattattccattaccaggatggtgcatttcatactgaatataaccgagctgtgacatttaagtccatagtggcctttttgaaggatccaaaagggcccccactgtgggaggaagatcctggagccaaagatgttgtccaccttgacagtgaaaaggacttcagacggctcctgaagaaggaagagaagccgctcctgatcatgttttatgccccctggtgcagcatgtgcaagaggatgatgccgcatttccagaaggctgcgactcagctgc

SEQ ID NO: 22685 - DNA, 458 bp, Homo sapiens
  misc_feature (1)...(458): n = a,t,c or g
gnnnnntttgaaacagtttgacatgattacgaatttaatacgactcactatagggaatttggccctcgaggccaagaattcggcacgagagaaaccaaaggaatgatctcattaaaagtaattcccaaccagcaaagccgtcttcctgcactacagatgttcatgagagcgcagtttgactatgatcccaaaaaggacaatctgatcccttgcaaggaggcgggactgaagtttgctactggggacattatccagattatcaacaaggatgacagcaattggtggcagggacgggtggaaggctnctncaaggagtcngcangattgatcccttnccctganctgcangantggcnagtggcaagtatggntcagtnatttgtanntacccgtcngngtggnnnttggtttnntngattnttgnnnnnanntgttttngtgtnnnttnnggtantgtt

SEQ ID NO: 22686 - DNA, 725 bp, Homo sapiens
tgacatgattacgaatttaatacgactcctatagggaatttggccctcgaggccaagaattcggcacgagcagaattcttcatggtggcatgatccatagacaaggctcccttcacgtgggggatgagatcctagaaatcaatggcacaaatgtgacaaatcattcagtggatcagctgcagaaggcgatgaaagaaaccaaaggaatgatctcattaaaagtaattcccaaccagcaaagccgtcttcctgcactacagatgttcatgagagcgcagtttgactatgatcccaaaaaggacaatctgatcccttgcaaggaggcgggactgaagtttgctactggggacattatccagattatcaacaaggatgacagcaattggtggcagggacgggtggaaggctcctccaaggagtcagcaggattgatcccttcccctgagctgcaggaatggcgagtggcaagtatggctcagtcagctcctagcgaagccccgagctgcagtccctttgggaagaagaagaagtacaaagacaaatatctggccaagcacagctcgatttttgatcagttggatgttgtttcctacgaggaagtcgttcggctccctgcattcaagaggaagaccctggtgctgatcggagccagtggggtgggtcgcagccacattaagaatgccctgctcagccagaatccggagaagtttgtgtaccctgtccca

SEQ ID NO: 22687 - DNA, 257 bp, Homo sapiens
cccgggaatcccggtttctgaaggttaagaacctggtatgaggagagtcagtattacgagtcctaacatttcgctctcatcaaaaacgtaaaaaccagttaggtacggcggcggcgggtattcgcaactttagtcatctagaaggtcgaggtaggagtactatccgaattcgggaggtggaggccgtagcgagtcgagactatgttatcgtatcttagttagggcgataagagatcttgctctaaaaaaaaaaaaaa

SEQ ID NO: 22688 - DNA, 368 bp, Homo sapiens
cccacgcgtccgctagttctagatcgcgggcggccgctctagaggatccctcgaggggcccaagcttacgcgtgcatgcgacgtcatagctctctccctatagtgagtcgtattataagctaggcactggccgtcgttttacaacgtcgtgactgggagatctgctagcttgggatctttgtgaaggaaccttacttctgtggtgtgacataattggacaaactacctacagagatttaaagctctaaggtaaatataaaatttttaagtgtataatgtgttaaactagctgcatatgcttgctgcttgagagttttgcttactgagtatgatttatgaaaatattatacacaggagctagtggatta

SEQ ID NO: 22689 - DNA, 790 bp, Homo sapiens
  misc_feature (1)...(790): n = a,t,c or g
ctttacatgacacgaatttaatacgactcactatagggaatttggccctcgaggccaagaattcggcacgagcaaaatgcgtttctcgttgcttacacaaagaaagccccccagctgacctcgtcggagctgatggccatcaccagaaaaatggcagccacagcagccacttgttgccaactcagtgaggacaaactattggcctgtggcgagggagcggctgacattattatcggacacttatgtatcagacatgaaatgactccagtaaaccctggtgttggccagtgctgcacttcttcatatgccaacaggaggccatgcttcagcagcttggtggtggatgaaacatatgtccctcctgcattctctgatgacaagttcattttccataaggatctgtgcccaagctcagggtgtagcgctgcaaacgatgaagcaagagtttctcattaaccttgtgaagcaaaagccacaaataacagaggaacaacttgagggtgtcattgcagatttctcaggcctgttggagaaatgctgccaaggccaggaacaggaagtctgctttgctgaagagggacaaaaactgatttcaaaaactcgtgctgctttgggagtttaaattacttcaggggaagagaagacaaaacgagtctttcattcggtgtgaacttttctctttaattttaactgatttaacactttttgtgaattaatgaaatgataaagacttttatgtgaganttccntatcacagaattaaatatcccaaatggaaaaaaaaaaaaaa

SEQ ID NO: 22690 - DNA, 622 bp, Homo sapiens
gcagcattatgggtttgtgctgtaccggacaacacttcctcaagattgcagcaacccagcacctctctcttcacccctcaatggagtccacgatcgagcatatgttgctgtggatgggatcccccagggagtccttgagcgaaacaatgtgatcactctgaacataacagggaaagctggagccactctggaccttctggtagagaacatgggacgtgtgaactatggtgcatatatcaacgattttaagggtttggtttctaacctgactctcagttccaatatcctcacggactggacgatctttccactggacactgaggatgcagtgcgcagccacctggggggctggggacaccgtgacagtggccaccatgatgaagcctgggcccacaactcatccaactacacgctcccggccttttatatggggaacttctccattcccagtgggatcccagacttgccccaggacacctttatccagtttcctggatggaccaagggccaggtctggattaatggctttaaccttggccgctattggccagcccggggccctcagttgaccttgtttgtgccccagcacatcctgatgacctcggcccaaacaccataaccg

SEQ ID NO: 22691 - DNA, 427 bp, Homo sapiens
aacctctatgacatgattacgaatttaatacgactcactatagggaatttggccctcgaggccaagaattcggcacgagctttgtaaagctgtgtggaccagccaaagaaggtaaaagccattaaaatgatggaattataagaatggttatgttcaatttttattattttgggaaatggtcttttaatgagaactgaatgttctcaagcttcctcatatcaaaagaggaacgccgtgtgaaggaagctgtgacttcaaggaaggtatgctctgtggctactgctgatacctctgagaggagtaccatgagactggttcttggaatactaagctggaggctggaatcagtgctgctgctttcagatatagcaagctgacaagtctttggtctctcctcctgccttcttcttctagtaccctataggcg

SEQ ID NO: 22692 - DNA, 740 bp, Homo sapiens
ctgaagaaccttatatttgtaaggactttcctgaaaccaacaatattttgaaaatagtagctgatttttctgcaagtgttaaaaagccacataccctattacagagagtcaaagcctgcacaacagaagaggatcaggagaagctgatgcaaattaccagtctgcattcactgaatgccttcttgctgccaattaaaactgtaggtgtgcagggtgactgtcgttcctacagttacgtgtgtggaatctccagtaaagatgaacctgactgggaatcacttatttttctggctaggcttatacctcgcatgtgtcacaacgttaacagagttgtttatatatttggcccaccagttaaagaacctcctacagatgttactcccactttcttgacaacaggggtgctcagtactttacgccaagctgattttgaggcccataacattctcagggagtctgggtatgctgggaaaatcagccagatgccggtgattttgacaccattacattttgatcgggacccacttcaaaagcagccttcatgccagagatctgtggttattcgaacctttattactagtgacttcatgactggtatacctgcaacacctggcaatgagatccctgtagaggtggtattaaagatggtcactgagattaagaagattcctggtatttctcgaattatgtatgacttaacatcaaagcccccaggaactactgagtgggaagtaataaac

SEQ ID NO: 22693 - DNA, 329 bp, Homo sapiens
gagcaaaatcagtgatttagtcagatgagtttttcgttgtaggagcacttgatttctagtgtgttttgtacagtatataactacaagatagtacattttgtagcagttcaaagccaaagttgctagcatcattttgctgttgtgccagttaatcataggatcccattaaataagtgtgctaacatcgaatatagagaaaactggtaaagaacattccagtaggaaaagaaaagaacaatcttccatttctgggcttggccaccatcaccctggtcggacctgtcctggacttccaaccttgactgctgagctcctggcttagcttcttg

SEQ ID NO: 22694 - DNA, 454 bp, Homo sapiens
ctttgaaaaccccttatgacatgattacgaatttaatacgactcactatagggaatttggccctcgaggccaagaattcggcacgagcctggaaggacatccggcggttttccctgaccaccctccggaactatgggatggggaaacagggcaatgagagccggatccagagggaggcccacttcctgctggaagcactcaggaagacccaaggccagcctttcgaccccaccttcctcatcggctgcgcgccctggcaacgtcatagccgacatcctcttccgcaagcattttgactacaatgatgagaagtttctaaggctgatgtatttgtttaatgagaacttccacctactcagcactccctggctccagctttacaataattttcccagctttctacactacttgcctggaagccacagaaaagtcataaaaaatgtggctgaagtaa

SEQ ID NO: 22695 - DNA, 435 bp, Homo sapiens
  misc_feature (1)...(435): n = a,t,c or g
ttganacatttgactgnttcgaatttaatacgactcactatagggaatttggccctcgaggccaagaattcggcacgaggtgttttccagattggcccccgccgcatccacacagtccgtgtgcggggaggtaacaagaaataccgtgccctgaggttggacgtggggaatttctcctggggctcagagtgtgagtgaggccctttgggagtgggtgggaaaacgcacctaaacggtcttaagattcaccgtgcccgacctgctctgatctttctgaactctgcagcctgagagattggggctggtaaagactgcgggttgccaaacataactagaaacgtgggttagggggttgtggaagacgaactgatgccccatggcttgtaaaggctganagttcccttaatttctccttaaggcctcatgggggntgaa

SEQ ID NO: 22696 - DNA, 433 bp, Homo sapiens
gagctccagtcacaagctggaccaaccaaaggttggttcatgtccttttagtgagtctaccaagaccatttccctgtatatctcctctgaacagcaattccatctgcccaggccttcagagtcagatgactttattgaagacacagccgatatgctgtgtttcattcagtggatactctagtgccccaaagaatcaagagcaacttccctttgggaggccaaggcaggcggatcatgaggtcaggagtttgagaccagcttgaccaacatgctgaaaccccgtttctattaaaaatacaaaaatattagccgggtgtggtggcgcatgcctgtaatcccagctaatcaggaggctgaggcaggagaactgcttgaacccaggaggcggaggttgctatgagcagagatggagccactgcacttcagcctgggc

SEQ ID NO: 22697 - DNA, 485 bp, Homo sapiens
ctcctatagggaatttggccctcgaggccaagaattcggcacgagggaatcaaccccaccaggaaatgcagaggcttgctccacaagagtcagggcaggcctcccacctggaatttcctttctagattttcgtagcttccaggattttctttggctgtgataatggaaaccatcttctggacacagacaggatttccacacctaactgttcccatttatcaacaagctaggagatcctccattcatctccaccctcctaaccgcaggcaccatctccatattggagtttcctatgcagattttatgcatagaatgtttcagtggcttgacaagtacaatgtgtggcctcgtctttcttccttacactgaataagtagatgctcttgggctgagctcaggggtggagcccagcaagctcccagctagggtaaggactgagcagagcaccaggagaggccttcctgtgcgggtcagagcccttggtc

SEQ ID NO: 22698 - DNA, 790 bp, Homo sapiens
cccatcagctttgacatcattacgaatttaatacgactcactatagggaatttggccctcgaggccaagaattcggcacgagcagcgccgagcgatgggcatctctcgggacaactggcacaagcgccgcaaaaccgggggcaagagaaagccctaccacaagaagcggaagtatgagttggggcgcccagctgccaacaccaagattggcccccgccgcatccacacagtccgtgtgcggggaggtaacaagaaataccgtgccctgaggttggacgtggggaatttctcctggggctcagagtgttgtactcgtaaaacaaggatcatcgatgttgtctacaatgcatctaataacgagctggttcgtaccaagaccctggtgaagaattgcatcgtgctcatcgacagcacaccgtaccgacagtggtacgagtcccactatgccgctgcccctgggccgcaagaagggagccaagctgactcctgaggaagaagagattttaaacaaaaaacgatctaaaaaaattcagaagaaatatgatgaaaggaaaaagaatgccaaaatcagcagtctcctggaggagcagttccagcagggcaagcttcttgcgtgcatcgcttcaaggccgggacagtgtggccgagcagatggctatgtgctagagggcaaagagttggagttctatcttaggaaaatcaaggcccgcaaaggcaaataaatccttgttttgtcttcacccatgtaataaaggtgtttattgttttgttcccacaaaaaaaaaaaaaa

SEQ ID NO: 22699 - DNA, 686 bp, Homo sapiens
  misc_feature (1)...(686): n = a,t,c or g
gctggaagatcctgtatgaattaagcatgaaattaacaccatcttatgacttggcaccttttcgaatcagccgtttcccaagcctgggcaaagcccacctttgacctctggccagaagcctcccttctgtgcacaggagccagtttcacagatggagaagatgtctcagatgaagggagtgtccctgagatatcatccttttcttctgcctcgcctgaatcccccataaacaccagatgattgagtctaccttctttccttggcccgctccctttttcttctgcctcacttgaatcccccgtaaacaccagacgattgagtctaccttcntttcttgggcacctccccattcacaactactttctcgctcccagaaggttgatcagatattctacaatcacagagtagcaaggacgtttgagatgggtatatcagtaagaagagggcacaagaactggctctggagaccaaagcagttgttaaaaattctctttgctgggggccgggtgtggtggctcacacctgtaatctcggcactttggggggctgagacaggcggatcacctgaggccaggaattcaagaccagcctggccaacatggtgaaaccctatctccactaaaaatacaaaattagctgggtgtggtggcgcatgcctgtaatcccagctacttgggagactgagg

SEQ ID NO: 22700 - DNA, 488 bp, Homo sapiens
  misc_feature (1)...(488): n = a,t,c or g
gctggcctctcacctcaacctggccatgtgtcatctgaaactacaggccttctctgctgccattgaaagctgtaacaaggccctagaactggacagcaacaacgagaagggcctcttccgccggggagaggcccacctggccgtgaatgactttgaactggcacgggctgatttccagaaggtcctgcagctctaccccaacaacaaagccgccaagacccagctggctgtgtgccagcagcggatccgaaggcagcttgcccgggagaagaagctctatgccaatatgtttgagaggctggctgaggaggagaacaaggccaaggcagaggcttcctcaggagaccatcccactgacacagagatgaaggaggagcagaagagcaacacggcagggagccagtctcaggtggagacagaagcatagcccctntccaccagccctactcctgcggctgctgcccccagctcccattcacctgtagttt

SEQ ID NO: 22701 - DNA, 462 bp, Homo sapiens
  misc_feature (1)...(462): n = a,t,c or g
aaacccttgacatgattacgaatttaatacgactcactatagggaatttggccctcgaggccaagaattcggcacgagctggaaggctgtgagtttttcagtacagctgaaaatcaatgtgtcttcaatagaggaaatcaatttcttgccatgttggtactcgaagagccatatcctacatgacatttgccctagaatcctgttattggctagaaaattctgaagttataatatctgaaaagtatagccattaaggaatacttctaatgctaatataactctttttagtgaaggatgagttaagatgaaggaataagcagaggaggaggaagagtagaaggaagaagggttgggggaggaggaagaggaaaggagggggaggaagaagaggagaggagcaggggaggaagaagaggagatggggagaggaacanctattcctttccacccactggtcctttc

SEQ ID NO: 22702 - DNA, 479 bp, Homo sapiens
  misc_feature (1)...(479): n = a,t,c or g
gcttccatctctacatggctctcaagaaggcccttttcaaacctggagcctggttcaaagggatcctgattccactgtgcgagtctggcacttgtaccctccgggaagccatcattgtgggtagcatcatcaccaagtgctccatccctgtgttgcactccagtgcggccatgctgaaaattgctgagatggaatacagcggtgccaacagcatcttcctgcgactgctgctggataagaagtatgcactgccttaccgggtgctggatgccctagtcttccacttcctggggttccggacagagaagcgtgaactgcctgtgctgtggcaccagtgcctcctgactttggtccagcgctacaaggcccgacttggccacagaccagaaaagaggccctttnaaactgctccggttgccccnnnccaanttttccccaaaaagggggggnttttaaaagnggnnccccccggnggggga

SEQ ID NO: 22703 - DNA, 525 bp, Homo sapiens
  misc_feature (1)...(525): n = a,t,c or g
gnntttgnnaacngctatgacatgattacgaatttaatacgactcactatagggaatttggccctcgaggccaagaattcggcacgaggcaaaatctcctttaacaaccaagcagttcctcattcacatcaacagagcgaggctgtgataacttaggaggcagcaatcctaatagtccttcagtgcattttagtctgtctccaactggacaccagtaggtagtgtcaagccagagattcggggcagtagataaatgttcattttactgatgcactttagtttttggtctgttacctgttttccagaaatttgtggccttttaggcgggagttaggcgaccaaaccagtgagagccccaatccctgcagttttgtggcttcaagtgtgggtggacagtcctaatggggatctccagctccttccctgtgggctgcacagacagctacccccagaagggtcaatgttgggagtggttgtggctctgagctgtctacagagcttcntgtgagaggatcgaaccntttg

SEQ ID NO: 22704 - DNA, 682 bp, Homo sapiens
gcggggcttcacgctggtggggatgaagatgctgcaggcaccagagagcgtccttgccgagcactaccaggacctgcggaggaagcccttctaccctgccctcatccgctacatgagctctgggcctgtggtggccatggtctgggaagggtacaatgtcgtccgcgcctcaagggccatgattggacacaccgactcggctgaggctgccccaggaaccataaggggtgacttcaagcgtccacatcagcaggaatgtcatccacgccagcgactccgtggagggggcccagcgggagatccagctgtggttccagagcagtgagctggtgagctgggcagatgggggccagcacagcagcatccacccagcctgaggctcaagctgcccttaccaccccatcccccacgcaggaccaactacctccgtcagcaagaacccaagcccacatccaaacctgcctgtcccaaaccacttacttccctgttcacctctgccccaccccagcccagaggagtttgagccaccaacttcagtgcctttctgtaccccaagccagcacaagattggaccaatcctttttgcaccaaagtgccggacaacctttgtggtgggggggggtcttcacattatcataacctctcctctaaaggggaggcattaaaattcactgtgcccagc

SEQ ID NO: 22705 - DNA, 329 bp, Homo sapiens
gccgagactacctgccccggcacagcatcgggctggcccagctgctgctcttcgcccagcagatctgcgagggcatggcctatctgcacgcgcagcactacatccaccgagacctagccgcgcgcaacgtgctgctggacaacgacaggctggtcaagatcggggactttggcctagccaaggccgtgcccgaaggccacgagtactaccgcgtgcgcgaggatggggacagccccgtgttctggtatgccccagagtgcctgaaggagtataagttctactatgcgtcagatgtctggtccttcggggtgaccctgtatgagctgctg

SEQ ID NO: 22706 - DNA, 942 bp, Homo sapiens
gtgcacaagcagggatggccgtcgcttcagcgttctcgggtgctacgctgctgcagctgcccgcctcttccaggcgcaccaggtaaaaaagagtgtcaagtggacatgcaaagcttgtggagagaagcagtcctttttgcaggtctctagaagaaactgtcagtgccagtgaagaagaaaacgtgggacaccagcaggctgggaatgtgaagcagcaggaaaaatcgcagccctcagagagtcgctggctgaagtatctagaaaaggactcccaagaactggagctggaaggaacaggagtgtgtttcagcaaacagccttcatccaaaatggaggagccaggcccccgcttcagtcaagacctgcctagaaaaaggaagtggagcaggagcaccgtccagcctccgtgcagccgtggcgtgcaggactcgggtggctctgaggtcgcctggggaccccagaagggacaggctgcctgacatggaagttgaaacaaggcagcagccccttgcctccaggagaactctgcagactgcagtgccggggagctgaggggtcctgggaaggagctatggagtcccatccagcaggttacagccacatcctctaaatgggcgcgatttgtcctgccacctagaaaaagttcacatgtggacagtgagcagccaaggtctcttcagagggaccccaggccagctggtccagcacaggctaagcaagggacccccagagcacaggcctcaagagaaggcctcagcaggcccactgccgctgtccagcttcctcgggccacacaccccgtcacatctgggtctgagaggccttgcgggaagacctcatgggacgcaaggactccctgggcagagggtgggcccctggtcctggaggcacagaatcctcgacccacacgactatgtgacctctttataactggggaagacc

SEQ ID NO: 22707 - DNA, 400 bp, Homo sapiens
ggaagcgctccgggcctggaatccctacgcgtccctttgggtttagcaccctgacggaagagtttttcaagttgaatatgctatgaaggctgtggaaaatagtagtacagctattggaatcagatgcaaagatggtgttgtctttggggtagaaaaattagtcctttctaaactttatgaagaaggttccaacaaaagactttttaatgttgatcggcatgttggaatggcagtagcaggtttgttggcagatgctcgttctttagcagacatagcaagagaagaagcttccaacttcagatctaactttggctacaacattccactaaaacatcttgcagacagagtggccatgtatgtgcatgcatatacactctacagtgctgtaaaccttttggct

SEQ ID NO: 22708 - DNA, 480 bp, Homo sapiens
gcaaatggaacacgccatggaaaccatgatgtttacatttcacaaattcgctggggataaaggctacttaacaaaggaggacctgagagtactcatggaaaaggagttccctggatttttggaaaatcaaaaagaccctctggctgtggacaaaataatgaaggacctggaccagtgtagagatggcaaagtgggcttccagagcttcttttccctaattgcgggcctcaccattgcatgcaatgactattttgtagtacacatgaagcagaagggaaagaagtaggcagaaatgagcagttcgctcctccctgataagagttgtcccaaagggtcgcttaaggaatctgcccacagcttcccccatagaaggatttcatgagcagatcaggacacttagcaaatgtaaaaataaaatctaactctcatttgacaagcagagaaagaaaagttaaataccagataagcttttgatttttg

SEQ ID NO: 22709 - DNA, 413 bp, Homo sapiens
  misc_feature (1)...(413): n = a,t,c or g
agctatgacatgattacgaatttaatacgactcactatagggaatttggccctcgaggccaagaattcggcacgaggagcgaggctgtgataacttaggaggcagcaatcctaatagtccttcagtgcattttagtctgtctccaactggacaccagtaggtagtgtcaagccagagattcggggcagtagataaatgttcattttactgatgcactttagtttttggtctgttacctgttttccagaaatttgtggccttttaggcgggagttaggcgaccaaaccagtgagagccccaatccctgcagttttgtggcttcaagtgtgggtggacagtcctaatggggatctccagctccttccctgtgggctgccacanacagttacccccaaangggtcantgtngggag

SEQ ID NO: 22710 - DNA, 536 bp, Homo sapiens
  misc_feature (1)...(536): n = a,t,c or g
tnnnnntnnannatttgaanatncgctatgnctgattacgaatttaatancgactcactatagggaatttggccctcgaggccaagaattcggcacgagggcaagtgctggtgtgtggaccggaagacgggggtgaagcttccggggggcctggagccaaagggggagctggactgccaccagctggctgacagctttcgagagtgaggcctgccagcaggccagggactcagcgtcccctgctactcctgtgctctggaggctgcagagctgacccagagtggagtctgagtctgagtcctgtctctgcctgcggcccagaagtttccctcaaatgcgcgtgtgcacgtgtgcgtgtgcgtgcgtgtgtgtgtgtttgtgagcatgggtgtgcccttggggtaagccagagcctggggtgttctctttggtgttacacagcccaagaggactgagactggcacttagcccaagaggtctgaccctggtgtgtttccagatcgatcctggattcactcactcactcattccttact

SEQ ID NO: 22711 - DNA, 532 bp, Homo sapiens
  misc_feature (1)...(532): n = a,t,c or g
ggnntnnnnnttgnnattgaanacagcttgactgattacgaatttaatacgactcactatagggaatttggccctcgaggccaagaattcggcacgagatttttgaaaaggctgattatgtgtatcaaggtacagcatcgtagggttcccctaaacttgccctgtttttgtttttttagtttgttatccccttactgagcggcctctactaggtggctgtgattaaatgtcccaagcaaggatagggaaggggaatggttgagcctctggagatcattgtaaccaatcctgccagacctgtttggggcagtggggagcaaacctagataaggacctgtttggggcagcagggagcaaaatctcctttaacaaccaagcagttcctcattcacatcaacagagcgaggctgtgataacttaggaggcagcaatcctaatagtccttcagtgcattttagtctgctccactggacaccagtaggtagtgtcanncnaaaattnggggccattaaanaagngncnttnccggggc

SEQ ID NO: 22712 - DNA, 704 bp, Homo sapiens
  misc_feature (1)...(704): n = a,t,c or g
accgtttgactgattacgaatttaatacgactcactatagggaatttggccctcgaggccaagaattcggcacgagcggcacgagatggggcgccccgggaggatgcccggcctgtgccccagggctcctgccagagcgagctgcaccgggcgctggagcggctggccgcttcacagagccgcacccacgaggacctctacatcatccccatccccaactgcgaccgcaacggcaacttccaccccaagcagtgtcacccagctctggatgggcagcgtggcaagtgctggtgtgtggaccggaagacgggggtgaagcttccggggggcctggagccaaagggggagctggactgccaccagctggctgacagctttcgagagtgaggcctgccagcaggccagggactcagcgtcccctgctactcctgtgctctggaggctgcagagctgacccagagtggagtctgagtctgagtcctgtctctgcctgcggcccagaagtttccctcaaatgcgcgtgtgcacgtgtgcgtgtgcgtcctgtgtgtgtgtttgtgancatgggtgtgcccttggggtaagccagacctggggtgttctctttggtgttacacaanccaaaaggactgagactggcacttaacccaaaaggnnttaacccttggggngtttccaaancgaacctggatttactcactact

SEQ ID NO: 22713 - DNA, 376 bp, Homo sapiens
gaagatgaccttgaaaacccagggaaagggactagaaagagtagagaagggaactggattggaggagacatcagcagaggagacaaagaggagccagtaaggcgtgaggaaaatcagagcagagcggtcacgcagctgagagcagaaagtgtttcaaggagcggggagcggtgtccatgcccttccaaccggtaacacgtggatacagtcttattttgtaataacctcaggccaaaagcaacagttttcagatgaactatattcttactttccttaaaagttacaaagtaaaactgaagaaaagaacaacagaaaaagtgctttctgatagctctctaactattcactggtgccaatttcttgaactttaaagtca

SEQ ID NO: 22714 - DNA, 453 bp, Homo sapiens
  misc_feature (1)...(453): n = a,t,c or g
tnnnnnnnnnnntttgattccnaacagctatgacatgattacgaatttaatacgactcactatagggaatttggccctcgaggccaagaattcggcacgagctcggcgtggtggctcatgcctctaatcccaacactttgggaggctgaggcaggcagatcgcttgcatccaggagttcaagaccagcctgggcaacatggtgaaacctcttctctacaaaaattagctgggcatggtggcgcacacctgtaatcccagctacttgggaggctaagctgggaggatcacttgaacccaggaggtcaagccagcagtaaactgcaatcacaccactgtactccagcctgggcaacagagtgaaactctgtctcaaaaataaaaaaaaatttaaaaagtagtttgtcagctgggcgcagtggctcaccatgcctgcaatcccagcactttgggag

SEQ ID NO: 22715 - DNA, 442 bp, Homo sapiens
gattacgaatttaatacgactcactatagggaatttggccctcgaggccaagaattcggcacgaggtcttctaaagaataatagagcaccgctagcaagagccataaaaatcctgaagccctctgaactagtaaaaccactcttggtaactttctctaaggaaataattacactgaagcaaaaagctatttaaaaatgttcactgcaccactatctataacaaaaaagtggaaacccaattcccaacaatagaatggttaagtaaaaaccttacagccgggcgcagtggctcacgcctgcaatcccagcactttgggaggccgaggcgggcgcatcacctgaggtcggtagtacgagaccaaactggccaacatggtgaaaccttgtctctaccaaaaatacaaaaattagccaagcgtggtggaacattcctgtagcccca

SEQ ID NO: 22716 - DNA, 497 bp, Homo sapiens
gcaggggagccaggagggcctggagggggccgcctctgacaccggaggacctgatgggtgtggcggggagggtgggggtgccggaggaggtgacggtcctgaggagcctgctttgcccagcctggagggcgtcagtgaaaagcagtacaccatctacatcgcacctggaggcggggcgttcacgacgttgaatggctcgctgaccctggagctggtgaatgagaaattctggaaggtgtcccggccactggagctgtgctatgctcccaccaaggatccaaagtgaccccaccaggggacagccagaggaaggggaccatggggtatccctgtgtcctggtctatcaccccagcttctttgtcccccagtacccccagcccagccagccaataagaggacacaaatgaggacacgtggcttttatacaaagtatctatatgagattcttctatattgtacagagtggggcaaaacacgcccccatctgctgcttttt

SEQ ID NO: 22717 - DNA, 1352 bp, Homo sapiens
cccttaacagctatgacatgattacgaatttaatacgactcactatagggaatttggccctcgaggccaagaattcggcacgagtggagagcctcttctggtggatgctttgctccctctgagctgcccatgctggtctggcaaacacacctttctgctttgccttcacaaaagtaatgtgttccctttcccaccccttgcctgaccctcagggagtcagcctgcttccatccatgggtgggaagacttcagcacaaaggaaagactaattcttgtcaggcatttttgaaaaggctgattatgtgtatcaaggtacagcatcgtagggttcccctaaacttgccctgtttttgtttttttagtttgttatccccttactgagcggcctctactaggtggctgtgattaaatgtcccaagcaaggatagggaaggggaatggttgagcctctggagatcattgtaaccaatcctgccagacctgtttggggcagtggggagcaaacctagataaggacctgtttggggcagcagggagcaaaatctcctttaacaaccaagcagttcctcattcacatcaacagagcgaggctgtgataacttaggaggcagcaatcctaatagtccttcagtgcattttagtctgtctccaactggacaccagtaggtagtgtcaagccagagattcggggcagtgttttccagaaatttgtggccttttaggcgggagttaggcgaccaaaccagtgagagccccaatccctgcagttttgtggcttcaagtgtgggtggacagtcctaatggggatctccagctccttccctgtgggctgccacagacagctacccccagaagggtcaatgttgggagtggttgtggctctgagctgctctacagagcttcagtgtgagaggatcgagccattgaaagctcattaccagtaggacataatttttggctctccctattcacaaccagtgcacagtttgacacagtggcctcaggttcacagtgcaccatgtcactgtgctatcctacgaaatcatttgtttctaagttgtgtttattcctggagtgacatgccaccccgaatggctcactttcactgaggatgctgtcctctgatttagctgctgcctccagcctctggcttgagaacttactaaaggcacttccttcctgttaaacccctgttaactctccataaatttggtgattctctgctaggcctaagattttgagttaacatctcttgaagccaaactccaccttctgtgcttttttgcttgggataatggagtttttctttagaaacagtgccaagaatgacaagatattaaaaaaaaaaaaaa

SEQ ID NO: 22718 - DNA, 452 bp, Homo sapiens
  misc_feature (1)...(452): n = a,t,c or g
ggcacctgtaaccccagctactcaggaggctgaagcagcagaatcacttgaacccgggaggcggaggttgcagtgagctgagatcgcaccactgcactccagcttgggcgacagagcgagactccatctcaaacaaacaaacaaacaaaaagcttgcccagggtcacataactggtactttggtcaataatgtccgactcccaagaggtcacaggctggaattgagtgatggagacctcctgacctttggccctgaagggcccccaggaaccagcccctcggagttctacttcatgttccaacaattggggtggaccaaagagcctgcctgttcccgccccacctggggaaatggggaccacgccttctgctccaccacaacgcaatcggaggaaatctgttcaccgagtgttggcggaactggatgatganagtgacctnctganaacccc

SEQ ID NO: 22719 - DNA, 344 bp, Homo sapiens
gccagcttcttcatacacatgcacttgtcaagggctctttggctgaagagaagttagaagtttccagatatggaggggtattttcagcagatatgcccaccgccatggttttgtcagctctgtagggtggtcttgcaccctgctcactgctggcatcacctgagcctatggcagatacccagtgctgcccgccaccatgtgagttcatcagctctgcaggcacagaccttgcactaggaatgggctgggacgccaccctctgcctcttaccattcactgggtttggcaagtgtgctgggatctggaatcacatggatgaggaacccgataatggtgacgaccga

SEQ ID NO: 22720 - DNA, 365 bp, Homo sapiens
gtgcgattgtgtgggacggtctggggcagcccagcagcggctgaccctctgcctgcggggaagggagtcgccaggcggccgtcatggcggtgtcggagagccagctcaagaaaatggtgtccaagtacaaatacagagacctaactgtacgtgaaactgtcaatgttattactctatacaaagatctcaaacctgttttggattcatatgtttttaacgatggcagttccagggaactaatgaacctcactggaacaatccctgtgccttatagaggtaatacatacaatattccaatatgcctatggctactggacacatacccatataatccccctatctgttttgttaagcctactagttca

SEQ ID NO: 22721 - DNA, 454 bp, Homo sapiens
  misc_feature (1)...(454): n = a,t,c or g
cttgganaaccgntatgacatgattacgaatttaatacgactcactatagggaatttggccctcgaggccaagaattcggcacgaggctacatgaagcacgccaccaagaccgccaaggatgcactgagcagcgtgcaggagtcccaggtggcccagcaggccaggggctgggtgaccgatggcttcagttccctgaaagactactggagcaccgttaaggacaagttctctgagttctgggatttggaccctgaggtcagaccaacttcagccgtggctgcctgagacctcaataccccaagtccacctgcctatccatcctgccagctccttgggtcctgcaatctccagggcttcccctgtaggttgcttaaaagggacagtattctcagtgctctcctaccccacctcatgcctggcccccctccaggcaagctggcctcccaataaagc

SEQ ID NO: 22722 - DNA, 649 bp, Homo sapiens
  misc_feature (1)...(649): n = a,t,c or g
ctatgacatgattacgaatttaatacgactcactatagggaatttggccctcgaggccaagaattcggcacgagagagtaaatggactgtaatgaggatggtttgtaatctagattatatgttccacatgtaacatcgaaatgaaatataaaattgagttgttggcatgtggttgtggtgagcagaagcagttattatacattacttggtaaaattcatattcatatcttgtcagtttacagtgagccagagattaaaaataacatttgtttctgttttagtaactgcttaaaaatatccaaaatcattttattttctttagcctgacttctagtagtgttttgaatatgtggcctttcaagcagtaatgaaatgcatcaatgcgacttggcaatgcctcacaggacatgcttctaggatcatttttaatgattaaaagtcaaattgagttctaaaaaactgacccaaaatatagatgagccaagtaaaaacggaaggaaatctgaataaaatcttggttcttggtcctctgcatgtatcctccacatctgttttctccagatctcttttttcttgcttgttgatagcacagaggaagatcgcagagagtaatgtactggatatgtttcacatcccccttcctcnttag

SEQ ID NO: 22723 - DNA, 511 bp, Homo sapiens
  misc_feature (1)...(511): n = a,t,c or g
nnnnnnnnnannnnnnnnnntnnnnnnnannnnnnngnnnnnnnnnnnnnnnggnntnntnannatnnngnnnantnattccccttgattcntnccgaagatacgatttaatacgactcactatagggaatttggccctcgaggccaagaattcggcacgagccacgcatcaccattagctggagaaccaagactgagacgatcactggcttccaagttgatgccgttccagccaatggccagactccaacccagagaaccatcaagccagaggccagacgctacaccatcacaggcttacaaccaggcactgactacaagatctacctgtccaccttgaatgacaaagctcggagctaccctgtgggaatcgacgcctccactgccattgatgcaccatccaacctgcgtttcctggccaccacacccaattacttgctggtatcatggcagccgccacgtgccacngattaccggatacatcatcctagtatgagaagcctgggtctcc

SEQ ID NO: 22724 - DNA, 464 bp, Homo sapiens
  misc_feature (1)...(464): n = a,t,c or g
ttgnnttntngnatcctnnataccctttggactccctacgaatttantacgactcactatagggaatttggccctcgaggccaagaattcggcacgagtcaagccagatgtcagaagctacaccatcacaggtttacaaccaggcactgactacaagatctacctgtacaccttgaatgacaatgctcggagctcccctgtggtcatcgacgcctccactgccattgatgcaccatccaacctgcgtttcctggccaccacacccaattccttgctggtatcatggcagccgccacgtgccaggattaccggctacatcatcaagtatgagaagcctgggtctcctcccagagaagtggaccctcggccccgccctggtgtcacagaggctactattactggcctggaaccgggaaccgaatatacaatttatgtcattgccctgaagaataatcagaagagcg

SEQ ID NO: 22725 - DNA, 550 bp, Homo sapiens
  misc_feature (1)...(550): n = a,t,c or g
tgaataccgttatgacatgattacgaatttaatacgactcactatagggaatttggccctcgaggccaagaattcggcacgagcggaccaatgaaagaaatcaaccttgctcctgacagctcatccgtggttgtatcaggacttatggtggccaccaaatatgaagtgagtgtctatgctcttaaggacactttgacaagcagaccagctcagggagttgtcaccactctggagaatgtcagcccaccaagaagggctcgtgtgacagatgctactgagaccaccatcaccattagctggagaaccaagactgagacgatcactggcttccaagttgatgccgttccagccaatggccagactccaatccagagaaccatcaagccagatgtcagaagctacaccatcacaggtttacaaccaggcactgactacaagatctacctgtacaccttgaatgacaatgctcggagctnccctgtggtcatcgacgcctcactgcattgatgcaccatccaacctgcgtttcctggcaccacacccaattctt

SEQ ID NO: 22726 - DNA, 372 bp, Homo sapiens
ggtcacactccctcaggcaggaccatggaacacagcatctttggtcttcaatcagtccccttcaatggctccgggagccatgatgggtggtcaaccttcaggttttagtcagcccgtcatttttggtacaagtccagctgtttcaggttggaaccagccttcaccctttgcagcctcaactccccctccagtgcctgttgtctggggcccttctgcatctgtggcacccaatgcttggtcaacaacaagccctttggggaatccttttcagagcaatatttttccagctcctgctgtgtccactcagcccccatccatgcactcctctctcctggtcactcctcctcagccacctcccagagctggcccttc

SEQ ID NO: 22727 - DNA, 624 bp, Homo sapiens
gtactgagagacaaacatcttgtcattttcactgtttgtaaaagataattcagattgtttgtctccttgtgaagaaccatcgaaacctgtttgttcccagcccacccccagtggatgggatgcataatgccagcaagttttgtttaacagcaaaaaaggaagattaatgcaggtgttatagaagccagaagagaaactgtgtcaccctaaagaagcatataatcatagcattaaaaatgcacacattactccaggtggaaggtggcaattgctttctgatatcagctcgtttgatttagtgcaaaaatgttttcaagactatttaatggatgtaaaaaagcctatttctacattataccaactgagaaaaaaatggtcggtaaagtgttctttcataataaataatcagacatggtcccatttgcaggaaaagtgcagactctgagtgttccagggaaacacatgctggacatcccttgtaacccggtatgggcgcccctgcattgctgggatgtttctgcccacggttttgtttgtgcaataacgttatcacatttctaatgaggattcacattaatataatataaaataaataggtcagttactggtctcaaaaaataaaaa

SEQ ID NO: 22728 - DNA, 643 bp, Homo sapiens
gggagcacagctgttggtttctgagcagcatggagtcacactggttcctcctggcctgaggggaaagagagacagagagaggaacttggctgtgttgtcctgcctcagagacaaattcatctattgtaggcctagcccctgcctttgaaaacaaggaaaggttggtagaacatcaacacagcatggaatttccagggaggtctcatttcaaaacttcataaagaacaagaaccacctggacttctgtgagggcgatgattaaactggcctgagtttgaatgaaaggataatgtatgctcaacctgtgactaacaccaaggaggtcaagtggcagaaggtcttgtatgagcgacagccctttcctgataactatgtggaccggcgattcctggaagagctccggaaaaacatccatgctcggaaataccaatattgggctgtggtatttgagtccagtgtggtgatccagcagctgtgcagtgtttgtgtttttgtggttatctggtggtatatggatgagggtcttctggccccccattggcttttagggactggcctggcttcttcactgattgggtatgttttgtttgatctcattgatggaggtgaagggcggaagaagagtgggcagacccggtgggcg

SEQ ID NO: 22729 - DNA, 776 bp, Homo sapiens
  misc_feature (1)...(776): n = a,t,c or g
agctatgacatgattacgaatttaatacgactcactatagggaatttggccctcgaggccaagaattcggcacgagcggcacgagccctagaggcagctgctccaggaacagaggtgccatgcagccccgggtactccttgttgttgccctcctggcgctcctggcctctgcccgagcttcagaggccgaggatgcctcccttctcagcttcatgcagggctacatgaagcacgccaccaagaccgccaaggatgcactgagcagcgtgcaggagtcccaggtggcccagcaggccaggggctgggtgaccgatggcttcagttccctgaaagactactggagcaccgttaaggacaagttctctgagttctgggatttggaccctgaggtcagaccaacttcagccgtggctgcctgagacctcaataccccaagtccacctgcctatccatcctgccagctccttgggtcctgcaatctccagggcttcccctgtaggttgcttaaaagggacagtattctcagtgctctcctaccccacctcatgcctggcccccctccaggcaagctggcctcccaataaagctggacaagaagctgttatgaaaaaaaaaaaatgggannaatnnnnnannnnnannnnannaaaaaaaaaaaanntttttttnggngnnggngaatntnnncnnttanggggggntttttttnggganggggcntntttaaaantcngggggggaaaaaaccnnnnnnnggggnnnncnnccnngggggg

SEQ ID NO: 22730 - DNA, 685 bp, Homo sapiens
  misc_feature (1)...(685): n = a,t,c or g
ggctgtggaaagtggtcaagcagatgatgagcgtgttcgtgaatattatcttcttcaccttcagaggtggattgatatcagcttagaagagattgagagcattgaccaggaaataaagatcctgagagaaagagactcttcaagagaggcatcaacttctaactcatctcgccaggagaggcctccagtgaaacccttcattctcactcggaacatggctcaagccaaagtatttggagctggttatccaagtctgccaactatgacggtgagtgactggtatgagcaacatcggaaatatggagcattaccggatcagggaatagccaaggcagcaccagaggaattcagaaaagcagctcagcaacaggaagaacaagaagaaaaggaggaagaggatgatgaacaaacactccacagagcccgggagtgggatgactggaaggacacccatcctaggggctatgggaacccgacagaacatgggctgatcttcccacaacaccacaggactgcagggtgcacaactcccctgccaaggaaaaccatgcagtcctcccctccctggtctcctgcttcagctctgtacaacgagggcaaagatgctaaatcttgcttttgcattcagtaaagtgtcaagtgantaaatggggaattggaccctaaatgatatgaaccnncagtc

SEQ ID NO: 22731 - DNA, 734 bp, Homo sapiens
  misc_feature (1)...(734): n = a,t,c or g
ggtaacaggcagaggttggaacagtttggagggatcagaagacaggaagatgtgggaaagtttgggacttcctagagacttgttaaatggctttgaccaaaatgctgataatgattgggacatgaaatccaggctgagttggtctcacgatagcgatgaggaacttgtttggtactggagtaaaggtgacncttgctatattttagcaaagagactggctgcattttgcccctgccctanagatttgtggaactttgaactcgagggagatgatttagggtatctggcagaagaaatttctaagcagcaaagcattcatgaggtgacttgggtgctgttaaaaggcagcctgatgatgagatagaaaagaaaaacccattttctgaggataaattcaagccccctgcagaaatttgcataagtaacaaggagccaaatgttaatcactaagacatggggaaaatgtctgcagggcatgtcagagacctttgcagcagtgcctcccatcacaggcctggaggcctaggagggaaaaaatggttttgtgggccaggcccaaggtccccttgctgtgtgcagcccagggacttggtaccatgcatcccagctgctctagtcatggctaaaaggggccaagatacagctcaggccttggcttcagagggtgcaaagccccaagtcttggcatcttccacgtagtgttgagcctgcaggtgcacagaagttaanaactg

SEQ ID NO: 22732 - DNA, 602 bp, Homo sapiens
  misc_feature (1)...(602): n = a,t,c or g
ctttcatcaagccttctcctgaggaagcacagctgtggtcagaagcatttgacgagctgctagccagcaaatatggtcttgctgcattcagggcttttttaaagtcggaattctgtgaagaaaatattgaattctggctggcctgtgaagacttcaaaaaaaccaaatcaccccaaaagctgtcctcaaaagcaaggaaaatatatactgacttcatagaaaaggaagctccaaaagagataaacatagattttcaaaccaaaactctgattgcccagaatatacaagaagctacaagtggctgctttacaactgcccagaaaagggtatacagcttgatggagaacaactcttatcctcgttgcttggagtcagaattctaccaggacttgtgtaaaaagccacatgtcaccacagagcctcatgctacatgaaatgtagaagggagcccagaaatggaggacatttcattcttttttcctgatgggaaggactgtgacctgccataaagactgacctttgaattcagcctgggtgttcaggaaacatcactcanaactattggttccaaagttggggaantgaatcanggaagccngtaa

SEQ ID NO: 22733 - DNA, 479 bp, Homo sapiens
  misc_feature (1)...(479): n = a,t,c or g
cttgactgattacgaantttgacacagctatgactgattacgaatttaatacgactcactatagggaatttggccctcgaggccaagaattcggcacgagcccctcgcttcccgacgttccgttcccccctgcccgccttctcccgccaccgccgccgccgccttccgcaggccgtttccaccgaggaaaaggaatcgtatcgtatgtccgctatccagaacctccactctttcgacccctttgctgatgcaagtaagggtgatgacctgcttcctgctggcactgaggattatatccatataagaattcaacagagaaacggcaggaagacccttactactgtccaagggatcgctgatgattacgataaaaagaaactagtgaaggcgtttaagaaaaagtttgcctgcaatggtactgtaattgagcatccggaatatggagaagtaattcagctacagggtgaccaacgcaagaa

SEQ ID NO: 22734 - DNA, 408 bp, Homo sapiens
gtcttaaccagacttgccgcagaattgaacaaatttatgctggaaaaagtgactgaggacacaagcagtgttctgcgttccccgatgcccggagtggtggtggccgtctctgtcaagcctggagacgcggtagcagaaggtcaagaaatttgtgtgattgaagccatgaaaatgcagaatagtatgacagctgggaaaactggcacggtgaaatctgtgcactgtcaagctggagacacagttggagaaggggatctgctcgtggagctggaatgaaggatttataacctttcagtcatcacccaatttaattagccatttgcatgatgctttcacacacaattgattcaagcattatacaggaacacccctgtgcagctacgtttacgtcgcatttattcccagagt

SEQ ID NO: 22735 - DNA, 380 bp, Homo sapiens
gtcagcagcctcccccttgagccccctcgcttcccgacgttccgccgccttccgcaggccgtttccaccgaggaaaaggaatcgtatcgtatgtccgctatccagaacctccactctttcgacccctttgctgatgcaagtaagggtgatgacctgcttcctgctggcactgaggattatatccatataagaattcaacagagaaacggcaggaagacccttactactgtccaagggatcgctgatgattacgataaaaagaaactagtgaaggcgtttaagaaaaagtttgcctgcaatggtactgtaattgagcatccggaatatggagaagtaattcagctacagggtgaccaacgcaagaacatatgccagttcct

SEQ ID NO: 22736 - DNA, 522 bp, Homo sapiens
gaagaaaacttcggttcgctcccaggaccccgggcagcggcgggtgctggaccgggctgcccggcagcgtcgcatcaaccggcagctggaggccctggagaatgacaacttccaggatgacccccacgcgggactccctcagctcggcaagagactgcctcagtttgatgacgatgcggacactggaaagaaaaagaagaaaacccgaggtgatcattttaaacttcgcttccgaaaaaactttcaggccctgttggaggagcagaacttgagtgtggccgagggccctaactacctgacggcctgtgcgggacccccatcgcggccccagcgccccttctgtgctgtctgtggcttcccatccccctacacctgtgtcagctgcggtgcccggtactgcactgtgcgctgtctggggacccaccaggagaccaagtgtctgaagtggactgtgtgagcctgggcattccagagaggaaaggcgctgtgacttgccgggctttaaaaagaccgaatttcttc

SEQ ID NO: 22737 - DNA, 482 bp, Homo sapiens
gcggcacgagcaccctcctctctcccgcaatccggttcctcttccccctccttctcactgtttgttgtgtgtttgatgtgttaaagcaggagcgagaacccgagcagcgccatgagcaacactaccgtcgtccccagcactgcaggtccgggccccagcggcgggcccggtggcggaggtggtggtggcggcggaggcggcggcaccgaggtaatccaggtgactaatgtctccccgagcgctagctctgagcagatgcggactctcttcggtttcctaggcaagatcgacgaactgcgcctcttcccgccggatgattcgcctttgccagtctcatctcgtgtctgctttgttaagttccatgatccagactcagcagttgtggcacagcatctgacaaacactgtattcgttgacagagctttgatagtcgtaccatatgcaagaagtgaagcagccgacacgagtcgttgttcataaaa

SEQ ID NO: 22738 - DNA, 603 bp, Homo sapiens
cttgttttgtatcttattttggtaggccaggtcagcaattggacattttataataaaatataatactttgtcttccacaaaaacaataacataaaaacctcctttcttattaatttggtgagccaacctactattgcttaaaaaaaccaatcagcatagatacatacctgaccatattcctcaaggtctccttttccttcctccagtgtaacaaaattccctgctggcgtcctatgtaaagataatcggccctttttggaccttttgttgggatcagcaactgggtccttgaagacgttaatcccaaggccattagttacaacatagctacacttgaaggaacaattcaagagatctcttgtcaacttctgtagcaaacctccaccagaaccgaaggcaatattttcaatactccacattttttgtttcatgccttctacaatctcttgtaaggtattaatatctactccatccccttgaataactctaagataaggtggcagcaacttgtaaccctttgagttctcagtaacaggaaacttcttacctaaaatctccaaaacctttaacacagtgtcaagagggtttccagaatcaggtctg

SEQ ID NO: 22739 - DNA, 1116 bp, Homo sapiens
ttgacatgattacgaatttaatacgactcactatagggaatttggccctcgaggccaagaattcggcacgagcgccgccgaggattcagcagcctcccccttgagccccctcgcttcccgacgttccgttcccccctgcccgccttctcccgccaccgccgccgccgccttccgcaggccgtttccaccgaggaaaaggaatcgtatcgtatgtccgctatccagaacctccactctttcgacccctttgctgatgcaagtaagggtgatgacctgcttcctgctggcactgaggattatatccatataagaattcaacagagaaacggcaggaagacccttactactgtccaagggatcgctgatgattacgataaaaagaaactagtgaaggcgtttaagaaaaagtttgcctgcaatggtactgtaattgagcatccggaatatggagaagtaattcagctacagggtgaccaacgcaagaacatatgccagttcctcgtagagattggactggctaaggacgatcagctgaaggttcatgggttttaagtgcttgtggctcactgaagcttaagtgaggatttccttgcaatgagtagaatttcccttctctcccttgtcacaggtttaaaaacctcacagcttgtataatgtaaccatttggggtccgcttttaacttggactagtgtaactccttcatgcaataaactgaaaagagccatgctgtctagtcttgaagtccctcatttaaacagaggtcaagcaataggcgcctggcagtgtcaagcctgaaaccaagcaataccgtcatgtttcagccaagcccagagccctaagattacaaacaactatggccggaacctcctcagctctccctctgcagagttccctaccctaagagaatgttaccacctgaacagtcctcggtgaatctgagaggagaggatggggtaaggcagaagcaccagctgtactactagaagggagcttttggtggtagatcccctggtgtctccaacctgactaggtggacagagctcaaagaggccctcttaccgctagcgaggtgataggacatctggcttgccacaaaggtctgttcgaccagacat

SEQ ID NO: 22740 - DNA, 457 bp, Homo sapiens
atctttcattcagaatggacattaatatcttgaatagagaagaaagcttttagaaatgtatcatttgtcagaattgcatgccttttaaaaaatgataaagagagatgctgagtgttttgtatgttagcatcgactctttctttttatttctgttcagactcaagtttttagaagctagaatatagatccctttaagaaaaaaaaagggaagaaagaagaatttgctggttagtcgacctctgtttaagaagtgcttcatcctcctcctccacctctccgtggtgtttctctgcagctctctgtaggttagggttctgtgctgcctagcagaatgctcatgtgttagctgaatagatatcatcgacagacatagaccactataggttttctttccttgtgatttccaaaatgccatccaaagagtcttggtcagggaggaaaactaatagggctgcag

SEQ ID NO: 22741 - DNA, 419 bp, Homo sapiens
gagatcttttttatgtttgcacacttaaccctagtaagccaggagccatctctgaaagaaataataattagcatttcttattagccaaaatagggattcttcattgttcagtttggtggaaccagtagactcagcagtcagaatttgtttcagtcctttaatcgtagcaggggagaactttaccttttgcttccttgaaagagagtccctagagtgttgtaaatctccaagtagatttaacctaaagctgtaattaggaaagtgaacaaaaaatacgtgtgtaaggattttaattgctactgtgtttataactgagattgttggaagaaactggaatgttcgtcagtaagggattggttaaataagttgatgcacacgtaaaatggaacaccatgtagccattaaaagaacatggtaga

SEQ ID NO: 22742 - DNA, 565 bp, Homo sapiens
gggaatttagtggttatgttcaacaagtaaaatatgcaatgacaagaataaaagctgccatgccaagaatctatgagctcgcagctggaggcactgctgttggtacaggtttaaatactagaattggctttgcagaaaaggttgctgcaaaagtggctgcacttacaggcttgccttttgtcactgctccgaataaatttgaagctctggctgctcatgacgctctggttgagctcagtggagccatgaacactactgcctgcagtctgatgaagatagcaaatgatattcgatttttgggttctggtcctcggtcaggtctgggagaattgatcttgcctgaaaatgaaccaggaagcagtatcatgccaggcaaggtgaaccctactcagtgtgaagcaatgaccatggttgcagcccaagtcatggggaaccatgttgctgtcactgtcggaggcagcaatggacattttgagttgaatgttttcaagccaatgatgattaaaaatgtgttacactcagccaggctgctgggggatgcttcagtttcctttacagaaaactg

SEQ ID NO: 22743 - DNA, 514 bp, Homo sapiens
  misc_feature (1)...(514): n = a,t,c or g
tntgaatnccttgagctctgacatgattacgaatttaatacgactcactatagggaatttggccctcgaggccaagaattcggcacgagggcaccctcaagggccacaacggctgggtaacccagatcgctactaccccgcagttcccggacatgatcctctccgcctctcgagataagaccatcatcatgtggaaactgaccagggatgagaccaactatggaattccacagcgtgctctgcggggtcactcccactttgttagtgatgtggttatctcctcagatggccagtttgccctctcaggctcctgggatggaaccctgcgcctctgggatctcacaacgggcaccaccacgaggcgatttgtgggccataccaaggatgtgctgagtgtggcttctcctctgacaaccggcagattgtctctggatctcgagataaaaccatcaagctatggaataccctgggtgtgtgcaaatacactgtcaggatgagagccactcagagtggg

SEQ ID NO: 22744 - DNA, 363 bp, Homo sapiens
gacccatgcctttagatactgaggccatcttacataaaacagctgaatggtatgtcctctgtctcaaaacctgtttcttcatgtatgtcctctatttcccatatttgaggagtatgagtctgcttgagtaacagcacctccatccttttgagagaaatagagaagtggacgctgggtaagtaatgagtctagttttggatttactgaatttaggtcctaaagtgacaactggatagtcatttccatagacacatttacttgaaatgtgcaagtaaaatttatgagactgttttgtgactgatgtgaaaaatttaggaggcctgtgctttcgttggtgtagatgagtttgccaaggaaaaacat

SEQ ID NO: 22745 - DNA, 621 bp, Homo sapiens
gatgtaccgacggccgatgctgcaccccccacagaaccaccaccctgccggtggagttcaagtgccctgacggcgaggtcatgaagaagaacatgatgttcatcaagacctgtgcctgccattacaactgtcccggcgacaatgacatctttgaatcgctgtactacaggaagatgtacggagacatggcatgaagccagagagtgagagacattaactcattagactggaacttgaactgattcacatctcatttttccgtaaaaatgatttcagtagcacaagttatttaaatctgtttttctaactgggggaaaagattcccacccaattcaaaacattgtgccatgtcaaacaaatagtctatcaaccccagacactggtttgaagaatgttaagacttgacagtggaactacattagtacacagcaccagaatgtatattaaggtgtggctttaggagcagtgggagggtaccagcagaaaggttagtatcatcagatagcatcttatacgagtaatatgcctgctatttgaagtgtaattgagaaggaaaattttagcgtgctcactgacctgcctgtagccccagtgacagctaggatgtgcattcttcaccat

SEQ ID NO: 22746 - DNA, 862 bp, Homo sapiens
  misc_feature (1)...(862): n = a,t,c or g
ggttcagtctggaatttcaagattttgtgaataaatgcttaataaaaaaccccgcagagagagcagatttgaagcaactcatggttcatgcttttatcaagagatctgatgctgaggaagtggattttgcaggttggctctgctccaccatcggccttaaccagcccagcacaccaacccatgctgctggcgtctaagtgtttgggaagcaacaaagagcgagtcccctgcccggtggtttgccatgtcgcttttgggcctccttcccatgcctgtctctgttcagatgtgcatttcacctgtgacaaaggatgaagaacacagcatgtgccaagattctactcttggcatttttaatattaccggctttagtcctaatacnattattgttcccctaagttggattaactttgtgcttggggctatttgngtgtangctgatgatcaaaacctgtgccaggctgaattacagtgaaattttggtgaatgtgggtagtcattcttacaattgcactgctgttcctgctccatgactggctgtctgcctgtattttcgggattctttgacatttggtggtactttattcttgctgggcatactttctctctaggagggagccttgtgagatccttcacaggcagtgcatgtgaagcatgctttgctgctatgaaaatgagcatcagagagtgtacatcatgttattttattattattatttgcttttcatgtagaactcagcagttgacatccaaatctagccagagcccttcactgccatgatagctggggcttcaccagtctgtctactgtggtgatctgtagacttctggntgtatttctatatttattttcagtatactg

SEQ ID NO: 22747 - DNA, 515 bp, Homo sapiens
ctcctacctcctcacggctcttcccggcgctctcctggctcccttctgccccagctccgtctcggcggcggcgggcagttgcagaggtgcagaatggctgacctcagtcttgcagatgcattaacagaaccatctccagacattgagggagagataaagcgggacttcattgccacactagaggcagaggcctttgatgatgttgtgggagaaactgttggaaaaacagactatattcctctcctggatgttgatgagaaaaccgggaactcagagtcaaagaagaaaccgtgctcagaaactagccagattgaagatactccatcttctaaaccaacactcctagccaatggtggtcatggagtagaagggagcgatactacagggtctccaactgaattccttgaagagaaaatggcctaccaggaatacccaaatagccagaactggccagaagataccaacttttgtttccaacctgagcaagtggtcgatcctatccagactgatccctt

SEQ ID NO: 22748 - DNA, 454 bp, Homo sapiens
  misc_feature (1)...(454): n = a,t,c or g
ttgnnnaccnttttgacangattacgaattcnataccgactcactatagggaattcnggccctcgaggccaagaattcggcacgagcatgaggtcaggagatcgggaccatcctggctaacacggtgaaaccccgtctctactaagaatacaaaaaaattggccaggtatggtggcaggcacctgtagtcccagctactcgggaggctgagggaggagaatggcatgaacccgggaggcagagcttgcagtgagctgagattgcgccactgcactccagcctgggcgacagagcaagactccgcctcaacaacaacaacaaaaaaagataacactggcctgccttccacccaggactttttcccatcactaactaaaaatataaatgaaagccctgatcaggtggnttattataatatctgccaggnatcaagcatttactatgcctaaatgct

SEQ ID NO: 22749 - DNA, 413 bp, Homo sapiens
gctatgacatgattacgaatttaatacgactcactatagggaatttggccctcgaggccaagaattcggcacgagctggggcagatcccacattgtatgatataacatatctattaaaaacatgcctaatctggccaggcgtggtagctcactcctataattctagcactttgggaggctgaggcaggcagatcacttgaggtcaggagtttgagaccagcctggccaacatggcgaaactccatctctactaaaaatataaaaattagccgggtgtggtggcgggcgcctgtagtccgagctacttgggaagctgaggcaggagaaacgcttgaacccgggaggtggaggctgcagtgagccgagattatgccactgcactccagcctgggtgacagagcgggattccatct

SEQ ID NO: 22750 - DNA, 800 bp, Homo sapiens
cctcaaccccgacaacctgcagggcggcgacgacctggaccccaactacgagctcagcacgtagttggggtccagggtgcgcacgggccgcagcatccgtggcttctgcctccccccgcactgcagccgcggggagcgccgcgccatcgagaagctcgcggtggaagccctgtccagcctggacggcgacctggcgggccgatactacgcgctcaagagcatgacggaggcggagcagcagcagctcatcgacgaccacttcctcttcgacaagcccgtgtcgcccctgctgctggcctcgggcatggcccgcgactggcccgacgcccgcggtatctggcacaatgacaataagaccttcctggtgtgggtcaacgaggaggaccacctgcgggtcatctccatgcagaaggggggcaacatgaaggaggtgttcacccgcttctgcaccggcctcacccagattgaaactctcttcaagtctaaggactatgagttcatgtggaaccctcacctgggctacatcctcacctgcccatccaacctgggcaccgggctgcgggcaggtgtgcatatcaagctgcccaacctgggcaagcatgagaagttctcggaggtgcttaagcggctgcgacttcagaagcgaggcacaggcggtgtggacacggctgcggtgggcggggtcttcgacgtctccaacgctgaccgcctgggcttctcagaggtggagctggtgcagatggtggtggacggagtgaagctgctcatcgagatggaacagcggctggagcagggccagg

SEQ ID NO: 22751 - DNA, 588 bp, Homo sapiens
  misc_feature (1)...(588): n = a,t,c or g
gcagcttcgcctcaacagcatcaagaagctgtccaccatcgccttggcccttggggttgaaaggacccgaagtgagcttctgcctttccttacagataccatctatgatgaagatgaggtcctcctggccctggcagaacagctgggaaccttcactaccctggtgggaggtcctgactttgcccactgtctgctgcctcctttggaaaatctggcaactgtggaagagactgttgttcgtgacaaggctgtggagtccctgagacagatctcccaggagcatactcctgttgctctggaagcttattttgtacctctggtgaaacgcttagcaagtggggattggttcacctctcgcacatctgcatgtggtttgttcagcgtttgctatcccagggcatcaaatgctgttaaagcagaaatcagacagcaattccgttccttgtgctcagatgacacaccaatggtaccacgtgctgctgcttccaaattgggtgaatttgcaaaagttttgggattanacagtgtgaaaagtgaaattgttccactgtcactagtctagcttcagatgaacaggattcagtgcgc

SEQ ID NO: 22752 - DNA, 445 bp, Homo sapiens
tatatatcaataaatgtttatatttattttgtgaaggtgccatggagaactggggccttgttacttatagggagactgcattgcttattgatccaaaaaattcctgttcttcatcccgccagtgggttgctctggttggtgggacatgaactcgcccatcaatggtttggaaatcttgttactatggaatggtggactcatctttggttaaatgaaggttttgcatcctggattgaatatctgtgtgtagaccactgcttcccagagtatgatatttggactcagtttgtttctgctgattacacccgtgcccaggagcttgacgccttagataacagccatcctattgaagtgagccatactttctaaccattagcctatgactgctctcatttacaatgaaatacgtaatttgttacatagatactttggactttgaaaagaa

SEQ ID NO: 22753 - DNA, 536 bp, Homo sapiens
  misc_feature (1)...(536): n = a,t,c or g
gntgntnnntttgaagatncgttgancgttangacatgattacgaatttaatacgactcactatagggaatttggccctcgaggccaagaattcggcacgagcccagatcgctactaccccgcagttcccggacatgatcctctccgcctctcgagataagaccatcatcatgtggaaactgaccagggatgagaccaactatggaattccacagcgtgctctgcggggtcactcccactttgttagtgatgtggttatctcctcagatggccagtttgccctctcaggctcctgggatggaaccctgcgcctctgggatctcacaacgggcaccaccacgaggcgatttgtgggccataccaaggatgtgctgagtgtggccttctcctctgacaaccggcagattgtctctggatctcgagataaaaccatcaagctatggaataccctgggtgtgtgcaaatacactgtccaggatgagagccactcagagtgggtgtcttgtgtcgcttctcgcccaacagcagcaaccctt

SEQ ID NO: 22754 - DNA, 342 bp, Homo sapiens
gggcttgtcccctgccctgaagctggcagttcagtcccttattctgccctgttggaagccctgctgaaccctcaactattgactgctgcagacagcttatctccctaaccctgaaatgctgtgagcttgacttgactcccaaccctaccatgctccatcatactcaggtctccctactcctgccttagattcctcaataagatgctgtaactagcattttttgaatgcctctccctccgcatctcatctttctcttttcaatcaggcttttccaaagggttgtatacagactctgtgcactatttcacttgatattcattccccaattcactgcaaggagac

SEQ ID NO: 22755 - DNA, 454 bp, Homo sapiens
  misc_feature (1)...(454): n = a,t,c or g
ttgnnaacngttatgacatgattacgaatttaatacgactcactatagggaatttggccctcgaggccaagaattcggcacgaggaattccacagcgtgctctgcggggtcactcccactttgttagtgatgtggttatctcctcagatggccagtttgccctctcaggctcctgggatggaaccctgcgcctctgggatctcacaacgggcaccaccacgaggcgatttgtgggccataccaaggatgtgctgagtgtggccttctcctctgacaaccggcagattgtctctggatctcgagataaaaccatcaagctatggaataccctgggtgtgtgcaaatacactgtccaggatgagagccactcagagtgggtgtcttgtgtccgcttctcgcccaacagcagcaaccctatcatcgtctcctgtggctgggacaagctggtcaaggt

SEQ ID NO: 22756 - DNA, 581 bp, Homo sapiens
  misc_feature (1)...(581): n = a,t,c or g
gtccgaaacttttaaggtaactgggatgatctgcttgtaaaaatgcttgttgccttttgctttatcttcagtgtacctccttaatcctgcttcaacttgattatcttgtgaaacgatgagagtaagttgcaaccttgtgactgaaaacttgaaaagagtggagcaggtgggacctcttattctcaaataattctccgtagncacagtttcagaactgagtaaggatccttggtacttggtggcatctgttgaactgaggagcatttctcattgtaaagattgcctttgttctgtctaaaagtctggagaaatcccaaagacttttcctatgtactaggcattttattttgattgacttacaaactcttcttaatcattatcaatctcggtttttttgtggtgcagtggaaggagaaataggtctagtttctgcctctgattagccgcacagccttgaacaaatcacatttcatctttgaacttacctctactgttagactaggcgactcacatttgaggacttttctcgggtatcttgagggtttgtgatcctgaacccttaaacagtgcttttttgttac

SEQ ID NO: 22757 - DNA, 526 bp, Homo sapiens
taacagctatgacatgattacgaatttaatacgactcactatagggaatttggccctcgaggccaagaattcggcacgagctgttgttgtgactacagctccgtctcctaaacaggcacctgagcaacaatgattatgagagaggatggcttccgtgaaagaccatgcctggtctgtcctggctgagaagggaccagggaggttgcatcattgttttaagcttgcctgttcaaggcagccaggcgaggggtgatggcaacggtggcctggattcgtggcctggattctgctgccacgtgccatagtggagcaccctgagaaaggttcactccagggttccaaggggcggtggctcacgcctctaaatcccagcactttgggaggccaaggcgggcggatcacgaggtcaggagatcgagaccatcctggacaacatggtgaaaccctgtctctactaaactacaaagaattggccgggcgtggtggtgtgcacctgtggtcgcagctgctcggaagctgaaggcaa

SEQ ID NO: 22758 - DNA, 612 bp, Homo sapiens
  misc_feature (1)...(612): n = a,t,c or g
ggagatcagaggaaaaccagcaacagcgtgggagtttggggagaggcattccataccagattctgtggcctgcaggtgacatgctgcctaagagaagcaggagaacagtcagcaaaagcattggtcccacctgcccctttgctggaagctgtgaagtcagcaagactcagaggcgccactgcccagcctgcaggttgcanaagtgcttagatgctggcatgaggaaagacatgatactgtcggcagaagccctggcattgcggcgagcaaagcaggcccagcggcgggcacagcaaacacctgtgcaactgagtaaggagcaagaagagctgatccggacactcctgggggcccacacccgccacatgggcaccatgtttgaacagtttgtgcagtttaggcctccanctcatctgttcatcatcaacaagcccttgccaacctgggccctntnnngccccgggccaaaaacttcgnaancatnacnacttcaagggactggnancacnagtttactaaggacctgccctcttccgttcccgccattgangacaaatcnccttctcagggacaactntgaaatccntaatcgncccanacacttncgtccaa

SEQ ID NO: 22759 - DNA, 331 bp, Homo sapiens
  misc_feature (1)...(331): n = a,t,c or g
ccnttggnnnccnnaacagcctatgacatgattacgaatttaatacgactcactatagggaatttggccctcgaggccaagaattcggcacgagcggcacgagccagattctgtggcctgcaggtgacatgctgcctaagagaagcaggagtctgtgacagccaccccaacacgtgacgtcatggccagtagggaagatgagctgaggaactgtgtggtatgtggggaccaagccacatgctaccactttaatgcgctgacttgtgagggctgcnngggtttcttcangagancagncnnanaancnttggnnccacctgcccctttgctg

SEQ ID NO: 22760 - DNA, 462 bp, Homo sapiens
ctgctatgacatgattacgaatttaatacgactcactatagggaatttggccctcgaggccaagaattcggcacgaggggtcataatccctaactccaatcactggcaactcctgagatcagaggaaaaccagcaacagcgtgggagtttggggagaggcattccataccagattctgtggcctgcaggtgacatgctgcctaagagaagcaggagtctgtgacagccaccccaacacgtgacgtcatggccagtagggaagatgagctgaggaactgtgtggtatgtggggaccaagccacaggctaccactttaatgcgctgacttgtgagggctgcaagggtttcttcaggagaacagtcagcaaaagcattggtcccacctgcccctttgctggaagctgtgaagtcagcaagactcagaggcgccactgcccagcctgcaggttgcagaagtgctta

SEQ ID NO: 22761 - DNA, 756 bp, Homo sapiens
actttgaatgccatgattacgaatttaatacgactcactatagggaatttggccctcgaggccaagaattcggcacgagtgcaaggcggcggcaggagaggttgtggtgctagtttctctaagccatccagtgccatcctcgtcgctgcagcgacacacgctctcgccgccgccatgactgagcagatgacccttcgtggcaccctcaagggccacaacggctgggtaacccagatcgctactaccccgcagttcccggacatgatcctctccgcctctcgaggtacggactaagataagaccatcatcatgtggaaactgaccagggatgagaccaactatggaattccacagcgtgctctgcggggtcactcccactttgttagtgatgtggttatctcctcagatggccagtttgccctctcaggctcctgggatggaaccctgcgcctctgggatctcacaacgggcaccaccacgaggcgatttgtgggccataccaaggatgtgctgagtgtggccttctcctctgacaaccggcagattgtctctggatctcgagataaaaccatcaagctatggaataccctgggtgtgtgcaaatacactgtccaggatgagagccactcagagtggggtgtcttgtgtccgcttctcgcccaacagcagcaaccctatcatcgtctcctgtggctgggacaagctggtcaaggtatggaacctggctaactgcaagctgaagaccaaccacattgg

SEQ ID NO: 22762 - DNA, 381 bp, Homo sapiens
ggagagcctgaaaaggctgaaacaagccagaaaaaccactcccgccaaccccgtcggtcccagtggtggcatgagcgacgacgacaaaatcaggctgcagttggccctagatgttgagtacttgggagagcagatacaaaagttgggactacaagcaagtgacataaaaagcttctcagctctcgcagagcttgttgctgctgccaaggaccaggcaacagcagagcagccttaagcatcttggaagatcccgaggttagattcttaagcaagagaagagttggacttccaggctgaaggggagaaagtgactctgttctcttagcaaccgtctgtagcaaagaagtgcttccagcatcactccagcaacacgcccatgcg

SEQ ID NO: 22763 - DNA, 402 bp, Homo sapiens
gcagatgaatgaataaagaaaatatatatttacacaatggaatactattcagccctaagaaagaaggaaattctgtcacttgtaacaacatggataagcctggagaacattatgttaagtgaaataagacaaacacaggaagacaaatacagtatggcatattctcacttatgtatgaaatctaaaaatgctgaactcatagaagcagagagtggtggttaccaggtgccggaagtggggtgggagttaaggaagattggtcaaaggataaaacatttcagttagacagaaggactaagttcaagagatctattttacaacatgatgactgtagttaataacaatgtattgtatacttgaaagctgtttaagagagtagattttaagtgttctcaccacaca

SEQ ID NO: 22764 - DNA, 701 bp, Homo sapiens
  misc_feature (1)...(701): n = a,t,c or g
acataaccnaatatcatatagggaacccggtttctgaggtaanaacctggtatgagggaggttcagttccgacggaggtcggaaaaggggaggcgagccggtttcggagtttttanttcaccctagggatcgacgttatcgcccggaaaccgggaggcgaacgcgtccctcggggatcgttcccgagacgaatggcgctactagcgaacgatatgatcccttattcccctttanccttcgaaatcgcccgccggattcctctcgctttcacatccttactcgtagcccaggggaaaaaaggtaaaacgatagcgcgtctccaaactacagatttcaaaccagggagcttctccgtcatagggtcgangacgaggtttcttcggcataaggttacgcggcatagagaccaaaagtcggtttctggggctttaacgttcgggccgaaaatttaacnnaggggtngggttctcgggntttatagggggggggccaaaanttttaanaagggttttcnggaattccgcgactntnggtagggcntccancgggatntagggaaacgaccccgaatacngttaaaacnctatacccaacaaaagaaatctcangtcctccttcccccccccccccgaaaangaaccccgttnccnattaggtgggccaaacnggggaacnccggngaanaaaaantttttttttgg

SEQ ID NO: 22765 - DNA, 482 bp, Homo sapiens
cctttgctatccacatgattacgaatttaatacgactcactataggggaatttggccctcgaggccaagaattcggcacgaggggtaatatagtgagaccttgtctcttctaaaaaataattaaccaggggtggtggtgtgcacccgtcatccagctactgtggaggctgaggtgagaggattccttgagcctgggaggttgaggctgcagtgagccctgatcttgcctgtactccatccagcctgagcaacagaacgagaccttgtctcaaaaaaaataataattatgaaaataagtgttaaaagtaataaacatatattgcagtagaatcttcaaataagaaaactggtgccacattggattctatgatttcatggtgtgaaatgggataatttggggggtggctcacgcctgtaatcccagcacttcgggaggcagaggcaggcagattacatgaggccaggagttcaagaccagcctg

SEQ ID NO: 22766 - DNA, 448 bp, Homo sapiens
gatgcaacagcatttttttgatgatgaagacagaacagttccaagtactccaactcttgtggtgccacatcgtactgatggatttgctgaagcaattcattcgccgcaggttgctggtgtccctagattccggtttgggccacctgaagatatgccacaaacaagttctagtcactctgatcttggccagcttgcttctcaaggaggtttaggaatgtatgaaacacccctgttcctagctcatgaagaagagtcaggtggccgaagtgttcccactactccactacaagtagcagccccagtgactgtatttactgagagcaccacctctgatgcttcggaacatgcctctcaatctgttccaatggtgactacatccactggcactttatctacaacaaatgaaacagcaacaggtgatgatggagatgaagtatttgtggaggca

SEQ ID NO: 22767 - DNA, 771 bp, Homo sapiens
gtctagccaaaggaagaccagtaggaaagcaaacccttgactctggcaggatttgcaggcagcaggcagcacccctctgccagccgggccccggctgcagaagtgctgttggtttggatgctgtgtgcctgtcaagattccctccggttttctggctagaaagctcatccgtttccggtttctaagagtcagttcagtggcagagccaccagggaaaagtgaggctcttgggggtggtttgaccctgcttacctgggagcacacttttcccttccccgatgacctgggatggtggccaggccgtgcccttgctgttgctgggcagtgtccttttggaaagggagctgccccaggctttagtgcagctgccaaccctgttaggcctggcctctcgaggcctcttctgacctcaagggtcacaccccctcaaagatcctctcacccatggtagttgctgctcgtggttctgtctgtccgtgcaccgatgcacacaccgcaccccaccactgtactctgaaattggcgagtgagttgagagccagctctgcggggtcatcacgcagccatggttgtgcctgccgttcatggtggtctttcaggttatcttggcaacatgtacattgcttttatttttttttcttttttgctttcattgtacagtcagtactataaaatttctcttttgagttttatacctttgtagcattttagatgacattgtgtttgtactttgttgtgtagagtggaagaattgtgttgaataaacccaag

SEQ ID NO: 22768 - DNA, 833 bp, Homo sapiens
cgtccctgttttttgtgctcctccgagctcgctgttcgtccgggttttttacgttttaatttccaggacttgaactgccatgtcctctgaagaaggaaagctcttcgtgggagggctcaactttaacaccgacgagcaggcactggaagaccacttcagcagtttcggacctatctctgaggtggtcgttgtcaaggaccgggagactcagcggtccaggggttttggtttcatcaccttcaccaacccagagcatgcttcagttgccatgagagccatgaacggagagtctctggatggtcgtcagatccgtgtggatcatgcaggcaagtctgctcggggaaccagaggaggtggctttggggcccatgggccttggtcgcagctactctagaggtggtggggaccagggctatgggagtggcaggtattatgacagtcgacctggagggtatggatatggatatggacgttccagagactataatggcagaaaccaaggtggttatgaccgctactcaggaggaaattacagagacaattatgacaactgaaatgagacatgcacataatatagatacacaaggaataatttctgatccaggatcgtccttccaaatggctgtatttataaaggtttttggagctgcaccgaagcatcttattttatagtatatcaaccttttgtttttaaattgacctgccaaggtagctgaagaccttttagacagttccatctttttttttaaattttttctgcctatttaaagacaaattatgggacgtttgtagaacctgagtatttttctttttaccagttttttagtttgagc

SEQ ID NO: 22769 - DNA, 407 bp, Homo sapiens
ggccctcgaggccaagaattcggcacgagatgactttgtggcacctgaattgtattatgtatgagaaactgatatatttgcaagatagcaaatgtaaataggagctagataatataagaatcctaatagatacccaaaagactctgttggctgggtgtggtggctcatgcttgtaatcctagcatttcaggaggctgaggcaggagaatcatttgaacccaggtgtttgagaccaacctggctaacataaggagaccctgtctctataaaaaataaaaaattagccgggcatggtggcatgcgcacagctatggccctagctacttgggaggctgaggtggaaagatcagttgagtctggaggtcactacagtgagctgttattgtgccactgtattccagcctggg

SEQ ID NO: 22770 - DNA, 293 bp, Homo sapiens
  misc_feature (1)...(293): n = a,t,c or g
gttcttcagttctatctgagacctcatcagaatggcctttaccagccatatttctatcagcactctgatctcaacgacttcagtaaccattaagaagttccagactttccctagttctggggtcttcctttaagccctcaccagaactgcagaactgtctttaatgctccattctttttctttctttttttttttttgnaaagggnntttggttttgggggnnncntgaaatggncttttaaanntcngggggggccncnnagngcaaggncccaaaaaaaaaaaanaaaaaa

SEQ ID NO: 22771 - DNA, 530 bp, Homo sapiens
ggaggaagagatctaattgggtagggcgggtgtagactagcctgccgagccgcccgctggcacctgcagcctcctgggcgcccgccgggccccggcgagaaagttgttaaagggagcgaggtggttgttcctggggtccgaggcgcgcctctcacgccctgcccaacagaagccgcagtcccgtggggtctggagacgcagtttcctgttaatgacaataaatccctgctccccctgcctcagacatctacgcagcgaaatcgagcctggccttgagggtccacaccgcgagggaagatgcgtgcgcccattccagagcctaagcctggagacctgattgagatttttcgccctttctacagacactgggccatctatgttggctgatggatatgtggttcatctggcccctccaagtgaggtcgcaggagctggtgcagccagtgtcatgtccgccctgactgacaaggccatcgtgaagaaggaattgctgtatgatgtggccgggagtgacaagtaccaggtcaacc

SEQ ID NO: 22772 - DNA, 638 bp, Homo sapiens
gccacctggagggatccccgctttggatgtgattccctctccccaaatgggcctaccaagggggcgggctgatgaccataagcggtacggcctttcaggagctgcctcaacgtaggggtgggtagtctgtgttctagttcctacataattgtaggaaaatgagctgtgtcatctctgagtcccttggtaattcaagggctgtacatccagctacagatctctctgctcatcatgccctttcttggtgctgctttttgggtaggaccccacgatttagggtaactgttatcatcagctgccatttctgatagggtctaccacatctgtaatgtctgcctttcccccacttttactgggaattgatagtccagcttccttgggcagtgtaagtaggaggttcatctgctgtgcgcctctaatgtctgtctggatgggatgtgttaggagttggcctgttgggttgaattgttgatttggctgagcagagctgagttttggtaggagtgctcatggttctgtcattcttggacctctcctggctgagctctgattccctgtgagcacgatgctgatgcaatagtcctgtgtcatcactgcagcggtcctcaggagctgccagggccaattgctacagagtg

SEQ ID NO: 22773 - DNA, 487 bp, Homo sapiens
gggccaagaagtaccgggacgcccgcacccaccagcacattccctaccgggaaaacaagaacctgaccggcacggcccgctacgcttccatcaacacgcacctgggcaaggagcagagccgccgcgacgacctggaggcgctgggccacatgttcatgtacttcctgcgcggcagcctcccctggcaggggctcaaggccgacacgctcaaggagcggtaccagaagatcggggacaccaaacgcgccacgcccatcgaggtgctctgcgagaacttcccagaggagatggccacgtacctgcgctatgtgcggcgcctggacttcttcgagaagcccgactatgactacctgcggaagctcttcaccgacctcttcgaccgcagtggcttcgtgttcgactatgagtacgactgggccgggaagcccctgccgacccccatcggcaccgtccacaccgacctgcctccagctcagctccggacaaa

SEQ ID NO: 22774 - DNA, 456 bp, Homo sapiens
tatgactgattacgaatttaatacgactcactatagggaatttggccctcgaggccaagaattcggcacgagggctcggcgtggtggcatgtgcctgtaatcctacctactcgggagaccgaggcaggagaatcccttgaacccaggaggtggaggttgcagtgagctgagatcctgccactgcactccagctgggcgacaagcacgaaactctgcctcaaaaaaaaaagaaaaataaacaaaacaaaacaaaacaaaaagtgattttttactatcatataatgaaataccagcattgaaaatatctgcataatccaataaaaattttccaaatgctccacacgttacaaaattatgccagggtaaaagagccattcaaactgtaaaacagacaatgaatttatacaaagtcaaatattcggctgggtgcggtggctcacatctgtaatccccgca

SEQ ID NO: 22775 - DNA, 379 bp, Homo sapiens
attacccacatatagtaattaatagatggtaattaattgatccttgatgtgatgttcttttgcatatttccttcattctaaagttgttccctggccgggagcgttggctttcgcctgtaatcccaacactttgggaggccaggacagatcacttgaggtcaggagttcgagaccagcccagccaacatggcgaaaccatgtctctactaaaaatacaaaaattatggtgacgcctgcctgtagtcccagctactcgggaggctgaggcaggaggatcgcttgaacccaggaagtggagactgcagtgagccgatatcgcaccacagcgctccagcctggtcgacagagtgagactccatctcaagaaaaaaaaaaaaaa

SEQ ID NO: 22776 - DNA, 336 bp, Homo sapiens
gctgaagaaggatgcaatctttcctgctccatttgttaatgccactactgatgacaggatacagtcattagttgttatcagcttctgtgttgctgttggaagttcatgctctattgcagctttttgactataatgtttggaaatatctttcataacgtcatgaaatccatgcagagcagcaccaacatttgttaacacagaactgtagtttgtccgaaggagtccatctggctctgtacttggcaaggcaagaagagctatgtaagtctgcagcttctcaaacacagctgtcatttttttcatgtcctgggacagctctagattcctggctcttaa

SEQ ID NO: 22777 - DNA, 1021 bp, Homo sapiens
  misc_feature (1)...(1021): n = a,t,c or g
gggctcgggtcgttgtggtgcgctgtcttcccgcttgcgtcagggacctgcccgactcagtggccgccatggcatcagatgaaggcaaactttttgttggagggctgagttttgacaccaatgagcagtcgctggagcaggtcttctcaaagtacggacagatctctgaagtggtggttgtgaaagacagggagacccagagatctcggggatttgggtttgtcacctttgagaacattgacgacgctaaggatgccatgatggccatgaatgggaagtctgtagatggacggcagatccgagtagaccaggcaggcaagtcgtcagacaaccgatcccgtgggtaccgtggtggctctgccgggggccggggcttcttccgtgggggccgaggacggggccgtgggttctctagaggaggaggggaccgaggctatggggggaaccggttcgagtccaggagtgggggctacggaggctccagagactactatagcagccggagtcagagtggtggctacagtgaccggagctcgggcgggtcctacagagacagttacgacagttacgctacacacaacgagtaaaaacccttcctgctcaagatcgtccttccaatggctgtgtgtttaaagattgtgggagcttcgctgaacgttaatgtgtagtaaatgcacctccttgtattcccactttcgtagtcatttcggttctgatcttgtcaaacccagcctgaccgcttctgacgccgggatggcctcgttactagacttttctttttaaggaagtgctgtttttttttgagggttttcaaaacattttgaaaagcatttacttttttgaccacgagccatgagttttcaaaaaaatcgggggttgtgtgggtttttggtttttgttttagtttttggttgcgttgcctttttttttttantggggttggcccatgaagtgggtgcccnatcacttctcngagatcaancggnctgtgaatcgncctttgtcggaaactgacaaactg

SEQ ID NO: 22778 - DNA, 625 bp, Homo sapiens
ggaggcaggcagatcacgaggtcaggaattcaagaccagcctggcaaacatggggaaaccttatctctactaaaaatacaaaacaattaggcggttgaggaggcacacacctgtaatcctagctactcaggaggctgaggcaggagaattgcctgaacccgggaggcggagtttgcagagagttgagatggcgccactgcactccagcctgaatgacagagtgagactccatctcagaggaaaaaaaaagtgcctttattagagaaccagtcattatggctcacacctgtaatgacagctacatggtacattaaggttggagaactgcttcaggccaggatttcgagaccagccttggttatgtagcaagacgtcatctccaaaataagtgcctctaagagagatgtgagatccagggatgcagttgtgaatccctattaaagcttaagttcgagacgtgttctattcagaaggcaggccctcattcaggtgggaaattacaggacccctgttcttggctacagaccaggatagggttcacccaacttggtcccactgagaattctgaacttactctgtagccaccacaaactcctcccaagccagagtctggcagaggtcctac

SEQ ID NO: 22779 - DNA, 611 bp, Homo sapiens
  misc_feature (1)...(611): n = a,t,c or g
cgatacgacatgacccaacatgatcttcacagggaacccggtttctgaggttaagaacctggtatgagaaaagctcgccaacccgtcgtccggggctcatcggatctctacgatcccgcgagcgcacgcaattgccntcggcgaacgagacccgaaatatattaagtgctatctagaaatccggtagatagatttcaaggaacgtttagatttcaaaggagaaataagcagccgggcgaggcgttagtaggtctcggtccaccgttttaggatgtcggtagctcctctcgggtagcaggatcgtgcgacggccctcatacctcacaaaacatatcgccgtcacgaggagaaaacgcccgaaaataagaagcaaagacaaattcgaaggaaataaangacaggagatctaggcaagcgtcagacgcctcaaagtttcatctccagcatcgggcccgactgctaatctcgcgtactatctcgaancggatcggcgcgcgatanaggtcgcggtatcncgcggttacattcggacggcgacgttnaatcccaaagggcnacaaaaacgcgttntncgnaanggaagaggttttnagggccncncccccaaaatt

SEQ ID NO: 22780 - DNA, 410 bp, Homo sapiens
caagtgttcacaggaggtggggacgcctctgcgcgaggaacgaggagctacgggcctgggcccggttattgccatgggcagcggctgccgcatcgaatgcatattcttcagcgagttccaccccacgctgggacccaagatcacctatcaggtccctgaagacttcatctcccgagagctgtttgacacagtccaagtgtacatcatcaccaagccagagctgcagaacaagcttatcactgtcacagctatggaaaagaagctgatcggctgtcctgtgtgcatcgaacacaagaagtacagccgcaatgctctcctcttcaacctgggcttcgtgtgtgatgcccaggccaagacctgcgccctcgagcccattgttaaaaagctggctggctatctgaccacactag

SEQ ID NO: 22781 - DNA, 423 bp, Homo sapiens
  misc_feature (1)...(423): n = a,t,c or g
gagcacaatacctgtcatgggtgaggaaatggaaggtggcaagaaatgtgtcagggatctgccatccctgggctatactttaggttgagctagggtgggaggctttagaggcacagattggatggtcagatagactctgataaataactccaatagctcctcgcaagagcatgctttactttaaccctccaagaatggaggttgcccttgctcacccaggaggacctaaattacacaggtttacattgaatccatagtatgtagggaaaacaaccatgtgaacactgtgatcacaaactaggcttaaattgatcttacttgtaatcctggtggtcctgcaggtcctacagctccaggaaatccgggtgctccttgtgggccagtgattccatncagtcaggcagcccaggatcccctgaaaaa

SEQ ID NO: 22782 - DNA, 415 bp, Homo sapiens
ctttttgacacgattacgaatttaatacgactcactatagggaatttggccctcgaggccaagaattcggcacgagcacaatcttggacctggactttggtcttgccctgaggttgtgaggtgctgggaggtctgcggagctctctgtgtcgcttggaaaacttaccactctctaagatggctgttccccgcccctgccctgtgctccgtcctacctactgcctgggtagcaagggccatagcctcctacttcaccacgaaaatggagaccaataggggttcagaccctaaatttccctccctacaattccaaacttagctgagtcttatacccacctgctcaccttttgtttttcccttcctttctgtcttccttctgtcgtctcagagaatgtgtgtttttcctgccttcctt

SEQ ID NO: 22783 - DNA, 361 bp, Homo sapiens
ggagtaataataaaagtattacttataatacctttttaaccttatatatggacacggctttggaatgagctgtttaagcttcctcaatggctgtagaatatacttcatatagatatattgctataatattccagtaaatgtagatggctagccagtagtttgatgaatttaacaaggtgtagaaaaacatcaaatgaccttttcagttaaaaaaatgtctaagccaggcacgttggctcatgcttgtaatctcagcactttgggaggccgaggcaggcggataacctgagctcaggagtttgagaccagcctggccaacgtggtgaaatcctgtctctactaaaaatacaaaaattacccg

SEQ ID NO: 22784 - DNA, 434 bp, Homo sapiens
  misc_feature (1)...(434): n = a,t,c or g
aananccgntatgacatgattacgaatttaatacgactcactatagggaatttggccctcgaggccaagaattcggcacgagaatatcaaggtcgtttttttcattccatgtgcccagttaatcttgctttctttgtttggctgggatagaggggtcaagttattaatttcttcacacctaccctcctttttttccctatcactgaagctttttagtgcattagtggggaggagggtggggagacataaccactgcttccatttaatggggtgcacctgtccaataggcgtagctatccggacagagcacgtttgcagaagggggtctcttcttccaggtagctgaaaggggaagacctgacgtactctggttaggttaggacttgccctcgtggtggaaacttttcttaaaaagttataaccaacttttctat

SEQ ID NO: 22785 - DNA, 369 bp, Homo sapiens
caactgtgaaaaggggcttggtgttaaggaatgaaaagtgcaatgagaactataccactgacttcattttcaacctgtactctgaggaggggaagggcatcttcgacagcaggaagaatgtgcttggtcacatgcagcagggtgggagcccaaccccatttgataggaattttgccactaagatgggcgccaaggctatgaactggatgtctgggaaaatcaaagagagttaccgtaatgggcggatctttgccaatactccagattcgggctgtgttctggggatgcgtaagagggctctggtcttccaaccagtggctgagctgaaggaccagacagattttgagccatcgaaatccccaaggaaca

SEQ ID NO: 22786 - DNA, 690 bp, Homo sapiens
  misc_feature (1)...(690): n = a,t,c or g
gcactgaggaagaatatgaagactcaagtgggaatgttgtgaataagaagacatacgaggatctgaaaagacaaggactgctctagtgttcagggatgtagctcagcttttgggctagcccaggcttccctaagatctgctttttctatttctcccaaccaaatcctcttaaagaccctttgctatgtagtctcatggtctagcatgcatcttgtagaaacaaggcatgctggcagattgcagggttgagatgtgttttatctgttttatattttaaaagattctgccagaaaataaaaccagaccttgttctaaagcccagggttatggaccaactcagtgcttcaggtcttaacgcctccatacctcttcctcaccaactttactagtagctgagatttaatgggcacctattatgctacatatcatgttaggtaaatctgacctgacctctttccccaccctcctttgttgctgcttccctgaatgagtattaccccaggatgaggtctgccatcagcttagttagccattgatgcaaatactagggaaagactaggaggatgagccagggttgctactaaggactaagtgtcgcaccaaggtttgccttttgtatttgcatanagaaaggagtnggagctgggngcanngncttgngcctgcagacccagntacttngnnaggctg

SEQ ID NO: 22787 - DNA, 487 bp, Homo sapiens
  misc_feature (1)...(487): n = a,t,c or g
tnnnntnnnnnatctgaatccctaacagctatgacatgattacgaatttaatacgactcactatagggaatttggccctcgaggccaagaattcggcacgagggtactgagtctaagcactggatgaagaagatagtagaaaacagtctggatgctggtgccactaatgttgatctaaagcttaaggactatggaatggatctcattgaagtttcaggcaatggatgtggggtagaagaagaaaacttcgaaggcttaatgatgtcaccatttctacctgccacgtatcggcgaaggttgggactcgactggtgtttgatcacgatgggaaaatcatccagaaaaccccctacccccaccccagagggaccacagtcagcgtgaagcagttattttctacgctacctgtgcgccataaggaatttcaaaggaatattaagaagaaacgtgcctgcttccccttcgccttctgccgtgattgcagctt

SEQ ID NO: 22788 - DNA, 481 bp, Homo sapiens
atctgaaccctttgactgattacgaatttaatacgactcactatagggaatttggccctcgaggccaagaattcggcacgaggagagctagagtacagaacctgctaaggccatcaaacctatcgatcggaagtcagtccatcagatttgctctgggccggtggtactgagtctaagcactgcggtgaaggagttagtagaaaacagtctggatgctggtgccaccaatattgatctaaagcttaaggactatggagtggatctcattgaagtttcagacaatggatgtggggtagaagaagaaaactttgaaggcttaacgatgtcaccatttctacctgccacgcatcggcgaaggttgggactcgactggtgtttgatcacgatgggaaaatcatccagaaaaccccctacccccaccccagagggaccacagtcagcgtgaagcagttattttctacactacctgtgcaccataagg

SEQ ID NO: 22789 - DNA, 411 bp, Homo sapiens
gagtgagaaaaccagcaagtcagagggtcgcaggaccgtggaccgtccactggggacagcttagtgcctcctggtttaacttcagctgctctgcgggcccttatgaccggcatggctggctttgtctggggctgtgagcttctgactctcctcagtagagtggcagcacgtggcactgtgcaacccgagggcagctcagggtccctgtagcctgcatttgctgaagtgggagcttctgacacgtggtgaagatgttggcaggcttgagcggcacgtgacccccttccttccccaccacacactctggtgtgcagggcagacgccgtgcaggttcatctcgactcccgtgagtgtcctggtggcagaaggactgtcccaccctcacccaaagctcgttggtacaaaaagcac

SEQ ID NO: 22790 - DNA, 422 bp, Homo sapiens
gctatgacatgattacgaatttaatacgactcactatagggaatttggccctcgaggccaagaattcggcacgagagggtgaacagcggaagtgacactgtccttcactggacttcttccagtgcccaagttttcaaatagccaattcatcctcaaaacagttgtgtgaagtaagttttaacattcctattctataggtacaaggaaacttgaggactggaggggtaataagttttgcaagtgttaggtaaagccccagtctcaaagagtgcaaagccagtgccctcatccttggcaactagggcgccccttctgagcaggccatgctgtctctgctgctgtcgctgctgctataccagccagccaagcccaactcttcacttcctgaggaggcagctccagggttaatatgccaaggccag

SEQ ID NO: 22791 - DNA, 376 bp, Homo sapiens
gactgacttcccccaaagcagacactactccagtatgtcccagtagaacactcatttgcaatgtgttgagctccgttaagcacacacacactcacacaacaggctcacgaggctcaggcctggcgggtcagaaagcccactccctctcccaaggccactggatcccaggagaagcccagactggcgatactacaaaggtctccagggcctggcagaccccagagtcaggcctgctgttaaaaagtgagagtgctgctgttccattcctggggtcccaagcacttccctttaccccaggacccagggcagcctgcagggcagctggcggtggccttggccatttgccccagcctccagctggctcctgagctctgca

SEQ ID NO: 22792 - DNA, 412 bp, Homo sapiens
cccacgcgtccgcccacgcgtccgaaaagttagatgcaaatgtattactgtataaagcaaagctgtatatactaaacattttttagcagagtaatatttatttgcatagtctatttattgtattcgtatcacactgttattaaatactgggatgaaatcagtgacctgaagcaagaaatcttgccttttaatgtatcattaattagggctgctgtgatattgtcagcttgcattaacaattagaagatagagaacccgccatcagggtgtctacctaacttctcagggactacacttggtagttttccaccatttaaagaactggtaaatatgaaacatttgttgagttaccagaattgccattaacagtgttttctttcccatattccatgctttctgcctctgtgtatat

SEQ ID NO: 22793 - DNA, 1250 bp, Homo sapiens
  misc_feature (1)...(1250): n = a,t,c or g
agaagccctcatccgcacgtgtcttctcaatgaaaccggcgatgagcccttccagtacaaaaattaagtggactagacctccagctgttgagcccctcctagttcttcatcccactccaactcttccccctctcccagttgtcccgattgtaactcaaagggtggaatatcaaggtcgtttttttcattccatgtgcccagttaatcttgctttctttgtttggctgggatagaggggtcaagttattaatttcttcacacctaccctcctttttttccctatcactgaagctttttagtgcattagtggggaggagggtggggagacataaccactgcttccatttaatggggtgcacctgtccaataggcgtagctatccggacagagcacgtttgcagaagggggtctcttcttccaggtagctgaaaggggaagacctgacgtactctggttaggttaggacttgccctcgtggtggaaacttttcttaaaaagttataaccaacttttctattaaaagtgggaattaggagagaaggtaggggttgggaatcagagagaatggctttggtctcttgcttgtgggactagcctggcttgggactaaatgccctgctctgaacacgaagcttagtataaactgatggatatccctaccttgaaagaagaaaaggttcttactgcttggtccttgatttatcacacaaagcagaatagtatttttatatttaaatgtaaagacaaaaaactatatgtatggttttgtggattatgtgtgttttgctaaaggaaaaaaccatccaggtcacggggcaccaaatttgagacaaatagtcggattagaaataaagcatctcattttgagtagagagcaagggaagtggttcttagatggtgatctgggattaggccctcaagacccttttgggtttctgccctgcccaccctctggagaaggtgggcactggattagttaacagacgacgcgttactagcagtcacttgatctccgtggctttggtttaaaagacacacttgtccacataggtttagagataagagttggctggtcaacttgagcatgttactgacagagggggtattggggttattttctggtaggaatagcatgtcactaaagcaggccttttgatattaaattttttaaaaagcaaaattatagaagtttagattttaatcaaatttgtagggtttctangtaatttttacagaattgctgtttgcct

SEQ ID NO: 22794 - DNA, 372 bp, Homo sapiens
  misc_feature (1)...(372): n = a,t,c or g
atttgattaatttgaaggtgagaggtatcattttctcagatgctccaactaggcttctcacatccctcaaaggttatcagctaaagacaagagtttctgaggctaatgcaaaaacatggtcaaatgtgaaaccgcccttttagaggcagggtttgtgaaaggctgctggcctccaaaggagagtatgcctaaactctctgggctcccaggacctgtggtgacctcaagctaacctgatgcacagacaacagtatcttttagggactgcagccaatgttccccaatttactttttttttataccttaaaatatcaaatgtttcatttttaggtgatatcccaagtgacacagaaacacagntcctccggatgg

SEQ ID NO: 22795 - DNA, 624 bp, Homo sapiens
  misc_feature (1)...(624): n = a,t,c or g
gaagctaaccatgctaaccaccaaggcaaagcagcacagtgtgaatagaacagagcgggatcaagaatttcacagaagacaggtcagctgaggggcctgcacacacagggtgttgaggaaccacagatgggcgccgagaggcctgccttttgcctggcccaggcttacccccaccttgggcctcacctcctccaggaagccttcccagctacccgaagctcaggtggccttcttgcaggtccccgtagcaccctgagcttgtaccttgggtggcacttgttatgctatcctgtgctagccgtttgtgcctcgtctcgctgttagattgtgagttcccatgggcagagacccactgtcgttccccgtgtgtccccagcccagtccctgtcacatttgttaaatgaaagaacaatgaagcccantgtaacgtcagtccacagaaatagccacagcttccaatggtggccgtagacttggctcggaacttaatggnaccagagtanctctagtcagttacagtaaatccactgtgtgtggaaagcaaaattagcggttgttccaagcatcttttgtatttgncttanacattgctgattcnctgaatactatactggngttccttcc

SEQ ID NO: 22796 - DNA, 753 bp, Homo sapiens
ttgattcgaatttaatacgactcactatagggaatttggccctcgaggccaagaattcggcacgagggagaccaactccaggctggattcggtcttgctgctctcgtccatgaaccttcctggaggagagctgaggagaagatctgcagaagatgagcttgcaatgagaggtttcttacaggaaggggaccttatcagtgctgaggtccaggcagtgttctctgacggagctgtctctttgcacacgaggagcctgaaatatggaaaactaggtcagggggttttggtccaggtttccccctccctggtgaaacggcagaagacccactttcatgatttgccatgtggtgcctcagtgattctcggtaacaacggcttcatctggatttacccaacacctgagcacaaagaagaggaagcagggggcttcattgcaaacctggagcctgtctctcttgctgatcgagaggtgatatcccggcttcggaactgcatcatctcgctggtaactcagaggatgatgctgtatgataccagcatcctgtactgctatgaagcatcccttccacatcagatcaaagacatcttaaagccagaaataatggaggagattgtgatggaaacacgccagaggcttttggaacaggagggataaagaggtgctccagaagcacgggactgtggaccttgcaggagtgaagactgtgatgtgtggtccccatatgtggctcagcaaagactcgagagatcatc

SEQ ID NO: 22797 - DNA, 536 bp, Homo sapiens
gctaaaatcaccagtgctgtttggggacccctgggggagtgcatcatcgctggccatgagagtggagagctcaaccagtatagtgccaagtctggagaggtgttggtgaatgttaaggagcactcccggcagatcaacgacatccagttatccagggacatgaccatgtttgtgaccgcgtccaaggacaacacagccaagctttttgactccacaactcttgaacatcagaagactttccggacagaacgtcctgtcaactcagctgccctctcccccaactatgaccatgtggtcctgggcggtggtcaggaagccatggatgtaaccacaacctccaccaggattggcaagtttgaggccaggttcttccatttggcctttgaagaagagtttggaagagtcaagggtcactttggacctatcaacagtgttgccttccatcctgatggcaagagctacagcagcggcggcgaagatggttacgtccgtatccattacttcgacccacagtacttcgaatttgagtttgaggg

SEQ ID NO: 22798 - DNA, 445 bp, Homo sapiens
  misc_feature (1)...(445): n = a,t,c or g
anncccatngctatnacatgattacgaatttaatacgactcactatagggaatttggccctcgaggccaagaattcggcacgaggaacccacaacatgaaagaaatggtgctacccagctcaagcctgggcctttgaatccggacacaaaaccctctagcttggaaatgaatatgctgcactttacaaccactgcactacctgactcaggaatcggctctggaaggtgaagctagaggaaccagacctcatcagcccaacatcaaagacaccatcggaacagcagcgcccgcagcacccaccccgcaccggcgactccctcttcttctttttcatccttctgtctctttgtttctgagctttcctgtctttccttttttctgagagattcaaagcctccacgactctgtttcccccgtcccttctgaatttaatttgcactaagt

SEQ ID NO: 22799 - DNA, 740 bp, Homo sapiens
  misc_feature (1)...(740): n = a,t,c or g
atttgagcaattttctcgacttgtcgacattcgttattaactgagcaggaatcaggagaggaacccggtcctctccacacagcccagcagagagcctacgactagatttgcatctttacgtcctgcgcggaggctgctacacacatgcagaagtcatgctggtggcctggacagtgaagggagagaagtggatttgggagacatttaggagatggcaccaaaagcgaaggaagctcctgcccctcctaaagctgaagccaaagccgaaggctttaaaggccaagaaggcagtgttgaaaggtgtccacagccacaaaaagaagaagatccgcacgtcacccaccttccggcggccgaagacactgtgactccggaggcagcccaaatatcctcggaagagcgctcccaggagaaacaagcttgaccactatgctatcatcaagtttccgctgaccactgagtctgccatgaagaagatagaagacaacaacacacttgtgttcattgtggatgttaaagccaacaagcaccagattaaacaggctgtgaagaagctgtatgacattgatgtggccaaggtcaacaccctgattcggcctgatggagagaagaaggcatatgttcgactggctcctgattacgatgctttggatgttgccaacaaaattgggatcatctaaactgagtccaactggccnaatctgataaacanananaaaaacctttcacaatatcatgcc

SEQ ID NO: 22800 - DNA, 1095 bp, Homo sapiens
  misc_feature (1)...(1095): n = a,t,c or g
gggagcgagaccgattcaaatcacatccttccttgtctaccaccaaccaacagatgtcacccatcattcagtcaggctccagcaaaccttcaccaatttacatcagttcctattcctcaccagcaagagaacaaaatagacggctacagcatcaacagctgtattatagtcaagatgactccaacagaaagaactttgatgcatacagattgtatttgcagtctcctcatagctatgaagatccttattttgatgaccgagttcactttccagcttctactgattactcaacacagtatggactgaaatcgaccacaaattatgtagacttttattccactaaacgaccttcttatagagcagaacagtacccagggtccccagactcatgggtgtagcatcaagatgcccaacagaggaactctttctttctaaccttgttcagattgaggtgaaaagtccatcttgctgatttgatgattgaaatgtgaaagtgaagtggaaggaatgaatgaagtgtgtttttttttcttttttgaggaattatcagggaagtgaggaaatgtttgggagaggactttctaagctctatttaggtgttagatctaattacttatagattctgtagtctggtgaaggtgtgggtgacgtgatganaggtttgagaaatgggtgaaatgaaatgggggatatgtaggtcaaancaaattaaagatgatttttttaatgtgaataaagttatgttctgatagtttgtacagaaaaaataaaatggatgcccatgttttattgctattactaaatgtcaagattgtatgctattatgtcttgtaaatttcttttgttggtgtaaatatggaaatgccacattggttaagtgccatcatttgtaatgcaatgtgtcacttgaaaagagatttgaagaaactgacaacttcaaaaacaaatgagaagcccaaggaactgtgagcaattaaaagcaaaccgcgacaccctttgtctccaccacacatagtgtactttggaagcacaacgtccaggctggtaccgcagcgccatgcccattcctcgcctcgttcataggacacttcactg

SEQ ID NO: 22801 - DNA, 328 bp, Homo sapiens
gaaatggaatgaagtgatactcttcatcaaacagaagtgactgttatctcaaccattttgttaaatcctaaacagaaaacaaaaaaaatcatgacgaaaagacacttgcttattaattggcttggaaagtagaatataggagaaaggttactgtttattttttttcatgtattcattcattctacaaatatattcgggtgccaataggtacttggtataaggtttttggccccagagacatgggaaaaaaatgcatgccttcccagagaatggctaatactttccttttggcttgttttcttgttagggcatggcttaatccctaaat

SEQ ID NO: 22802 - DNA, 490 bp, Homo sapiens
gactgcttgtgtttttcatcagtgtccaccccaagtgggtcttcctgctattctcttcacttagttgcccctcacttgccatctgagcaattggcaaggatgtgccaggcctaggttaaacttggaaacatgcttgaccattctattccctggtcctttaagatcagtttggctgcaattttggctccttggaccctcaagcatagctggtaaatcaagttagagatgtaactgccttaaaacatgccagcttaggctgggcacggtggctcacgcctgtaatctcaacacttcaggaggctgaggcaggcagatcacttgaggtcaggagttcgagaccggcctgaccaacatggagaaattctgtccctactgaaaatacaaaattagccggatgtggtggtgcatgcctgtaatcccagctacttgggaggctgaggcaagagaattgcttgaacccagggaggcagaggttgcggtgagccgagag

SEQ ID NO: 22803 - DNA, 393 bp, Homo sapiens
gtttttttttcaaaattaacacaaagctaataagctgaatacacaatgcaaagcatcctaaatcttgggcaataacaaaatctaagatcctaagatcatgatatttaaggtaggaaaaaagtaatcagactagactgggcgcggtggctcacgcctgtaatcaatcccagcactttgggaggcagagatgggtggatcacctgacgtcgggagtttgagaccagcctgaccaacatggagaaaccccatctctactaaaactacaaaattagccgggcgtggtgccacatgcctgtaatcctagctactccggaggctaaggcaggagaattgcttgaacccaggaggtgaaggttgtggtgagctgagattgtgccactgcactctagactg

SEQ ID NO: 22804 - DNA, 546 bp, Homo sapiens
  misc_feature (1)...(546): n = a,t,c or g
ggcacagagaaggaggtcgaggtgattgggggagcagacaagtaccactccgtgtgtcggctctgctacttcaagaaggcctcaggccagcctgccgggccggacaacaaagagaactgcccagtgccaggaaagccaggggaagccgtggctgccaggaagctctttgccccacagcagattctgcaatgcagccctgccaactgagggacctgcgagggccgcccgctcccttcctgccactgccgcctactggacgctgccctgcatgctgcccagccactccaggaggaagtcgggaggcgtggaggatgaccacaccttggccttctgggaactctcctttgtgtggctgccccacctgccgcatgctccctcctctcctacccactggtctgcttaaagcttccctctcagctgctgggacgatcgcccaggctggagctggccccgcttggtggcctgggatctggcacactccctctccttggggtgagggacagagccccncgctgttgacatcagcctgcttcttccctctgcggg

SEQ ID NO: 22805 - DNA, 410 bp, Homo sapiens
gaaaggctgggaaaaactaagctgtcccagcccctcccatttcttgggcagggctcttttcctgttgtgtcttcccccagggcctgtcctgtaccgagctctgtctgttccagccttcatccttcctggctgttgcttttcctcttaagggcctcagaactcttgctcttcctgggctgagggggaatgagtgttcttgccatttgccagcctaatgcgcatgctttctgcctctggtaacaggagtgagtgagcccctcagacctgcactctgggtgtctcctgctttcaaaggttcttaatagtgaatgctttaaaattaaagtcatcacgaaatggaagttttcccagggtggaaaataagaggaagtgctgctgtaattgggagcacaaggggcctcccaaaaagg

SEQ ID NO: 22806 - DNA, 514 bp, Homo sapiens
  misc_feature (1)...(514): n = a,t,c or g
ggaggtaagcacagcctctgactctttagacacagttggcttggcctcccttaagaaggtagaaactacattttaaagctattgaagggatttcaagccttggagagcagatgaaaccaagtatgtggatgctcctctgtccacagatcaagatcaagctgaccctacctattcagataaaacaagcaaaaacttgcaggcaaattcccaaggtgcaagggtcacagtagaagaatgtgggtccttcatcctttcctgtaccttgggacatggttcaggcatgattgaggcaccctgggcactgaatccctaccttgggttaggccctgtgcaaatactggaaacacaaaaatgaattgaaaatgactcatacctagccgggtgcaattgcttacgcctgtaatccaagcactttggaaggccaagcaaggtgatcacttgaggttggaatttggnaccaccctancaanatantgaaaacccgtctccanaaaaatcaaaatttncccggggt

SEQ ID NO: 22807 - DNA, 560 bp, Homo sapiens
  misc_feature (1)...(560): n = a,t,c or g
ggnntnntnnanctnntgctttgacnnagngatctttntggaaaaaccaatacgantcactatagggaatntggccctcgaggccaagaattcggcacgagagggattattggagctcctttctcaaagggacagccacgaggaggggtggaagaaggccctacagtattgagaaaggctggtctgcttgagaaacttaaagaacaagagtgtgatgtgaaggattatggggacctgccctttgctgacatccctaatgacagtccctttcaaattgtgaagaatccaaggtctgtgggaaaagcaagcgagcagctggctggcaaggtggcagaagtcaagaagaacggaagaatcagcctggtgctgggcggagaccacagtttggcaattggaagcatctctggccatgccagggtccaccctgatcttggagtcatctgggtggatgctcacactgatatcaacacttcactgacaaccacaagtgggaactttgcttgacaacctggatctttcttctgaaggacttanagggaagattccgatgnngccnggat

SEQ ID NO: 22808 - DNA, 592 bp, Homo sapiens
ataccaatttaatacgactcactatagggaatttggccctcgaggccaagaattcggcacgagaaagaccaagaagctgataattgatgtgatccggaaccagccagggaacacattgacagaaatcttagagacaccagcaactgcgcaacaggaggtagaccatgccacggacatggtgagccgtgcaatgatagattccaggactccagaagaaatgaagcatagccaatctatgattgaagatgcacagctgcctcttgagcagaagaagaggaaaatccagaggaatcttcggacgttggaacagactggacacgtgtcatccgaaaataaataccaagacattctcaatgagattgccaaggatattcgaaatcaaagaatctatcgtaagcttcgaaaagctgaattggcaaaacttcagcagaccctgaatgcacttaacaagaaggcagcattttatgaagagcaaatcaattattatgacacctacataaagacttgtttagacaacttaaaaagaaaaaatactcggagatcaattaaactagatggaaaaggagaacccaaaggggcgaagagagcgaag

SEQ ID NO: 22809 - DNA, 382 bp, Homo sapiens
gctctggcagcaatgaagcagctgctgacccagctctagttttcgggaagtcagatgaccttttccctcccgcggctctctacctctcgccgcccctagggaggacaccatgggcccactgatggttcttttttgcctgctgttcctgtacccagctggccactgccccaacccaggcatttcactgggcgcagtgcggacaggcttccgctttggtcatggggacaaggtccgctatcgctgctcctcgaatcttgtgctcacggggtcttcggagcgggagtgccagggcaacggggtctggagtggaacggagcccatctgccgcaaccctactcttatgacttccctgaggacgtggcccctgccctgggcacttcct

SEQ ID NO: 22810 - DNA, 433 bp, Homo sapiens
ggcctgtataaaatattctatgtttaccttcaacttcttgttctggctatgtggtatcttgatcctagcattagcaatatgggtacgagtaagcaatgactctcaagcaatttttggttctgaagatgtaggctctagctcctacgttgctgtggacatattgattgctgtaggtgccatcatcatgattctgggcttcctgggatgctgcggtgctataaaagaaagtcgctgcatgcttctgttgtttttcataggcttgcttctgatcctgctcctgcaggtggcgacaggtatcctaggagctgttttcaaatctaagtctgatcgcattgtgaatgaaactctctatgaaaacacaaagcttttgagcgccacaggggaaagtgaaaaacaattccaggaaccataattgggttcaagaagagtttaa

SEQ ID NO: 22811 - DNA, 340 bp, Homo sapiens
gggagagctcaagtgcagcaaagagaagtgtcagagcatgagcgccaagtccagaaccatagggattattggagctcctttctcaaagggacagagtgtgatgtgaaggattatggggacctgccctttgctgacatccctaatgacagtccctttcaaattgtgaagaatccaaggtctgtgggaaaagcaagcgagcagctggctggcaaggtggcagaagtcaagaagaacggaagaatcagcctggtgctgggcggagaccacagctacattttgaaaactctaggcattaaatacttttcaatgactgaagtggacagactaggaattggcaagg

SEQ ID NO: 22812 - DNA, 443 bp, Homo sapiens
  misc_feature (1)...(443): n = a,t,c or g
gatctaaatcattaactccagccttatgcagaacacctgcaaataaattaaagaacaaagaaaatgtatatactcctaagtctgctgtaaagaatgaagagtactttatgtttcctgagccaaagactccagttaataagaaccagcataagagagaaatactcactacgccaaatcgttacactacaccctcaaaagctagaaaccagtgcctgaaagaaactccaattaaaataccagtaaattcaacaggaacagacaagttaatgacaggtgtcattagccctgagaggcggtgccgctcagtggaattggatctcaaccaagcacatatggaggagactccaaaaagaaagggagccaaagtgtttgggagccttgaaagggggttggataaggttatcactgtgctnaccaggagcaaaaggaagggttctgccaga

SEQ ID NO: 22813 - DNA, 346 bp, Homo sapiens
tcaccttcacagaatccttttctgtcaattcgagcagagacagacacccgcccatcaggaatgaacatgcaggaaactttcttttcttttttagcagacacaggtgccattaaatcaggggtattgacatccaccagatccactacttcaaaggttttctttgtctcttgagttggctggctcgggcggtcaagaaaagccttcacccagcagtctacacacccatattttcctttgaaggatgttcccagaggcccctgaggaagctcaaagccgaacttgtactcatatttgtttccaggtctcatgatcaccatctcattctcacctgttggctggtcttcca

SEQ ID NO: 22814 - DNA, 774 bp, Homo sapiens
  misc_feature (1)...(774): n = a,t,c or g
cttcaaaggaaaatatgggtgtgtagactactgggtgaaggcttttcttgaccgcccgagccagccaactcatgagacaaagaaaaactttgaagtagtggatctggtggatgtcaatacccctgatttaatggtgagatccattttaaagattctattctcctgggtcatgaggatgataaatcagacgtcttgggcattagattgaagcatctcaaaacacctttttatccccttctatataggcacctgtgtctgctaaaaaagaaaagaaagtttcctgcatgttcattcctgatgggcgggtgtctgtctctgctcgaattgacagaaaaggattctgtgaaggtaaaatcctagtgcttatggcagttaaaacaggaactgggtttaggggcaagggcatgggactggggtagaggaagtgtcattaactatactgagtatcagtaagttttcatctttctcattgctaggtgatgagatttccatccatgctgactttgagaatacatgttcccgaattgtggtccccaaagctgccattgtggcccgccacacttaccttgccaatggccagaccaaggngctgactcanaagttgtcatcagtcagaggcaatcatattatctcagggacatcgcatcatggcgtggcaagaccttcnggttcaaaanatcaagccttctattctnggctggacatcttcaggtgaaaatcctaccgngnatttaacgntctgntccaaaagggntccttgcntccncggaattg

SEQ ID NO: 22815 - DNA, 384 bp, Homo sapiens
ggcttccattctggtggcaacccggggtcgtggtcggggaggaaaaagaggaaaccagtcggggaagaatgtgatggtggagccgcatcggcatgagggtgtcttcatttgtcgaggaaaggaagatgcactggtcaccaagaacctggtccctggggaatcagtttatggagagaagagagtctcgatttcggaaggagatgacaaaattgagtaccgagcctggaaccccttccgctccaagctagcagcagcaatcctgggtggtgtggaccagatccacatcaaaccgggggctaaggttctctacctcggggctgcctcgggcaccacggtctcccatgtctctgacatcgttggtccggatggtctagtctatgcagt

SEQ ID NO: 22816 - DNA, 387 bp, Homo sapiens
gatagaaacccccacattgtttaagaggaccccagggggtgccaaagagtttttagtaccatccagggaacctggaaagttttattctctccctcagagtcctcaacagtttaagcaacttctgatggttggcggtttagacagatattttcaggttgcccgatgttatcgagatgaaggttcaagaccagacagacagcctgagtttactcagattgacatagagatgtcatttgtagaccagactgggatccagagtttaattgagggtttgctccagtattcctggcccaatgacaaagatcctgtggttgttccttttcctactatgacttttgctgaggtgctggccacctatggaactgataaacctgacactcgctttgg

SEQ ID NO: 22817 - DNA, 517 bp, Homo sapiens
  misc_feature (1)...(517): n = a,t,c or g
cttggnngccaacatctatgacatgattacgaatttaatacgactcactatagggaatttggccctcgaggccaagaattcggcacgagggagtgaatctggccagcttctgctatctgggtctctgttattttgttttactattttcactgtaattttcaagattgaatacttgattggtatgtttttaactgaatggacttgagattcattcacctggcagcttattgagtgcccactatgtgttcattataccaacaagtcaaggaatttataattcagctcatgtgatagaactttagtgaaacaagtggagaaggtaacaaattgcataacaattttgcctgaagtgaaaacctacatgctgaaaaatacactccaggaagtgtacagcattgttactgttatttgttttgccttgtgaaagagttatttgtaaaattaatgcattatctttcatgaatgtgccaaataagccttgcatgcattacttcaattatatagctttggtgagacc

SEQ ID NO: 22818 - DNA, 564 bp, Homo sapiens
  misc_feature (1)...(564): n = a,t,c or g
gcgtcagtgtgggtgtcacatggatcgtggtcagcatcctcctgggtgggcctggcagtggctttcctcgcatccagcaactcttcaccagtccagagagctcggtgactgcagcgccacgggccaggaagtacaagtgtggcctgccccagccgtgtcctgaggagcacctggccttccgcgtggtcagcggggccgccaacgtcattgggcccaagatctgcctcgaggacaagatgctgatgagcagcgtcaaggacaacgtgggccgcgggctgaacatcgccctggtgaacggggtcagcggcgagctcatcgaggcccgggcctttgacatgtgggccggagatgtcaacgacctgttgaagtttattcggccactgcacgaaggcaccctggtgttcgtggcatcctacgacgacccagccaccaagatgaatgaagagaccagaaagctcttcagtgagctgggcacaggaacccaaaggagtggccttccggacagctggtgtttgtcggggcaanggtgtcaaaacaaggccctttgagcacactgaanaacag

SEQ ID NO: 22819 - DNA, 430 bp, Homo sapiens
  misc_feature (1)...(430): n = a,t,c or g
gttttttttaagatcgtttaaaaacctctaatctggataggagttagattatttttttgttttggtttttgggacaatcttgctctgttgcctaggctggagtgcagtggtgccatcacagctcactgcggcctctacctctggggctcaagcaatcctcccacctcagctactcaggaggttgaggcaggagaatcgtttgaacctgggaggcggaggttgcagtaagcagagatcatgccaccgcactccagcctgggaaacagagcgggactccatctcaaaacaaaacaaancaaaaaaccgggcacagtggctcactcctgtaatcctagcttactctgggaggccaaggagggtggattgcctaaactcaggagttcaagaccagctttggcaacatggggaaaccctgtttctgctgaaaata

SEQ ID NO: 22820 - DNA, 544 bp, Homo sapiens
gggtctacctgatccgggtggcacggaggaaccaggagcgtgccctgcgcaccgtctggagctccggagatgacaaggagcagctggtgaagaacacatatgtcctgtgaccgccctgtcgccaagaggactggggaagggaggggagactatgtgtgagctttttttaaatagagggattgactcggatttgagtgatcattagggctgaggtctgtttctctgggaggtaggacggctgcttcctggtctggcagggatgggtttgctttggaaatcctctaggaggctcctcctcgcatggcctgcagtctggcagcagccccgagttgtttcctcgctgatcgatttctttcctccaggtagagttttctttgcttatgttgaattccattgcctcttttctcatcacagaagtgatgttggaatcgtttcttttgtttgtctgatttatggtttttttaagtataaacaaaagttttttattagcattctgaaagaaggaaagtaaaatgtacaagtttaataaaaaggggccttcccc

SEQ ID NO: 22821 - DNA, 497 bp, Homo sapiens
ggaaggacgtgccgtgccgctgggttctgagccggagtggtcggtgggtgggatggaggcgaccttggagcagcacttggaagacacaatgaagaatccctccattgttggagtcctgtgcacagattcacaaggacttaatctgggttgccgcgggaccctgtcagatgagcatgctggagtgatatctgttctagcccagcaagcagctaagctaacctctgaccccactgatattcctgtggtgtgtctagaatcagataatgggaacattatgatccagaaacacgatggcatcacggtggcagtgcacaaaatggcctcttgatgctcatatctgttcttcagcagcctgtcataggaactggatcctacctatgttaattaccttatagaactactaaagttccagtagttaggccattcatttaatgtgcattaggcacttttctgtttatttaagagtcaattgctttctaatgctctatggaccgact

SEQ ID NO: 22822 - DNA, 846 bp, Homo sapiens
gggagagctcaagtgcagcaaagagaagtgtcagagcatgagcgccaagtccagaaccatagggattattggagctcctttctcaaagggacagccacgaggaggggtggaagaaggccctacagtattgagaaaggctggtctgcttgagaaacttaaagaacaagagtgtgatgtgaaggattatggggacctgccctttgctgacatccctaatgacagtccctttcaaattgtgaagaatccaaggtctgtgggaaaagcaagcgagcagctggctggcaaggtggcagaagtcaagaagaacggaagaatcagcctggtgctgggcggagaccacagtttggcaattggaagcatctctggccatgccagggtccaccctgatcttggagtcatctgggtggatgctcacactgatatcaacactccactgacaaccacaagtggaaacttgcatggacaacctgtatctttcctcctgaaggaactaaaaggaaagattcccgatgtgccaggattctcctgggtgactccctgtatatctgccaaggatattgtgtatattggcttgagagacgtggaccctggggaacactacattttgaaaactctaggcattaaatacttttcaatgactgaagtggacagactaggaattggcaaggtgatggaagaaacactcagctatctactaggaagaaagaaaaggccaattcatctaagttttgatgttgacggactggacccatctttcacaccagctactggcacaccagtcgtgggaggtctgacatacagagaaggtctctacatcacagaagaaatctacaaaacagggctact

SEQ ID NO: 22823 - DNA, 433 bp, Homo sapiens
  misc_feature (1)...(433): n = a,t,c or g
ggtgaagcaaccgtgacaagtggtgcccgaccagggacctgaacgaggaaggtctgccagagcagagaaagtgaaactgatcagacgaactacgaacccctggacgggagagtctgccggcggagaatataaggagatggacaaaccgtgtgggtgccctccaggtgtgtgtgaccatggaacgggagaccggagggatccatggtattcaaccgtgggcctgttacctccagtacgagccatgagccagcggaatctgaatgcaaagacagaacaagggccgaccggagtcacaatgacatccaaccccataacatggggacagatcaagaaaacgacacaagaagctgagaaactactggagcgccagggtcaggcaaaaacccctgactncatgttcttggccatgctagctgtagngnctgtgcnttat

SEQ ID NO: 22824 - DNA, 405 bp, Homo sapiens
gcaagcccgctgtcagggagtagtttgtgccatgaaggaggcatttggctttattgaaagaggtgatgttgtaaaagagatattctttcactatagtgaatttaagggtgacttagaaaccttacagcctggcgatgatgtggaattcacaatcaaggacagaaatggtaaagaagttgcaacagatgtcagactattgcctcaaggaacagtcatttttgaagatatcagcattgaacattttgaaggaactgtaaccaaagttatcccaaaagtacccagtataaaccagaatgacccattgccaggacgcatcaaagttgactttgtgatccctaaagaacttccctttggagacaaagatacgaaatccaaggtgaccctgctggaaggtgaccatgttag

SEQ ID NO: 22825 - DNA, 412 bp, Homo sapiens
cagggtcatcctgagggtgcgactccgccgcgatggtgacccggttcctgggcccacgctaccgggagctggtcaagaactgggtcccgacggcctacacatggggcgctgtgggcgccgtggggctggtgtgggccaccgattggcggctgatcctggactgggtaccttacatcaatggcaagtttaagaaggataattaattacacaaacccttcacagactgctctggtgcctggtggtgctagctcctcccacctcagcacctgctgcatctggagcagcccaagcctcaggatggacaagaggaaacccacagctcagcttcaggcttcttatgtttctgaaaacagcttggatattttaatgcacgttgcattaaacctcactgaaacctgaaaaaaaaaaaaaa

SEQ ID NO: 22826 - DNA, 508 bp, Homo sapiens
  misc_feature (1)...(508): n = a,t,c or g
gcagtcctcatttctgtggaatctgaagaagcccacgcagattttaattcccactctanattctggcttcatcgttatgaagcatatgatgatcccgtggatagtatctagatcaccatggcgactggacagaagttgatgagagctgttagagtttttgaatttggtggaccagaagtcctgaaattgcgatcagatattgcagtaccgattccaaaagaccatcaggttctaatcaaggtccatgcatgtggtgtcaaccccgtggagacatacattcgctctggtacttatagtagaaaaccactcttaccctatactcctggctcagatgtggctggggtgatagaagctgttggagataatgcatctgctttcaagaaaggtgacagagttttcactaagcgccacgatctctgggggttatgcagaattatgctccttgcagcagaccacactgtttacaaactacctgaaaaactggactttaaacaaggagctgccatcg

SEQ ID NO: 22827 - DNA, 461 bp, Homo sapiens
aacagctatgacatgattacgaatttaatacgactcactatagggaatttggccctcgaggccaagaattcggcacgagaaagtggcgagttccggatccctgcctagcgcggcccaacctttactccagagatcatggctgccgaggatgtggtggcgactggcgccgacccaagcgatctggagagcggcgggctgctgcatgagattttcacgtcgccgctcaacctgctgctgcttggcctctgcatcttcctgctctacaagatcgtgcgcggggaccagccggcggccagcggcgacagcgacgacgacgagccgccccctctgccccgcctcaagcggcgcgacttcacccccgccgagctgcggcgcttcgacggcgtccaggacccgcgcatactcatggccatcaacggcaaggtgttcgatgtgaccaaaggccgcaaattctacggccc

SEQ ID NO: 22828 - DNA, 690 bp, Homo sapiens
cccacgcgtccgggaaaagaaaatttgtactgtctctgagaatttcttgaggatgtgcgaatctactgagctgaacatgaccttccacttgtttattgtggcacttgctggagctggggcagcagtcattgctatggttcactaccttatggttctgtctgccaactgggcctatgtgaaagacgcctgccggatgcagaagtatgaagacatcaagtcgaaggaagagcaagagcttcatgacatccactctactcgctccaaagagcggctcaatgcatacacataaatgcatcttcctgttctttctaccatttgaatgcattggtgtttaactaagggccatccaaccatccaacctttaaaaaacaaaacgaaagtgcttctcatcaatgatatgtaaggtgacttatgaatcacctgagtacaattctttgttgtttagcacttaaatttcccaatttattaaattgatgtaaatcagatcttttctacaagctcctatccagccttttttttgaaatttctcaaactcatttactagttctgtaaaatcaaagatactaacattgtcaaatgcaaagatttgtttgatttttaaccacttcccatgtgttatacataacaccttttgcattatttcttatgttttgaaaagaaaatagctttttatactttttagttttgatt

SEQ ID NO: 22829 - DNA, 453 bp, Homo sapiens
  misc_feature (1)...(453): n = a,t,c or g
gtgnnntttganaacagntatgacatgattacgaatttaatacgactcactatagggaatttggccctcgaggccaagaattcggcacgagccactccaaccgcatctatcgcatgatcaagctaggtctaggtaagtagctttggtacttggtgtggcaaggagtttgtgcaactcgtctcctctatggatttgacttaatgctatttggtcaagtctcacatggcttaattttacttcaggtattgatgaagatgaagtggcagcagaggaacccaatgctgcagttcctgatgagatcccccctctcgagggcgatgaggatgcgtctcgcatggaagaagtcgattaggttaggagttcatagttggaaaacttgtgcccttgtatagtgtccccatgggctcccactgcagcctcgagtgcccctgtcccacctgctccccctgctgg

SEQ ID NO: 22830 - DNA, 380 bp, Homo sapiens
  misc_feature (1)...(380): n = a,t,c or g
caaaattgtaaatcactacatgaagcttatatattggtttggcctgaaaggtgaagtggggtaggcagggggcgggcttacaggttatggtggattcaaagactccctgatttgtgattggttaaggaagcaaagctttgtctaaaaacttggggtccgcagaaaggaacattaaggtctggccaggcccctcaggaagaaactgagaaccaaagaatggaggtcagagtttaatccctggngttcccccttatctgacgtctgtgtgaatccatttggtgggggtctgggtttctgaaaagtagctcaggggcacgtgttaaggatgtctctaggtgactctaacttccctggctattgtttgaaactgttatgacctt

SEQ ID NO: 22831 - DNA, 498 bp, Homo sapiens
gcagctgaaactggagcgtgccacaccagctgagcgccagcttgtcttcaatgaaatcctccaggctgcctaccaactcatggtggatgtgtttggtaattacgtcattcagaagttctttgaatttggcagtcttgaacagaagctggctttggcagaacggattcgaggccacgtcctgtcattggcactacagatgtatggctgccgtgttatccagaaagctcttgagtttattccttcagaccagcaggtaattaatgagatggttcgggaactagatggccatgtcttgaagtgtgtgaaagatcagaatggcaatcacgtggttcagaaatgcattgaatgtgtacagccccagtctttgcaatttatcatcgatgcgtttaagggacaggtatttgccttatccacacatccttatggctgccgagtgattcagagaatcctggagcactgtctccctgaccagacactccctattttagaggagcttcg

SEQ ID NO: 22832 - DNA, 524 bp, Homo sapiens
  misc_feature (1)...(524): n = a,t,c or g
gctcagcagttaaggactttccagaagtccccagggagttagttggcccatgagccaccgtgcctggccttctccttaataaactcccctttatatatacatctatcctattagtcctgtccctctagagaaccctgactaatagtatgtgactcgaaaggtctctagtgaaggtgcagtgagacaacttaggtagtatctgttggtgtggcacgttggcatcactccggagcctggtgacctaagtttgggtgactgactttgctgcctactagctgtgtgccctggaacaagtgacttcacctctttgtgcttgtgtaaatatggagagatgataagtcacctactaatagattgtttggaagattgaatggcttaatccacatcaagtgtctgaaacagtgcacatctacatagctgggaaatgttagccattgtaggccaagggccagtcacatactaggnggtcaataaatacaccacccttctggtattanatgngctggaacaattncattacccta
